United States Patent Application Publication US 2009/0215178 A1 - sequence listing, part 2

SEQ ID NO: 841 - DNA, 3124 bp, Homo sapiens
taagatccacatcagctcaactgcacttgcctcgcagaggcagcccgctcacttcccgcggaggcgctccccggcgccgcgctccgcggcagccgcctgcccccggcgctgcccccgcccgccgcgccgccgccgccgccgcgcacgccgcgccccgcagctctgggcttcctcttcgcccgggtggcgttgggcccgcgcgggcgctcgggtgactgcagctgctcagctcccctcccccgccccgcgccgcgcggccgcccgtcgcttcgcacagggctggatggttgtattgggcagggtggctccaggatgttaggaactgtgaagatggaagggcatgaaaccagcgactggaacagctactacgcagacacgcaggaggcctactcctccgtcccggtcagcaacatgaactcaggcctgggctccatgaactccatgaacacctacatgaccatgaacaccatgactacgagcggcaacatgaccccggcgtccttcaacatgtcctatgccaacccgggcctaggggccggcctgagtcccggcgcagtagccggcatgccggggggctcggcgggcgccatgaacagcatgactgcggccggcgtgacggccatgggtacggcgctgagcccgagcggcatgggcgccatgggtgcgcagcaggcggcctccatgaatggcctgggcccctacgcggccgccatgaacccgtgcatgagccccatggcgtacgcgccgtccaacctgggccgcagccgcgcgggcggcggcggcgacgccaagacgttcaagcgcagctacccgcacgccaagccgccctactcgtacatctcgctcatcaccatggccatccagcaggcgcccagcaagatgctcacgctgagcgagatctaccagtggatcatggacctcttcccctattaccggcagaaccagcagcgctggcagaactccatccgccactcgctgtccttcaatgactgcttcgtcaaggtggcacgctccccggacaagccgggcaagggctcctactggacgctgcacccggactccggcaacatgttcgagaacggctgctacttgcgccgccagaagcgcttcaagtgcgagaagcagccgggggccggcggcgggggcgggagcggaagcgggggcagcggcgccaagggcggccctgagagccgcaaggacccctctggcgcctctaaccccagcgccgactcgcccctccatcggggtgtgcacgggaagaccggccagctagagggcgcgccggcccccgggcccgccgccagcccccagactctggaccacagtggggcgacggcgacagggggcgcctcggagttgaagactccagcctcctcaactgcgccccccataagctccgggcccggggcgctggcctctgtgcccgcctctcacccggcacacggcttggcaccccacgagtcccagctgcacctgaaaggggacccccactactccttcaaccacccgttctccatcaacaacctcatgtcctcctcggagcagcagcataagctggacttcaaggcatacgaacaggcactgcaatactcgccttacggctctacgttgcccgccagcctgcctctaggcagcgcctcggtgaccaccaggagccccatcgagccctcagccctggagccggcgtactaccaaggtgtgtattccagacccgtcctaaacacttcctagctcccgggactggggggtttgtctggcatagccatgctggtagcaagagagaaaaaatcaacagcaaacaaaaccacacaaaccaaaccgtcaacagcataataaaatcccaacaactatttttatttcatttttcatgcacaacctttcccccagtgcaaaagactgttactttattattgtattcaaaattcattgtgtatattactacaaagacaaccccaaaccaatttttttcctgcgaagtttaatgatccacaagtgtatatatgaaattctcctccttccttgcccccctctctttcttccctctttcccctccagacattctagtttgtggagggttatttaaaaaaacaaaaaaggaagatggtcaagtttgtaaaatatttgtttgtgctttttccccctccttacctgaccccctacgagtttacaggtctgtggcaatactcttaaccataagaattgaaatggtgaagaaacaagtatacactagaggctcttaaaagtattgaaagacaatactgctgttatatagcaagacataaacagattataaacatcagagccatttgcttctcagtttacatttctgatacatgcagatagcagatgtctttaaatgaaatacatgtatattgtgtatggacttaattatgcacatgctcagatgtgtagacatcctccgtatatttacataacatatagaggtaatagataggtgatatacatgatacattctcaagagttgcttgaccgaaagttacaaggaccccaacccctttgtcctctctacccacagatggccctgggaatcaattcctcaggaattgccctcaagaactctgcttcttgctttgcagagtgccatggtcatgtcattctgaggtcacataacacataaaattagtttctatgagtgtataccatttaaagaatttttttttcagtaaaagggaatattacaatgttggaggagagataagttatagggagctggatttcaaaacgtggtccaagattcaaaaatcctattgatagtggccattttaatcattgccatcgtgtgcttgtttcatccagtgttatgcactttccacagttggacatggtgttagtatagccagacgggtttcattattatttctctttgctttctcaatgttaatttattgcatggtttattctttttctttacagctgaaattgctttaaatgatggttaaaattacaaattaaattgttaatttttatcaatgtgattgtaattaaaaatattttgatttaaataacaaaaataataccagattttaagccgtggaaaatgttcttgatcatttgcagttaaggactttaaataaatcaaatgttaacaaaaaaaaaaaaaaaa

SEQ ID NO: 842 - DNA, 5246 bp, Homo sapiens
agttccgggtgcgcggccccggatgttggctgctcttgctgccgccgccgctctcggggctgctcggggcctcgaccgctcgcagtaggcaccgttgggacctttcccgggggggcggagacgcacggagcggccgggggctcggccgggccgtcccggcctgcgcagcctgagattctctttgtggccagatgggtttgtatggacaggcttgtccatctgtaacttcattaaggatgacatctgaactggagagcagcctaacgtctatggactggttaccacagctcaccatgagagcagccatccaaaaatctgatgctacacaaaatgcacatggaacaggaatttctaagaagaatgcactccttgacccaaatacaactctggaccaggaagaagtccaacagcacaaagatgggaaacctccatacagttatgccagcctcattacatttgcaattaatagctcacccaaaaagaaaatgactttaagtgaaatttatcagtggatttgtgataacttcccatattatagagaggctggcagtggttggaagaattccatacgacataatctgtcattgaacaaatgtttccttaaagtgcctcgatctaaggatgaccctggaaaggggtcctactgggcaatagacaccaatccgaaggaagatgtgctgcctactcggccaaagaagagggcacgatctgtagaacgggcctcaactccatatagcatagattcagattctttgggaatggagtgtattatttcgggaagtgcctctccaactctggcaatcaacactgtgactaacaaagtaacattgtataacactgatcaggatggtagtgatagcccacgcagtagccttaacaacagtctctcagaccagagtttggcatctgttaatttgaacagtgttggaagtgtgcatagttatacaccggtgacaagccatccagaatcagtctctcaatcattaactcctcagcagcaaccacagtacaaccttccagaaagagacaagcaactacttttctcagaatataattttgaagatcttagtgcctcatttcggagcctttataagtcagtttttgagcagtcacttagtcaacaaggtttgatgaacatcccttctgaatcttcccagcagtcccacacttcatgtacctatcagcactctcccagcagtacagtgagcactcacccacacagcaaccaaagcagcctgtccaacagtcatggcagtggcctcaacaccacaggcagtaattcggttgcacaggtctcactgtctcacccccagatgcacacacagccatctccacatcctccccatcgaccgcatggtttaccgcagcatccgcagcgttccccacacccagcaccacacccacagcaacacagccagctccagtcccctcacccccagcatccctctccacatcaacacatacagcaccatccgaaccatcagcatcagacgttaacacatcaggcacccccacccccacaacaggtatcctgtaattctggtgtttcaaatgattggtatgcgacacttgatatgctaaaagaaagctgtcgaattgccagcagtgttaattggtcagatgtagacctttcacagtttcaaggtctgatggagagtatgagacaggcagatctcaagaactggtctttagaccaggttcagtttgccgatctttgttcttctcttaatcagttctttacacaaactggccttatacattcacagagtaatgttcaacaaaatgtttgtcatggtgccatgcatccaacaaaaccttcccaacacattggaacaggaaatttgtacatagattctaggcaaaatctccctccttcagtgatgccaccccctggttatcctcatatcccacaggcactcagcactccaggaacaacgatggcaggccatcacagagccatgaaccagcagcacatgatgccttcccaagccttccagatgcggcgttccctgcctccagatgacatccaggatgactttgattgggattcaattgtgtagggcttgtttctgcaagacaccagaccctaacgttacctttctgtgcagtgaagggaaaggtttaagagaatccagttgagaaaacaaacttgctaatcactttaccaatgttatcaaaattacttttgaagacaatcagaaggattttagctggataacttactgcttttatctgacccaagcaagtactacatgtttgtctccctgccagctgccctatgtagctcctaactgttgtgtgatttggacggctttttgcatatttgtgtcagtttgatgttaaccacaagtgccagactgatttttcagacggagcctattttgctgcaagcagtttatataaagatacatatgtgtaaatatatgtacaaaaattactgaaaggcttcagttttttctaattggattattatgtcttgaaagttattgtcagtttttattccttgttaggctattttctgcaggatgcttttaactgatgtaggaaactgaaaggaaatagattttttccaaaacccagttccccttatttaatcttttttagaaatgtgggtaatgaattctatctaataagtcaaggaaaccagaatttgacacactccaacaatccaaaggggcatgttgctcctgagcagcatgaagaactgaccaaattggttttgatgcttgggggatcatagagtatttatgtctgcttttctaaatctgcattataatagctctaaaatttgttgattggtaagaaattgggcattgcttggctctttaaacacatcagtgcttccacattcacctatgtatttattattcaaaagtgtcattttaatatttattgctaccttctgtgaatgcttagctcctgtcgggttcattaaggagaaatgtgtctgaaagcacagaactattattatttttttctttttttgagatggagtcttgccctgttgcccaggctggagtgcagtggcacgatctcggctcactgcaacctccgcctcccgggttcaagcaattctcctgcctcagcctcccgagtagctgggagtgcaggtgcacaccgccatgcctggctgattttttgtattttagtagagatggggtttcaccatgttgcctgggctggttgcaaactcttgagctcaggcagtctgcctgcctcagcctcctagagtgctgggattacagacatgagccactgcgcctggcccagcgttacttttcttgataagaatttacagataagacactcagagagacattgtgtcattctctatcatcactccttttaccatgtgaatagatttctctgtcttggcattcttgctgattcagacttattagttaaatcggatttttctggaatttgaatcagatttcatttgggcaacaacagcagggcagggtttctaaagcaggtttccccactcatctaggttgtcttgaaaggaggatagagccacttacagttttatttgcttcagtgtttaatgtagatattatgtggcctgctgtttctgttgtcttgtatgtctgtgtatgcatgacatttggtccctttctttgaaatgcagcccctcttacgggttttttagtggtggtggtttgttttgtttcatatcatatcacagtttgcatggactgattatcttagttttatgataaaactagaagaaatgagggtttttttttaatgaatagattttgaattgattctttagaccccccaaaaagtgtcagttctaatggggaaatatattccatcaagtcaaagagtaataactgctcactagttgctttttagcatctctggtcttatcagccatgctaaatcactttaattagccttagtgattctatggttgagtaatctctacttgaactaaacaaacatcttttgtttctgtgtgtgtgtgctgtgtgtgagagtgtgcgcgcgcgtgtgtgtgtgtgtgttttaatggagtgttgccttgaatgaatcactgggaagccagccatggtaagggctggtgaggttggggagaaaggaagagctttatgtttctctgttgtttggaccctacttggcatgaaaaaggaagctcagttccagccccttggatcaacgaaaatcagaggattctggaaaggcagccaacttgcgcctcttagaaggatcagaggcaagatgagatggcagcctgcagagtaaatgcttgaaaaaagaggggtgattttcaatggtttgcttaagtcactgttttctagacaccaaaatagctgttttgaaactgttttaattgcttgggtagcaatgtgcactttaaacaatttggatattggaatgcagtctcatactgagtgatttgagtagaaccactgatgatgattttataaattgtgtgaagcgaatttcccatttggcaatcatttactgatttgcagtgatgaatatttttatgagaatttaaacttagcaagaatggccatggaggcaaagccttcacccagacccatcccactctcctgtgatccaggtggtccaggagcccaggacaggccttttctgtgggccctggccagacagggttacctggtgaggtgcagagagtccctctagtggccattttgtatggtagttgctaatgcagaacaagttctgtcttgggcttaaattgactgaagactttagggggaaagaatagtaaatgcatgtaaacaaatggggacactctgttcaggagaataatccgactggcatttgtggcagtttttgaaatgtaaatgtattcatgtgtgttcttgtaaatacgtgtcgctcagatgtcctttgaagtgggagggaatcaatccggggataatttcaaatggaatagagtattttgatattgttcattcagagggtgatgtgtacatatctatattgtatatatgtgatgaaaatgcattggctttttgtgcagatacaacctgctctctgtactgctgttggacagtcagtgttttaatgtttctacagttttgctattgcacgatttcatattttgcctctatgatgaacggcaaccattatttgtaactgtttagtgctgtaaagaaatattccaagtgtcattaggattgttgctgccagaactgatatgcatgaatggcacttaaaataaatatattatgttaactctatttacaacaaaaaaaaaaaaaaaa

SEQ ID NO: 843 - DNA, 2744 bp, Homo sapiens
tgggcggactccccatggccagaggctgagctccactcccgccggccgctccctaggggaaggggaaggagaggggagagcagcgacaggcctccagcaagcaagcgcgggcggcatccgcagtctccagaagtttgagacttggccgtaagcggactcgtgcgccccaactctttgccgcgccagcgcctggagcggagagcagaggcggcccggccgcggcgcgccggctttgtcatgatggccagctaccccgagcccgaggacgcggcgggggccctgctggccccagagaccggtcgcacagtcaaggagccagaagggccgccgccgagcccaggcaagggcggtgggggtggcggcgggacagccccggagaagccggacccggcgcagaagcccccgtactcgtacgtggcgctcatcgccatggcgatccgcgagagcgcggagaagaggctcacgctgtccggcatctaccagtacatcatcgcgaagttcccgttctacgagaagaataagaagggctggcaaaatagcatccgccacaacctcagcctcaacgagtgcttcatcaaggtgccgcgcgagggcggcggcgagcgcaagggcaactactggacgctggacccggcctgcgaagacatgttcgagaagggcaactaccggcgccgccgccgcatgaagaggcccttccggccgccgcccgcgcacttccagcccggcaaggggctcttcggggccggaggcgccgcaggcgggtgcggcgtggcgggcgccggggccgacggctacggctacctggcgccccccaagtacctgcagtctggcttcctcaacaactcgtggccgctaccgcagcctccctcacccatgccctatgcctcctgccagatggcggcagccgcagcggctgcagcagctgcggctgcagccgcgggccccggtagccctggcgcggccgctgtggtcaaggggctggcgggcccggccgcctcgtacgggccgtacacacgcgtgcagagcatggcgctgccccccggcgtagtgaactcgtacaatggcctgggaggcccgccggccgcacccccgcctccgccgcacccccacccgcatccgcacgcacaccatctgcacgcggccgccgcaccgccgcctgccccaccgcaccacggggccgccgcgccgccgccgggccagctcagccctgccagcccagccaccgccgcgcccccggcgcccgcgcccaccagtgcgccgggcctgcagttcgcttgtgcccggcagcccgagctcgccatgatgcattgctcttactgggaccacgacagcaagaccggcgcgctgcattcgcgcctcgatctctgagagcccaccgcatgccggtgcagacggatgcgaggatgcagggacgcgcgacgccggccccggtcgcagccgacgacgccgccgccagcctgacctcacaccctctgggcccgcctctggagccagcgcccagggtccctctgtgctttttcgctttcctaagctcctgtcgctcctctttgtcccctcagtttatgtcctcctgtgctcacctccctgacctctgtgaccttgcactcccctggcctgaagctgcctctctgcgcgctttctactgggctcgtctctttccggagccccagcgtctcctgcccaaattcaccgcggaaagggcccggggcggaggtgcgaccgggcgtcggcagcgcagacctcttggccttctctcacaggtcggtgcgctcgctctccgcgttccccgcccgactgccgtgcagtccatggctagacgcgccggacaggactgatggcgggaccgcgctgcccgagaaagggacggaccaatacgtgtgtttgctccgcgaaccctcttgaagctgttcagaagccgcttgccgcggggcccactaggcggggcgggggttgggacccagcgggagccggggcagcctggctccacggcctgtactcggtttacaccgcgggcgggcgcggagggaggctgcgtttcctccgctatcagtcccgtcgcttcgggcacctccgggccccggcggctggctaatgttttgtttgaaagatcggtggaactttttaagagagtatttaaaaaaaaaaaaaggaaaaaaaattcaccgggcaaccggggaagtattgtggccttggagtttgctaaatccaaatatgaaaatcaaaagctttagtattcctcatcttctcttctggaagatttgcgttagagtttttgttgggccttcaaaaagctgtgttcagagttaggagaatatatccaataaaagatggtttcgtctaccaattggggaagtttcaccctctccctatctgaagaaaaaaatcaaaaacaaatgtccccggatctttcgatgcaagtcctggaggcagggagatcactgcctgcctggcccacgctgctgggacggctcgtcctccctgctttttgtttttcaaacctcctgcttctcccaccttgggaaggagaaatgtgaaacccggcagcggccgacctaggcggtcttgtggcccggagccggcccggcccgaaaaccatagacctggttgtactgtagcttgttgtttgggggaccaaattttctagagagaactagagcacttttgttgtgtttttttgttttgtttttgttttttgccttgtcgattcccgaataaattttgtgttccttcttttaaaaaaaaaa

SEQ ID NO: 844 - DNA, 2517 bp, Homo sapiens
aaaacactcattttgttttatagcatgacaggctgtctgattccatctttataaccaaagccaattaagatcttaaaaccaaacatataacttcatctttttacaagtacttagagcctgagttgctccacaggaatccaggaactgggcacaggaaaaggatctaagctggtggtgtgggaagatggaaaccaacttctccattcctctgaatgaaactgaggaggtgctccctgagcctgctggccacaccgttctgtggatcttctcattgctagtccacggagtcacctttgtcttcggggtcctgggcaatgggcttgtgatctgggtggctggattccggatgacacgcacagtcaacaccatctgttacctgaacctggccctagctgacttctctttcagtgccatcctaccattccgaatggtctcagtcgccatgagagaaaaatggccttttggctcattcctatgtaagttagttcatgttatgatagacatcaacctgtttgtcagtgtctacctgatcaccatcattgctctggaccgctgtatttgtgtcctgcatccagcctgggcccagaaccatcgcaccatgagtctggccaagagggtgatgacgggactctggattttcaccatagtccttaccttaccaaatttcatcttctggactacaataagtactacgaatggggacacatactgtattttcaactttgcattctggggtgacactgctgtagagaggttgaacgtgttcattaccatggccaaggtctttctgatcctccacttcattattggcttcagcgtgcctatgtccatcatcacagtctgctatgggatcatcgctgccaaaattcacagaaaccacatgattaaatccagccgtcccttacgtgtcttcgctgctgtggtggcttctttcttcatctgttggttcccttatgaactaattggcattctaatggcagtctggctcaaagagatgttgttaaatggcaaatacaaaatcattcttgtcctgattaacccaacaagctccttggccttttttaacagctgcctcaacccaattctctacgtctttatgggtcgtaacttccaagaaagactgattcgctctttgcccactagtttggagagggccctgactgaggtccctgactcagcccagaccagcaacacagacaccacttctgcttcacctcctgaggagacggagttacaagcaatgtgaggtcggggatatttttgggctctgtctctttctaccctgcgttaagcggaaaaaaaaaattctgacagtgtttttcttcctctttcataccaccaccaccacaatcatcaacataaaggaagtctgtaccaaatctgtagggggtttttcccacaaccaagcaatagacaccagctgggtgtcctacaattaaattccaacactatctacctggagctactgtcagatcccacaggtttaagggctcattccccaagtctgctcctccagttgagacacaagtcacaaatccaggcttctgagacttcggaccaaccagcttcaatcagggttcccactaccccctctttgggggtagagtggctcatggaactcagagaaacatttatttcggcttgctggtttattataaaagcaaggtttattataaaagatactacaaaggatacagatgaagaggcacatagggcaaggtacggggttccacgccctccctgagtgcatcaccctctgggaacctccgtgtgttcacgtctcatgaagctctccaaatccagtcctcttgggtttttatggaagcttcatgatgtcagcattctttcctccagtgtataggatgggatcctctctggggagggtcttaagacccacaattagaaaggcaagggaagattagagtcctgctttggggtagatgaaaggaaaggagagagattctgtttcctgaggcttaatacacccaacattataacaaaggactgtagcaagggctatgggagttctgaagcagaaaccatgggctaaaaccaacatacatcttaataccagataccctaatcccagtcctaacttcatttaaccttggtcacattgagtcattccaggatgagtggctcaagtatttcctcagggaaaatacttctgtgccccctgatttgagggtaagaagtagataatgaggccactgtgggtgttattttttcatgtctggacctcagcctatatcctgagactaagtggaagtgggaaaagagtacaagagaagagacaaagtggggatatttgtaaggcttagatgagatagtgtttttttagaaaaaaactttatcttaccattaagtaaaatgtttgccataggctttctggggctttctctttttaaagtcagactgttgaaggtttcttctattcttatttgttaagagttttcttttattgtttaaatcatgaatgaatgttgaattttattaaatgcagtttctgtaaatatt

SEQ ID NO: 845 - DNA, 2040 bp, Homo sapiens
ggccttaccaatcgcgaaaacccgccgttcgcgctctgaccagcccgcagagccagcccccgaccccgggccacctgggcccccgggttccgccggcactctcgccaccaccgcgtgggtctgacaagatgtaccaggtcccactaccactggatcgggatgggaccctggtacggctccgcttcaccatggtggccctggtcacggtctgctgtccacttgtcgccttcctcttctgcatcctctggtccctgctcttccacttcaaggagacaacggccacacactgtggggccacgccctgcaggatgttctctgcggcctcccagcctttggaccccgatgggaccttgttccggcttcgcttcacagccatggtctggtgggccatcacttttcctgtgttcggcttcttcttctgcatcatctggtccctggtgttccactttgagtacacggtggccactgactgtggggtgcccaattacctgccctcggtgagctcagccatcggcggggaggtgccccagcgctacgtgtggcgtttctgcatcggcctgcactcggcgcctcgcttcttggtggccttcgcctactggaaccactacctcagctgcacctccccgtgttcctgctatcgcccgctctgccgcctcaacttcggcctcaatgtcgtggagaacctcgcgttgctagtgctcacttatgtctcctcctccgaggacttcaccatccacgaaaatgctttcattgtgttcattgcctcatccctcgggcacatgctcctcacctgcattctctggcggttgaccaagaagcacacagtaagtcaggaggatcgcaagtcctacagctggaaacagcggctcttcatcatcaacttcatctccttcttctcggcgctggctgtctactttcggcacaacatgtattgtgaggctggagtgtacaccatctttgccatcctggagtacactgttgtcttaaccaacatggcgttccacatgacggcctggtgggacttcgggaacaaggagctgctcataacctctcagcctgaggaaaagcgattctgaacccttcagtcctgcttgggaggacgcagcccactgcccagaaacaagaaacacgataccattctggccttccccaccccacatcctctcttggccttactgaagatgggggaagggtaagaaggaagggtgtaggccaaggctcaccccagtgctgctggcttctcctctccacccctcatatgggcgtggggtcctcaaacatcacctttacctgagaggccccaagaagctgagctggcagagagctccaccatttggtgctaaaaaaaaaaacgtcctgaggttcatgaccaccatccagtttctggcctttacacagtcacctttcactgaggtcaggagcccctgagcagtggctgctccctgacaaccacagccatttctctgcacgggggtcattcataggactaatgtatttcatgatctactgtgcacatccaggcctgtggccacagtcccctgctaaagttgctcaggtgttctagtcctgacttcacctttttgatttggtgtgtgccctagggtatgtacccttccccatctgagcctcggtgtgtccatgtgtctggcgggggatgggtggactgtatgatttccaaggactctaccagtcagtggttctgatgtcatcgggtggaggtggtgttctatacctaaaggatgacctgctccagaaacagcaccagcacagcatgtattttcttctcttctgaaagttctggcttgtagacccctcccctcctttgcaaaggtatgggatagaggggtcagatgcagatctctactgtaaaatgggctccctggtatctcctgtcttccctactgctccaaaccctaaattttggttgtacattttattttgaaaggaaaataaattttttttttgggccaacaaaaaaaaaaaaaaaaaaaaaaaaaaaaaaaaaaaaaaaaaaaaaaaaaaaaaaaaaaaaaaaaaaaa

SEQ ID NO: 846 - DNA, 833 bp, Homo sapiens
ggccacccgcctttcactatccgccattcttgtcacctcagctgctgccctcgctaccgcaccgacttcgcccgtgtgctcgcctgcacttgcgctgcccgccatggccaccgcccagccgtcgcaggtgcgccagaagtacgacaccaactgcgacgccgccatcaacagccacatcacgctggagctctacacctcctacctgtacctgtctatggccttctacttcaaccgggacgacgtggccctggagaacttcttccgctacttcctgcgcctgtcggacgacaaaatggagcatgcccagaagctgatgaggctgcagaacctgcgcggtggccacatctgccttcacgatatcaggaagccagagtgccaaggctgggagagcgggctcgtggccatggagtccgccttccacctggagaagaacgtcaaccagagcctgctggatctgtaccagctggccgtggagaagggcgacccccagctgtgccacttcctggagagccactacctgcacgagcaagtcaagaccatcaaagagctgggtggctacgtgagcaacctgcgcaagatttgttccccggaagccggcctggctgagtacctgttcgacaagctcaccctgggcggccgcgtcaaagagacttgagcccagatgggccccacagccacggggtcccttccctgggtcaggccactaggcggggcgtgcatgttgccctttcagaacgttctcttcagttttatctttcagttttaccattgttagcaaaaaagttatctggttctcaaagcaataaaggtgtccataaaaaaaaaaaaaaaaa

SEQ ID NO: 847 - DNA, 889 bp, Homo sapiens
gcagttcggcggtcccgcgggtctgtctcttgcttcaacagtgtttggacggaacagatccggggactctcttccagcctccgaccgccctccgatttcctctccgcttgcaacctccgggaccatcttctcggccatctcctgcttctgggacctgccagcaccgtttttgtggttagctccttcttgccaaccaaccatgagctcccagattcgtcagaattattccaccgacgtggaggcagccgtcaacagcctggtcaatttgtacctgcaggcctcctacacctacctctctctgggcttctatttcgaccgcgatgatgtggctctggaaggcgtgagccacttcttccgcgaattggccgaggagaagcgcgagggctacgagcgtctcctgaagatgcaaaaccagcgtggcggccgcgctctcttccaggacatcaagaagccagctgaagatgagtggggtaaaaccccagacgccatgaaagctgccatggccctggagaaaaagctgaaccaggcccttttggatcttcatgccctgggttctgcccgcacggacccccatctctgtgacttcctggagactcacttcctagatgaggaagtgaagcttatcaagaagatgggtgaccacctgaccaacctccacaggctgggtggcccggaggctgggctgggcgagtatctcttcgaaaggctcactctcaagcacgactaagagccttctgagcccagcgacttctgaagggccccttgcaaagtaatagggcttctgcctaagcctctccctccagccaataggcagctttcttaactatcctaacaagccttggaccaaatggaaataaagctttttgatgcaaaaaaaaaaaaaaaaaaa

SEQ ID NO: 848 - DNA, 4876 bp, Homo sapiens
ccgcagttcttgagttccacatgcagagcagatgcgacagctagaagtgagtagggcccagaccctggcccaggaagatccactaaaggaggccatccttccgccttcttctgcaggagtcaggatggaaaggcagatgtaaagtccctcatggcgaaatataacacggggggcaacccgacagaggatgtctcagtcaatagccgacccttcagagtcacagggccaaactcatcttcaggaatacaagcaagaaagaacttattcaacaaccaaggaaatgccagccctcctgcaggacccagcaatgtacctaagtttgggtccccaaagccacctgtggcagtcaaaccttcttctgaggaaaagcctgacaaggaacccaagcccccgtttctaaagcccactggagcaggccaaagattcggaacaccagccagcttgaccaccagagaccccgaggcgaaagtgggatttctgaaacctgtaggccccaagcccatcaacttgcccaaagaagattccaaacctacatttccctggcctcctggaaacaagccatctcttcacagtgtaaaccaagaccatgacttaaagccactaggcccgaaatctgggcctactcctccaacctcagaaaatgaacagaagcaagcgtttcccaaattgactggggttaaagggaaatttatgtcagcatcacaagatcttgaacccaagcccctcttccccaaacccgcctttggccagaagccgcccctaagtaccgagaactcccatgaagacgaaagccccatgaagaatgtgtcttcatcaaaagggtccccagctcccctgggagtcaggtccaaaagcggccctttaaaaccagcaagggaagactcagaaaataaagaccatgcaggggagatttcaagtttgccctttcctggagtggttttgaaacctgctgcgagcaggggaggcccaggtctctccaaaaatggtgaagaaaaaaaggaagataggaagatagatgctgctaagaacaccttccagagcaaaataaatcaggaagagttggcctcagggactcctcctgccaggttccctaaggccccttctaagctgacagtgggggggccatggggccaaagtcaggaaaaggaaaagggagacaagaattcagccaccccgaaacagaagccattgcctcccttgtttaccttgggtccacctccaccaaaacccaacagaccaccaaatgttgacctgacgaaattccacaaaacctcttctggaaacagtactagcaaaggccagacgtcttactcaacaacttccctgccaccacctccaccatcccatccggccagccaaccaccattgccagcatctcacccatcacaaccaccagtcccaagcctacctcccagaaacattaaacctccgtttgacctaaaaagccctgtcaatgaagacaatcaagatggtgtcacgcactctgatggtgctggaaatctagatgaggaacaagacagtgaaggagaaacatatgaagacatagaagcatccaaagaaagagagaagaaaagggaaaaggaagaaaagaagaggttagagctggagaaaaaggaacagaaagagaaagaaaagaaagaacaagaaataaagaagaaatttaaactaacaggccctattcaagtcatccatcttgcaaaagcttgttgtgatgtcaaaggaggaaagaatgaactgagcttcaagcaaggagagcaaattgaaatcatccgcatcacagacaacccagaaggaaaatggttgggcagaacagcaaggggttcatatggctatattaaaacaactgctgtagagattgactatgattctttgaaactgaaaaaagactctcttggtgccccttcaagacctattgaagatgaccaagaagtatatgatgatgttgcagagcaggatgatattagcagccacagtcagagtggaagtggagggatattccctccaccaccagatgatgacatttatgatgggattgaagaggaagatgctgatgatggctccacactacaggttcaagagaagagtaatacgtggtcctgggggattttgaagatgttaaagggaaaagatgacagaaagaaaagtatacgagagaaacctaaagtctctgactcagacaataatgaaggttcatctttccctgctcctcctaaacaattggacatgggagatgaagtttacgatgatgtggatacctctgatttccctgtttcatcagcagagatgagtcaaggaactaatgttggaaaagctaagacagaagaaaaggaccttaagaagctaaaaaagcaggaaaaagaagaaaaagacttcaggaaaaaatttaaatatgatggtgaaattagagtcctatattcaactaaagttacaacttccataacttctaaaaagtggggaaccagagatctacaggtaaaacctggtgaatctctagaagttatacaaaccacagatgacacaaaagttctctgcagaaatgaagaagggaaatatggttatgtccttcggagttacctagcggacaatgatggagagatctatgatgatattgctgatggctgcatctatgacaatgactagcactcaactttggtcattctgctgtgttcattaggtgccaatgtgaagtctggattttaattggcatgttattgggtatcaagaaaattaatgcacaaaaccacttattatcatttgttatgaaatcccaattatctttacaaagtgtttaaagtttgaacatagaaaataatctctctgcttaattgttaactcagaagactacattagtgagatgtaagaattattaaatattccatttccgctttggctacaattatgaagaagttgaaggtacttcttttagaccaccagtaaataatcctccttcaaaaaataaaaataaaagaaaaaggaaaatcattcaggaagaaatgacctgtctaaaaaaacctaaggaagaataataatataagaaaggaaatttaaaaacattccacaagaagaaaaattattgtttatacttctacttatggttatatcttatattctctattcaagtgacctgtcttttaaaaaggcagtgctgtcttacctcttgctagtgggttaaatgttttcaaaaattatagcagtagtagaagttttgtataaaatttgtccttatttgttaattgtatataaatgttaattatttgatacgaatgttatgcatttagtatgcacattgaagtctaaactgtagaagagtctaaaacaagttctctttttgcagattcacatactaatggtttaattctgtgctctgtttaaagtactattataactagagtagatctgaatgaggataaccctaaaatcatgaggaatggaagaatggaccttgaaactacctaggcttttatgcatggcacctctttataatgaagacactttttaaagtttttgtttttgtttcaattaccgctagatttttttttctctttttttaaaatccattttactggaaagttggccagcagagggagtagaaattattaaaattctagtgtttggattgggcccttctctaacagtacatactcattcccaaagcaatccaaaaacaaaatgtgaaccatttgggtttcaaatgttaagaacactaaatagcatgatttaaaaaatgaaaaatgctaacacccaagaaaagaagatattaagtgctttttaacaactcctagagtacaaaatgagtacatcataatgctggctcttctactaatgaaccatcgagtgatattgaataaattatttatcttctcagtttccttatctgtaaattacaatattagactaagtaagtttttccaactcttcactaccaattaccttaggcttttataatgctccgcctacttcagtcccatgtttcagaagcttttgtctattttttaaactcattgattaaataatgattaatgcattctccacattttaatattgcaaaggcccattggagtttctgaagtggctccacagaattgaaataatttcaaataactgtaaaggaactgaaaatcttcacagagatgaagtggggtttccattaggtgctttgaaatttgataacaaatcatcaacttccactggtcaatatatagattttgggtgtctgaggccccaagattagatgccactaatctccaaagattccctccaattatgaaatattttaatgtctacttttagagagcactagccagtatatgaccatgtgattaatttcttttcacactagataaaattacctggttcaaaagtggtttttgtttattaaatttggtaataaatatatataatacacagacaggatagtttttatgctgaagtttttggccagctttagtttgaggactccttgataagcttgctaaactttcagagtgccctgagacacttccagccatccctcctcctgccttcattggggcagacttgcattgcagtctgacagtaattttttttctgattgagaattatgtaaattcaatacaatgtcagtttttaaaagtcaaagttagatcaagagaatatttcagagttttggtttacacatcaagaaacagacacacatacctaggaaagatttacacaatagataatcatcttaatgtgaaagatatttgaagtattaattttaatatattaaatatgatttctgttatagtcttctgtatggaattttgtcacttaagatgagctgcaaataaataataccttcaatggaaaaaaaaaaaaaaaaaaaaaaaaaaaaaaaaaaaaaaaaaaaaaaaaa

SEQ ID NO: 849 - DNA, 4738 bp, Homo sapiens
ccgcagttcttgagttccacatgcagagcagatgcgacagctagaagtgagtagggcccagaccctggcccaggaagatccactaaaggaggccatccttccgccttcttctgcaggagtcaggatggaaaggcagatgtaaagtccctcatggcgaaatataacacggggggcaacccgacagaggatgtctcagtcaatagccgacccttcagagtcacagggccaaactcatcttcaggaatacaagcaagaaagaacttattcaacaaccaaggaaatgccagccctcctgcaggacccagcaatgtacctaagtttgggtccccaaagccacctgtggcagtcaaaccttcttctgaggaaaagcctgacaaggaacccaagcccccgtttctaaagcccactggagcaggccaaagattcggaacaccagccagcttgaccaccagagaccccgaggcgaaagtgggatttctgaaacctgtaggccccaagcccatcaacttgcccaaagaagattccaaacctacatttccctggcctcctggaaacaagccatctcttcacagtgtaaaccaagaccatgacttaaagccactaggcccgaaatctgggcctactcctccaacctcagaaaatgaacagaagcaagcgtttcccaaattgactggggttaaagggaaatttatgtcagcatcacaagatcttgaacccaagcccctcttccccaaacccgcctttggccagaagccgcccctaagtaccgagaactcccatgaagacgaaagccccatgaagaatgtgtcttcatcaaaagggtccccagctcccctgggagtcaggtccaaaagcggccctttaaaaccagcaagggaagactcagaaaataaagaccatgcaggggagatttcaagtttgccctttcctggagtggttttgaaacctgctgcgagcaggggaggcccaggtctctccaaaaatggtgaagaaaaaaaggaagataggaagatagatgctgctaagaacaccttccagagcaaaataaatcaggaagagttggcctcagggactcctcctgccaggttccctaaggccccttctaagctgacagtgggggggccatggggccaaagtcaggaaaaggaaaagggagacaagaattcagccaccccgaaacagaagccattgcctcccttgtttaccttgggtccacctccaccaaaacccaacagaccaccaaatgttgacctgacgaaattccacaaaacctcttctggaaacagtactagcaaaggccagacgtcttactcaacaacttccctgccaccacctccaccatcccatccggccagccaaccaccattgccagcatctcacccatcacaaccaccagtcccaagcctacctcccagaaacattaaacctccgtttgacctaaaaagccctgtcaatgaagacaatcaagatggtgtcacgcactctgatggtgctggaaatctagatgaggaacaagacagtgaaggagaaacatatgaagacatagaagcatccaaagaaagagagaagaaaagggaaaaggaagaaaagaagaggttagagctggagaaaaaggaacagaaagagaaagaaaagaaagaacaagaaataaagaagaaatttaaactaacaggccctattcaagtcatccatcttgcaaaagcttgttgtgatgtcaaaggaggaaagaatgaactgagcttcaagcaaggagagcaaattgaaatcatccgcatcacagacaacccagaaggaaaatggttgggcagaacagcaaggggttcatatggctatattaaaacaactgctgtagagattgactatgattctttgaaactgaaaaaagactctcttggtgccccttcaagacctattgaagatgaccaagaagtatatgatgatgttgcagagcaggatgatattagcagccacagtcagagtggaagtggagggatattccctccaccaccagatgatgacatttatgatgggattgaagaggaagatgctgatgatggtttccctgctcctcctaaacaattggacatgggagatgaagtttacgatgatgtggatacctctgatttccctgtttcatcagcagagatgagtcaaggaactaatgttggaaaagctaagacagaagaaaaggaccttaagaagctaaaaaagcaggaaaaagaagaaaaagacttcaggaaaaaatttaaatatgatggtgaaattagagtcctatattcaactaaagttacaacttccataacttctaaaaagtggggaaccagagatctacaggtaaaacctggtgaatctctagaagttatacaaaccacagatgacacaaaagttctctgcagaaatgaagaagggaaatatggttatgtccttcggagttacctagcggacaatgatggagagatctatgatgatattgctgatggctgcatctatgacaatgactagcactcaactttggtcattctgctgtgttcattaggtgccaatgtgaagtctggattttaattggcatgttattgggtatcaagaaaattaatgcacaaaaccacttattatcatttgttatgaaatcccaattatctttacaaagtgtttaaagtttgaacatagaaaataatctctctgcttaattgttaactcagaagactacattagtgagatgtaagaattattaaatattccatttccgctttggctacaattatgaagaagttgaaggtacttcttttagaccaccagtaaataatcctccttcaaaaaataaaaataaaagaaaaaggaaaatcattcaggaagaaatgacctgtctaaaaaaacctaaggaagaataataatataagaaaggaaatttaaaaacattccacaagaagaaaaattattgtttatacttctacttatggttatatcttatattctctattcaagtgacctgtcttttaaaaaggcagtgctgtcttacctcttgctagtgggttaaatgttttcaaaaattatagcagtagtagaagttttgtataaaatttgtccttatttgttaattgtatataaatgttaattatttgatacgaatgttatgcatttagtatgcacattgaagtctaaactgtagaagagtctaaaacaagttctctttttgcagattcacatactaatggtttaattctgtgctctgtttaaagtactattataactagagtagatctgaatgaggataaccctaaaatcatgaggaatggaagaatggaccttgaaactacctaggcttttatgcatggcacctctttataatgaagacactttttaaagtttttgtttttgtttcaattaccgctagatttttttttctctttttttaaaatccattttactggaaagttggccagcagagggagtagaaattattaaaattctagtgtttggattgggcccttctctaacagtacatactcattcccaaagcaatccaaaaacaaaatgtgaaccatttgggtttcaaatgttaagaacactaaatagcatgatttaaaaaatgaaaaatgctaacacccaagaaaagaagatattaagtgctttttaacaactcctagagtacaaaatgagtacatcataatgctggctcttctactaatgaaccatcgagtgatattgaataaattatttatcttctcagtttccttatctgtaaattacaatattagactaagtaagtttttccaactcttcactaccaattaccttaggcttttataatgctccgcctacttcagtcccatgtttcagaagcttttgtctattttttaaactcattgattaaataatgattaatgcattctccacattttaatattgcaaaggcccattggagtttctgaagtggctccacagaattgaaataatttcaaataactgtaaaggaactgaaaatcttcacagagatgaagtggggtttccattaggtgctttgaaatttgataacaaatcatcaacttccactggtcaatatatagattttgggtgtctgaggccccaagattagatgccactaatctccaaagattccctccaattatgaaatattttaatgtctacttttagagagcactagccagtatatgaccatgtgattaatttcttttcacactagataaaattacctggttcaaaagtggtttttgtttattaaatttggtaataaatatatataatacacagacaggatagtttttatgctgaagtttttggccagctttagtttgaggactccttgataagcttgctaaactttcagagtgccctgagacacttccagccatccctcctcctgccttcattggggcagacttgcattgcagtctgacagtaattttttttctgattgagaattatgtaaattcaatacaatgtcagtttttaaaagtcaaagttagatcaagagaatatttcagagttttggtttacacatcaagaaacagacacacatacctaggaaagatttacacaatagataatcatcttaatgtgaaagatatttgaagtattaattttaatatattaaatatgatttctgttatagtcttctgtatggaattttgtcacttaagatgagctgcaaataaataataccttcaatggaaaaaaaaaaaaaaaaaaaaaaaaaaaaaaaaaaaaaaaaaaaaaaaaa

SEQ ID NO: 850 - DNA, 7391 bp, Homo sapiens
gctgcgcagcgctggctgctggctggcctcgcggagacgccgaacggacgcggccggcgccggcttgtgggctcgccgcctgcagccatgaccctcgcagcctgtccctcggcctcggcccgggacgtctaaaatcccacacagtcgcgcgcagctgctggagagccggccgctgccccctcgtcgccgcatcacactcccgtcccgggagctgggagcagcgcgggcagccggcgcccccgtgcaaactgggggtgtctgccagagcagccccagccgctgccgctgctacccccgatgctggccatggcctggcggggcgcagggccgagcgtcccgggggcgcccgggggcgtcggtctcagtctggggttgctcctgcagttgctgctgctcctggggccggcgcggggcttcggggacgaggaagagcggcgctgcgaccccatccgcatctccatgtgccagaacctcggctacaacgtgaccaagatgcccaacctggttgggcacgagctgcagacggacgccgagctgcagctgacaactttcacaccgctcatccagtacggctgctccagccagctgcagttcttcctttgttctgtttatgtgccaatgtgcacagagaagatcaacatccccattggcccatgcggcggcatgtgtctttcagtcaagagacgctgtgaacccgtcctgaaggaatttggatttgcctggccagagagtctgaactgcagcaaattcccaccacagaacgaccacaaccacatgtgcatggaagggccaggtgatgaagaggtgcccttacctcacaaaacccccatccagcctggggaagagtgtcactctgtgggaaccaattctgatcagtacatctgggtgaaaaggagcctgaactgtgtgctcaagtgtggctatgatgctggcttatacagccgctcagccaaggagttcactgatatctggatggctgtgtgggccagcctgtgtttcatctccactgccttcacagtactgaccttcctgatcgattcttctaggttttcctaccctgagcgccccatcatatttctcagtatgtgctataatatttatagcattgcttatattgtcaggctgactgtaggccgggaaaggatatcctgtgattttgaagaggcagcagaacctgttctcatccaagaaggacttaagaacacaggatgtgcaataattttcttgctgatgtacttttttggaatggccagctccatttggtgggttattctgacactcacttggtttttggcagcaggactcaaatggggtcatgaagccattgaaatgcacagctcttatttccacattgcagcctgggccatccccgcagtgaaaaccattgtcatcttgattatgagactggtggatgcagatgaactgactggcttgtgctatgttggaaaccaaaatctcgatgccctcaccgggttcgtggtggctcccctctttacttatttggtcattggaactttgttcattgctgcaggtttggtggccttgttcaaaattcggtcaaatcttcaaaaggatgggacaaagacagacaagttagaaagactgatggtcaagattggggtgttctcagtactgtacacagttcctgcaacgtgtgtgattgcctgttatttttatgaaatctccaactgggcactttttcggtattctgcagatgattccaacatggctgttgaaatgttgaaaatttttatgtctttgttggtgggcatcacttcaggcatgtggatttggtctgccaaaactcttcacacgtggcagaagtgttccaacagattggtgaattctggaaaggtaaagagagagaagagaggaaatggttgggtgaagcctggaaaaggcagtgagactgtggtataaggctagtcagcctccatgctttcttcattttgaaggggggaatgccagcattttggaggaaattctactaaaagttttatgcagtgaatctcagtttgaacaaactagcaacaattaagtgacccccgtcaacccactgcctcccaccccgaccccagcatcaaaaaaccaatgattttgctgcagactttggaatgatccaaaatggaaaagccagttagaggctttcaaagctgtgaaaaatcaaaacgttgatcactttagcaggttgcagcttggagcgtggaggtcctgcctagattccaggaagtccagggcgatactgttttcccctgcagggtgggatttgagctgtgagttggtaactagcagggagaaatattaacttttttaaccctttaccattttaaatactaactgggtctttcagatagcaaagcaatctataaacactggaaacgctgggttcagaaaagtgttacaagagttttatagtttggctgatgtaacataaacatcttctgtggtgcgctgtctgctgtttagaactttgtggactgcactcccaagaagtggtgttagaatctttcagtgcctttgtcataaaacagttatttgaacaaacaaaagtactgtactcacacacataaggtatccagtggatttttcttctctgtcttcctctcttaaatttcaacatctctcttcttggctgctgctgttttcttcattttatgttaatgactcaaaaaaggtatttttatagaatttttgtactgcagcatgcttaaagaggggaaaaggaagggtgattcactttctgacaatcacttaattcagaggaaaatgagatttactaagttgacttacctgacggaccccagagacctattgcattgagcagtggggacttaatatattttacttgtgtgattgcatctatgcagacgccagtctggaagagctgaaatgttaagtttcttggcaactttgcattcacacagattagctgtgtaatttttgtgtgtcaattacaattaaaagcacattgttggaccatgacatagtatactcaactgactttaaaactatggtcaacttcaacttgcattctcagaatgatagtgcctttaaaaatttttttattttttaaagcataagaatgttatcagaatctggtctacttaggacaatggagactttttcagttttataaagggaactgaggacagctaatccaactacttggtgcgtaattgtttcctagtaattggcaaaggctccttgtaagatttcactggaggcagtgtggcctggagtatttatatggtgcttaatgaatctccagaatgccagccagaagcctgattggttagtagggaataaagtgtagaccatatgaaatgaactgcaaactctaatagcccaggtcttaattgcctttagcagaggtatccaaagcttttaaaatttatgcatacgttcttcacaagggggtacccccagcagcctctcgaaaattgcacttctcttaaaactgtaactggcctttctcttaccttgccttaggccttctaatcatgagatcttggggacaaattgactatgtcacaggttgctctccttgtaactcatacctgtctgcttcagcaactgctttgcaatgacatttatttattaattcatgccttaaaaaaataggaagggaagcttttttttttctttttttttttttcaatcacactttgtggaaaaacatttccagggactcaaaattccaaaaaggtggtcaaattctggaagtaagcatttcctcttttttaaaaatttggtttgagccttatgcccatagtttgacatttccctttcttctttcctttttgtttttgtgtggttcttgagctctctgacatcaagatgcatgtaaagtcgattgtatgttttggaaggcaaagtcttggcttttgagactgaagttaagtgggcacaggtggcccctgctgctgtgcccagtctgagtaccttggctagactctaggtcaggctccaggagcatgagaattgatccccagaagaaccattttaactccatctgatactccattgcctatgaaatgtaaaatgtgaactccctgtgctgcttgtagacagttcccataactgtccacggccctggagcacgcacccaggggcagagcctgcccttactcacgctctgctctggtgtcttgggagttgtgcagggactctggcccaggcaggggaaggaagaccaggcggtaggggactggtcttgctgttagagtatagaggtttgtaatgcagttttcttcataatgtgtcagtgattgtgtgaccaaggcagcatctagcagaaagccaggcatggagtaggtgatcgatacttgtcaatgactaaataataacaataaaagagcacttgggtgaatctgggcacctgatttctgagttttgagttctggagctagtgttttgacaatgctttgggttttgacatgccttttccacaaatctcttgccttttcagggcaaagtgtatttgatcagaagtggccatttggattagtagccttagcaatgctacagggttataggcctctcctttcacattccagacaatggagagtgtttatggtttcaggaaaagaactttgtggctgaggggtcagttaccagtgaccttcaatcaactccatcacttcttaaatcggtatttgttaaaaaaatcagttattttatttattgagtgccgactgtagtaaagccctgaaatagataatctctgttcttctaactgatctaggatggggacgcacccaggtctgctgaactttactgttcctctgggaaaggagcagggacctctggaattcccatctgtttcactgtctccattccataaatctcttcctgtgtgagccaccacacccagcctgggtctctctacttttaacacatctctcatccctttcccaggattccttccaagtcagttacaggtggttttaacagaaagcatcagctctgcttcgtgacagtctctggagaaatcccttaggaagactatgagagtaggccacaaggacatgggcccacacatctgctttggctttgccggcaattcagggcttggggtattccatgtgacttgtataggtatatttgaggacagcatcttgctagagaaaaggtgagggttgtttttctttctctgaaacctacagtaaatgggtatgattgtagcttcctcagaaatcccttggcctccagagattaaacatggtgcaatggcacctctgtccaacctcctttctggtagattcctttctcctgcttcatataggccaaacctcagggcaagggaacatgggggtagagtggtgctggccagaaccatctgcttgagctacttggttgattcatatcctctttcctttatggagacccatttcctgatctctgagactgttgctgaactggcaacttacttgggcctgaaactggagaaggggtgacatttttttaatttcagagatgctttctgattttcctctcccaggtcactgtctcacctgcactctccaaactcaggttccgggaagcttgtgtgtctagatactgaattgagattctgttcagcaccttttagctctatactctctggctcccctcatcctcatggtcactgaattaaatgcttattgtattgagaaccaagatgggacctgaggacacaaagatgagctcaacagtctcagccctagaggaatagactcagggatttcaccaggtcggtgcagtatttgatttctggtgaggtgaccacagctgcagttagggaagggagccattgagcacagactttggaaggaaccttttttttgttgtttgtttgtttgtttgtttgtttgtttgtttgagacagggtcttgctctgtcacccaggctggggcgcaatggcacgatcttggctcactgcaacctctgcctcctgggttcaagtgattctcctgccacagcctcctgaggagctgggactacaggtgcgtgctaccacgcccagctacttctgtatttttagtagagacggggtttcactgtgttggccaggctggtctcgaactcctgacctcatgatctgcccgcctcagcctcccaaagtgctgggattacaagtgtgagccaccacacctggcctggaaggaacctcttaaaatcagtttacgtcttgtattttgttctgtgatggaggacactggagagagttgctattccagtcaatcatgtcgagtcactggactctgaaaatcctattggttcctttattttatttgagtttagagttcccttctgggtttgtattatgtctggcaaatgacctgggttatcacttttcctccagggttagatcatagatcttggaaactccttagagagcattttgctcctaccaaggatcagatactggagccccacataatagatttcatttcactctagcctacatagagctttctgttgctgtctcttgccatgcacttgtgcggtgattacacacttgacagtaccaggagacaaatgacttacagatcccccgacatgcctcttccccttggcaagctcagttgccctgatagtagcatgtttctgtttctgatgtaccttttttctcttcttctttgcatcagccaattcccagaatttccccaggcaatttgtagaggacctttttggggtcctatatgagccatgtcctcaaagcttttaaacctccttgctctcctacaatattcagtacatgaccactgtcatcctagaaggcttctgaaaagaggggcaagagccactctgcgccacaaaggttgggtccatcttctctccgaggttgtgaaagttttcaaattgtactaataggctggggccctgacttggctgtgggctttgggaggggtaagctgctttctagatctctcccagtgaggcatggaggtgtttctgaattttgtctacctcacagggatgttgtgaggcttgaaaaggtcaaaaaatgatggccccttgagctctttgtaagaaaggtagatgaaatatcggatgtaatctgaaaaaaagataaaatgtgacttcccctgctctgtgcagcagtcgggctggatgctctgtggcctttcttgggtcctcatgccaccccacagctccaggaaccttgaagccaatctgggggactttcagatgtttgacaaagaggtaccaggcaaacttcctgctacacatgccctgaatgaattgctaaatttcaaaggaaatggaccctgcttttaaggatgtacaaaagtatgtctgcatcgatgtctgtactgtaaatttctaatttatcactgtacaaagaaaaccccttgctatttaattttgtattaaaggaaaataaagttttgtttgttaaaaaaaaa

SEQ ID NO: 851 - DNA, 3851 bp, Homo sapiens
ctctcccaaccgcctcgtcgcactcctcaggctgagagcaccgctgcactcgcggccggcgatgcgggaccccggcgcggccgctccgctttcgtccctgggcctctgtgccctggtgctggcgctgctgggcgcactgtccgcgggcgccggggcgcagccgtaccacggagagaagggcatctccgtgccggaccacggcttctgccagcccatctccatcccgctgtgcacggacatcgcctacaaccagaccatcctgcccaacctgctgggccacacgaaccaagaggacgcgggcctcgaggtgcaccagttctacccgctggtgaaggtgcagtgttctcccgaactccgctttttcttatgctccatgtatgcgcccgtgtgcaccgtgctcgatcaggccatcccgccgtgtcgttctctgtgcgagcgcgcccgccagggctgcgaggcgctcatgaacaagttcggcttccagtggcccgagcggctgcgctgcgagaacttcccggtgcacggtgcgggcgagatctgcgtgggccagaacacgtcggacggctccgggggcccaggcggcggccccactgcctaccctaccgcgccctacctgccggacctgcccttcaccgcgctgcccccgggggcctcagatggcagggggcgtcccgccttccccttctcatgcccccgtcagctcaaggtgcccccgtacctgggctaccgcttcctgggtgagcgcgattgtggcgccccgtgcgaaccgggccgtgccaacggcctgatgtactttaaggaggaggagaggcgcttcgcccgcctctgggtgggcgtgtggtccgtgctgtgctgcgcctcgacgctctttaccgttctcacctacctggtggacatgcggcgcttcagctacccagagcggcccatcatcttcctgtcgggctgctacttcatggtggccgtggcgcacgtggccggcttccttctagaggaccgcgccgtgtgcgtggagcgcttctcggacgatggctaccgcacggtggcgcagggcaccaagaaggagggctgcaccatcctcttcatggtgctctacttcttcggcatggccagctccatctggtgggtcattctgtctctcacttggttcctggcggccggcatgaagtggggccacgaggccatcgaggccaactcgcagtacttccacctggccgcgtgggccgtgcccgccgtcaagaccatcactatcctggccatgggccaggtagacggggacctgctgagcggggtgtgctacgttggcctctccagtgtggacgcgctgcggggcttcgtgctggcgcctctgttcgtctacctcttcataggcacgtccttcttgctggccggcttcgtgtccctcttccgtatccgcaccatcatgaaacacgacggcaccaagaccgagaagctggagaagctcatggtgcgcatcggcgtcttcagcgtgctctacacagtgcccgccaccatcgtcctggcctgctacttctacgagcaggccttccgcgagcactgggagcgcacctggctcctgcagacgtgcaagagctatgccgtgccctgcccgcccggccacttcccgcccatgagccccgacttcaccgtcttcatgatcaagtacctgatgaccatgatcgtcggcatcaccactggcttctggatctggtcgggcaagaccctgcagtcgtggcgccgcttctaccacagacttagccacagcagcaagggggagactgcggtatgagccccggcccctccccacctttcccaccccagccctcttgcaagaggagaggcacggtagggaaaagaactgctgggtgggggcctgtttctgtaactttctccccctctactgagaagtgacctggaagtgagaagttctttgcagatttggggcgaggggtgatttggaaaagaagacctgggtggaaagcggtttggatgaaaagatttcaggcaaagacttgcaggaagatgatgataacggcgatgtgaatcgtcaaaggtacgggccagcttgtgcctaatagaaggttgagaccagcagagactgctgtgagtttctcccggctccgaggctgaacggggactgtgagcgatccccctgctgcagggcgagtggcctgtccagacccctgtgaggccccgggaaaggtacagccctgtctgcggtggctgctttgttggaaagagggagggcctcctgcggtgtgcttgtcaagcagtggtcaaaccataatctcttttcactggggccaaactggagcccagatgggttaatttccagggtcagacattacggtctctcctcccctgccccctcccgcctgtttttcctcccgtactgctttcaggtcttgtaaaataagcatttggaagtcttgggaggcctgcctgctagaatcctaatgtgaggatgcaaaagaaatgatgataacattttgagataaggccaaggagacgtggagtaggtatttttgctactttttcattttctggggaaggcaggaggcagaaagacgggtgttttatttggtctaataccctgaaaagaagtgatgacttgttgcttttcaaaacaggaatgcatttttccccttgtctttgttgtaagagacaaaagaggaaacaaaagtgtctccctgtggaaaggcataactgtgacgaaagcaacttttataggcaaagcagcgcaaatctgaggtttcccgttggttgttaatttggttgagataaacattcctttttaaggaaaagtgaagagcagtgtgctgtcacacaccgttaagccagaggttctgacttcgctaaaggaaatgtaagaggttttgttgtctgttttaaataaatttaattcggaacacatgatccaacagactatgttaaaatattcagggaaatctctcccttcatttactttttcttgctataagcctatatttaggtttcttttctatttttttctcccatttggatcctttgaggtaaaaaaacataatgtcttcagcctcataataaaggaaagttaattaaaaaaaaaaagcaaagagccattttgtcctgttttcttggttccatcaatctgtttattaaacatcatccatatgctgaccctgtctctgtgtggttgggttgggaggcgatcagcagataccatagtgaacgaagaggaaggtttgaaccatgggccccatctttaaagaaagtcattaaaagaaggtaaacttcaaagtgattctggagttctttgaaatgtgctggaagacttaaatttattaatcttaaatcatgtactttttttctgtaatagaactcggattcttttgcatgatggggtaaagcttagcagagaatcatgggagctaacctttatcccacctttgacactaccctccaatcttgcaacactatcctgtttctcagaacagtttttaaatgccaatcatagagggtactgtaaagtgtacaagttactttatatatgtaatgttcacttgagtggaactgctttttacattaaagttaaaatcgatcttgtgtttcttcaaccttcaaaactatctcatctgtcagatttttaaaactccaacacaggttttggcatcttttgtgctgtatcttttaagtgcatgtgaaatttgtaaaatagagataagtacagtatgtatattttgtaaatctcccatttttgtaagaaaatatatattgtatttatacatttttactttggatttttgttttgttggctttaaaggtctaccccactttatcacatgtacagatcacaaataaatttttttaaatac

SEQ ID NO: 852 - DNA, 5008 bp, Homo sapiens
gctaaccttgccgcgggccgagccctgcctcgccatggaccaggactatgagcggcgcctgcttcgccagatcgtcatccagaatgagaacacgatgccacgcgtcacagagatgcggcggaccctgacgcctgccagctccccagtgtcctcgcccagcaagcacggagaccgcttcatcccctccagagccggagccaactggagcgtgaacttccacaggattaacgagaatgagaagtctcccagtcagaaccggaaagccaaggacgccacctcagacaacggcaaagacggcctggcctactctgccctgctcaagaatgagctgctgggtgccggcatcgagaaggtgcaggacccgcagactgaggaccgcaggctgcagccctccacgcctgagaagaagggtctgttcacgtattcccttagcaccaagcgctccagccccgatgacggcaacgatgtgtctccctactccctgtctcccgtcagcaacaagagccagaagctgctccggtccccccggaaacccacccgcaagatctccaagatccccttcaaggtgctggacgcgcccgagctgcaggacgacttctacctcaatctggtggactggtcgtccctcaatgtgctcagcgtggggctaggcacctgcgtgtacctgtggagtgcctgtaccagccaggtgacgcggctctgtgacctctcagtggaaggggactcagtgacctccgtgggctggtctgagcgggggaacctggtggcggtgggcacacacaagggcttcgtgcagatctgggacgcagccgcagggaagaagctgtccatgttggagggccacacggcacgcgtcggggcgctggcctggaatgctgagcagctgtcgtccgggagccgcgaccgcatgatcctgcagagggacatccgcaccccgccactgcagtcggagcggcggctgcagggccaccggcaggaggtgtgcgggctcaagtggtccacagaccaccagctcctcgcctcggggggcaacgacaacaagctgctggtctggaatcactcgagcctgagccccgtgcagcagtacacggagcacctggcggccgtgaaggccatcgcctggtccccacatcagcacgggctgctggcctcggggggcggcacagctgaccgctgtatccgcttctggaacacgctgacaggacaaccactgcagtgtatcgacacgggctcccaagtgtgcaatctggcctggtccaagcacgccaacgagctggtgagcacgcacggctactcacagaaccagatccttgtctggaagtacccctccctgacccaggtggccaagctgaccgggcactcctaccgcgtgctgtacctggcaatgtcccctgatggggaggccatcgtcactggtgctggagacgagaccctgaggttctggaacgtctttagcaaaacccgttcgacaaaggagtctgtgtctgtgctcaacctcttcaccaggatccggtaaacctgccaggcaggaccgtgccacaccagctgtccagagtcggaggaccccagctcctcagcttgcatggactctgccttcccagcgcttgtcccccgaggaaggcggctgggcgggcggggagctgggcctggaggatcctggagtctcattaaatgcctgattgtgaaccatgtccaccagtatctggggtgggcacgtggtcggggaccctcagcagcaggggctctgtctcccttcccaaagggcgagaaccacattggacggtcccggctcagaccgtctgtactcagagcgacggatgccccctgggaccctcactgcctccgtctgttcatcacctgcccaccggagccgcatgctcttcctggaactgcccacgtctgcacagaacagaccaccagacgccagggctgattggtgggggcctgagacccccggttgcccattcatggctgcaccccaccatgtcaaacccaagaccagccccaaggccagaccaaggcatgtaggcctgggcaggtggctcggggccactggcggagccagtctgtggatccaagagacagtccccacctgggcttcacggcatccttgcagccacctctgctgtcactgctcgaagcagcagtctctctggaagcatctgtgtcatggccatcgcccggcggtcagtgggcttcagatgggcctgtgcatcctggccaagcgtcaccctcacactggaggaggatgtctgctctggacttatcaccccaggagaactgaacccggacctgctcactgccctggctggagaggagcacaacagatgccacgtcttcgtgcattcgccaacacgtgccctcacagggccagcgtcctccttccctgcgcaagacttgcgtcccccatgcctgctgggtggctgggtcctgtggaggccagcagcggtgtggcccccgcccccaggctgcctgtgtcttcacctgtcctgtccaccagcgccaacagccgtggggaagccaaggagacccaaggggtccaggaggtgggcgccctccatccttcgagaagcttcccaggctcctctgcttctctgtctcatgctcccaggctgcacagcaggcagggagggaggcaaggcaggggagtggggcctgagctgagcactgccccctcacccccccaccaccccttcccatttcatcggtggggacgtggagagggtggggcgggctggggttggagggtcccacccaccaccctgctgtgcttgggaacccccactccccactccccacatcccaacatcctggtgtctgtccccagtggggttggcgtgcatgtgtacatatgtatttgtgacttttctttggatttgttttgtgtttttgttgactagtcctggaaatgtttgaggctagacggggaggggccaggacccacccactgctcctgggggatgaggtcctggttttaaagccccgtcatttcaagcgggtcgatcttccacattcactggagagactctccccacctctgtctgggtggggcgcggacccctcactgtgcgcctgtgcagggggtgctggtgcacgtggcagtgtggatttccagtggtcacggtcttactgtttcaaggtttttaaataagaaaaccaaccctgccttcgcccatgcccgcccctgcccgcagttgccaaagagccgccttgtcgctgtgggcgtcagggcttggctggctcagtgcacaacccacagtggccttcagaggctcctcctgggactgggaaccgccgcagggccaggcggacggcgtgaggtttgtgttggggctggttctgcccatgctagggggtgggggagctcccaggacagaccagccttgtttctcatgtaatgcagtgacgctgtcattaaacacgtggattcatgtgtggccgggactggctggctctaggtccccggctcgggtggggtcacacggtcctgccctagagcccccatctggccctggagctgcagaagcagcttctgaggggcttcccaggcctgcatttcacagatggggagctcagccctcgaaggccgcagagacgcctcccaggcccgtctgccagggcgccggccacaatcctgcagggccaaggactggactccaggcaagtccctgcgctccagctggacggccctgttccagggaggaggtgctcggttgacaccatcagggagggagggtgggcactgctgggctgagttcacccccagggctggccagatggggccaggagggacagagcaaggggggtgaaggccgtggtgggagggtcccatgatgatgggccagggctcgtgtagaaatgggggaattggttccccatggcccaggacagctgagaggaggtggaggggccccaggggagtgtacgtcaggctttgcggggcacgggggccactcagcagcgctggggcaggtgcctctgctgtcagctccacccgacaggcagacgaaggccagtggggccatcgcttcctggggcgaccctggcagtggttgggagacgcccagatggagggggaggctgaccaagggccccgcagggcgggctgcaacttttctgttgatcctggaatgtagctggtgcagtgagagggaaagagaattgaaaaactcaggctgccataggttctgcgatgagaggtgcaggaggcaggagcctggcccagggggtgctggtgcctccccggggtctgggcggagagaacaggaggaatggctgggaagtggctgagggagccaggaggccggggggccgggggctgcaggggaggctgtgggggtcctggcagccaggaggccccaggtggttttgaggctcgctcttgcgcggtgcctgagaagagggtgaaggagctggggcaggccccatcctgggcattggagatgatgaaaccgagcagacctggcccatgtggagctggcatgggggacacagcccagagacagagaagcttatgaggaagtgaggaggtggcgtcacaagggtggggagggggccttggggaagggcggccttggatcagaggctcaccacaagcctggcatttcagccagggctggagaaggcagggacgcctgggtgagaggcaaagggcacagccatgcaaaggccctggggcaggacggcacctggtatgcgggaggaacagagtgaggagaggagggcagggcgtgcagggccttgtgggcctcagggaggacttgggcacctaccccgagggagtggagctcctgggtgcgtgtccagatgggaaaggcagggtcgtatctgtggggacctgacaagggcaggggaagcggagaccagggtgcaggctccgcccccacccaaggccgggcccagccagaggaggggcagggcagggcaggaggtttctggatgtttgttgggtttggtttggttttgttttgttttgtttattgtggtaaaatacaaaatctaccgtctt

SEQ ID NO: 853 - DNA, 1049 bp, Homo sapiens
gctccaggagcttccggtatgtgttttccctctgttctcgattaccttggcaacggctgaggcgggagaccggtggtctgcaccgtcctggagggagatatgagtggctggactctcagccagccactgggatgtgttcgggctttggaccctgaggccggagagagctcccgagaggaggcggcgccacgttcgttcttctgaggggacggtagatttgggggttttcctctaggattctcgcgccgtttcctctgaagaaacaggaccagagagggaaggtgacctgaaagtcacagaataattttttagagctgaacaagaatccaagcctgcaactgcagagacgagagatctttctgctgtctatactcttggaaagcacatcctaagatctttgcagattatcctgtggaaggaaaatgcctaaagtcaaaagaagccggaaagcacccccagatggctgggagttgattgagccaacactggatgaattagatcaaaagatgagagaagctgaaacagaaccgcatgagggaaagaggaaagtggaatctctgtggcccatcttcaggatccaccaccagaaaacccgctacatcttcgacctcttttacaagcggaaagccatcagcagagaactctatgaatattgtattaaagaaggctatgcagacaaaaacctgattgcaaaatggaaaaagcaaggatatgagaacttgtgctgcctgcggtgcattcagacacgggacaccaacttcgggacgaactgcatctgccgcgtgcccaaaagcaagctggaagtgggccgcatcatcgagtgcacacactgtggctgtcgtggctgctctggctgaggctggcgcgctccaccctggactctggacttcgcaggttcctgcctgtcacgccacccccttcctgggagcagcgagcagtgccccaggcccgagttggagcacggtctctatggggaaggcttcgctgtctatcagctgtgatttgtaaaaataaaatctttaaatctctcgaaaaaaaaaaaaaaaaaa

SEQ ID NO: 854 - DNA, 1259 bp, Homo sapiens
gtggtcttgcgagtggagtgtccgctgtgcccgggcctgcaccatgagcgtcccggccttcatcgacatcagtgaagaagatcaggctgctgagcttcgtgcttatctgaaatctaaaggagctgagatttcagaagagaactcggaaggtggacttcatgttgatttagctcaaattattgaagcctgtgatgtgtgtctgaaggaggatgataaagatgttgaaagtgtgatgaacagtgtggtatccctactcttgatcctggaaccagacaagcaagaagctttgattgaaagcctatgtgaaaagctggtcaaatttcgcgaaggtgaacgcccgtctctgagactgcagttgttaagcaaccttttccacgggatggataagaatactcctgtaagatacacagtgtattgcagccttattaaagtggcagcatcttgtggggccatccagtacatcccaactgagctggatcaagttagaaaatggatttctgactggaatctcaccactgaaaaaaagcacacccttttaagactactttatgaggcacttgtggattgtaagaagagtgatgctgcttcaaaagtcatggtggaattgctcggaagttacacagaggacaatgcttcccaggctcgagttgatgcccacaggtgtattgtacgagcattgaaagatccaaatgcatttctttttgaccaccttcttactttaaaaccagtcaagtttttggaaggcgagcttattcatgatcttttaaccatttttgtgagtgctaaattggcatcatatgtcaagttttatcagaataataaagacttcattgattcacttggcctgttacatgaacagaatatggcaaaaatgagactacttacttttatgggaatggcagtagaaaataaggaaatttcttttgacacaatgcagcaagaacttcagattggagctgatgatgttgaagcatttgttattgacgccgtaagaactaaaatggtctactgcaaaattgatcagacccagagaaaagtagttgtcagtcatagcacacatcggacatttggaaaacagcagtggcaacaactgtatgacacacttaatgcctggaaacaaaatctgaacaaagtgaaaaacagccttttgagtctttctgatacctgagtttttatgcttataatttttgttctttgaaaaaaaagccctaaatcatagtaaaacattataaactaaaaaaaaaaaaaaaaaaaaaaaa

SEQ ID NO: 855 - DNA, 3782 bp, Homo sapiens
acccgcctctgcgcgcccccgggcacgaccccggagtctccgcgggcggccagggcgcgcgtgcgcggaggtgagccgggccggggctgcggggcttccctgagcgcgggccgggtcggtggggcggtcggctgcccgcgcggcctctcagttgggaaagctgaggttgtcgccggggccgcgggtggaggtcggggatgaggcagcaggtaggacagtgacctcggtgacgcgaaggaccccggccacctctaggttctcctcgtccgcccgttgttcagcgagggaggctctgcgcgtgccgcagctgacggggaaactgaggcacggagcgggcctgtaggagctgtccaggccatctccaaccatgggagtgaggcacccgccctgctcccaccggctcctggccgtctgcgccctcgtgtccttggcaaccgctgcactcctggggcacatcctactccatgatttcctgctggttccccgagagctgagtggctcctccccagtcctggaggagactcacccagctcaccagcagggagccagcagaccagggccccgggatgcccaggcacaccccggccgtcccagagcagtgcccacacagtgcgacgtcccccccaacagccgcttcgattgcgcccctgacaaggccatcacccaggaacagtgcgaggcccgcggctgttgctacatccctgcaaagcaggggctgcagggagcccagatggggcagccctggtgcttcttcccacccagctaccccagctacaagctggagaacctgagctcctctgaaatgggctacacggccaccctgacccgtaccacccccaccttcttccccaaggacatcctgaccctgcggctggacgtgatgatggagactgagaaccgcctccacttcacgatcaaagatccagctaacaggcgctacgaggtgcccttggagaccccgcatgtccacagccgggcaccgtccccactctacagcgtggagttctccgaggagcccttcggggtgatcgtgcgccggcagctggacggccgcgtgctgctgaacacgacggtggcgcccctgttctttgcggaccagttccttcagctgtccacctcgctgccctcgcagtatatcacaggcctcgccgagcacctcagtcccctgatgctcagcaccagctggaccaggatcaccctgtggaaccgggaccttgcgcccacgcccggtgcgaacctctacgggtctcaccctttctacctggcgctggaggacggcgggtcggcacacggggtgttcctgctaaacagcaatgccatggatgtggtcctgcagccgagccctgcccttagctggaggtcgacaggtgggatcctggatgtctacatcttcctgggcccagagcccaagagcgtggtgcagcagtacctggacgttgtgggatacccgttcatgccgccatactggggcctgggcttccacctgtgccgctggggctactcctccaccgctatcacccgccaggtggtggagaacatgaccagggcccacttccccctggacgtccagtggaacgacctggactacatggactcccggagggacttcacgttcaacaaggatggcttccgggacttcccggccatggtgcaggagctgcaccagggcggccggcgctacatgatgatcgtggatcctgccatcagcagctcgggccctgccgggagctacaggccctacgacgagggtctgcggaggggggttttcatcaccaacgagaccggccagccgctgattgggaaggtatggcccgggtccactgccttccccgacttcaccaaccccacagccctggcctggtgggaggacatggtggctgagttccatgaccaggtgcccttcgacggcatgtggattgacatgaacgagccttccaacttcatcaggggctctgaggacggctgccccaacaatgagctggagaacccaccctacgtgcctggggtggttggggggaccctccaggcggccaccatctgtgcctccagccaccagtttctctccacacactacaacctgcacaacctctacggcctgaccgaagccatcgcctcccacagggcgctggtgaaggctcgggggacacgcccatttgtgatctcccgctcgacctttgctggccacggccgatacgccggccactggacgggggacgtgtggagctcctgggagcagctcgcctcctccgtgccagaaatcctgcagtttaacctgctgggggtgcctctggtcggggccgacgtctgcggcttcctgggcaacacctcagaggagctgtgtgtgcgctggacccagctgggggccttctaccccttcatgcggaaccacaacagcctgctcagtctgccccaggagccgtacagcttcagcgagccggcccagcaggccatgaggaaggccctcaccctgcgctacgcactcctcccccacctctacacactgttccaccaggcccacgtcgcgggggagaccgtggcccggcccctcttcctggagttccccaaggactctagcacctggactgtggaccaccagctcctgtggggggaggccctgctcatcaccccagtgctccaggccgggaaggccgaagtgactggctacttccccttgggcacatggtacgacctgcagacggtgccagtagaggcccttggcagcctcccacccccacctgcagctccccgtgagccagccatccacagcgaggggcagtgggtgacgctgccggcccccctggacaccatcaacgtccacctccgggctgggtacatcatccccctgcagggccctggcctcacaaccacagagtcccgccagcagcccatggccctggctgtggccctgaccaagggtggggaggcccgaggggagctgttctgggacgatggagagagcctggaagtgctggagcgaggggcctacacacaggtcatcttcctggccaggaataacacgatcgtgaatgagctggtacgtgtgaccagtgagggagctggcctgcagctgcagaaggtgactgtcctgggcgtggccacggcgccccagcaggtcctctccaacggtgtccctgtctccaacttcacctacagccccgacaccaaggtcctggacatctgtgtctcgctgttgatgggagagcagtttctcgtcagctggtgttagccgggcggagtgtgttagtctctccagagggaggctggttccccagggaagcagagcctgtgtgcgggcagcagctgtgtgcgggcctgggggttgcatgtgtcacctggagctgggcactaaccattccaagccgccgcatcgcttgtttccacctcctgggccggggctctggcccccaacgtgtctaggagagctttctccctagatcgcactgtgggccggggccctggagggctgctctgtgttaataagattgtaaggtttgccctcctcacctgttgccggcatgcgggtagtattagccacccccctccatctgttcccagcaccggagaagggggtgctcaggtggaggtgtggggtatgcacctgagctcctgcttcgcgcctgctgctctgccccaacgcgaccgctgcccggctgcccagagggctggatgcctgccggtccccgagcaagcctgggaactcaggaaaattcacaggacttgggagattctaaatcttaagtgcaattatttttaataaaaggggcatttggaatcaaaaaaaa

SEQ ID NO: 856 - DNA, 1885 bp, Homo sapiens
cagctctagcgaaaagccgccggtatttctccatctggctctcctctacctccaggcaggctcacccgagatccccgccccgaaccccccctgcacactcggcccagcgctgttgcccccggagcggacgtttctgcagctattctgagcacaccttgacgtcggctgagggagcgggacagggtcagcggcgaaggaggcaggccccgcgcggggatctcggaagccctgcggtgcatcatgaagttccagtacaaggaggaccatccctttgagtatcggaaaaaggaaggagaaaagatccggaagaaatatccggacagggtccccgtgattgtagagaaggctccaaaagccagggtgcctgatctggacaagaggaagtacctagtgccctctgaccttactgttggccagttctacttcttaatccggaagagaatccacctgagacctgaggacgccttattcttctttgtcaacaacaccatccctcccaccagtgctaccatgggccaactgtatgaggacaatcatgaggaagactattttctgtatgtggcctacagtgatgagagtgtctatgggaaatgagtggttggaagcccagcagatgggagcacctggacttgggggtaggggaggggtgtgtgtgcgcgacatggggaaagagggtggctcccaccgcaaggagacagaaggtgaagacatctagaaacattacaccacacacaccgtcatcacattttcacatgctcaattgatattttttgctgcttcctcggcccagggagaaagcatgtcaggacagagctgttggattggctttgatagaggaatggggatgatgtaagtttacagtattcctggggtttaattgttgtgcagtttcatagatgggtcaggaggtggacaagttggggccagagatgatggcagtccagcagcaactccctgtgctcccttctctttgggcagagattctatttttgacatttgcacaagacaggtagggaaaggggacttgtggtagtggaccatacctggggaccaaaagagacccactgtaattgatgcattgtggcccctgatcttccctgtctcacacttcttttctcccatcccggttgcaatctcactcagacatcacagtaccaccccaggggtggcagtagacaacaacccagaaatttagacagggatctcttacctttggaaaataggggttaggcatgaaggtggttgtgattaagaagatggttttgttattaaatagcattaaactggaattgacaagagtgttgagcatccctgtctaacctgctctttctctttggtgccccttatctcaccccttccttggaatttaataagtctcaggcatttccaattgtagactaaaaccactcttagcatctcctctagtattttccatgtatcaggacagaggtgtcttatgtagggagggggcaagtatgaagtaaggtaattatatactactctcattcaggattcttgctcccatgctgctgtcccttcaggctcacatgcacaggaatgctacatgatggccagctgcttccctccttggttatcatccactgcagctgctagttagaaaggtttggagggatgacttttagtaaatcatggggattttattgatttattttcacttttgggattttgtggggtgggagtggggagcaggaattgcactcagacatgacatttcaattcatctctgctaatgaaaagggttctttctcttgggggaaatgtgtgtgtcagttctgtcagctgcaagttcttgtataatgaagtcaatgccatcaggccaaggaaataaaataattgcttaccttaaaaaaaaaaaaaaaaaaaa

SEQ ID NO: 857 - DNA, 2806 bp, Homo sapiens
gcacaccatgtgtccctccgcgcgcagcacgggggacttttcggtggggattttgggcgccgaccagacgcggcattttcggaaaatagcgccctgtgcagctgaagcgctttgtgtgtagcggggccgcgtcagcccggccgggtacgaggcgcctcgggtccccgcaccacctcctgctgccttcccgtcgccgctcccgaagcttttccagatgtccctggtagatttgggaaagaagcttttagaagcggcacgagcaggtcaagatgatgaagttcgtattttgatggcaaatggagctccctttactacagactggctgggaacttctccacttcatctagcagcacagtatggtcattattccaccacagaggtactgctgcgagctggtgtgagcagagatgccagaaccaaagtggaccgaacaccattacatatggcagcttctgagggccatgccagcatagtagaggttttacttaagcatggtgctgatgtcaatgcaaaggacatgttaaagatgacagctctccattgggccacagaacacaatcatcaagaggtggtggaacttttaatcaaatatggtgctgatgtacacacgcaaagtaaattttgtaaaactgcatttgatatttcaatagacaatggaaatgaagatttagcagagatattacagattgctatgcagaaccaaatcaacacaaacccagagagtcctgacactgtgacaatacatgctgcaacaccacagtttatcattggacctggaggggtggtgaacctaacagatgaaacgggtgtatctgctgttcagtttggaaactcttctacatcagtattagctacattagctgccttagctgaagcatctgctccattgtccaattcttcagaaactccagtagtggccacagaagaagtagttactgcagaatctgtggatggtgccattcagcaagtagttagttcagggggtcagcaagtcatcacaatagttacagatggaattcagcttggaaatttgcactctattccaaccagtggaattggtcagcccatcattgtgaccatgccagatggacaacaagtattaacagtaccagcaacagacattgctgaagaaactgttataagtgaagaaccaccagctaagagacaatgtatcgaaataattgaaaaccgggtggaatctgcagaaatagaagagagagaagctcttcagaaacagctggatgaagcaaatcgagaagcacaaaaatatcgacagcagctcctaaagaaagaacaggaagcagaggcctacagacagaagttggaagctatgactcgtcttcagactaataaagaagctgtttaattgaaatgaacatgtagtttgattttacttttggtcaagaaagaatacaatcttgaactgtacacaacaaaggtacagccatgggaatacagaatgatagaagagactacagatggataattggacttaagccatgagctctgagttcttgtaacataaaactttactttagaagttgtgaaatgtatttaaaactgaattctgtaaatagtttttttttttttacagttccaaatgagttgataaagattgttgaagagatccaaaaccagaataagccactgtttttgtgaattctttttgattttagtacaaaccttaatttctcagaaacggaacagttttaagggtgatcgttgttggttaggccaaatgttgtgtaataattatggtggactgatgctggaattactcctgtaggtataaacctctgtatgaagagaagatttctcccaggaaatctttgtacagctttaagttgtgtcagattctctgaaaacattttttagaaagcaaaatttttatatttgttcaatttcagctatacccaagtagatttacatgtatatgaagcaaatatttttaaaaatttctgtttgtacatattctgcatgttttataatttcaaaatgcatcacttacataggtatttctcccacagaaatgatgaaagtgaccagaaaaaaacaaaaacaaaacccctttactctgtaggtcattgaaacgaagtaagctggcagctggttttattggaatgacagtgttctcggaaggagcagcctacaagataacttgaatttgccaattctgcaaaatctgtgcttttttgaaaatttaagagtggggacgtgaaactgtattctgtgccttccatcatgatttccacatgaaagcactttaaggcactgattttaagataatgtttttggaaaacccaatgcatatgggtttctgaaatattttatggacttatttctccccaggaaatgattcttacggaaaaaaattgcttttgtatgtagaacaggaactttttgtattacagtgatgcaatagacatgtctaatgtaacttctacttttccttttgaaagctcagtgtctgtgctatgacttgctctcatcacaatattgttgaattccacaatgtatggacattaaacactggcagactgttcactttttcttttttttttttggtaaaatattacttcaaacccctttttcttgctttatttttcagtgttttattgctttatgaactgtttaaccctgaaatccctctaggttatctatactgtataaaaaagcaattacccttaaaactgtactctggcctacttttctattttgcaattaaatatctttttcacatatgttcattgtagacttatgtttttatcacatcttattaacacattaaaaatgttatcctactgca

SEQ ID NO: 858 - DNA, 1412 bp, Homo sapiens
gcacaccatgtgtccctccgcgcgcagcacgggggacttttcggtggggattttgggcgccgaccagacgcggcattttcggaaaatagcgccctgtgcagctgaagcgctttgtgtgtagcggggccgcgtcagcccggccgggtacgaggcgcctcgggtccccgcaccacctcctgctgccttcccgtcgccgctcccgaagcttttccagatgtccctggtagatttgggaaagaagcttttagaagcggcacgagcaggtcaagatgatgaagttcgtattttgatggcaaatggagctccctttactacagactggctgggaacttctccacttcatctagcagcacagtatggtcattattccaccacagaggtactgctgcgagctggtgtgagcagagatgccagaaccaaagtggaccgaacaccattacatatggcagcttctgagggccatgccagcatagtagaggttttacttaagcatggtgctgatgtcaatgcaaaggacatgttaaagatgacagctctccattgggccacagaacacaatcatcaagaggtggtggaacttttaatcaaatatggtgctgatgtacacacgcaaagtaaattttgtaaaactgcatttgatatttcaatagacaatggaaatgaagatttagcagagatattacagattgctatgcagaaccaaatcaacacaaacccagagagtcctgacactgtgacaatacatgctgcaacaccacagtttatcattggacctggaggggtggtgaacctaacagatgaaacgggtgtatctgctgttcagtttggaaactcttctacatcagtattagctacattagctgccttagctgaagcatctgctccattgtccaattcttcagaaactccagtagtggccacagaagaagtagttactgcagaatctgtggatggtgccattcagcaagtagttagttcagggggtcagcaagtcatcacaatagttacagatggaattcagcttggaaatttgcactctattccaaccagtggaattggtcagcccatcattgtgaccatgccagatggacaacaagtattaacagtaccagcaacagacattgctgaagaaactgttataagtgaagaaccaccagctaagagacaatgtatcgaaataattgaaaaccgggtggaatctgcagaaatagaagtaaggagtcttttacccggtgtgctttgccgcagtcatccaaaataaattcaattttttttgtcttttatatttattactgacagtattgttttgatacagaatgaaagtgcgtagtattttcattttgtttatttttgccttatacatatagcaagccctcaataaataaatattgaatgaatgaaaaaaaaaaaaa

SEQ ID NO: 859 - DNA, 2426 bp, Homo sapiens
atcgttttccccctcctcctcttcctcctcctcctcttcctcctcctccgcccatcaccgccactacgaacgccttcgcctccttctacacctcgcgccgccgccgcggctcctagcgctcctctccggcttccaccagcccatcgctccacgctctcttggctgctgcagtctcggtctctctctctctctctctctctctctctctctctctctctctctctctctctctctctcccaagtttcctatctcgtcaagatcagggcaaaaggaagaaaacaccgaattctgcttgccgtttcagagcggcggtgatgaagacaaaattgaacatctacaacatgcagttcctgctttttgttttcttggtgtgggaccctgccaggttggtgctggctaacatccaagaagatgaggctaaaaataacattaccatctttacgagaattcttgacagacttctggatggttacgataatcggcttagaccaggactgggagacagtattactgaagtcttcactaacatctacgtgaccagttttggccctgtctcagatacagatatggaatatacaattgatgttttctttcgacaaaaatggaaagatgaacgtttaaaatttaaaggtcctatgaatatccttcgactaaacaatttaatggctagcaaaatctggactccagataccttttttcacaatgggaaaaaatcagtagctcataatatgacaatgccaaataagttgcttcgaattcaggatgatgggactctgctgtataccatgaggcttacagttcaagctgaatgcccaatgcacttggaggatttcccaatggatgctcattcatgtcctctgaaatttggcagctatgcatatacaacttcagaggtcacttatatttggacttacaatgcatctgattcagtacaggttgctcctgatggctctaggttaaatcaatatgacctgctgggccaatcaatcggaaaggagacaattaaatccagtacaggtgaatatactgtaatgacagctcatttccacctgaaaagaaaaattgggtattttgtgattcaaacctatctgccttgcatcatgactgtcattctctcccaagtttcattctggcttaacagagaatctgtgcctgcaagaactgtgtttggagtaacaactgtcctaacaatgacaactctaagcatcagtgctcggaattctctccccaaagtggcttatgcaactgccatggactggtttattgctgtttgttatgcatttgtgttctctgccctaattgaatttgcaactgttaattacttcaccaaaagaggatgggcttgggatgggaagagtgtagtaaatgacaagaaaaaagaaaaggcttccgttatgatacagaacaacgcttatgcagtggctgttgccaattatgccccgaatctttcaaaagatccagttctctccaccatctccaagagtgcaaccacgccagaacccaacaagaagccagaaaacaagccagctgaagcaaagaaaactttcaacagtgttagcaaaattgacagaatgtccagaatagtttttccagttttgtttggtacctttaatttagtttactgggctacatatttaaacagagaacctgtattaggggtcagtccttgaattgagacccatgttatctttgggatgtatagcaacattaaatttggtttgttttgctatgtacagtctgactaataactgctaatttgtgatccaacatgtacagtatgtatatagtgacatagcttaccagtagacctttaatggagacatgcatttgctaactcatggaactgcagacagaaagcactccatgcgaaaacagccattgccttttttaaagatttaccctaggacctgatttaaagtgaatttcaagtgacctgattaatttcctattcttccaaatgagatgaaaatggggatcctgtacaaccctttgtggacccttttggtttagctcttaagtaggggtattttctactgttgcttaattatgatggaagataacattgtcattcctagatgaatcctttgaagtaacaaacattgtatctgacatcagctctgttcatgagtgctcagagtccctgctaatgtaattggaagcttggtacacataagaaaaactagagatttgaaatcagctatgaattactctatatagtatctatagccatgtacatattacagcatgacaagctcaaataattatgagtcagcccgaaaggatgttaattatgcctacgatgtaataactattggaatgtcatggtcattacatttttagcttcagagtttatttgaaagtaataattgaaatcctacaatttattttaatcattggaaactaccttaattaaaaaaaaaaaaaa

SEQ ID NO: 860 - DNA, 2784 bp, Homo sapiens
aaacgcgtcgtttcgcagcacttgatcggaacccggctgcctctaagacttggtcttgggcaaccgtgggtgggcaggaagggaaattatttattttattttgttaaggggagtgaagaaaagaagacgtgaggaccgcagttcactgtaatgtagagtaattgcaaaagtgggctgcctgcccctagcttttcccgctgtggttgcggaggtggtcttggttgagggggttgtggcgtgaagtacccatctctcctctcctctcctttcctcccctcccctccaacccattccctttccagctgctatgccagtttaaagtccagggtgttattattacgtgtgcgcaaaacagtgtttgctgacgatgaggctgggggacgttcctggcagagagaagtctgattacttggtcatcttgctgttaaagaaagaaagaaagaaaaaaagaaagaaagaaacagaaaggaaaagggtgggggtgggggtccataaaaaagaaatcgtctctcaatcatcaagtcctacacagagtccaggaagtaatctccatagctttaacacgaatccctaactaaaaggatattctttggggttacttggatagtgaaactgaaggcaattttaagtgtattttgtttttcattccatggctttgtaaagagcggcggtgatgaagacaaaattgaacatctacaacatgcagttcctgctttttgttttcttggtgtgggaccctgccaggttggtgctggctaacatccaagaagatgaggctaaaaataacattaccatctttacgagaattcttgacagacttctggatggttacgataatcggcttagaccaggactgggagacagtattactgaagtcttcactaacatctacgtgaccagttttggccctgtctcagatacagatatggaatatacaattgatgttttctttcgacaaaaatggaaagatgaacgtttaaaatttaaaggtcctatgaatatccttcgactaaacaatttaatggctagcaaaatctggactccagataccttttttcacaatgggaaaaaatcagtagctcataatatgacaatgccaaataagttgcttcgaattcaggatgatgggactctgctgtataccatgaggcttacagttcaagctgaatgcccaatgcacttggaggatttcccaatggatgctcattcatgtcctctgaaatttggcagctatgcatatacaacttcagaggtcacttatatttggacttacaatgcatctgattcagtacaggttgctcctgatggctctaggttaaatcaatatgacctgctgggccaatcaatcggaaaggagacaattaaatccagtacaggtgaatatactgtaatgacagctcatttccacctgaaaagaaaaattgggtattttgtgattcaaacctatctgccttgcatcatgactgtcattctctcccaagtttcattctggcttaacagagaatctgtgcctgcaagaactgtgtttggagtaacaactgtcctaacaatgacaactctaagcatcagtgctcggaattctctccccaaagtggcttatgcaactgccatggactggtttattgctgtttgttatgcatttgtgttctctgccctaattgaatttgcaactgttaattacttcaccaaaagaggatgggcttgggatgggaagagtgtagtaaatgacaagaaaaaagaaaaggcttccgttatgatacagaacaacgcttatgcagtggctgttgccaattatgccccgaatctttcaaaagatccagttctctccaccatctccaagagtgcaaccacgccagaacccaacaagaagccagaaaacaagccagctgaagcaaagaaaactttcaacagtgttagcaaaattgacagaatgtccagaatagtttttccagttttgtttggtacctttaatttagtttactgggctacatatttaaacagagaacctgtattaggggtcagtccttgaattgagacccatgttatctttgggatgtatagcaacattaaatttggtttgttttgctatgtacagtctgactaataactgctaatttgtgatccaacatgtacagtatgtatatagtgacatagcttaccagtagacctttaatggagacatgcatttgctaactcatggaactgcagacagaaagcactccatgcgaaaacagccattgccttttttaaagatttaccctaggacctgatttaaagtgaatttcaagtgacctgattaatttcctattcttccaaatgagatgaaaatggggatcctgtacaaccctttgtggacccttttggtttagctcttaagtaggggtattttctactgttgcttaattatgatggaagataacattgtcattcctagatgaatcctttgaagtaacaaacattgtatctgacatcagctctgttcatgagtgctcagagtccctgctaatgtaattggaagcttggtacacataagaaaaactagagatttgaaatcagctatgaattactctatatagtatctatagccatgtacatattacagcatgacaagctcaaataattatgagtcagcccgaaaggatgttaattatgcctacgatgtaataactattggaatgtcatggtcattacatttttagcttcagagtttatttgaaagtaataattgaaatcctacaatttattttaatcattggaaactaccttaattaaaaaaaaaaaaaa

SEQ ID NO: 861 - DNA, 1925 bp, Homo sapiens
ggtccattcgggaattactgcccagcagccgactaagttgcattccttgaatcttcgcagaaaagacaattcttttaatcagagttagtaatgtggacagtacaaaatcgagagagtctggggcttctctctttccctgtgatgattaccatggtctgttgtgcacacagcaccaatgaacccagcaacatgccatacgtgaaagagacagtggacagattgctcaaaggatatgacattcgcttgcggccggacttcggagggccccccgtcgacgttgggatgcggatcgatgtcgccagcatagacatggtctccgaagtgaatatggattatacactcaccatgtatttccagcagtcttggaaagacaaaaggctttcttattctggaatcccactgaacctcaccctagacaatagggtagctgaccaactctgggtaccagacacctactttctgaatgacaagaaatcatttgtgcatggggtcacagtgaaaaatcgaatgattcgactgcatcctgatggaacagttctctatggactccgaatcacaaccacagctgcatgtatgatggatcttcgaagatatccactggatgagcagaactgcaccctggagatcgaaagttatggctataccactgatgacattgaattttactggaatggaggagaaggggcagtcactggtgttaataaaatcgaacttcctcaattttcaattgttgactacaagatggtgtctaagaaggtggagttcacaacaggagcgtatccacgactgtcactaagttttcgtctaaagagaaacattggttacttcattttgcaaacctacatgccttctacactgattacaattctgtcctgggtgtctttttggatcaactatgatgcatctgcagccagagtcgcactaggaatcacgacggtgcttacaatgacaaccatcagcacccacctcagggagaccctgccaaagatcccttatgtcaaagcgattgatatttatctgatgggttgctttgtgtttgtgttcctggctctgctggagtatgcctttgtaaattacatcttctttgggaaaggccctcagaaaaagggagctagcaaacaagaccagagtgccaatgagaagaataaactggagatgaataaagtccaggtcgacgcccacggtaacattctcctcagcaccctggaaatccggaatgagacgagtggctcggaagtgctcacgagcgtgagcgaccccaaggccaccatgtactcctatgacagcgccagcatccagtaccgcaagcccctgagcagccgcgaggcctacgggcgcgccctggaccggcacggggtacccagcaaggggcgcatccgcaggcgtgcctcccagctcaaagtcaagatccccgacttgactgatgtgaattccatagacaagtggtcccgaatgtttttccccatcaccttttctctttttaatgtcgtctattggctttactatgtacactgaggtctgttctaatggttccatttagactactttcctcttctattgttttttaaccttacaggtccccaacagcgatactgctgtttctcgaggtaagagattcagccatccaattggttttaggtcttgcatatcagttttattactgcaccatgtttacttcaaaaagacaaaacaaaaaaaaaattatttttccagtctaccgtggtccaggttatcagctctttaagagctctattaattgccatgtttacaaacaaacacaaagagagaagttagacaggtagatctttagcagtcttttctagtttccctggatttcactgatttattttttagggaaaatgaaaagaggaccttgctgtccgcctgcactgcttcctggtaaactataacaaacttatgctgcc

SEQ ID NO: 862 - DNA, 2000 bp, Homo sapiens
gcgcccagaacgccccggccatgggcatccgaggcatgctgcgagccgcagtgatcctgctgctcatcaggacctggctcgcggagggcaactaccccagtcccatcccgaaattccacttcgagttctcctctgctgtgcccgaagtcgtcctgaacctcttcaactgcaaaaattgtgcaaatgaagctgtggttcaaaagattttggacagggtgctgtcaagatacgatgtccgcctgagaccgaattttggaggtgcccctgtgcctgtgagaatatctatttatgtcacgagcattgaacagatctcagaaatgaatatggactacacgatcacgatgttttttcatcagacttggaaagattcacgcttagcatactatgagaccaccctgaacttgaccctggactatcggatgcatgagaagttgtgggtccctgactgctactttctgaacagcaaggatgctttcgtgcatgatgtgactgtggagaatcgcgtgtttcagcttcacccagatggaacggtgcggtacggcatccgactcaccactacagcagcttgttccctggatctgcataaattccctatggacaagcaggcctgcaacctggtggtagagagctatggttacacggttgaagacatcatattattctgggatgacaatgggaacgccatccacatgactgaggagctgcatatccctcagttcactttcctgggaaggacgattactagcaaggaggtgtatttctacacaggttcctacatacgcctgatactgaagttccaggttcagagggaagttaacagctaccttgtgcaagtctactggcctactgtcctcaccactattacctcttggatatcgttttggatgaactatgattcctctgcagccagggtgacaattggcttaacttcaatgctcatcctgaccaccatcgactcacatctgcgggataagctccccaacatttcctgtatcaaggccattgatatctatatcctcgtgtgcttgttctttgtgttcctgtccttgctggagtatgtctacatcaactatcttttctacagtcgaggacctcggcgccagcctaggcgacacaggagaccccgaagagtcattgcccgctaccgctaccagcaagtggtggtaggaaacgtgcaggatggcctgattaacgtggaagacggagtcagctctctccccatcaccccagcgcaggcccccctggcaagcccggaaagcctcggttctttgacgtccacctccgagcaggcccagctggccacctcggaaagcctcagcccactcacttctctctcaggccaggcccccctggccactggagaaagcctgagcgatctcccctccacctcagagcaggcccggcacagctatggtgttcgctttaatggtttccaggctgatgacagtattattcctaccgaaatccgcaaccgtgtcgaagcccatggccatggtgttacccatgaccatgaagattccaatgagagcttgagctcggatgagcgccatggccatggccccagtgggaagcccatgcttcaccatggcgagaagggtgtgcaagaagcaggctgggaccttgatgacaacaatgacaagagcgactgccttgccattaaggagcaattcaagtgtgatactaacagtacctggggccttaatgatgatgagctcatggcccatggccaagagaaggacagtagctcagagtctgaggatagttgccccccaagccctgggtgctccttcactgaagggttctccttcgatctctttaatcctgactacgtcccaaaggtcgacaagtggtcccggttcctcttccctctggcctttgggttgttcaacattgtttactgggtataccatatgtattagtcccccagtgctccagaacagcgggagcactgtgctgtgctcctttcagtttcttttgggtttgtttttccctctttcctt

SEQ ID NO: 863 - DNA, 720 bp, Homo sapiens
accagggaggggagggaggactgcatgacgcgggatggggtggggcgaggcggggcactgcagcacacaacgcaggcaccgacttcagtgtgcatgttccttggacacctgcctcagtgtgcatgttcactgggcatcttcccttcgacccctttgcccacgtggtgaccgctggggagctgtgagagtgtgaggggcacgttccagccgtctggactctttctctcctactgagacgcagcctataggtccgcaggccagtcctcccaggaactgaaatagtgaaatatgagttggcgaggaagatcaacatataggcctaggccaagaagaagtttacagcctcctgagctgattggggctatgcttgaacccactgatgaagagcctaaagaagagaaaccacccactaaaagtcggaatcctacacctgatcagaagagagaagatgatcagggtgcagctgagattcaagtgcctgacctggaagccgatctccaggagctatgtcagacaaagactggggatggatgtgaaggtggtactgatgtcaaggggaagattctaccaaaagcagagcactttaaaatgccagaagcaggtgaagggaaatcacaggtttaaaggaagataagctgaaacaacacaaactgtttttatattagatattttactttaaaatatcttaataaagttttaagcttttctccaaaaaaaaaa

SEQ ID NO: 864 - DNA, 4549 bp, Homo sapiens
gaggccgcggcggaggggacggggctaggccgggtcgccgcctgacgcgacgcgtcctcacgggcgcctacgtcacggcgtcgaggcggaagatggtgcacctccgggccggcggttgctgagctgacccggacggcgagggagcgggagcccgagcccgaccactccggctgccgcggggtgcggcgcagccaccgccatgtcgctgctgcagtcggcgctcgacttcttggcgggtccaggctccctgggcggtgcttccggccgcgaccagagtgacttcgtggggcagacggtggaactgggcgagctgcggctgcgggtgcggcgggtcctggccgaaggagggtttgcatttgtgtatgaagctcaagatgtggggagtggcagagagtatgcattaaagaggctattatccaatgaagaggaaaagaacagagccatcattcaagaagtttgcttcatgaaaaagctttccggccacccgaacattgtccagttttgttctgcagcgtctataggaaaagaggagtcagacacggggcaggctgagttcctcttgctcacagagctctgtaaagggcagctggtggaatttttgaagaaaatggaatctcgaggccccctttcgtgcgacacggttctgaagatcttctaccagacgtgccgcgccgtgcagcacatgcaccggcagaagccgcccatcatccacagggacctcaaggttgagaacttgttgcttagtaaccaagggaccattaagctgtgtgactttggcagtgccacgaccatctcgcactaccctgactacagctggagcgcccagaggcgagccctggtggaggaagagatcacgaggaatacaacaccaatgtatagaacaccagaaatcatagacttgtattccaacttcccgatcggcgagaagcaggatatctgggccctgggctgcatcttgtacctgctgtgcttccggcagcacccttttgaggatggagcgaaacttcgaatagtcaatgggaagtactcgatccccccgcacgacacgcagtacacggtcttccacagcctcatccgcgccatgctgcaggtgaacccggaggagcggctgtccatcgccgaggtggtgcaccagctgcaggagatcgcggccgcccgcaacgtgaaccccaagtctcccatcacagagctcctggagcagaatggaggctacgggagcgccacactgtcccgagggccaccccctcccgtgggccccgctggcagtggctacagtggaggcctggcgctggcggagtacgaccagccgtatggcggcttcctggacattctgcggggtgggacagagcggctcttcaccaacctcaaggacacctcctccaaggtcatccagtccgtcgctaattatgcaaagggtgacctggacatatcttacatcacatccagaattgcagtgatgtcattcccagcagaaggtgtggagtcagcgctcaaaaacaacatcgaagatgtgcggttgttcctggactccaagcacccagggcactatgccgtctacaacctgtccccgaggacctaccggccctccaggttccacaaccgggtctccgagtgtggctgggcagcacggcgggccccacacctgcacaccctgtacaacatctgcaggaacatgcacgcctggctgcggcaggaccacaagaacgtctgcgtcgtgcactgcatggacgggagagccgcgtctgctgtggccgtctgctccttcctgtgcttctgccgtctcttcagcaccgcggaggccgccgtgtacatgttcagcatgaagcgctgcccaccaggcatctggccatcccacaaaaggtacatcgagtacatgtgtgacatggtggcggaggagcccatcacaccccacagcaagcccatcctggtgagggccgtggtcatgacacccgtgccgctgttcagcaagcagaggagcggctgcaggcccttctgcgaggtctacgtgggggacgagcgtgtggccagcacctcccaggagtacgacaagatgcgggactttaagattgaagatggcaaagcggtgattcccctgggcgtcacggtgcaaggagacgtgctcatcgtcatctatcacgcccggtccactctgggcggccggctgcaggccaagatggcatccatgaagatgttccagattcagttccacacggggtttgtgcctcggaacgccaccactgtgaaatttgccaagtatgacctggacgcgtgtgacattcaagaaaaatacccggatttatttcaagtgaacctggaagtggaggtggagcccagggacaggccgagccgggaagccccaccatgggagaactcgagcatgagggggctgaaccccaaaatcctgttttccagccgggaggagcagcaagacattctgtctaagtttgggaagccggagcttccccggcagcctggctccacggctcagtatgatgctggggcagggtccccggaagccgaacccacagactctgactcaccgccaagcagcagcgcggacgccagtcgcttcctgcacacgctggactggcaggaagagaaggaggcagagactggtgcagaaaatgcctcttccaaggagagcgagtctgccctgatggaggacagagacgagagtgaggtgtcagatgaagggggatccccgatctccagcgagggccaggaacccagggccgacccagagccccccggcctggcagcagggctggtgcagcaggacttggtttttgaggtggagacaccggctgtgctgccagagcctgtgccacaggaagacggggtcgacctcctgggcctgcactccgaggtgggcgcagggccagctgtacccccgcaggcctgcaaggccccctccagcaacaccgacctgctcagctgcctccttgggccccctgaggccgcctcccaggggcccccggaggatctgctcagcgaggacccgctgctcctggcaagcccggcccctcccctgagcgtgcagagcaccccaagaggagggccccctgccgctgctgacccctttggcccgcttctgccgtcttcaggcaacaactcccagccctgctccaatcctgatctcttcggcgaatttctcaattcggactctgtgaccgtcccaccatccttcccgtctgcccacagtgctccgcccccatcctgcagcgccgacttcctgcacctgggggatctgccaggagagcccagcaagatgacagcctcgtccagcaacccagacctgctgggaggatgggctgcctggaccgagactgcagcatcggcagtggcccccacgccagccacagaaggccccctcttctctcctggaggtcagccggccccttgtggctctcaggccagctggaccaagtctcagaacccggacccatttgctgaccttggcgacctcagctccggcctccaaggctcaccagctggattccctcctgggggcttcattcccaaaacggccaccacgcccaaaggcagcagctcctggcagacaagtcggccgccagcccagggcgcctcatggccccctcaggccaagccgccccccaaagcctgcacacagccaaggcctaactatgcctcgaacttcagtgtgatcggggcgcgggaggagcggggggtccgcgcacccagctttgctcaaaagccaaaagtctctgagaacgactttgaagatctgttgtccaatcaaggcttctcctccaggtctgacaagaaagggccaaagaccattgcagagatgaggaagcaggacctggctaaagacacggacccactcaagctgaagctcctggactggattgagggcaaggagcggaacatccgggccctgctgtccacgctgcacacagtgctgtgggacggggagagccgctggacgcccgtgggcatggccgacctggtggctccggagcaagtgaagaagcactatcgccgcgcggtgctggctgtgcaccccgacaaggctgcggggcagccgtacgagcagcacgccaagatgatcttcatggagctgaatgacgcctggtcggagtttgagaaccagggctcccggcccctcttctgaggccgcagtggtggtggctgcgcacacagctccacaggttgggagccgtcgtgggacctgggtccccaccgtgaggaccccgtgggcgacagcaggtgtggccagggtggggctccgagccccgggtcaccgcccgcccagcgttccaggcacatgaagagaaagcattccaaagcctctgattgttgtttcctttttctcctcccgaaggaacagctgattcatgctcctcccgcaattgtcacgtctgtgatttatttggtgtttcgggcgtggcctctggagccccggcacgtggtgggccacgctgctggcgctcatgggccctggtgtttgcaccgcactttgtaatcagtcccgtggttgtctgtacagaattaaactattttccgatgaaaaaaaaaaaaaaaaaaa

SEQ ID NO: 865 - DNA, 3121 bp, Homo sapiens
ccggaagaaaacggctcctgtcacagaagtctcgtgattgctctgggagctttgcttagacacttgaaactacaggagaaagaaggatctagcgaaatatggctacagagagccctgctacgcgtcgggtccaggtggcagaacatcctaggttactgaagctaaaggagatgtttaactccaagtttggatctattcccaagttttatgttcgagcaccaggaagagtcaacataataggagagcatatagattattgtggatattctgttcttcctatggctgtagaacaagatgtgctaatagctgtagaacctgtgaaaacgtacgctctccaactggccaatacaaatcccttgtatccggacttcagtactagtgctaataacatccagattgataaaaccaagcctttgtggcacaactatttcttatgtggacttaaaggaattcaggaacactttggtcttagtaacctgactggaatgaactgcctggtagatggaaatatcccaccaagttctggcctctccagctccagtgctttggtctgttgtgctggcttggtgacgctcacagtgctgggaaggaatctatccaaggtggaacttgcagaaatctgtgccaagagtgagcgttacattggcactgaaggaggaggcatggaccagtctatatcatttcttgcagaagaaggaactgccaagttgatagaatttagtcctctgagggcaaccgatgtaaaactcccaagtggagcagtgtttgtgattgccaacagttgtgtggagatgaataaggcagcaacttcccatttcaatatcagggtgatggagtgtcggctggctgcgaagctcctggctaaatacaaaagcttgcaatgggacaaagtactgaggctggaggaggtgcaggctaaactagggattagtctagaagaaatgctgttggtcacagaagatgcccttcatcctgaaccctataaccctgaggagatctgcaggtgtctgggaattagcctggaggaactccgaacccaaatcctgagtccaaacactcaagatgtgctcatcttcaaactctatcagcgggcaaagcatgtgtacagcgaggctgcgcgagtgctccagtttaagaagatatgtgaagaagcacctgaaaacatggtccagctgctgggagagttgatgaaccagagccacatgagctgccgggacatgtatgagtgcagctgccccgagctggatcagctggtggacatctgtcggaagtttggggctcaagggtcacgacttactggagcaggatggggaggctgcacagtatcaatggtacctgcggacaagctgcccagctttctagcaaatgtgcacaaagcttattaccagaggagtgatggaagcttagcaccggagaagcaaagtttgtttgctaccaaacctggaggtggggctttggttttgcttgaggcctgaaaaaatgtaaaaagtctgagagaaactacttagggcacttaggaattggcaggactttctgtgccacagtaaattaatcttccttctgttttgtattatgatgaacggttgctattatatcaagatatattttcaaagaaatggttgaaagctctctatgcttcataatgattctttttccatcttaaaatatggttttactattaagagccaagatcatgcttggacagatcttttaagaataacttactgagatttattgatttgaagattttaaagatgaatggtaaaacacactcttaatactgattacatggattggacttgaattaaatatattgttacaattaaactgataccactgaattgtatgcattattcttgaatagagttcatttctggtttctcttagtattcttcttcctcaaagttgtagttgtctgttgatgatggtgatgatgatgatgatgacgatagtgatgccacacattctctctcaatttcagcttcggaacgctatgaaaataatacatgattaaagtttcacagatcttcttggacattgtataattgaatttgaatgtgagatttctccagttatcaagagactaaggatttttttttttttttgacaaaaggaggatacaggaagaaaattcagactcatttgaatatttgtaaaccatgtaatatataaataaccactttcaattcttttggccctgagctatctccattacttaatagaaaaacttagataaaaaacactttaagactcttctattcacattgaaataaagaattatctagatgataattcagataattcagtttgttcatagaattactttcttatcactctttttctactactttttctcaaatacctctctaatccaagaggcacttccaagaaattccacacattccttatatcccttttttgcttgtctagcaaagcttgtttgtatatatgcaccccattgtaaagcaggtatgcaggtatgtgggtgaaagtgactatgaaaagacttaatgaattctgggatttgtaatggtattgatgggtatctctgtatgtatatcaagagtgggcagaaatgtttggctggtgatggcaaatgactggctttctcttgtggatggactataggaagcactttctgaattatgtaatgatttggaccaaaaagtattttgctgaaatactcaggtaattgagatagcaatggttttatggcatgaattatccaaaaaaatatcagaattacttattattctgtgatttcattagctcattaatgtttaactcacagattgggcatcaccatctagaatttcagtttaagggaggcctgcgcaaagctagttttatttcttaaaggataacagtcatacatagaatactaggaaagccaatattctatttaaaaataaacttctgatgcattttcattcttagcagaaaggtaaatgcttgagaaagcttgagtcaaatttgttaaaagaattttgagttctataaatccaaaaatctgaaacctgaatttatttaaatttataatcctttattttttaataccgtgccattttccacaaaggatttgtggttggtatataattctttaaagatacctggatcagtg

SEQ ID NO: 866 - DNA, 3208 bp, Homo sapiens
ggttggtgccttagcaactaaagctggcaactgggacatcgtccggtgctgcaggtctcagccgaagggcgtcggaaactgcgctcgcatcgagcagtttccagcctcctgggtaaaggagcagtctcctcccttgcttgggactctggacgcatctcattccggtgaaagtaagggacagcttaggaccagaagcctttcgcggagaaaaggctgacatgcccgtcctatatgacaggttactgaagctaaaggagatgtttaactccaagtttggatctattcccaagttttatgttcgagcaccaggaagagtcaacataataggagagcatatagattattgtggatattctgttcttcctatggctgtagaacaagatgtgctaatagctgtagaacctgtgaaaacgtacgctctccaactggccaatacaaatcccttgtatccggacttcagtactagtgctaataacatccagattgataaaaccaagcctttgtggcacaactatttcttatgtggacttaaaggaattcaggaacactttggtcttagtaacctgactggaatgaactgcctggtagatggaaatatcccaccaagttctggcctctccagctccagtgctttggtctgttgtgctggcttggtgacgctcacagtgctgggaaggaatctatccaaggtggaacttgcagaaatctgtgccaagagtgagcgttacattggcactgaaggaggaggcatggaccagtctatatcatttcttgcagaagaaggaactgccaagttgatagaatttagtcctctgagggcaaccgatgtaaaactcccaagtggagcagtgtttgtgattgccaacagttgtgtggagatgaataaggcagcaacttcccatttcaatatcagggtgatggagtgtcggctggctgcgaagctcctggctaaatacaaaagcttgcaatgggacaaagtactgaggctggaggaggtgcaggctaaactagggattagtctagaagaaatgctgttggtcacagaagatgcccttcatcctgaaccctataaccctgaggagatctgcaggtgtctgggaattagcctggaggaactccgaacccaaatcctgagtccaaacactcaagatgtgctcatcttcaaactctatcagcgggcaaagcatgtgtacagcgaggctgcgcgagtgctccagtttaagaagatatgtgaagaagcacctgaaaacatggtccagctgctgggagagttgatgaaccagagccacatgagctgccgggacatgtatgagtgcagctgccccgagctggatcagctggtggacatctgtcggaagtttggggctcaagggtcacgacttactggagcaggatggggaggctgcacagtatcaatggtacctgcggacaagctgcccagctttctagcaaatgtgcacaaagcttattaccagaggagtgatggaagcttagcaccggagaagcaaagtttgtttgctaccaaacctggaggtggggctttggttttgcttgaggcctgaaaaaatgtaaaaagtctgagagaaactacttagggcacttaggaattggcaggactttctgtgccacagtaaattaatcttccttctgttttgtattatgatgaacggttgctattatatcaagatatattttcaaagaaatggttgaaagctctctatgcttcataatgattctttttccatcttaaaatatggttttactattaagagccaagatcatgcttggacagatcttttaagaataacttactgagatttattgatttgaagattttaaagatgaatggtaaaacacactcttaatactgattacatggattggacttgaattaaatatattgttacaattaaactgataccactgaattgtatgcattattcttgaatagagttcatttctggtttctcttagtattcttcttcctcaaagttgtagttgtctgttgatgatggtgatgatgatgatgatgacgatagtgatgccacacattctctctcaatttcagcttcggaacgctatgaaaataatacatgattaaagtttcacagatcttcttggacattgtataattgaatttgaatgtgagatttctccagttatcaagagactaaggatttttttttttttttgacaaaaggaggatacaggaagaaaattcagactcatttgaatatttgtaaaccatgtaatatataaataaccactttcaattcttttggccctgagctatctccattacttaatagaaaaacttagataaaaaacactttaagactcttctattcacattgaaataaagaattatctagatgataattcagataattcagtttgttcatagaattactttcttatcactctttttctactactttttctcaaatacctctctaatccaagaggcacttccaagaaattccacacattccttatatcccttttttgcttgtctagcaaagcttgtttgtatatatgcaccccattgtaaagcaggtatgcaggtatgtgggtgaaagtgactatgaaaagacttaatgaattctgggatttgtaatggtattgatgggtatctctgtatgtatatcaagagtgggcagaaatgtttggctggtgatggcaaatgactggctttctcttgtggatggactataggaagcactttctgaattatgtaatgatttggaccaaaaagtattttgctgaaatactcaggtaattgagatagcaatggttttatggcatgaattatccaaaaaaatatcagaattacttattattctgtgatttcattagctcattaatgtttaactcacagattgggcatcaccatctagaatttcagtttaagggaggcctgcgcaaagctagttttatttcttaaaggataacagtcatacatagaatactaggaaagccaatattctatttaaaaataaacttctgatgcattttcattcttagcagaaaggtaaatgcttgagaaagcttgagtcaaatttgttaaaagaattttgagttctataaatccaaaaatctgaaacctgaatttatttaaatttataatcctttattttttaataccgtgccattttccacaaaggatttgtggttggtatataattctttaaagatacctggatcagtg

SEQ ID NO: 867 - DNA, 1932 bp, Homo sapiens
cctctagcttagcgagcgctggagtttgaagagcgggcagtggctgcacacgccaaactttccctatggcttcggtgaccagggccgtgtttggagagctgccctcgggaggagggacagtggagaagttccagctgcagtcagacctcttgagagtggacatcatctcctggggctgcacgatcacagccctagaggtcaaagacaggcaggggagagcctcggacgtggtgcttggcttcgccgagttggaaggatacctccaaaagcagccatactttggagcagttattgggagggtggccaaccgaatcgccaaaggaaccttcaaggtggatgggaaggagtatcacctggccattaacaaggaacccaacagtctgcatggaggagtcagagggtttgataaagtgctctggacccctcgggtgctgtcaaatggcgtccagttctcgcgcatcagtccagatggtgaagaaggctaccccggagagttaaaagtctgggtgacatacaccctggatggcggagagctcatagtcaactacagagcacaagccagtcaggccacaccagtcaacctgaccaaccattcttacttcaacctggcaggccaggcttccccaaatataaatgaccatgaagtcaccatagaagcggatacttatttgcctgtggatgaaaccctgattcctacaggagaagttgccccagtgcaaggcactgcattcgacctgagaaagccagtggagcttggaaaacacctgcaggacttccatctcaatggttttgaccacaatttctgtctgaagggatctaaagaaaagcatttttgtgcaagggtgcatcatgctgcaagcgggcgggtactagaagtatacaccacccagcccggggtccagttttacacgggcaacttcctggatggcacattaaagggcaagaatggagctgtctatcccaagcactccggtttctgcctggagactcagaactggcctgatgcagtcaatcagccccgcttccctcctgtgctgctgaggcctggtgaggagtatgaccacaccacctggttcaagttttctgtggcttaaggaagtgtgaagatatgatccagtccagggctaggctcagccacctgtctcctgtccagaaaaaaggtgaagattaagaagctttcagaatgattctatggattaaaatcatacaaatggtggctgttctgagaatcagtctgggtattgatttccttttccagtgactggctccaggccatgtctaatgaccagctcgattccctgtgcagttcagagagcaagtgaacccaaccaacaatgtcgtcatctaagccctgaccctagccagggactcccatgctgctgttggctccatctctccacactgcctctttcttttcaactttttgcccttcctttctttaaagctattctcacattgcttttatttcctcctccttcacctccaaccactgtcagcagcactctggagttttcaaatgtcacattagcctcaccctgcatgctaggagatggacctgtctctatacagcagtagatgattgataagtgaggaaactgaggcttacagaggttgaagaccaacaagctaataaataaaaagttgaggccgggcacggtggctcacgcctgtaatcccagcactttggaaggccgaggcaggcggatcacgaggtcaggagatcgagaccatcctggctaacacggtgaaaccccgtctctacataaaaaattagctgggtgtggtagcacgcacccgtagttccagctacttgggaggctgaagcaggagaatcgcttgaacctgggaggtggaggttgcagtgagccgagatcatgccactgcactgggcaacagagcaaaactcgatctcaaaaaaaaaaaaaaaaaaaa

SEQ ID NO: 868 - DNA, 5674 bp, Homo sapiens
gggagaagtgaccaggcggcggcggctctgctgaggtgacaacgtgctagcagccctcgctcgctctgggcgcctcctcggcctcagcgtccgctctggccgcgctcgaggagcccttcagcccgccgctgcgctatgaaggcccctctctggggctggccgaggctggagccggctccctctgctcgcgggcaagtgtgaagagagaggcgcgggcgggagccggggctgcgcgcggcgctcgcgggccggcgcgggttccaggtgagcgcggactcggcgagccccgcactcggcgcggccggccggcgcctgctgggcttgatctgaggctgaatcccgtgtgtggaccgccgttccctcttcgcgggatcgttggccaggatagcagatgcatttttgtagaagcattttgaggatgaatgtttgcaaatcattttgaaattgccaagtgccacatacatggaatgtatcctgctttcatcttggagttcacctgtgtggcttggatttatcacagtagcatttgtcttcaatctgtgtgttaactagaaatcaaggaaagacatgaggagatttgtctactgcaaggtggttctagccacttcgctgatgtgggttcttgttgatgtcttcttactgctgtacttcagtgaatgtaacaaatgtgatgacaagaaggagagatctctgctgcctgcattgagggctgttatttcaagaaaccaagaagggccaggagaaatgggaaaagctgtgttgattcctaaagatgaccaggagaaaatgaaagagctgtttaaaatcaatcagtttaaccttatggccagtgatttgattgcccttaatagaagtctgccagatgtaagattagaaggatgtaagacaaaagtctaccctgatgaacttccaaacacaagtgtagtcattgtgtttcataatgaagcttggagcactctccttagaactgtttacagtgtgataaatcgttccccacactatctactctcagaggtcatcttggtagatgatgccagtgaaagagattttctcaagttgacattagagaattacgtgaaaaatttagaagtgccagtaaaaattattaggatggaagaacgctctgggttaatacgtgcccgtcttcgaggagcagctgcttcaaaagggcaggtcataacttttcttgatgcacactgtgaatgcacgttaggatggctggagcctttgctggcaagaataaaggaagacaggaaaacggttgtctgccctatcattgatgtgattagtgatgatacttttgaatatatggctgggtcagacatgacttatgggggttttaactggaaactgaatttccgctggtatcctgttccccaaagagaaatggacaggaggaaaggagacagaacattacctgtcaggacccctactatggctggtggcctattttctattgacagaaactactttgaagagataggaacttacgatgcaggaatggatatctggggtggagagaatcttgaaatgtcttttaggatttggcaatgtggaggctccttggagattgttacttgctcccatgttggtcatgtttttcggaaggcaactccatacacttttcctggtggcactggtcatgtcatcaacaagaacaacaggagactggcagaagtttggatggatgaatttaaagatttcttctacatcatatccccaggtgttgtcaaagtggattatggagatgtgtcagtcagaaaaacactaagagaaaatctgaagtgtaagcccttttcttggtacctagaaaacatctatccggactcccagatcccaagacgttattactcacttggtgagataagaaatgttgaaaccaatcagtgtttagacaacatgggccgcaaggaaaatgaaaaagtgggtatattcaactgtcatggtatgggaggaaatcaggtattttcttacactgctgacaaagaaatccgaaccgatgacttgtgcttggatgtttctagactcaatggacctgtaatcatgttaaaatgccaccatatgagaggaaatcagttatgggaatatgatgctgagagactcacgttgcgacatgttaacagtaaccaatgtctcgatgaaccttctgaagaagacaaaatggtgcctacaatgcaggactgtagtggaagcagatcccaacagtggctgctaaggaacatgaccttgggcacatgaagatcatgtcctccaagccatgaaagtgtctacgcttttgtttttccattatttcaattgggggaaaatattaactttgctgaattgaaagttttaaaaatccttttagtattctaaaacacaattgtttctaattcgtttctagaaatgtttgcttatttccctactaaaatttgtatctgatcaaagcacataagaatataaataatagcaaactactattaaacaacagaacaacttgtaaaacaaattgtgtttgctttaagaaaaatctttattgcactcatgtcatagggttaattggaggttattttatttttggttgtcatggtgattgaaagagataatgtaaatgccttataaaatcttcattatgaaatattatcagttgctttataaactcactctttttatggatccttcatggaaacatgtttgatttctgtgtctacaacagggccacatattaaattacttctgaatggtgaattcatcttacaaaatgttccaagttttggacaaggaaaaacattacattggatattgaattcatggagcctttacagaagcatcacatttaaaccaatgtgaattcaaaaaagagaaggaaactttttaaattcaatttagagtacataaaaaaagaaatccgcgaagcattgaggggaacaagatgagtctaatccgcagcacttcgatcactgtgagagaactcaaagtgggttgcaatcattcctaacacaggctgaaactaaacaatcttgctcctagagtttatgttggatactcaattcttaaccaaaatcttggtctccacaaactctaccatcccttttctcttcactctatagacagtggcatgccattgatgctgtacagaattgcaggtgaaagggagaattttagacttaatttttaactctattgcacttaaagattttagttaggttaccactgtcattttcattttctatgttaaagaatacctttcagtgctgtgctccagtatctaaaaattttatcaccaggggaataaactcaatacacattcattaaacttttgttgtaattaaactgctatatattgtttgccatatattatggcccaaggaatatagttataatcaggctacattcacattttcttttctcatcttaaaaccctttatgttcaaaatacattagcagaggccatgaaagtgaaaaaaaatcagatttttgctagtaagtttttatatttgacatcattttaaatgctcaaagagttgccctatatatgcatgttatccattataaatgcactcagcagctaagagaaatttgagaggaaaagtggaagaagtgttttctggagcagaagattccacttctttggtcctcatctttacttaaaaagctcttatagaaaggattaatcattttgactgcatacaaactatgtctctgacatgcacatacactgctttataatgaaaatgaggacactttctgatggtcagtaaaatcttaaatgatttttgccactggtattccttcctcttttgactttttattggtacaactgtagggaagaatctacaacctggagcatttcaggtttgctctttaaatatagacacccctcaccatgagctctctgtgaatccgtgaatttcctaaaattgtaagcaaaatgttgaatatcagggcatttttttttctgaggtgggagtatgtcactcacagcaaacttggaaagaaggctatgactcccaagaggcagtgaaccattgccttaaattaatagcagcctctcaagtccattgaggcctcatgtaaaattcccatttttcatctttacactccttttctcccctcatttcctcttctccttactaaggtaaaaagaccctgcacagcattattacttaagttgaaaaagcttcaactctcaaggactcatgtataccatatgttccacttattgctttgttagtcaaaatgcatgttatgtagaaaatggtcaatggcaaatttttataaatacagctaccccatcaaagctgaacttgaaacgttttagcagaattttaaatatgtgaaagttcattgtggtcatggtgagaaaactaaaactacatgagtttcatgttagaaaagaatttttaaacaatcttcagatggcttgaacacgtgccattatagtatctaacaaaaagtggcataaaatattacaaaacatccaacactagaaagcaatgactaacatttaatttgtttacaaaaatgtttattgtcttcagtacaaaaagttaaaaccatgattggattcataatgcacttgtcttatcccttatttatggagctagactgacatatttcaaaccaatctcttctgtggtcttctccatctcagttaatgcaacttcaaccttccagatgctcaggtcaaaaactgaaagttgcttttgactcctctatttctgtttcaactctcgtctaatccaacagcaaatccccttgatgctacctttgaaatataactagaaaagaatgacttgccaccatatccactaggtgtcactacctctaacctttttaatcgcaatatgcttattatttagttccctaatttcccagtccttgtcttgaacaatcttttctcagtacaacagccatagtgattctgttaaccatgaatttgattgtgtcacttccctgctcacaatcttccaatgacttctccctccggtggccttcaaggtcctttatgagtgttacccctctacacgtccacaccactcaccacacatacatacacatgcacacacacacacatgcaattctacctttttctaacaccatctcttatctctcattattctgcctcttacttaccctattatggctcccaagaaagttcctgctttagtgttttgttccctctgccccagagagctccccttagtgatctcagttcaaatattatcttatcagtaagacaaacccttctcccatctgccttccctatcccctgtacctgacaatctatgagtttgcttctttatttctgtctatacttccccctccccagccccaaacatgcccatcacatgccctagaaggtaagtcccatgaaggcaggggctttgtcagttttgttcatttggtatttctggcatatatattctctaaatatttcttgaattaatgaactgaaaaatgtgtgttaaagttgctaagtgtaactgtatcatactttttttgtattttaaattttaaaataaaggctaatatatttagacaggatttccaaaaactttgtcttcaaattttaattttcttcctaatattcttcacattaaactatggactctaattttctggataaaatatcctgccttatggaaatgaaatatgaaattttattaaaatgctgctatattaaaaaaaaaaa

SEQ ID NO: 869 - DNA, 3131 bp, Homo sapiens
agtgtttatcagaacttagccagggccagccaagcaggcacagatgctctgctatgaaatgccacgcaggcagagactgacaagcggtaggaactgagctttccccttggactgctgcttcctgctgtgttcaggggagggggtcactttctggcaactctgctgctgctgctgctgctgctgctacttcagcttcctctccactcaaggtaagcaggctaagggagggcaggctgctagggaaagctttgtaccatgaacaggatccgaaagtttttccgaggaagtgggcgagtcttggcatttatctttgtagcttctgtcatctggctcctctttgacatggcagctctccgcctctcattcagtgagatcaacactcgggtcatcaaggaagacattgtgaggagggagcggataggattcagagttcagccagaccaaggaaaaattttttacagcagcataaaagagatgaaacctcccctaaggggacatgggaaaggggcatggggcaaagagaatgttagaaaaactgaggagagtgtgctcaaggttgaggtggacttggaccaaacccagagggaaagaaaaatgcagaatgccctgggaaggggcaaggttgtgccgttgtggcatcctgcacatctgcagaccctccctgtgactcctaacaagcagaagacagacgggagaggcaccaaacctgaagcctcctctcaccaggggacaccaaagcaaacgacagctcagggggctccaaagacctcattcatagcagcaaaaggaactcaggtagtcaaaatatcagtacacatgggacgtgtcagtttaaaacaggagccccggaagagtcatagtcccagcagtgacacatcaaaactagcagctgaaagggacttgaatgtgaccatcagtcttagtactgatagaccaaagcagcgatcacaggcagtagcaaacgagagggcacaccctgccagcacagcagtgccgaagtctggggaagccatggccttaaacaaaactaagactcagagcaaagaagtcaatgcaaataaacacaaagccaatacgagtcttccttttcctaagttcactgtcaattcaaatcgcttaaggaagcaatctattaatgagacacctttgggaagtttgtcaaaggatgatggagctagaggggctcatgggaagaaactcaatttctctgaaagccatcttgtgattataaccaaagaggaagagcaaaaggcagaccccaaagaggtctctaattctaaaaccaaaacaatatttcctaaagtattgggtaaaagccaaagtaaacacatttccaggaatagaagtgagatgtcttcctcttcacttgctccacatagagtgccactgtcccaaactaaccatgctttaactggagggctagagccagcaaaaatcaacataactgccaaagccccctctacagaatacaaccagagtcatataaaagcccttttacctgaagacagtggaacgcaccaggtgttaagaattgatgtgacactttctccaagggaccccaaagctccagggcagtttgggcgtcctgtagttgtcccccatggaaaggagaaggaggcagaaagaagatggaaagaaggaaacttcaatgtctaccttagcgatttgatcccagtggatagagccattgaagacaccagacctgctggatgtgcagagcagctagttcacaataacctcccaaccaccagtgtcatcatgtgctttgtggatgaagtgtggtccactctcctgagatctgttcacagtgtcatcaatcgctctcctccacacctcatcaaggagattctgctggtagatgacttcagcaccaaagactatctaaaagataatttggataaatacatgtcccagtttccaaaagttcggattcttcgcctcaaagagagacatggcttaataagggccaggctggcaggagcacagaatgcaacaggtgatgtgttgacatttttagattctcatgtggaatgtaacgttggttggttggaacctcttctggaaagagtttatttaagtagaaagaaagtggcctgtccagtaatcgaagtcatcaatgataaggatatgagttacatgacagtggataactttcaaagaggcatctttgtgtggcccatgaactttggttggagaacaattcctccagatgtcattgcaaaaaacagaattaaagaaactgatacaataaggtgccctgtcatggctggtggattgttttctattgacaaaagttacttttttgaacttggaacatacgaccctggccttgatgtttggggtggggaaaatatggagctctcattcaaggtgtggatgtgtggtggtgaaattgagatcattccctgctcccgagtgggccatatattcagaaatgacaatccatattccttccccaaagaccggatgaagacagtggagcggaacttggtgcgggttgccgaggtctggctggatgagtataaggagctgttctatggccacggagaccacctcatcgaccaagggctagatgttggcaacctcacccagcaaagggagctgcgaaagaaactgaagtgcaaaagtttcaaatggtacttggagaatgtctttcctgacttaagggctcccattgtgagagctagtggtgtgcttattaatgtggctttgggtaaatgcatttccattgaaaacactacagtcattctggaagactgcgatgggagcaaagagcttcaacaatttaattacacctggttaagacttattaaatgtggagaatggtgtatagcccccatccctgataaaggagccgtaaggctgcacccttgtgataacagaaacaaagggctaaaatggctgcataaatcaacatcagtctttcatccagaactggtgaatcacattgtttttgaaaacaatcagcaattattatgcttggaaggaaatttttctcaaaagatcctgaaagtagctgcctgtgacccagtgaagccatatcaaaagtggaaatttgaaaaatattatgaagcctgaagtgtaactgatgtttttatatagtaaacccattaaatactgtgaaaataaca

SEQ ID NO: 870 - DNA, 2162 bp, Homo sapiens
cttccggcgagcgggcaagcgggaaccaggtggccacccggtgtcggtttcattttcctttggaatttctgctttacagacagaacaatggcagcccgagtacttataattggcagtggaggaagggaacatacgctggcctggaaacttgcacagtctcatcatgtcaaacaagtgttggttgccccaggaaacgcaggcactgcctgctctgaaaagatttcaaataccgccatctcaatcagtgaccacactgcccttgctcaattctgcaaagagaagaaaattgaatttgtagttgttggaccagaagcacctctggctgctgggattgttgggaacctgaggtctgcaggagtgcaatgctttggcccaacagcagaagcggctcagttagagtccagcaaaaggtttgccaaagagtttatggacagacatggaatcccaaccgcacaatggaaggctttcaccaaacctgaagaagcctgcagcttcattttgagtgcagacttccctgctttggttgtgaaggccagtggtcttgcagctggaaaaggggtgattgttgcaaagagcaaagaagaggcctgcaaagctgtacaagagatcatgcaggagaaagcctttggggcagctggagaaacaattgtcattgaagaacttcttgacggagaagaggtgtcgtgtctgtgtttcactgatggcaagactgtggcccccatgcccccagcacaggaccataagcgattactggagggagatggtggccctaacacagggggaatgggagcctattgtccagcccctcaggtttctaatgatctattactaaaaattaaagatactgttcttcagaggacagtggatggcatgcagcaagagggtactccatatacaggtattctctatgctggaataatgctgaccaagaatggcccaaaagttctagagtttaattgccgttttggtgatccagagtgccaagtaatcctcccacttcttaaaagtgatctttatgaagtgattcagtccaccttagatggactgctctgcacatctctgcctgtttggctagaaaaccacaccgccctaactgttgtcatggcaagtaaaggttatcctggagactacaccaagggtgtagagataacagggtttcctgaggctcaagctctaggactggaggtgttccatgcaggcactgccctcaaaaatggcaaagtagtaactcatgggggtagagttcttgcagtcacagccatccgggaaaatctcatatcagcccttgaggaagccaagaaaggactagctgctataaagtttgagggagcaatttataggaaagacgtcggctttcgtgccatagctttcctccagcagcccaggtaaaactctaagcaagttagctgtagtgccatttcagaaactggcctaaatggctatgtagaacatttcattaaccctataagtcattcagtattcttttctctctgtgggagtgatacagtcttggtttgtattttgtttgaatcaaaactggttatagcaatactcaaattaaatggaaaaaacttcatgatagcgtaagtttggaaagtttagcaaaatcacagtggtactgatttttatttgttttctattttttttaatttatatttttaatttttttaacagggtcttcctctctcgcccaagttctcatgcctcagcctcccaaatagctgggactacaggcacaggccaccacacctggctaatttttttgtattttttgtggagatggggtttcaccatgttgccaaggccagtctgaaatcctgggctcaagtgatcctcctgctttggcctcccaaaatgctgggattataggcatgagccgctgcacttggcctgatactgatttttattccttgcgttatcacatagtgttgtatttgaaacatagttcatggttttatcaaagaactgaagatgagaatactggtcatctaactttgtaatttgatttgattatactgtaaagtttgacagtctcattttatcactgcgtttgtatctattactaaaatgtattttttgacctcttactgattcattgttggtatgtacaaactgttgacttgtaaaatcaataaagtcttagttggaaaaaaaaaaaaaaa

SEQ ID NO: 871 - DNA, 3300 bp, Homo sapiens
cttccggcgagcgggcaagcgggaaccaggtggccacccggtgtcggtttcattttcctttggaatttctgctttacagacagaacaatggcagcccgagtacttataattggcagtggaggaagggaacatacgctggcctggaaacttgcacagtctcatcatgtcaaacaagtgttggttgccccaggaaacgcaggcactgcctgctctgaaaagatttcaaataccgccatctcaatcagtgaccacactgcccttgctcaattctgcaaagagaagaaaattgaatttgtagttgttggaccagaagcacctctggctgctgggattgttgggaacctgaggtctgcaggagtgcaatgctttggcccaacagcagaagcggctcagttagagtccagcaaaaggtttgccaaagagtttatggacagacatggaatcccaaccgcacaatggaaggctttcaccaaacctgaagaagcctgcagcttcattttgagtgcagacttccctgctttggttgtgaaggccagtggtcttgcagctggaaaaggggtgattgttgcaaagagcaaagaagaggcctgcaaagctgtacaagagatcatgcaggagaaagcctttggggcagctggagaaacaattgtcattgaagaacttcttgacggagaagaggtgtcgtgtctgtgtttcactgatggcaagactgtggcccccatgcccccagcacaggaccataagcgattactggagggagatggtggccctaacacagggggaatgggagcctattgtccagcccctcaggtttctaatgatctattactaaaaattaaagatactgttcttcagaggacagtggatggcatgcagcaagagggtactccatatacaggtattctctatgctggaataatgctgaccaagaatggcccaaaagttctagagtttaattgccgttttggtgatccagagtgccaagtaatcctcccacttcttaaaagtgatctttatgaagtgattcagtccaccttagatggactgctctgcacatctctgcctgtttggctagaaaaccacaccgccctaactgttgtcatggcaagtaaaggttatcctggagactacaccaagggtgtagagataacagggtttcctgaggctcaagctctaggactggaggtgttccatgcaggcactgccctcaaaaatggcaaagtagtaactcatgggggtagagttcttgcagtcacagccatccgggaaaatctcatatcagcccttgaggaagccaagaaaggactagctgctataaagtttgagggagcaatttataggaaagacgtcggctttcgtgccatagctttcctccagcagcccaggagtttgacttacaaggaatctggagtagatatcgcagctggaaatatgctggtcaagaaaattcagcctttagcaaaagccacttccagatcaggctgtaaagttgatcttggaggttttgctggtctttttgatttaaaagcagctggtttcaaagatccccttctggcctctggaacagatggcgttggaactaaactaaagattgcccagctatgcaataaacatgataccattggtcaagatttggtagcaatgtgtgttaatgatattctggcacaaggagcagagcccctcttcttccttgattacttttcctgtggaaaacttgacctcagtgtaactgaagctgttgttgctggaattgctaaagcttgtggaaaagctggatgtgctctccttggaggtgaaacagcagaaatgcctgacatgtatccccctggagagtatgacctagctgggtttgccgttggtgccatggagcgagatcagaaactccctcacctggaaagaatcactgagggtgatgttgttgttggaatagcttcatctggtcttcatagcaatggatttagccttgtgaggaaaatcgtggcaaaatcttccctccagtactcctctccagcacctgatggttgtggtgaccagactttaggggacttacttctcacgcctaccagaatctacagccattcactgttacctgtcctacgttcaggacatgtcaaagcctttgcccatattactggtggaggattactagagaacatccccagagtcctccctgagaaacttggggtagatttagatgcccagacctggaggatccccagggtcttctcatggttgcagcaggaaggacacctctctgaggaagagatggccagaacatttaactgtggggttggcgctgtccttgtggtatcaaaggagcagacagagcagattctgagggatatccagcagcacaaggaagaagcctgggtgattggcagtgtggttgcacgagctgaaggttccccacgtgtgaaagtcaagaatctgattgaaagcatgcaaataaatgggtcagtgttgaagaatggctccctgacaaatcatttctcttttgaaaaaaaaaaggccagagtggctgtcttaatatctggaacaggatcgaacctgcaagcacttatagacagtactcgggaaccaaatagctctgcacaaattgatattgttatctccaacaaagccgcagtagctgggttagataaagcggaaagagctggtattcccactagagtaattaatcataaactgtataaaaatcgtgtagaatttgacagtgcaattgacctagtccttgaagagttctccatagacatagtctgtcttgcaggattcatgagaattctttctggcccctttgtccaaaagtggaatggaaaaatgctcaatatccacccatccttgctcccttcttttaagggttcaaatgcccatgagcaagccctggaaaccggagtcacagttactgggtgcactgtacactttgtagctgaagatgtggatgctggacagattattttgcaagaagctgttcccgtgaagaggggtgatactgtcgcaactctttctgaaagagtaaaattagcagaacataaaatatttcctgcagcccttcagctggtggccagtggaactgtacagcttggagaaaatggcaagatctgttgggttaaagaggaatgaagccttttaattcagaaatggggccagtttagaaagaattatttgctgtttgcatggtggttttttatcatggacttggcccaaaagaaaaactgctaaaagacaaaaaagacctcacccttacttcatctatttttttaataaatagagactcactaaaaaaaaaaaaaaaaaaaaaaa

SEQ ID NO: 872 - DNA, 8181 bp, Homo sapiens
agaaacattgcatctggaaagtccagaacaagttgttaatttcccagcaagcactggagcggatttggaaggaactatgcaatgtagtgggttctttgtgaaagaacagcaatgagcaaagccacaggaacctccgctggggtgcccagaacactggccctgggctagcgacttgcctcagccccatttcccggagaggctgccatgaagaggaagccggcggagtcttggtgctgagtctgagggcttcaggcaggacccaagactctcctctgaggtagcagcccccagagaaggttagctgttctctgatgaagcctggaatggtcccccctccgccgggagaagaaagccagacggtcatccttccacctggctggcagagctacctgtcgcctcagggccggcggtactatgtcaacacgaccaccaatgagaccacctgggaacgtcccagcagttctcctgggattccagccagccctggctctcacaggagctctctgcctccaacagtgaatggataccacgcatcagggaccccagcgcaccctccagagactgcccacatgagtgtccgaaaatccaccggtgattcccagaacctgggatcctcatcgccaagcaaaaagcagagcaaggaaaacaccatcacaataaactgtgtgacgttccctcacccagacacgatgccggaacagcagctgctgaaaccaaccgagtggagctactgcgactacttctgggctgataagaaggacccccaaggcaacggcaccgtggctgggtttgaactactgctccagaaacagctgaagggcaaacaaatgcagaaggaaatgtcagaattcatccgggaaaggataaagattgaagaagactatgcgaagaacttagctaagctctctcagaactccttggcttcacaggaggaaggctccttgggagaggcgtgggcccaggtgaagaagagcctggcggacgaagcagaagttcacctcaagttctctgccaagcttcacagcgaggtggagaagcccctgatgaacttccgtgagaacttcaagaaagacatgaagaagtgcgaccaccacattgccgaccttcgcaagcagctcgccagccgctatgcctcggtggagaaggcccggaaagccctcacagagcggcagagagacctggagatgaagacccagcagctggagatcaagctgagcaacaagacagaggaggacatcaagaaggcgcggagaaagtccacacaggctggagacgacctcatgcgctgtgtggatctctacaaccaggcccagtccaaatggtttgaagagatggtgaccaccacattggagctagagcggctggaggtggagagggtagagatgatccggcagcacctgtgccagtacacgcagctgcggcatgaaacagacatgttcaaccaaagcacagtcgagcccgtggatcagctgcttcgaaaagtggacccggccaaagacagggagctgtgggtcagagagcacaagacgggcaacatccgccctgtggacatggagatctagatgggcctgtgcagcttcggggggtcctgctggggaggggggctgggctcccaccatggggcccatgccgagtggatgccccccaccctctctcctgggccactgaggagaggggagagagctggtgattccagaagggtgacccggacagcctagctgggggctcccccatattcccaggcccagaagacagacccacagccctgcccttgtctctgaggctgaagaccccctgactcccatgctgtgcttgccgctctgaaacaaacagaggctggaactttgtggtccttgccgagttttgtaggggtcactgtcacatgcttgtgccctggaagccccaaggctcttcctccagctggctcccttgtctccagggctttggaggatcagggtagggagggctctgtctctaagccaggtgtcaggatcagaatcatgggtagaaggtgccattcagctcacagccgcacccagaatcctttgcagccctccttctttatttttttcccattgcattctgggagtccacatctggctttctcagccactgttcatcaccaggggttttaggaggaaggcttggctcctgtcttcccagacccaccatgcctggagaggtcaggatggaactacctcattcggcaaattagccccaaattgagcgctgaatcgtgtcccatgagatcaggcgccatctgtaaagtctcctctggaaatgccaatccatccttcccccagctgcttcctcggggaggcccctgcccccaccctgccagcccttcccagtctcattagaggaagctttccaaagttctcagttatcaagacctcatccagctcgtccaaaggcttcagggatggaaacaaaccagctcgtctcagaggccagcaagctggggcctgtccgccacggtgccctgtgcacctttgggctgccctggcccccactctcccgggccgcccaccacaggctcttaatggggccgggtcagtcctacatgtgagatgggttagggcaagtctttgccatcccccagatggctctgtcttcttgtgtatggcagggctgggactgctgtcccttgtacagttttctgtcactggtgggcactggacaggcatagcagactctcttgtggccacactaggttgtcgcctttcaggcagtgtcccgccacctttgcttcccgctccttctggacattccagagccctgcaccaaacccttacttggtgtctgcacctcctttccctctctccatcttccaatccctggaaaagtctggtctgagtgtgacttgggaagctttcagtgctgctgtttggcccagctcattactttctccctttctctaccacagcaaacacattctccaccatgtcagtctaaagagtctaaaggggccgggagaagcatgagcgaggggcagattctagtcgggagcccatgccctggaaatccatctttcttcatctttcccattgaccactttgggtttgacctgcacatctgcagtgagggcagaattcaacaagcacaactcactggtctttcagtcaacgtgctagaaaccgatgacttattaatctctaattttttggcgcctctttcattgaatgagaattgctttcgtatagttcacattagaaaaatgcctaatatactaaagtaaaccaaacgttgtcacttttctcttgttcttgaaacattgcaaccaaaaaggtcagcacaaaggccttcacctacgtgaagacctcctggtaggatctgtccatgggatggagaaccactctgtccagatctggggttgggtcatgacaccagctaccaattttagaatattatttcttggtttctttatgaaaaatgggtgctagtggtaattgctttgtggcttagtaaactactctgtggatgatttccaaacattcaaagccaatagccttgttattaacaagatattttgagtacaatatggctcattgacttttccattacatctgaggattccagagtcctctgttcatccctgggatagagtgagccctcttgcgtcttccagggtagctcaggttggcccagtttgggccagtccatttttggaggtcactctttcccccctcatcccctcacctccttctctttacccccttcacgtacttcctttctttcttccctctgttattcattcatcaagcaggttaaagccattgtgctaagatctaatctgaggacactataatggccctgtcgtcagggaagcccgtgatcgctcgttttcaggggtcttaccggtcagcaaccttggcattgatacataggcactctacagaatttaagttttcagaggtaagtctgttgttctgattaatctgcattcattcagcgaatgctcaagacaagccaggcatgctgagaagcggcgctctagttgtatgtaagatgggcattcctctgctctcctctattctccatgtcgactgagaagagtataataagaacattgtaccctctccacacttaaccctctgggattctttattataatataaaccaccgtcgtgaggcatttacctgttggatggaaggtagacagcaacaagattttaatcacctggtcaccagaccctcacggcccatatccaattcgaatttcagaaatttctctgtttgctttaaataactctttacaaataagggtcgggcacggtggctcacgcctgtaatcccagctctttgggaggccgaggtgggcagatcacgaggtcaggagatcgagaccatcctggctaacatggtgaaaccccgtctctgctaaaaatacaaaaaattagccagatgtggtggtgcacacctgtagtcccaactattcggcaggctgaggcagtagaatcgcttgaacctgggaggcggagattgcagtgaaccaagatcgggccactgcactccagcttgggtgacagagcaagactccatctcaaaaaaattataaataactctttgcaaataggaaagtgaagctcaagggtaaccagtgaggctatgaaattgccagtgaattaagaccagggctagagtcaacagtccagaacccctatccgtatgaacaggggcccgtttctggttgaaatcaaggttaggatgcaactgagaaaataaaagactgcactttggagaggcaagcacgctatccgggttgttgttttgttttatgtcttggtgcttaggtgaggacttagctgggtttattcaaagtgggcgggtctgggctattcttgagaatgtcccttccatttctgagaacaagtcagccccttctacctgcctccacccaggagactgatgcacaagatctgtttgtgaaagcctgatttaaaaagaaaaaaaaaattccttaagccaaatggtgttccaagttggttgctgtgacaacctccaggaagagccacttgttaccctctattctttctagtgctttcagtcagtggcaacacataggccccttggaccgtggggatggcggccctgagattctgtcagtgggaccaccctgggcctcctttctacctccactcagcaccctgttggccaaggagaatttctgcggtgggaggcagtgctctgctagtcaggattgataaacagctgggcacaccgaaacagtgtaccaacgaattcaccaaccaggggtttctttccctaccctttgtgaaaaccaatcaattactagatgagtggatggatgcagaaaaatctgggctgagccaaagtcccttttggaaatacaagccataacattcgaaggacatcagcgaccttggcttgtttaggtgattttacttccagctgcaggtagtcttgacaaggagtgtttaaacagaaggctcaagatgcattccttgtgtaggtcggagagagcacttctaatgttaagtggggtacagatcagctgcccccccacgtagcctggacatcgtcttatccccataatccttgccatccctacaaggcccatcgccaccaccttttcccaggtttattgaggtatgattgacatccagtaaaattcaccctttggaaatatacagctctgtgaattttgacaaatttagtgtcttgtgaccatcaccaagatcaacctgtttttaaccctccaaaaaattcccttctcctgccctctttccctggcaaccctgattgattatctgatcctataattttgccttttctagaatgtcatataaatggagtcacactgatgtcgccttttgagtctggcatctttccctcagcttaatgcttttgagtcattcatgatgtgtgcgtgtggtttgttccttctccttgccgggaagtatttcattgcatgggcgtactactctgcttctttatttttacactgagcctttcgccctggaagttcttggcccagggtcttcaacttgtttgcacgaccacttccagcttgctgcttccttcagttccccaggctcctcctccaaatgccagctgtgcccacaagctgttcttagggctcacactcgccttttggcgcgtggtgggtttttggtagtgcagaaagaatccagggatgggaggggaagggacggatgggtgctcaattgctgctcacgtctgctgcaacctgaagcttgcatctcagccagcagatctgctcccttctgggacccaggcttcagtgtcacacggtccttggctatgtattgggcgttggaggctttgaaaggcgagcagaagcagcatggacaagaaggctggggctggccctggggctcatcatgatgctttcctggatctgttgcttcatctgcaagctgagggtgtttgttctagatgagtgtctcaggccaccggcaactgcatgtacctcctccctttctcatttccaatgatgtaccctgtacacgtgttcatgctgtgtctggctctcatctgcacaatcgtgcatagaattgcctcaagtcctggtgagagagatgccgtggtacttttccatttagattcaaatggagctaaaattaagagttttatgagctgttaagaatgaggtagtttctcctaggaccccccaaagacagtgcaagtaatgaccgtttggatctcattcgtcgatctttgatagtatgttctggagtctactccccaggagccaggacaggcgtgaagatggagtccttgtcgcagctggagccttgcctagctggtgatcacacagcctggcctgtacctgcaccccactggatggtggtacatggtggcagggacaggaccacacccagttaaggccagaccaggctgagtgtgacccctgaggtaaacactccactaagctgtgtcttgttcatgccccctgctcagtgaaaggtgagtcccgagaccagttgggtacctctctatgcgaaccagagacatttctggatccaggccaggtgaagattagggccaggaagcctgagcccccggggcctcaaggtagggagccgaagaggctgccaggactctgctgggttgaaatttgccggggaggactcttgtctccccctcaggagtatttttgttgaggctttcctggaggtgaagaagcaattcccattgcagcaggttagagcgagaatcagacagagggcaaaaaccaattcgcttctccccacgttctaaatgctggggcatggctgtcaggagggcttcctgggaggtgtctctgggggtggggtgaggttggggcgatggcctttggagattgcgtgtggtgttcaggactgttccttggtgtttgagggaaactttagtgggattgcagtggaatgtaaggtcagggcacgtgggtgctctctcggggtggggtgactgggagacctagagggaaagcctgctatgcagggggagagcacaggactggccctgctctgcggcctcctttgtcccataacctgaagttaagtcacatcccctgtcgggacctccgtgcactcatctgtcaagtgggggcgcttcccttccagcatcacctgcagcagacgggctctcgggagtcgtgggttccaggcagctgtgtggacccagggacagacattcaaagggacgccagccatccttagtgacaggggccccaacttagcatcccttcccttccgttaggaaggagatgaccggaagcaaccccttcacagacacgagcacatcggcaaaccctatgaaagtggaattttctaacaaaataaacttgcttgtttgatctgttttctgtaacttttgctaaatactttatacatttttcatgttaaagagccgtgtctcccgccagcactcctcaccccggtatgaatgtgtttcctccacattgtatatccttccaccctctggctgcctagatcagtaaataaaattgatgtaatataatttataagtaacactgttgaaaccctgatcccagtggaggctgtaacccacctgcccccgcaccacccccctgacccctgttaccgcatttgtgtgtattaatgctgaagaattaaatgtttaaagagtttaaattttgaaggcgtttgctatatacagttgtcctgcattattataaagagttttcaggaagtt

SEQ ID NO: 873 - DNA, 8211 bp, Homo sapiens
gtcccccgcctgcctgaggacccccgcgcaccccagagacggcgcgcgcccagagcgcgggagcccggagcgccgggcgcctgggaccccgcggagccgctgcccagcccgtggggctcggcgggaatgcaggctgcgctgtgaacccgggcgccaaggccatgtccggcgctcgctgccggaccctgtaccccttctccggggagcggcacggccaggggctgcgcttcgccgcgggcgagctgatcacgctgctgcaggtcccggacggcggctggtgggaaggcgagaaggaggacgggctccgtggctggttcccggcgagctacgtgcagttgctggagaagcctggaatggtcccccctccgccgggagaagaaagccagacggtcatccttccacctggctggcagagctacctgtcgcctcagggccggcggtactatgtcaacacgaccaccaatgagaccacctgggaacgtcccagcagttctcctgggattccagccagccctggctctcacaggagctctctgcctccaacagtgaatggataccacgcatcagggaccccagcgcaccctccagagactgcccacatgagtgtccgaaaatccaccggtgattcccagaacctgggatcctcatcgccaagcaaaaagcagagcaaggaaaacaccatcacaataaactgtgtgacgttccctcacccagacacgatgccggaacagcagctgctgaaaccaaccgagtggagctactgcgactacttctgggctgataagaaggacccccaaggcaacggcaccgtggctgggtttgaactactgctccagaaacagctgaagggcaaacaaatgcagaaggaaatgtcagaattcatccgggaaaggataaagattgaagaagactatgcgaagaacttagctaagctctctcagaactccttggcttcacaggaggaaggctccttgggagaggcgtgggcccaggtgaagaagagcctggcggacgaagcagaagttcacctcaagttctctgccaagcttcacagcgaggtggagaagcccctgatgaacttccgtgagaacttcaagaaagacatgaagaagtgcgaccaccacattgccgaccttcgcaagcagctcgccagccgctatgcctcggtggagaaggcccggaaagccctcacagagcggcagagagacctggagatgaagacccagcagctggagatcaagctgagcaacaagacagaggaggacatcaagaaggcgcggagaaagtccacacaggctggagacgacctcatgcgctgtgtggatctctacaaccaggcccagtccaaatggtttgaagagatggtgaccaccacattggagctagagcggctggaggtggagagggtagagatgatccggcagcacctgtgccagtacacgcagctgcggcatgaaacagacatgttcaaccaaagcacagtcgagcccgtggatcagctgcttcgaaaagtggacccggccaaagacagggagctgtgggtcagagagcacaagacgggcaacatccgccctgtggacatggagatctagatgggcctgtgcagcttcggggggtcctgctggggaggggggctgggctcccaccatggggcccatgccgagtggatgccccccaccctctctcctgggccactgaggagaggggagagagctggtgattccagaagggtgacccggacagcctagctgggggctcccccatattcccaggcccagaagacagacccacagccctgcccttgtctctgaggctgaagaccccctgactcccatgctgtgcttgccgctctgaaacaaacagaggctggaactttgtggtccttgccgagttttgtaggggtcactgtcacatgcttgtgccctggaagccccaaggctcttcctccagctggctcccttgtctccagggctttggaggatcagggtagggagggctctgtctctaagccaggtgtcaggatcagaatcatgggtagaaggtgccattcagctcacagccgcacccagaatcctttgcagccctccttctttatttttttcccattgcattctgggagtccacatctggctttctcagccactgttcatcaccaggggttttaggaggaaggcttggctcctgtcttcccagacccaccatgcctggagaggtcaggatggaactacctcattcggcaaattagccccaaattgagcgctgaatcgtgtcccatgagatcaggcgccatctgtaaagtctcctctggaaatgccaatccatccttcccccagctgcttcctcggggaggcccctgcccccaccctgccagcccttcccagtctcattagaggaagctttccaaagttctcagttatcaagacctcatccagctcgtccaaaggcttcagggatggaaacaaaccagctcgtctcagaggccagcaagctggggcctgtccgccacggtgccctgtgcacctttgggctgccctggcccccactctcccgggccgcccaccacaggctcttaatggggccgggtcagtcctacatgtgagatgggttagggcaagtctttgccatcccccagatggctctgtcttcttgtgtatggcagggctgggactgctgtcccttgtacagttttctgtcactggtgggcactggacaggcatagcagactctcttgtggccacactaggttgtcgcctttcaggcagtgtcccgccacctttgcttcccgctccttctggacattccagagccctgcaccaaacccttacttggtgtctgcacctcctttccctctctccatcttccaatccctggaaaagtctggtctgagtgtgacttgggaagctttcagtgctgctgtttggcccagctcattactttctccctttctctaccacagcaaacacattctccaccatgtcagtctaaagagtctaaaggggccgggagaagcatgagcgaggggcagattctagtcgggagcccatgccctggaaatccatctttcttcatctttcccattgaccactttgggtttgacctgcacatctgcagtgagggcagaattcaacaagcacaactcactggtctttcagtcaacgtgctagaaaccgatgacttattaatctctaattttttggcgcctctttcattgaatgagaattgctttcgtatagttcacattagaaaaatgcctaatatactaaagtaaaccaaacgttgtcacttttctcttgttcttgaaacattgcaaccaaaaaggtcagcacaaaggccttcacctacgtgaagacctcctggtaggatctgtccatgggatggagaaccactctgtccagatctggggttgggtcatgacaccagctaccaattttagaatattatttcttggtttctttatgaaaaatgggtgctagtggtaattgctttgtggcttagtaaactactctgtggatgatttccaaacattcaaagccaatagccttgttattaacaagatattttgagtacaatatggctcattgacttttccattacatctgaggattccagagtcctctgttcatccctgggatagagtgagccctcttgcgtcttccagggtagctcaggttggcccagtttgggccagtccatttttggaggtcactctttcccccctcatcccctcacctccttctctttacccccttcacgtacttcctttctttcttccctctgttattcattcatcaagcaggttaaagccattgtgctaagatctaatctgaggacactataatggccctgtcgtcagggaagcccgtgatcgctcgttttcaggggtcttaccggtcagcaaccttggcattgatacataggcactctacagaatttaagttttcagaggtaagtctgttgttctgattaatctgcattcattcagcgaatgctcaagacaagccaggcatgctgagaagcggcgctctagttgtatgtaagatgggcattcctctgctctcctctattctccatgtcgactgagaagagtataataagaacattgtaccctctccacacttaaccctctgggattctttattataatataaaccaccgtcgtgaggcatttacctgttggatggaaggtagacagcaacaagattttaatcacctggtcaccagaccctcacggcccatatccaattcgaatttcagaaatttctctgtttgctttaaataactctttacaaataagggtcgggcacggtggctcacgcctgtaatcccagctctttgggaggccgaggtgggcagatcacgaggtcaggagatcgagaccatcctggctaacatggtgaaaccccgtctctgctaaaaatacaaaaaattagccagatgtggtggtgcacacctgtagtcccaactattcggcaggctgaggcagtagaatcgcttgaacctgggaggcggagattgcagtgaaccaagatcgggccactgcactccagcttgggtgacagagcaagactccatctcaaaaaaattataaataactctttgcaaataggaaagtgaagctcaagggtaaccagtgaggctatgaaattgccagtgaattaagaccagggctagagtcaacagtccagaacccctatccgtatgaacaggggcccgtttctggttgaaatcaaggttaggatgcaactgagaaaataaaagactgcactttggagaggcaagcacgctatccgggttgttgttttgttttatgtcttggtgcttaggtgaggacttagctgggtttattcaaagtgggcgggtctgggctattcttgagaatgtcccttccatttctgagaacaagtcagccccttctacctgcctccacccaggagactgatgcacaagatctgtttgtgaaagcctgatttaaaaagaaaaaaaaaattccttaagccaaatggtgttccaagttggttgctgtgacaacctccaggaagagccacttgttaccctctattctttctagtgctttcagtcagtggcaacacataggccccttggaccgtggggatggcggccctgagattctgtcagtgggaccaccctgggcctcctttctacctccactcagcaccctgttggccaaggagaatttctgcggtgggaggcagtgctctgctagtcaggattgataaacagctgggcacaccgaaacagtgtaccaacgaattcaccaaccaggggtttctttccctaccctttgtgaaaaccaatcaattactagatgagtggatggatgcagaaaaatctgggctgagccaaagtcccttttggaaatacaagccataacattcgaaggacatcagcgaccttggcttgtttaggtgattttacttccagctgcaggtagtcttgacaaggagtgtttaaacagaaggctcaagatgcattccttgtgtaggtcggagagagcacttctaatgttaagtggggtacagatcagctgcccccccacgtagcctggacatcgtcttatccccataatccttgccatccctacaaggcccatcgccaccaccttttcccaggtttattgaggtatgattgacatccagtaaaattcaccctttggaaatatacagctctgtgaattttgacaaatttagtgtcttgtgaccatcaccaagatcaacctgtttttaaccctccaaaaaattcccttctcctgccctctttccctggcaaccctgattgattatctgatcctataattttgccttttctagaatgtcatataaatggagtcacactgatgtcgccttttgagtctggcatctttccctcagcttaatgcttttgagtcattcatgatgtgtgcgtgtggtttgttccttctccttgccgggaagtatttcattgcatgggcgtactactctgcttctttatttttacactgagcctttcgccctggaagttcttggcccagggtcttcaacttgtttgcacgaccacttccagcttgctgcttccttcagttccccaggctcctcctccaaatgccagctgtgcccacaagctgttcttagggctcacactcgccttttggcgcgtggtgggtttttggtagtgcagaaagaatccagggatgggaggggaagggacggatgggtgctcaattgctgctcacgtctgctgcaacctgaagcttgcatctcagccagcagatctgctcccttctgggacccaggcttcagtgtcacacggtccttggctatgtattgggcgttggaggctttgaaaggcgagcagaagcagcatggacaagaaggctggggctggccctggggctcatcatgatgctttcctggatctgttgcttcatctgcaagctgagggtgtttgttctagatgagtgtctcaggccaccggcaactgcatgtacctcctccctttctcatttccaatgatgtaccctgtacacgtgttcatgctgtgtctggctctcatctgcacaatcgtgcatagaattgcctcaagtcctggtgagagagatgccgtggtacttttccatttagattcaaatggagctaaaattaagagttttatgagctgttaagaatgaggtagtttctcctaggaccccccaaagacagtgcaagtaatgaccgtttggatctcattcgtcgatctttgatagtatgttctggagtctactccccaggagccaggacaggcgtgaagatggagtccttgtcgcagctggagccttgcctagctggtgatcacacagcctggcctgtacctgcaccccactggatggtggtacatggtggcagggacaggaccacacccagttaaggccagaccaggctgagtgtgacccctgaggtaaacactccactaagctgtgtcttgttcatgccccctgctcagtgaaaggtgagtcccgagaccagttgggtacctctctatgcgaaccagagacatttctggatccaggccaggtgaagattagggccaggaagcctgagcccccggggcctcaaggtagggagccgaagaggctgccaggactctgctgggttgaaatttgccggggaggactcttgtctccccctcaggagtatttttgttgaggctttcctggaggtgaagaagcaattcccattgcagcaggttagagcgagaatcagacagagggcaaaaaccaattcgcttctccccacgttctaaatgctggggcatggctgtcaggagggcttcctgggaggtgtctctgggggtggggtgaggttggggcgatggcctttggagattgcgtgtggtgttcaggactgttccttggtgtttgagggaaactttagtgggattgcagtggaatgtaaggtcagggcacgtgggtgctctctcggggtggggtgactgggagacctagagggaaagcctgctatgcagggggagagcacaggactggccctgctctgcggcctcctttgtcccataacctgaagttaagtcacatcccctgtcgggacctccgtgcactcatctgtcaagtgggggcgcttcccttccagcatcacctgcagcagacgggctctcgggagtcgtgggttccaggcagctgtgtggacccagggacagacattcaaagggacgccagccatccttagtgacaggggccccaacttagcatcccttcccttccgttaggaaggagatgaccggaagcaaccccttcacagacacgagcacatcggcaaaccctatgaaagtggaattttctaacaaaataaacttgcttgtttgatctgttttctgtaacttttgctaaatactttatacatttttcatgttaaagagccgtgtctcccgccagcactcctcaccccggtatgaatgtgtttcctccacattgtatatccttccaccctctggctgcctagatcagtaaataaaattgatgtaatataatttataagtaacactgttgaaaccctgatcccagtggaggctgtaacccacctgcccccgcaccacccccctgacccctgttaccgcatttgtgtgtattaatgctgaagaattaaatgtttaaagagtttaaattttgaaggcgtttgctatatacagttgtcctgcattattataaagagttttcaggaagtt

SEQ ID NO: 874 - DNA, 1522 bp, Homo sapiens
gcaaaggccaaggccagccaggacaccccctgggatcacactgagcttgccacatccccaaggcggccgaaccctccgcaaccaccagcccaggttaatccccagaggctccatggagttccctggcctggggtccctggggacctcagagcccctcccccagtttgtggatcctgctctggtgtcctccacaccagaatcaggggttttcttcccctctgggcctgagggcttggatgcagcagcttcctccactgccccgagcacagccaccgctgcagctgcggcactggcctactacagggacgctgaggcctacagacactccccagtctttcaggtgtacccattgctcaactgtatggaggggatcccagggggctcaccatatgccggctgggcctacggcaagacggggctctaccctgcctcaactgtgtgtcccacccgcgaggactctcctccccaggccgtggaagatctggatggaaaaggcagcaccagcttcctggagactttgaagacagagcggctgagcccagacctcctgaccctgggacctgcactgccttcatcactccctgtccccaatagtgcttatgggggccctgacttttccagtaccttcttttctcccaccgggagccccctcaattcagcagcctattcctctcccaagcttcgtggaactctccccctgcctccctgtgaggccagggagtgtgtgaactgcggagcaacagccactccactgtggcggagggacaggacaggccactacctatgcaacgcctgcggcctctatcacaagatgaatgggcagaacaggcccctcatccggcccaagaagcgcctgattgtcagtaaacgggcaggtactcagtgcaccaactgccagacgaccaccacgacactgtggcggagaaatgccagtggggatcccgtgtgcaatgcctgcggcctctactacaagctacaccaggtgaaccggccactgaccatgcggaaggatggtattcagactcgaaaccgcaaggcatctggaaaagggaaaaagaaacggggctccagtctgggaggcacaggagcagccgaaggaccagctggtggctttatggtggtggctgggggcagcggtagcgggaattgtggggaggtggcttcaggcctgacactgggccccccaggtactgcccatctctaccaaggcctgggccctgtggtgctgtcagggcctgttagccacctcatgcctttccctggacccctactgggctcacccacgggctccttccccacaggccccatgccccccaccaccagcactactgtggtggctccgctcagctcatgagggcacagagcatggcctccagaggaggggtggtgtccttctcctcttgtagccagaattctggacaacccaagtctctgggccccaggcaccccctggcttgaaccttcaaagcttttgtaaaataaaaccaccaaagtcctgaaaaaaaaaaaaaaaaaaaaaaaa

SEQ ID NO: 875 - DNA, 2602 bp, Homo sapiens
ttgcgacgctcgggtctgggtccgggtccggacgtgcaacagaagccgtcagtggccccgctggctaaaaaagggcaagcatcggaggctcgagccagcggccgcggcgcttcccgacagttcctaattcggggcgctacgccggccccaccacctgttcccggcagccaatggggccgcggggggcggccggggcggagcgcggctacaaaaggcctcgggccccgcgcgcccgcccaccccgctccgggcgcgctctcgggaaggcttggaccgacgcggcccagaggccaggaacattccgcgcgtggaccagccgggccagggcgatgctgcgggtgcggtgtctgcgcggcgggagccgcggcgccgaggcggtgcactacatcggatctcggcttggacgaaccttgacaggatgggtgcagcgaactttccagagcacccaggcagctacggcttcctcccggaactcctgtgcagctgacgacaaagccactgagcctctgcccaaggactgccctgtctcttcttacaacgaatgggaccccttagaggaagtgatagtgggcagagcagaaaacgcctgtgttccaccgttcaccatcgaggtgaaggccaacacatatgaaaagtactggccattttaccagaagcaaggagggcattattttcccaaagatcatttgaaaaaggctgttgctgaaattgaagaaatgtgcaatattttaaaaacggaaggagtgacagtaaggaggcctgaccccattgactggtcattgaagtataaaactcctgattttgagtctacgggtttatacagtgcaatgcctcgagacatcctgatagttgtgggcaatgagattatcgaggctcccatggcatggcgttcacgcttctttgagtaccgagcgtacaggtcaattatcaaagactacttccaccgtggcgccaagtggacaacagctcctaagcccacaatggctgatgagctttataaccaggattatcccatccactctgtagaagacagacacaaattggctgctcagggaaaatttgtgacaactgagtttgagccatgctttgatgctgctgacttcattcgagctggaagagatatttttgcacagagaagccaggttacaaactacctaggcattgaatggatgcgtaggcatcttgctccagactacagagtgcatatcatctcctttaaagatcccaatcccatgcatattgatgctaccttcaacatcattggacctggtattgtgctttccaaccctgaccgaccatgtcaccagattgatcttttcaagaaagcaggatggactatcattactcctccaacaccaatcatcccagacgatcatccactctggatgtcatccaaatggctttccatgaatgtcttaatgctagatgaaaaacgtgttatggtggatgccaatgaagttccaattcaaaagatgtttgaaaagctgggtatcactaccattaaagttaacattcgtaatgccaattccctgggaggaggcttccattgctggacctgcgatgtccggcgccgaggcaccttacagtcctacttggactgaacaggcctgatggagcttgtggctggcctcagatacacctaagaagcttaggggcaaggttcattctcctgctttaaaaagtgcatgaactgtagtgctttaaacaatcatctccttaacaggggtcgtaagcctggtttgcttctattacttttctttgacataaagaaaataacttctgctaggtattactctctactcctaaagttatttactatttggcttcaagtataaaattttggtgaatgtgtaccaagaaaaaattagtcacctgagtaacttggccactaataattaaccatctacctctgtttttaattttctttccaaaaggcagcttgaaatgttggtcctaatcttaattttttttcctcttctatagacttgagaatgtttttctctaaatgagagaaagacttagaatgtacacagatccaaaatagaatcagattatctctttttttctaaaggagagaaagacttagaacatacacagatcctaagtagaaccaggtaattgtctctttttctaataaggaatttgggtaatttttaattttttgttttttaaaaaataacctagactatgcaaaacatcaaagtgaattttccatgaatgtttttaatattctcatctcaacattgtgatatatgctactaaaaaccttttcatatacatcttacctcatttcaagtgaattattttaatctttttctctctttccaaaaatttaggaatgtttagtgtaattggatttcgctatcagttcccatccttaagttttgatattcaatatctgatagatacactgcatctttggtcatctaagatttgtttacaaatgtgcaaattatttagagcatagactttataagcattaaaaaaaactaatggaggtaaaacctaaatgcgatgtgaaataattttagtgttgataccgtatgtgtatttttattctaataaacttttgtgttccagattgaaaaaaaaaaaaaaaaaa

SEQ ID NO: 876 - DNA, 3639 bp, Homo sapiens
agaccggaaagggctcgggtcatcccggcgcccagggtcaccttcccacgggctggcacctgggcgcgggcgctgccccggagccggccggcgggacctggcgcccaatcctgggggacccggtgccgtggcccaggggccgggccgaggtcccgggggcggtgccttgcgggcccgtcccggggcggtgcctggtgggctggccccgcggctcctcccctctctgcgggcccagtcgccctttggccgggcgagctaatcgtcggctcaatgacgacgaggcccgacccttcccgtccaggacctacagagacaaccgaaggagagcccaaggcggcttctttgctgtcgccgcccccactgaagcaagagctccccggctccactgaaacaccagctcatttaagctttccccaacgcccggccctccgggacgatacctaacaacgaccggcgcccgcatctggaataggctggcgagatacttagtatccgagggctcgggacttggcgccatcgaggtcatggggacccaggatccagggaacatgggaaccggcgtcccagcctcggagcagataagctgtgccaaagaggatccacaagtttattgccctgaagagactggcggcaccaaggatgtgcaggttacagactgtaagagtcccgaagacagccgacccccaaaagagacggactgctgcaatccggaggactctgggcagctgatggtttcctatgagggtaaagctatgggctaccaggtgcctccctttggctggcgcatctgtctggctcatgagtttacagagaagaggaaaccctttcaagctaacaacgtctccctaagcaacatgataaagcatataggcatgggcttgaggtacctgcagtggtggtaccggaagacccatgtggaaaagaagacacctttcatcgacatgatcaattctgtacccctaagacagatttatggttgtcccttgggtggcatcgggggaggcactattacccgtggctggagaggccagttctgtcgttggcagcttaaccctggaatgtatcagcaccggacagtcatcgctgaccaattcacagtgtgcctgcgtcgggaagggcagactgtgtaccagcaagtcctgtccctggagcgcccaagtgtcctccgcagctggaactggggcctgtgtgggtactttgctttctaccatgccctctatccccgagcctggactgtctatcagcttcctggccagaatgtcaccctcacctgccgtcagatcacacccatcttgccccatgactaccaggacagcagcctgcctgtaggagtctttgtgtgggatgtggaaaatgaaggggacgaagctctagatgtgtccatcatgttctccatgcggaatggactgggtggtggagacgatgccccagggggtttgtggaatgagcccttctgtctggagcgtagcggggaaactgtccgggggctgctcctgcatcatccaacccttccaaacccctacacgatggctgtggctgcacgagtcacggcagctaccacggtaacccacatcacagcctttgaccctgacagcacggggcagcaggtgtggcaggatctacttcaggatggacagctggactctcccactggccaaagcacccctacgcagaaaggagtaggcattgctggagctgtgtgtgtttccagcaagttgcgacctcgaggccagtgccgcctggagttttcactggcttgggacatgcccaggatcatgtttggagctaaaggccaagtccactacaggcggtatacaaggttctttggccaggatggagatgcagcacctgccctcagccactatgcactgtgccgatacgcagagtgggaagagaggatctcagcttggcagagcccggtattggatgacagatcactgcctgcctggtacaaatctgcgctgttcaatgaactatacttcctggctgatggaggcacagtgtggctggaagttcttgaggactccctaccagaggagctgggcagaaacatgtgtcacctccgccccaccctacgggactacggtcgatttggctaccttgagggccaggagtaccgcatgtacaacacatatgatgtccacttttatgcttcctttgccctcatcatgctctggcccaaacttgagctcagcctacagtatgacatggctctggccactctcagggaggacctgacacggcgacggtacctgatgagtggggtgatggcacctgtgaaaaggaggaacgtcatcccccatgatattggggacccagatgatgaaccatggctccgcgtcaatgcatatttaatccatgatactgctgattggaaggacctgaacctgaagtttgtgctgcaggtttatcgggactattacctcacgggtgatcaaaacttcctgaaggacatgtggcctgtgtgtctagctgtgatggaatctgaaatgaagtttgacaaggaccatgatggactcattgaaaatggaggctatgcagaccagacctatgatggatgggtgaccacaggccccagtgcttactgtggagggctgtggctggcagctgtggctgtgatggtccagatggctgctctgtgtggggcacaggacatccaggataagttttcttctatcctcagccggggccaagaagcctatgagagactgctgtggaatggccgctattacaactatgacagcagctctcggcctcagtctcgtagtgttatgtctgaccagtgtgctggacagtggttcctgaaggcctgtggcctaggagaaggagacactgaggtgtttcctacccaacatgtggtccgtgctctccaaactatctttgagctgaacgtccaggcctttgcaggaggggccatgggggctgtgaatgggatgcagccccatggtgtccctgataaatccagtgtgcagtctgatgaagtctgggtgggtgtggtctacgggctggcagctaccatgatccaagagggcctgacttgggagggcttccagacagctgaaggctgctaccgtaccgtgtgggagcgcctgggtctggccttccagaccccagaggcatactgccagcagcgagtgttccgctcactggcctacatgcggccactgagcatatgggccatgcagctagccctgcaacagcagcagcacaaaaaggcctcctggccaaaagtcaaacagggcacaggactaaggacagggcctatgtttggaccaaaggaagccatggcaaacctgagcccagagtgagccgtctgaactgtgggagggaagtgctaacagcccagcctccagcctggcctttcctccttcccctctgaacctcctgcaaccctgagccatcaggacaatcataccccttcccttctctccacccaattgtgccagtaaatgggggttgagggtgacctaggcagcattagaatcacttatttatttctttcctcacctgttccctgactgcgtgaaatgttcagggaggtcagttgatttccccaggtacattcatggtgtgacagacacatgggtacaaataaaagacccagaaagccaaaaaaaaaaaaaaaaaaaaaaaaaaaaa

SEQ ID NO: 877 - DNA, 3099 bp, Homo sapiens
gtgagtgggcggagaggcctcggtgcctcctacccgctccggacgtgcgtcccggcatcaccccgggatccgctcctccccgctggcggggggagaaagggcaggaggccttccgtcccggctataaagggccccggaccgccgcggctcgcctcggcttgcctcgacacgcctaggcgccctccggctccgccctagccgccgcgtcccagctagagctccagcgcccgctcaggccccactcgaccctctcgggcctcggctacttggactgcggcggaatatggcggctccgatgactcccgcggctcggcccgaggactacgaggcggcgctcaatgccgccctggctgacgtgcccgaactggccagactcctggagatcgacccgtacttgaagccctacgccgtggacttccagcgcaggtataagcagtttagccaaattttgaagaacattggagaaaatgaaggtggtattgataagttttccagaggctatgaatcatttggcgtccacagatgtgctgatggtggtttatactgcaaagaatgggccccgggagcagaaggagtttttcttactggagattttaatggttggaatccattttcgtacccatacaaaaaactggattatggaaaatgggagctgtatatcccaccaaagcagaataaatctgtactcgtgcctcatggatccaaattaaaggtagttattactagtaaaagcggagagatcttgtatcgtatttcaccgtgggcaaagtatgtggttcgtgaaggtgataatgtgaattatgattggatacactgggatccagaacactcatatgagtttaagcattccagaccaaagaagccacggagtctaagaatttatgaatctcatgtgggaatttcttcccatgaaggaaaagtagcttcttataaacattttacatgcaatgtactaccaagaatcaaaggccttggatacaactgcattcagttgatggcaatcatggagcatgcttactatgccagctttggttaccaaatcacaagcttctttgcagcttccagccgttatggaacacctgaagagctacaagaactggtagacacagctcattccatgggtatcatagtcctcttagatgtggtacacagccatgcttcaaaaaattcagcagatggattgaatatgtttgatgggacagattcctgttattttcattctggacctagagggactcatgatctttgggatagcagattgtttgcctactccagctgggaaattttaagattccttctgtcaaacataagatggtggttggaagaatatcgctttgatggatttcgttttgatggtgttacgtccatgctttatcatcaccatggagtgggtcaaggtttctcaggtgattacagtgaatatttcggactacaagtagatgaagatgccttgacttacctcatgttggcaaatcatttggttcacacgctgtgtcccgattctataacaatagctgaggatgtatcaggaatgccagctctgtgctctccaatttcccagggagggggtggttttgactatcgactagccatggcaattccagataagtggattcagctacttaaagagtttaaagatgaagactggaacatgggcgatatagtatacacgctcacaaacaggcgctaccttgaaaagtgcattgcttatgcagagagccatgatcaggcattggttggggataagtcgctggcattttggttgatggatgccgaaatgtatacaaacatgagtgtcctgactccttttactccagttattgatcgtggaatacagcttcataaaatgattcgactcattacgcatgggcttggtggagaaggctatctcaatttcatgggtaatgaatttgggcatcctgaatggttagacttcccaagaaaaggaaataatgagagttaccattatgccaggcggcagtttcatttaactgacgacgaccttcttcgctacaagttcctaaataattttgacagggatatgaatagattggaagaaagatatggttggcttgcagctccacaggcctacgtgagtgaaaaacatgaaggcaataagatcattgcttttgaaagagcaggtcttcttttcattttcaacttccatccaagcaagagctacactgactaccgagttggaacagcattgccagggaaattcaaaattgtgctagattcagatgcagcggaatatggagggcatcagagactggaccacagcactgactttttttctgaggcttttgaacataatgggcgtccctattctcttttggtgtacattccaagcagagtggccctcatccttcagaatgtggatctgccgaattgaagaggcctgatttcagctccaccagatgcagatttgtgttttgttttcttgttatcactgtcacacagcttataacatgtatgcttttcagaatacagttgtctagccaagccatcaagtgtctgaaattcaatattggtttatgcaaatacagcaaacttttatttaagtagatgggagaatatgtttaaaatattaggaatcctagaccatattttcaagtcatcttagcagctaggattctcaaatggaagtgttatatataatatgttaaaaacattttgctttcctggctaattatttgatccttttaaattcaaatttgaatcatttgtcatgtatgattatttctgttaaatgtacacagtatttaagatggatatttggtggctctatttgttctgatatcttttggtctaaattatgaggtaccaagattgtttctttgtttctttttttcaaattgtgtttagaaatactgtaataaatatgcagtagtgatataaagaattatatccaaggtaatataaaagccattacgtatgaactcatccgtgtctcattttgtgttttattttgtgatctcttgtccactaagtatcttgttaaatgccagtatctcagtctttctgaagccctgaaatggtaattgtagcatttcagaaaatgtctttcatttcaatcaataaaaagcttttgtaaaattg

SEQ ID NO: 878 - DNA, 6376 bp, Homo sapiens
gacagggaaggtacccggctctactgcccgtcccggacgactcatcctggcggactgtgcagtcccaccctgacttcagcctcaatttccaggaaacaggctccttctcttctcccatctgctaccagagccgggagagctgctcggagacgcctccggggtgcgggctggacatgagcagcggctgccggtcctgggactaggccccgccattttggatccgctgacaggtttgccaagatggtggataagaatatttacatcattcaaggggagattaacattgtggttggggccatcaaacgaaatgcccgatggagcacccatacaccactggatgaagaacgggatcctctgctgcatagtttcggtcatctaaaggaggttttaaacagtataacagaactctcagaaattgagcccaatgtattccttcgaccttttctggaagtgattcgctctgaagataccactggccctatcactggactggcactcacctctgtcaacaagttcctgtcctatgcactcatagatcccacccatgagggcacagcagagggcatggagaacatggcagatgctgtcacccatgctcgttttgtgggcacggatcctgccagtgatgaagttgtcctgatgaaaatccttcaggttctacggactctgctgctaaccccagtgggtgcccacctaaccaatgaatctgtgtgtgagattatgcagtcttgcttccggatctgctttgaaatgaggctcagtgagttattgagaaaatccgcagagcacactctcgtagacatggtgcagctgctcttcacaaggttacctcagtttaaagaagaacccaagaactatgtggggaccaacatgaagaagctgaaaatgagagccggaggcatgagtgattcatccaaatggaagaaacagaagagatcccctcggcccccacgccatatgaccaaagtcacaccaggttcagagctgcccactcccaatggaaccaccttatcatctaacctcactggtggcatgcccttcattgatgtgcccactcccatctcctctgcaagttcagaagctgcctcagcagtggtcagtccctctacagacagtggcctggaattctcctcccaaaccacttccaaggaagaccttactgatctagagcaacctggctctccagggtacagcacagctacagagcctggaagcagtgagctaggtgttcccgagcagcctgacctccaggaagggacccatgtggaaaagtcccagtcagcatctgtggagtccatccctgaagtgttagaggagtgcacgtcccctgccgaccactctgactctgcctctgtccatgacatggattacgtcaatccccggggcgtgcgctttacacagtcctcccagaaagaaggcacagctttggtcccctatggtcttccctgcatccgcgagctcttccgcttcctcatctccctcaccaatccacacgaccgccataactcagaggttatgattcacatgggactgcatttgctgacagtggcccttgagtcagcccctgtagcccagtgccagaccctcttgggcctcatcaaggatgagatgtgccgtcacttattccagctactcagcatagagcgactaaacctttatgctgcttccctgcgagtatgcttcctactgtttgagagcatgcgagagcacctcaagttccaaatggagatgtacatcaaaaagcttatggagatcatcactgtggagaaccccaagatgccttatgagatgaaggagatggcactggaggccattgtgcagctctggcgcatccccagctttgtcacagagctctacatcaactatgattgtgactactactgttccaacctctttgaggaactcacaaagctgctgtccaagaatgccttccctgtgtctggtcaactctatacaacacacctactatctcttgatgccctattgacagtgattgacagcaccgaggcccactgccaggctaaagtcctcaacagcctcacccagcaagagaagaaggagacagccagaccaagctgtgagatagtagatggcacccgagaagctagcaatactgagagaactgccagcgatgggaaagctgtaggcatggcctcagacatcccaggcctgcatctgccaggtggagggcggctgccaccagaacatgggaaatcaggatgcagtgatctggaggaagctgttgactctggggctgacaaaaagtttgcccggaagccaccccgattttcctgtctcctgccagatccacgggaactaattgaaattaaaaacaaaaagaagctgctaatcactggcacagagcagttcaatcagaaaccaaagaaggggattcagtttctgcaagagaaaggcctcctcaccatcccaatggacaacacagaggttgctcagtggctccgagagaaccctcggctggacaagaagatgattggagagtttgtgagtgaccgcaaaaacattgacctgttggagagctttgtgagcaccttcagttttcagggtctgcgactggacgaagccctccgcctctacctggaagccttccgtttgcctggggaagcaccagtcatccagaggttgctggaggcattcacagagcgttggatgaattgtaatggctccccatttgccaatagcgatgcctgcttttccctggcctatgctgtcatcatgcttaatactgaccagcacaaccacaatgttcgtaaacagaatgcacccatgaccctggaggagtttcgcaaaaatctgaaaggtgtgaatggaggcaaggactttgagcaagacatcctggaggacatgtaccatgccatcaagaatgaggaaattgtaatgcctgaggagcagacaggcttggttcgggagaactatgtgtggaatgtgctgcttcatcgaggtgccacccctgagggcatattcctgcgtgtgcctactgccagctatgatcttgacctcttcaccatgacctggggccccactattgctgctctctcttatgtctttgacaaaagccttgaggagacaatcatccagaaagccatctcaggcttcaggaagtgcgccatgatctccgcccactatggcctcagcgatgtgtttgacaatctcatcatctctctatgcaaattcacagctctcagcagtgagtctattgagaacctgcccagtgtatttggaagcaaccctaaagcccatattgcagccaagacagtattccatttggcccatcgtcatggtgacatcctgcgggagggctggaagaatatcatggaggccatgctgcagctcttccgagcccaactactgcccaaggctatgatagaggtagaagatttcgtggatcccaatggcaagatctctctacagcgggaagagacaccatcaaaccgaggagagtcaacagtgctgagctttgtgagctggctaacactgagtggtcctgagcagtctagtgttcggggcccatccactgaaaaccaagaggccaagagagtggccttagagtgtataaagcaatgtgacccagaaaaaatgatcacagaaagcaagttcctccagctggagtcactacaggagctcatgaaggctctggtctcagtgacaccagatgaagagacatatgatgaggaagatgctgctttctgcctagagatgctgctaaggattgtgttggagaacagggatcgtgtgggctgtgtgtggcagactgttcgagaccatctataccacctctgtgttcaggcacaagatttctgcttccttgtggagcgggcagtggtggggttgctacgcctggccattcggcttctccggagagaagagatcagtgctcaggtgctgctctccctgcgcattttgctactgatgaagcccagtgtgctatcccgagtcagccaccaggttgcgtatgggctccatgaactcctgaagaccaatgcagccaacatccactcaggtgatgactgggccacactcttcacactgctggagtgcatcggctcaggtgtgaagcctccagctgctctgcaggccacagccagggcagatgcacctgatgccggggcccagtcagatagtgagctcccatcctaccatcagaatgacgtgagcctggatcgagggtacacttccgactcagaggtctacactgaccatggcaggccgggcaagatacaccgatcagccacagatgccgatgtggtcaacagtggttggttagtggttgggaaggatgacgttgataactccaagccagggcccagccgcccaggcccttcacccctgatcaatcaatacagcctaacagtgggactggatttggggccacacgacactaagtctctgcttaagtgtgtggaatcgctgtccttcatcgtgcgtgatgctgcccacatcacacctgacaactttgagctctgcgtcaagactctccggatctttgtggaggccagtctgaatggcggatgcaagtcccaggagaaacgtggcaagagtcacaaatatgacagcaaagggaaccgcttcaagaagaaatccaaagagggatcaatgcttcgccggcctcgaacctccagccaacatgcctctcggggcgggcagagtgatgatgatgaggacgaaggcgtgcctgccagctaccatacggtgtctttacaggtcagtcaggacttgctagacctgatgcacaccctgcacacgcgggcagcctctatctacagctcatgggcggaggagcaacgccacctggagacaggtggccagaagattgaagctgattctcgcaccctctgggcccactgctggtgccctttactgcagggtattgcctgcctgtgctgcgatgcccggcgccaggtacggatgcaggcactgacctatctgcagcgagcactacttgtacatgatctgcaaaagctagatgccctggaatgggagtcctgttttaacaaggtgctgtttcctctacttaccaagctcttggagaacatcagccctgcagatgtgggtgggatggaggagacccggatgagggcttccacattgctctctaaggtcttcctgcagcacctgtctccactgctgtcactctctacctttgcggccctctggctcaccatcttggacttcatggacaagtacatgcacgcaggctccagcgacttactgtcagaggcgatccctgagtctctgaagaacatgcttctggtgatggacacagcggagattttccacagtgcagatgcacggggaggcggcccctcggccctctgggagatcacctgggaacgcattgactgttttctccctcacctacgagatgaactcttcaagcagaccgtcatccaggaccccatgcccatggagcctcaaggccaaaagcctctcgcctcagcccacctgacttccgctgctggcgacactaggacacctggccatccaccgcccccagagattccatctgagctgggggcctgtgactttgagaagcccgagagcccccgagccgccagcagcagctccccaggatcaccagtggcctcaagccccagcaggctgagccccacccccgacgggcctccacccttggctcagcccccactgatcctgcagcccttggcctccccactgcaggtgggcgtgccacctatgactctgcccatcatcctcaaccctgcgctcatcgaggccacctcaccagtgcccctcctggccacaccccgccccacagatcccatacccacctctgaggtcaactaaggcaggtcactcagagatcaggaccagtgcttcccaccaggctttccttgaccccacttctggctgtcctgcgggccacaagctcttcaggccaagtcagagctgctgttgctgccacttggatggggacctgaaaaagagaatgttgatagccccagctaagacccccaatcagctgtgggacctttttcctcctctgcgctccattcctgggggttcagcctgagagtgaactcagctgtcatctgcagcctctgcctccagcccggcagctctggggaggcatccgtgtgccggccctgcagtgcctgcccacggtcaggcattgaaaactaagcccaaccactctgcactttgtttcccactcccattagccctgggccacctcctccagttcttcctcttttactaattagttggtcagtttggagagttgactggcaccatggagggtaggcaggtgggggctgggtgggggactgcccacaggagcatgtacatatggaaaaacagaacaacagtggactttttatgatataataaatgtcttagtacc

SEQ ID NO: 879 - DNA, 2431 bp, Homo sapiens
ctccaggctgtggaacctttgttctttcactctttgcaataaatcttgctgctgctcactctttgggtccacactgcctttatgagctgtaacactcactgggaatgtctgcagcttcactcctgaagccagcgagaccacgaacccaccaggaggaacaaacaactccagacgcgcagccttaagagctgtaacactcaccgcgaaggtctgcagcttcactcctgagccagccagaccacgaacccaccagaaggaagaaactccaaacacatccgaacatcagaaggagcaaactcctgacacgccacctttaagaaccgtgacactcaacgctagggtccgcggcttcattcttgaagtcagtgagaccaagaacccaccaattccggacacgctaattgttgtagatcatcacttcaaggtgcccatatctttctagtggaaaaattattctggcctccgctgcatacaaatcaggcaaccagaattctacatatataaggcaaagtaacatcctagacatggctttagagatccacatgtcagaccccatgtgcctcatcgagaactttaatgagcagctgaaggttaatcaggaagctttggagatcctgtctgccattacgcaacctgtagttgtggtagcgattgtgggcctctatcgcactggcaaatcctacctgatgaacaagctggctgggaagaacaagggcttctctgttgcatctacggtgcagtctcacaccaagggaatttggatatggtgtgtgcctcatcccaactggccaaatcacacattagttctgcttgacaccgagggcctgggagatgtagagaaggctgacaacaagaatgatatccagatctttgcactggcactcttactgagcagcacctttgtgtacaatactgtgaacaaaattgatcagggtgctatcgacctactgcacaatgtgacagaactgacagatctgctcaaggcaagaaactcacccgaccttgacagggttgaagatcctgctgactctgcgagcttcttcccagacttagtgtggactctgagagatttctgcttaggcctggaaatagatgggcaacttgtcacaccagatgaatacctggagaattccctaaggccaaagcaaggtagtgatcaaagagttcaaaatttcaatttgccccgtctgtgtatacagaagttctttccaaaaaagaaatgctttatctttgacttacctgctcaccaaaaaaagcttgcccaacttgaaacactgcctgatgatgagctagagcctgaatttgtgcaacaagtgacagaattctgttcctacatctttagccattctatgaccaagactcttccaggtggcatcatggtcaatggatctcgtctaaagaacctggtgctgacctatgtcaatgccatcagcagtggggatctgccttgcatagagaatgcagtcctggccttggctcagagagagaactcagctgcagtgcaaaaggccattgcccactatgaccagcaaatgggccagaaagtgcagctgcccatggaaaccctccaggagctgctggacctgcacaggaccagtgagagggaggccattgaagtcttcatgaaaaactctttcaaggatgtagaccaaagtttccagaaagaattggagactctactagatgcaaaacagaatgacatttgtaaacggaacctggaagcatcctcggattattgctcggctttacttaaggatatttttggtcctctagaagaagcagtgaagcagggaatttattctaagccaggaggccataatctcttcattcagaaaacagaagaactgaaggcaaagtactatcgggagcctcggaaaggaatacaggctgaagaagttctgcagaaatatttaaagtccaaggagtctgtgagtcatgcaatattacagactgaccaggctctcacagagacggaaaaaaagaagaaagaggcacaagtgaaagcagaagctgaaaaggctgaagcgcaaaggttggcggcgattcaaaggcagaacgagcaaatgatgcaggagagggagagactccatcaggaacaagtgagacaaatggagatagccaaacaaaattggctggcagagcaacagaaaatgcaggaacaacagatgcaggaacaggctgcacagctcagcacaacattccaagctcaaaatagaagccttctcagtgagctccagcacgcccagaggactgttaataacgatgatccatgtgttttactctaaagtgctaaatatgggagtttcctttttttactctttgtcactgatgacacaacagaaaagaaactgtagaccttgggacaatcaacatttaaataaactttataattattttttcaaactttaaaaaaaaaaaaaaaaaaaaaaaa

SEQ ID NO: 880 - DNA, 1449 bp, Homo sapiens
atggggcagataggaggaaaggggccccgtaagagtggccctaagccgcagaaccgggcgggcccagcgcgccccctgtcggccccgcctcgcctccctcagccccgcgctctcgctggagggggcggtggccgtgctgtcccgcccgtcgcgccggagcttgctctggggaccgccacaacgtccgctccacgggcaggggaggggtgtcggagctgggaggcacgccggggaatgacttggggcccgaaggagggcggcggcccggagcagaggggtgctgaggtccggccccgccgcctgtccctgctggtgcgccctctccgcctgccgcccggtgtcccatccacgctcggccccgccgccccatcggagcctgggccacctcccgcttgccctcctagccggagcccgggccagagagggagcgcggcgccggagccacactgcgccgagcccgcgccccgccgccacctcggcccgggagccagggagcgagccctgcgtcgggccggaggcggtagcgcccctgggggcaacggcgggggcggcggcgggggcccgggcactgccttctccatcgactccctaatcgggccgccgccgccgcgctccggccacttgctgtacaccggctaccccatgttcatgccctaccggccgctcgtgctgccgcaggcgctggcccctgcgccgctgcccgctggcctcccgcccctcgccccgctagcctctttcgccggccgccttaccaacaccttctgcgcggggctgggcggccgacgcccagagggtgggctggaagctgatgagctgctgccggcccgggagaaagtggcagagcccccaccacctccgcctccgcacttctcagagacttttccaagtctgcccgcagaggggaaggtgtacagctcagatgaggagaagctggaggcatcagcaggagacccagcaggcagcgaacaggaggaagagggctcaggcggtgacagcgaggatgacggtttcctggacagttctgcagggggcccaggggctcttctgggacctaaaccgaagctaaagggaagcctggggactggagctgaggagggggcaccggtgacagcaggggtcacagctcctggggggaaaagccgacggcgccgcacagcatttaccagcgagcagcttttggaattggagaaggaatttcattgcaagaaatacctgagcttgacagagcgctctcagatcgcccacgccctcaagctcagtgaggtgcaggtcaagatctggtttcagaatcgacgggccaagtggaagcgcatcaaagctggcaatgtgagcagccgttctggggagcccgtaagaaaccccaagattgttgtccccatacctgtgcatgtcaacaggtttgctgtgcggagccagcaccaacaaatggagcagggggcccggccctga

SEQ ID NO: 881 - DNA, 3899 bp, Homo sapiens
gaaacgccttgcggggcagtgtgggagggagaagtccagggcggacaggctgggcgcacccgtgctcgcgcaccccaagatggctgagaggcaggaagagcagagagggagcccgcccttgagggcggaaggcaaggccgacgcggaggttaagctcattctgtaccattggacgcattccttcagctctcaaaaggtgcgcttggtaattgctgaaaaggcattgaagtgcgaggaacatgatgtaagtctgcccttgagtgagcacaatgagccttggtttatgcgtttgaactcaactggagaagtgcctgtccttatccacggggaaaacataatttgtgaggccactcagatcattgattatcttgaacagactttcctggatgaaagaacacccaggttaatgcctgataaagaaagcatgtattacccacgggtacaacattaccgagagctgcttgactccttgccaatggatgcctatacacatggctgcattttacatcctgagttaactgtggactccatgatcccggcttatgcaactacaaggattcgtagccaaattggaaacacagagtctgagctgaagaaacttgctgaagaaaacccagatttacaagaagcatacattgcaaaacagaaacgacttaaatcaaagctgcttgatcatgacaatgtcaagtatttgaagaaaattcttgatgagttggagaaagtcttggatcaggttgaaactgaattgcaaagaagaaatgaagaaaccccagaagagggccagcaaccttggctctgcggtgaatccttcaccctggcagacgtctcactcgctgtcacattgcatcgactgaagttcctggggtttgcaaggagaaactggggaaacggaaagcgaccaaacttggaaacctattacgagcgtgtcttgaagagaaaaacatttaacaaggttttaggacatgtcaacaatatattaatctctgcagtgctgccaacagcattccgggtggccaagaaaagggccccaaaagttcttggcacgacccttgtggttggtttgcttgcaggagtgggatattttgcttttatgcttttcagaaagaggcttggcagcatgatattagcatttagacccagaccaaattatttctaggtttgttgggatcttgtcgtggcagctcatccaagcatttagctagaccctgtgattgcccgtggctctctgagtctgtcttattgagtagttagcagtattttttcctaaaattcagaagtcatctttgttacacaacacaggggttcaggtagcaataggacacaaaattgctttattctacaactgccagctccaggcagaaataggaaggcaaagagataagagaaggaaaaatgagagaatgaagtctgtatagggtagagcaatagaaagtaagcttcgggtgcctccaacgttcatggctgcctgtctcattggtaaacctcacatttagttacttgtggctactgcccacacatacacttctgtaattgagaactcttaggagaggactagggaatcactggggatagtgggctggagagaaccccaggctttatatgtatactttgacctcagtgttaattttaaatgcttatgaatcacacacattgctttagtaagattaagtgcttatatactagaaatttgatgctcattggaacacatctgcctagcatttctgtaaaagtcttaagtgatattaagatgattccttaccatttcagatggtccgcaatttgaattaccaagtggtaatggttccttactgttttagatggtgcctgtgagataccattcctctggatggtcatgtccagtcagtgggaggtagaaagggtggcatctgtagccctcttcatacacataagtggcatttaggtgaatgtcccagctaatcactagcatgtctaggtattggctgggtagtgggtattttgatgatctgggagcaccaaatatgttcattcttcgtttggggaggctggtctgtaaacacaaaaattgttgtccagatctttcatctgtttatgatcatcaacaaagacttgttagaaaggtctagtcttagcacttggcagttaatctagggaagatgaattaaatgggtagatagtgatgcatacctgtattcactgatgtatgtttaagggatttgggggggatacctcagttcatgtggaagggacagtctcggtgtgtcccatgaataaccttggaactgcaacaaatggtttgtgctcagaaaaagtctttcatggtgacaggaagacagtttccctggagctggccatgaaggccttagaagccatttctggtgtctggtgggtagcaggcatagagatgatgtgccgaggtcccagtgaacaacagtagccaaagaatgtactaactttatcattaataggaaagtcatacctaggaaacaatgactttttgatggcaaaatgattttttaattctattttgatgctgtaattccatttcatgacctagttgtattagaaaaccttgatgaactatatgttcccgatttacaaaaaaattaataaaacctccagagtaaactcagtcaaacaataattgagtagcagcttttataacatttaaaatttgcacatgagtgtgttgtcatatggagtgtctgaatctgttgctgggacataccaatccatgtattcattagagccatagaagttattattcattagttcatagtgtttgagttctttatgtcactctgttagaaacaagaactgagtcgtgaagaaataagaattggatttttataaaaacctctgaaggatatttacctatgaaaaagttgttaagaataaaaattagaagtccatggttaacttttccttcaatttatattattcctgaatcatagggaatctttctagaatgtgtttataatttccttgtacagtttctttggaaatacgttaaagatagtggcaatttcatatatttcatggatacttgagtttgtgcttttaaggtgtttgtttagggatacaatgaccactagatgtcgctgtttatccagtagactaagattgagtgttctttttgttcagcaactcttctaaaatgtttcaagcaaagatagtaatgacctcagtttctgaaataagggcatcttcatcagattattcttctgttttaaaaaaaagcttgaggcaaatgtgagtgatttccagtgctttgaaagggattacagtatcacacaatgtcaagctagagttaaacacagtattagctaaataggcacttatgtgtattttctttttcatgattatcggtgactggtcagtgtactcatcaatttccaaaatttgtataaatatcacaattagaaaaatgcctgaggtactaaagttatgttggctttttgtgtcttaacacacataaatactattgttattgcagcagatgccttttgaatccattttccataattgcggatagtcataaattgcttgctcaatttttagtaattattgctgttgacaccagcgttgtagatttttggtgttgttgaatgcagtagagagaccaagacactattctgtaagatcaataaaagtaattggaaaataaatatgaaccctaaaacaaagtactcactttgtaatcttttttggaaaacagatatatttttttcatttaaaatcaaagcatcatgtggtagttaaaagggtaaaataagcagaggttaggtattcaagatacttagctataggatgccatattttcgttataacaaaattgctgactcttgcttcatttaaatatgcacggttaaaatgaatagcggcctaaagaataacactgatctctcaaaaaaaaaaaa

SEQ ID NO: 882 - DNA, 2441 bp, Homo sapiens
agagtgccgggagcgcctgattggcggccctcccggcgcctgcaggccccgccccggctgcggaggctcagtcacagccctcccctcctcgctccctcccctcctctccccgcccagttcttctcttcccgtctgaggtggcggtcggtctcgccttgtcgccagctccattttcctctctttctcttcccctttccttcgcgcccaagagcgcctcccagcctcgtagggtggtcacggagcccctgcgccttttccttgctcgggtcctgcgtccgcgcctgccccgccatgaatgaggagtacgacgtgatcgtgctgggcaccggcctgacggaatgtatcctgtcaggtataatgtcagtgaatggcaagaaagttcttcatatggatcgaaacccttactacggaggagagagtgcatctataacaccattggaagatttatacaaaagatttaaaataccaggatcaccacccgagtcaatggggagaggaagagactggaatgttgacttgattcccaagttccttatggctaatggtcagctggttaagatgctgctttatacagaggtaactcgctatctggattttaaagtgactgaagggagctttgtctataagggtggaaaaatctacaaggttccttccactgaagcagaagccctggcatctagcctaatgggattgtttgaaaaacgtcgcttcaggaaattcctagtgtatgttgccaacttcgatgaaaaagatccaagaacttttgaaggcattgatcctaagaagaccacaatgcgagatgtgtataagaaatttgatttgggtcaagacgttatagattttactggtcatgctcttgcactttacagaactgatgattacttagatcaaccgtgttatgaaaccattaatagaattaaactttacagtgaatctttggcaagatatggcaaaagcccatacctttatccactctatggccttggagaactgccccaaggatttgcaaggctaagtgctatttatggaggtacctatatgctgaataaacccattgaagaaatcattgtacagaatggaaaagtaattggtgtaaaatctgaaggagaaattgctcgctgtaagcagctcatctgtgaccccagctacgtaaaagatcgggtagaaaaagtgggccaggtgatcagagttatttgcatcctcagccaccccatcaagaacaccaatgatgccaactcctgccagatcattattccacagaaccaagtcaatcgaaagtcagatatctacgtctgcatgatctcctttgcgcacaatgtagcagcacaagggaagtacattgctatagttagtacaactgtggaaaccaaggagcctgagaaggaaatcagaccagctttggagctcttggaaccaattgaacagaaatttgttagcatcagtgacctcctggtaccaaaagacttgggaacagaaagccagatctttatttcccgcacatatgatgccaccactcattttgagacaacgtgtgatgacattaaaaacatctataagaggatgacaggatcagagtttgactttgaggaaatgaagcgcaagaagaatgacatctatggggaagactaacagcagtacatgttattatgtaattaggacacatttaaaatttggcaaataatgcatataatgaaatcaatattgtaaggcctgcttttgtaatgaaaatggagagaatgaagagcgctgtgccagtaaatactccccttcacctttctaattattaacttgttttcatggagtggctattcagcattggcagttaccacattctgttcaatttaaccaaactggctttttttttttctagtgaagttaaacaaacattgggataccgacacagacaacttgagacagtttttttaatcttttaatcagtgtagctatgtgctgctgctgctcaagagctggatccatacaggttgtgtgtcatctgtcctcttgaggttcaggagattctaaattgaatattccacggtttgggacagcatccggaagttttccctatgactttatattttgtattatgtcaaatgttatggcagggcccaaatagcatagccacaagtttggtttatgtgggcataaaattctaaccaaaccccagacatagggagtcatttggagaaagcctgtatgtggtgttttaacctaataaagttgatgagagagaaggggagaggaagcgaacataaagcgggtcaagtgtagtgcatcttttgtatctcaggcgtggcttcttcagtggaccaagctgcaatgcagtattgacttgacagagcctctacttctgtctcaaaatggctccaaatgatttctgtactgcaaaataaagccaaattctggaaactaaaaaaaaaaaaaaaaaaaaaaaaaaaaaa

SEQ ID NO: 883 - DNA, 2093 bp, Homo sapiens
tcccttgaccttcaggagaacgagaaggctgcctgatcagagagtctctgaagaagattctgtggctacaggcttcagcagagtgtgagggagaccccggttatttcctcagctgtttccaccaaatcctcctgtctttcgtggccaacaccccaggcaaggcttggggcccccgtctgctgctggacgcagagccatgaagaagaagttagtggtgctgggcctgctggccgtggtcctggtgctggtcattgtcggcctctgtctctggctgccctcggcctccaaggaacctgacaaccatgtgtacaccagggctgccgtggccgcggatgccaagcagtgcttggagattgggagggacacactgcgggacggtggctctgcagtggatgcagccattgcagccctgttgtgtgtggggctcatgaatgcccacagcatgggcatcggggttggcctcttcctcaccatctacaacagcaccactcatgactgaggtcatcaatgcccgcgaggtggcccccaggctggcctttgccagcatgttcaacagctcggagcagtcccagaagggagggctgtcggtggcggtgcctggggagatccgaggctatgagctggcacaccagcggcatgggcggctgccctgggctcgcctcttccagcccagcatccagctggcccgccagggcttccccgtgggcaagggcttggcggcagtcctggaaaacaagcggaccgtcatcgagcagcagcctgtcttgtgtgaggtgttctgccgggatagaaaggtgcttcgggagggggagagactgaccctgccgcggctggctgacacctacgagatgctggccatcgagggtgcccaggccttctacaacggcagcctcatggcccagattgtgaaggacatccaggcggctgggggcattgtgacagctgaggacctgaacaactaccgtgctgagctgatcgagcacccgctgaacatcagcctgggagacgcggtgctgtacatgcccagtgcgcggctcagcgggcccgtgctggccctcatcctcaacatcctcaaagggtacaacttctcccgggagagcgtggagacccccgagcagaagggcctgacgtaccaccgcatcgtagaggctttccggtttgcctacgccaagaggaccctgcttggggaccccaagtttgtggatgtgactgaggtggtccgcaacatgacctctgagttcttcgctgcccagctccggtcccagatctctgaccacaccactcacccgatctcctactacaagcccgagttctacacgccggatgacgggggcactgctcacctgtctgtcgtcgcagaggacggcagtgctgtgtccgccaccagcaccatcaacctctactttggctccaaggtctgctccccggtcagtgggatcctgttcaataatgaatggacgacttcagctctcccagcattcaccaatgagtttggggcacccccctcacctgccaatttcatccagccagggaagcagccgctcttgtccatgtgcctgacgatcatggtgggccaggacggccaggtccggatggtggtgggagctgctgggggcacgcagatcaccacagacactgcactggccatcatctacaacctctggttcggctatgacgtgaagagggccgtggaggagccccggctgcacaacaagcttctgcccaacgtcacgacagtggagagaaacattgaccaggcagtgactgcagccctggagacccggcaccatcacacccagatcgcgtccaccttcatcgctgtggtgcaagccatcgtccgcacggctggtggctgggcagctgcctcggactccaggaaaggcggggaacctgctggctactgattgctccaggcagacaaggctgacaagcaatccagggacaagatactcaccaggatgaggaagaggactttgggggacgggcttcccctgtgagcagcagagcagcataataaatgaggccactgtgccaggctccaggtggcctccctggcctgtctccacaaaaaaaaaaaaaaaaaaaaaaaaaaa

SEQ ID NO: 884 - DNA, 2772 bp, Homo sapiens
ttccggcaggcgctgcgctgctggggggcgcgggcgaggatggcggcggagaacgaggccagccaggagagcgccctgggcgcctactcgccagtggactacatgagcatcaccagcttcccgcggctgcccgaggacgagccggcgcccgcggccccgctgaggggccgcaaggacgaggacgcctttctgggagaccccgacaccgacccggactccttcctgaagtctgcacggctgcagcggctgccatcgtcgtcgtcggagatgggcagccaagacgggtcgccgctacgcgagacgcgcaaagacccgttctccgccgcagcggccgagtgctcctgccgccaggatgggctcacggtcatcgtcacggcctgtctcaccttcgctaccggtgtcaccgtggcgctggtcatgcagatctacttcggggacccccagatcttccagcagggtgccgtggtgaccgatgctgcccgctgcacttcactgggcatcgaggtgctcagtaaacagggatcttctgtggacgcagcggtggcagcagccttgtgtttgggtatcgtggctccacacagttctggcctgggcggtgggggcgtgatgctggtacatgacatccgacgaaatgagagccacctaattgatttccgggagtccgcaccaggggccctcagggaagagaccctgcaaagatcctgggagaccaagcctgggctcttggtgggggttcccggaatggtgaaggggctacatgaagctcaccagctctatggcaggctgccatggtcccaagtcctggcctttgcagcagctgtggcccaagatggcttcaacgtgactcatgatctagcccgtgccctggctgaacagctgccacccaacatgtccgagcgcttccgggagacgttcctgccatcgggccgcccgccactacctggctcgttgctgcatcggcccgacctggctgaggtgctggatgtacttggcacctccggcccggctgccttctacgcaggtggcaacctcacactggagatggtggccgaggctcagcacgcagggggtgtcataaccgaagaggacttcagcaattacagcgcccttgtggagaagcctgtgtgtggcgtgtacagaggccacctggttcttagtcccccacctccgcacacgggccctgccctcatcagtgctctcaacatcctggagggcttcaatctcaccagcctggtatcccgagaacaggctcttcactgggtggcagagaccctgaagattgcattagccctggccagcagactgggagatcccgtctatgattctaccatcactgagagcatggatgacatgctcagcaaggtggaggccgcctacctccggggccatatcaatgactcccaggcagcccctgccccactcctgcctgtctatgaactagacggagctcccacggctgcccaggtgctgatcatgggacctgatgacttcattgtggccatggttagctccctgaaccagccctttggcagcggccttatcaccccctcggggatcctgctcaacagccagatgctggacttctcctggcccaaccggacagctaaccactctgcacccagcctggagaattcagtgcagccagggaagcggccactctctttcctgctgcccacagtggtccgacccgcggaggggctctgtggaacctacctcgctctgggggccaatggagctgcgcggggcctcagcggcctgacacagcatctgaatagacaaccagccctctttagggtgggatttgaaaggaagggcctgcttttctccagaacacctcagaatggctccatgaatgtcttgagaacctgatatatatgccaggcacctattttggcaggtggttctgctgaatgtcctgaccttgaaccggaacctgagtgacagcctggcccgcggccgcctacacccggacctgcagtccaacctcctgcaggtggacagtgagttcacagaggaagagattgagttcctggaagccaggggtcaccacgtggagaaagtagatgtcttatcctgggtccatggcagccgaaggaccaacaacttcatcatcgctgttaaggaccctcggagcccagatgcagctggagccaccatcctgtagagcagcggggtggggcggggtctctgctcccccactttgcatgttcccagagtccctccttctcccaggtttggtctcagggggaccccagggatgccccagatcaggggccagaggggatgcttagcaaacccaatcccagagtaactggaaaattctccatcaggaggcctgtggtggtggtggtggtggtggtggtggtggtggtggtggtgagtgtcagcatctacagtacagccaggcaggcaggaccttgaggaatcagactatctgtctgtgtgtcacctctcctccttcagccatgctggccccgagcttagggatgtgcttgcaaacccttctcaagggtctcacaaccccaacatcttcagactggcctgacctgggccttgtcttccagttcctttctcccattcccagcctcatttcttaaatgactaggaattttttaatggaccatcatagggagggggtgctcctcttttcccaccaggttgaggtgggggccttgcatcgggggtccccagggtatggggtaggggtgggggtgggcaccagctcaggggcttccatttgcaaagggaaattaaagaaagaatgttgcttaa

SEQ ID NO: 885 - DNA, 2636 bp, Homo sapiens
ttccggcaggcgctgcgctgctggggggcgcgggcgaggatggcggcggagaacgaggccagccaggagagcgccctgggcgcctactcgccagtggactacatgagcatcaccagcttcccgcggctgcccgaggacgagccggcgcccgcggccccgctgaggggccgcaaggacgaggacgcctttctgggagaccccgacaccgacccggactccttcctgaagtctgcacggctgcagcggctgccatcgtcgtcgtcggagatgggcagccaagacgggtcgccgctacgcgagacgcgcaaagacccgttctccgccgcagcggccgagtgctcctgccgccaggatgggctcacggtcatcgtcacggcctgtctcaccttcgctaccggtgtcaccgtggcgctggtcatgcagatctacttcggggacccccagatcttccagcagggtgccgtggtgaccgatgctgcccgctgcacttcactgggcatcgaggtgctcagtaaacagggatcttctgtggacgcagcggtggcagcagccttgtgtttgggtatcgtggctccacacagttctggcctgggcggtgggggcgtgatgctggtacatgacatccgacgaaatgagagccacctaattgatttccgggagtccgcaccaggggccctcagggaagagaccctgcaaagatcctgggagaccaagcctgggctcttggtgggggttcccggaatggtgaaggggctacatgaagctcaccagctctatggcaggctgccatggtcccaagtcctggcctttgcagcagctgtggcccaagatggcttcaacgtgactcatgatctagcccgtgccctggctgaacagctgccacccaacatgtccgagcgcttccgggagacgttcctgccatcgggccgcccgccactacctggctcgttgctgcatcggcccgacctggctgaggtgctggatgtacttggcacctccggcccggctgccttctacgcaggtggcaacctcacactggagatggtggccgaggctcagcacgcagggggtgtcataaccgaagaggacttcagcaattacagcgcccttgtggagaagcctgtgtgtggcgtgtacagaggccacctggttcttagtcccccacctccgcacacgggccctgccctcatcagtgctctcaacatcctggagggcttcaatctcaccagcctggtatcccgagaacaggctcttcactgggtggcagagaccctgaagattgcattagccctggccagcagactgggagatcccgtctatgattctaccatcactgagagcatggatgacatgctcagcaaggtggaggccgcctacctccggggccatatcaatgactcccaggcagcccctgccccactcctgcctgtctatgaactagacggagctcccacggctgcccaggtgctgatcatgggacctgatgacttcattgtggccatggttagctccctgaaccagccctttggcagcggccttatcaccccctcggggatcctgctcaacagccagatgctggacttctcctggcccaaccggacagctaaccactctgcacccagcctggagaattcagtgcagccagggaagcggccactctctttcctgctgcccacagtggtccgacccgcggaggggctctgtggaacctacctcgctctgggggccaatggagctgcgcggggcctcagcggcctgacacaggttctgctgaatgtcctgaccttgaaccggaacctgagtgacagcctggcccgcggccgcctacacccggacctgcagtccaacctcctgcaggtggacagtgagttcacagaggaagagattgagttcctggaagccaggggtcaccacgtggagaaagtagatgtcttatcctgggtccatggcagccgaaggaccaacaacttcatcatcgctgttaaggaccctcggagcccagatgcagctggagccaccatcctgtagagcagcggggtggggcggggtctctgctcccccactttgcatgttcccagagtccctccttctcccaggtttggtctcagggggaccccagggatgccccagatcaggggccagaggggatgcttagcaaacccaatcccagagtaactggaaaattctccatcaggaggcctgtggtggtggtggtggtggtggtggtggtggtggtggtggtgagtgtcagcatctacagtacagccaggcaggcaggaccttgaggaatcagactatctgtctgtgtgtcacctctcctccttcagccatgctggccccgagcttagggatgtgcttgcaaacccttctcaagggtctcacaaccccaacatcttcagactggcctgacctgggccttgtcttccagttcctttctcccattcccagcctcatttcttaaatgactaggaattttttaatggaccatcatagggagggggtgctcctcttttcccaccaggttgaggtgggggccttgcatcgggggtccccagggtatggggtaggggtgggggtgggcaccagctcaggggcttccatttgcaaagggaaattaaagaaagaatgttgcttaa

SEQ ID NO: 886 - DNA, 2505 bp, Homo sapiens
ggggacgcggagctgagaggctccgggctagctaggtgtaggggtggacgggtcccaggaccctggtgagggttctctacttggccttcggtgggggtcaagacgcaggcacctacgccaaaggggagcaaagccgggctcggcccgaggcccccaggacctccatctcccaatgttggaggaatccgacacgtgacggtctgtccgccgtctcagactagaggagcgctgtaaacgccatggctcccaagaagctgtcctgccttcgttccctgctgctgccgctcagcctgacgctactgctgccccaggcagacactcggtcgttcgtagtggataggggtcatgaccggtttctcctagacggggccccgttccgctatgtgtctggcagcctgcactactttcgggtaccgcgggtgctttgggccgaccggcttttgaagatgcgatggagcggcctcaacgccatacagttttatgtgccctggaactaccacgagccacagcctggggtctataactttaatggcagccgggacctcattgcctttctgaatgaggcagctctagcgaacctgttggtcatactgagaccaggaccttacatctgtgcagagtgggagatggggggtctcccatcctggttgcttcgaaaacctgaaattcatctaagaacctcagatccagacttccttgccgcagtggactcctggttcaaggtcttgctgcccaagatatatccatggctttatcacaatgggggcaacatcattagcattcaggtggagaatgaatatggtagctacagagcctgtgacttcagctacatgaggcacttggctgggctcttccgtgcactgctaggagaaaagatcttgctcttcaccacagatgggcctgaaggactcaagtgtggctccctccggggactctataccactgtagattttggcccagctgacaacatgaccaaaatctttaccctgcttcggaagtatgaaccccatgggccattggtaaactctgagtactacacaggctggctggattactggggccagaatcactccacacggtctgtgtcagctgtaaccaaaggactagagaacatgctcaagttgggagccagtgtgaacatgtacatgttccatggaggtaccaactttggatattggaatggtgccgataagaagggacgcttccttccgattactaccagctatgactatgatgcacctatatctgaagcaggggaccccacacctaagctttttgctcttcgagatgtcatcagcaagttccaggaagttcctttgggacctttacctcccccgagccccaagatgatgcttggacctgtgactctgcacctggttgggcatttactggctttcctagacttgctttgcccccgtgggcccattcattcaatcttgccaatgacctttgaggctgtcaagcaggaccatggcttcatgttgtaccgaacctatatgacccataccatttttgagccaacaccattctgggtgccaaataatggagtccatgaccgtgcctatgtgatggtggatggggtgttccagggtgttgtggagcgaaatatgagagacaaactatttttgacggggaaactggggtccaaactggatatcttggtggagaacatggggaggctcagctttgggtctaacagcagtgacttcaagggcctgttgaagccaccaattctggggcaaacaatccttacccagtggatgatgttccctctgaaaattgataaccttgtgaagtggtggtttcccctccagttgccaaaatggccatatcctcaagctccttctggccccacattctactccaaaacatttccaattttaggctcagttggggacacatttctatatctacctggatggaccaagggccaagtctggatcaatgggtttaacttgggccggtactggacaaagcaggggccacaacagaccctctacgtgccaagattcctgctgtttcctaggggagccctcaacaaaattacattgctggaactagaagatgtacctctccagccccaagtccaatttttggataagcctatcctcaatagcactagtactttgcacaggacacatatcaattccctttcagctgatacactgagtgcctctgaaccaatggagttaagtgggcactgaaaggtaggccgggcatggtggctcatgcctgtaatcccagcactttgggaggctgagacgggtggattacctgaggtcaggacttcaagaccagcctggccaacatggtgaaaccccgtctccactaaaaatacaaaaattagccgggcgtgatggtgggcacctctaatcccagctacttgggaggctgagggcaggagaattgcttgaatccaggaggcagaggttgcagtgagtggaggttgtaccactgcactccagcctggctgacagtgagacactccatctcaaaaaaaaaaaa

SEQ ID NO: 887 - DNA, 3058 bp, Homo sapiens
acggcgcaggctccgcggcccgagcaggcgcgtcagccgagctcggcggtggcgcgggcggctgggacgcagctgcccccgctcggcgcccgctgcacccttagcagccactgccacctgggcccggagcctccacgatctcgcccggcgattgtgggcaggggcgcctccggatcgatcttctgaaattcaagttttcaagatgaagtttttattgacaactgcctttttaattttaatttccttgtgggtggaagaagcctattctaaggaaaagtcttcaaagaaagggaaggggaaaaagaagcagtatctatgcccatctcagcagtcagcagaggaccttgcccgagtacctgccaactccactagcaatatcttgaacaggttattggtcagttatgatcccaggataagaccaaacttcaaaggcattcctgttgatgtagtagtcaacatttttattaacagttttggatccattcaagaaacaacaatggactatagagttaacatcttcctgagacaaaaatggaatgaccccaggctgaagctccccagtgattttaggggttcagatgcactgacagtggatccaacaatgtacaagtgtttatggaaacctgatttattttttgcaaatgaaaaaagtgccaattttcatgatgtgacccaggaaaacatcctcctctttatttttcgtgatggagatgtccttgtcagcatgaggttatctattactctttcatgccctttggacttgacattgtttcccatggatacacaacgttgcaagatgcaactggagagctttggttacacaactgatgatttacgatttatctggcagtcaggagatcctgtgcaattagaaaaaattgccttgcctcaatttgatatcaaaaaggaagatattgaatatggtaactgtacaaaatactataaaggcacgggctactacacatgcgtggaagtcatcttcaccctgaggaggcaggtcggcttttacatgatgggggtctacgccccaactctgctcattgttgttctctcctggctttccttctggatcaacccggacgcgagtgctgccagagtgcccctgggtatcttctcagtcctcagcttggcctctgagtgcacaacccttgccgctgagcttcccaaagtttcctatgtgaaggctcttgatgtttggcttattgcttgccttctctttgggtttgcttccctggtggagtatgcagttgtccaggtgatgctgaacaaccccaaaagggttgaagctgaaaaagccagaattgctaaggctgagcaagcagatggaaaaggtggaaatgtggctaaaaagaatactgtgaatggaacagggactcctgttcatattagcactttgcaggttggtgagaccagatgcaaaaaagtttgtacttctaagtctgatctgagatctaatgacttcagcattgttggaagcttaccaagagattttgaactatccaattatgactgctatggaaaacccattgaagttaacaacggacttgggaaatctcaggctaagaacaacaagaagcctccccctgcgaaacctgttattccaacagcagcaaagcgaattgatctttatgcaagagcattgtttcctttctgcttcttgttcttcaatgttatatattggtctatatatttatgataaatcttttccatttgtacaaaataaaattccatttcattgtgacctactcctttcataaatgccaatctgtgagaacttttgaattttcatagcaacattgcattttggatgccatttgattgtaataaaactgtggcaccttaattttgaatggcagcatgatcatgtaatatctgtgctctaataacgatgtatatatgtatagtgaacatattgcttagtaacaaatgaaggacaagcatactacataatataatccatacaattctcttcagttagtgtaaactgcaaatactacagataattctgataataaaatgatatgcacgctgaatcctgctatggtcaccattctaatgtatgtagtatttcaaatttccttccttgtaactttcaaagaaagccatcttattcttgtaaaattttagatggtattatcacagatttaaaaaggttgtattacatattgtttaaactttgtaagtagaaatatatctgttataattatacaggctctgtggagaaataaagttcaaaatatattaatttgtaaaatcagctcgttttaaagtgtgcttgtgttgtcaaaaatatcagatagtaatacacagtgagcatttttaaacaaagggaaacctatatttatgtaactgtatactgaattctgacaaaataaaaaaagataccttattgacgaaatatttaggataaacaaaattctatttaatccaccttaaaacctaaatgtattttcatggatttcatttgttggtacatattacacaaaacattgtgccttaaaatgagtcatacatcttttaaattggaatgcagtaatagatatgtgattttacatcatttttaagaaaccaaggggaagtaataagttgaaaaagaaatccataactattaaaagattttaacttttttattttattaaaatgcttgcatattttaagtaaaattaaaaatgtttactgaatttatttttttatttgaatattttgggattagttacaaaatatttagagattaaataaataatagctttgtttgtgttagacttcacttctacttgtattttctttcttgttaaaagtctagacaactgagatttacttactttgaacttgttccaatccaaaagtaagcactaagtctcattttatgagaccaccatttcttaatatcacatccagtgcacctttgtctttctgccatatctgaaataaaactatcagtaattcacatagataaacataagactaaagaagtatatttacattatctggagagttttgttgcagctacgagtttgtatggcaaattcaataataaagtattgtttatgcaaattgc

SEQ ID NO: 888 - DNA, 735 bp, Homo sapiens
gcggtgtccggcagtagagctcgctgcagatccgggctctgaccatgatttggcgccgcgcggcgctggcggggacgcggctggtttggagcaggagcggctcggcaggctggcttgacagggcggcgggagctgcgggagctgcggcagctgcggcctctgggatggagagcaatacatcatcatctttggagaatttagcgacggcgcctgtgaaccagatccaagaaacaatttctgataattgtgtggtgattttctcaaaaacatcctgttcttactgtacaatggcaaaaaagcttttccatgacatgaatgttaactataaagtggtggaactggacctgcttgaatatggaaaccagttccaagatgctctttacaaaatgactggtgaaagaactgttccaagaatatttgtcaatggtacttttattggaggtgcaactgacactcataggcttcacaaagaaggaaaattgctcccactagttcatcagtgttatttaaaaaaaagtaagaggaaagaatttcagtgatgtttatactaataagtttgctagtacagtgtcagttatttaaagtggtaatgcccgataatgtcttttaaatgtttgaggatgttttaaatacatgcattgtcttcacgaagaagatgtaaaaataatgaacaataaattgcggtggaaacctcaaaaaaaaaaaaaaaaaaaaaaaaaaaaaaaaaaaaaaaaa

SEQ ID NO: 889 - DNA, 1170 bp, Homo sapiens
aaggctattattaccaccactgagtggcttaaataatcctgtcaacagcaatcgcccatttccaaagccatggtgaaacatctctgtgctaatttcttttgttttgtttcctaattttttttttttggcaggtggtgggaaataatctttgtcttctttggagtaaaccttcaacaccggattttttcttttaattatggatgtaaaccccaatatccccataatttacattgggtctcgaccaattgcctaattataagaggatatatttaggctcttatttcatccacacaaaaacttgtgtaacaggtagttggaaacatctgaggcaccactttgattctgttttggatggtcatgttttttctcctccgtttccccagcatgtctgccaccatcctcatgcactgcttccaagtgcctgggagcctttatgagcgtccctaaacctaaaagaatccagaggcggggctcggatgaaccctcgagataagcaagtgagccgcttctcccctctaaaggatgtttacacgtgggtggcactcgctggaatccagcgctcgggcagccctgggaggacgcgctcagctgcgaggaggatggagagcaatacatcatcatctttggagaatttagcgacggcgcctgtgaaccagatccaagaaacaatttctgataattgtgtggtgattttctcaaaaacatcctgttcttactgtacaatggcaaaaaagcttttccatgacatgaatgttaactataaagtggtggaactggacctgcttgaatatggaaaccagttccaagatgctctttacaaaatgactggtgaaagaactgttccaagaatatttgtcaatggtacttttattggaggtgcaactgacactcataggcttcacaaagaaggaaaattgctcccactagttcatcagtgttatttaaaaaaaagtaagaggaaagaatttcagtgatgtttatactaataagtttgctagtacagtgtcagttatttaaagtggtaatgcccgataatgtcttttaaatgtttgaggatgttttaaatacatgcattgtcttcacgaagaagatgtaaaaataatgaacaataaattgcggtggaaacctaaaaaaaaaaaaaaaaaaaaaaaaaaaaaaaaaaaaaaaaaa

SEQ ID NO: 890 - DNA, 3499 bp, Homo sapiens
ggtgcggggctgctggcggctctgcagagtcgagagtgggagaagagcggagcgtgtgagcagtactgcggcctcctctcctctcctaacctcgctctcgcggcctagctttacccgcccgcctgctcggcgaccagcggggatcctcccccagccgcaagtccacgaagaaagcaacgaatgaaaattatgaagacaacgagaagtcagactcctccgggtcgcgctccagctgcttcggcttcgtcgcctactctgtgaactccggggagagatctcgagtcaagattaagaccttaacccaccaacctgcctgttcggacaccccccgggccggccgctgtctgtccccttctccatcgccctctcccagaaagctccggtgcttggaccagctagagtctgagaaagaggagaggcgcgaacgccactccaaaaagagaagggttaaagagggcaaccctaacgatacgcttgactttctgtggctgggaacaccttccaccatgaccacctcagcaagttcccacttaaataaaggcatcaagcaggtgtacatgtccctgcctcagggtgagaaagtccaggccatgtatatctggatcgatggtactggagaaggactgcgctgcaagacccggaccctggacagtgagcccaagtgtgtggaagagttgcctgagtggaatttcgatggctctagtactttacagtctgagggttccaacagtgacatgtatctcgtgcctgctgccatgtttcgggaccccttccgtaaggaccctaacaagctggtgttatgtgaagttttcaagtacaatcgaaggcctgcagagaccaatttgaggcacacctgtaaacggataatggacatggtgagcaaccagcacccctggtttggcatggagcaggagtataccctcatggggacagatgggcacccctttggttggccttccaacggcttcccagggccccagggtccatattactgtggtgtgggagcagacagagcctatggcagggacatcgtggaggcccattaccgggcctgcttgtatgctggagtcaagattgcggggactaatgccgaggtcatgcctgcccagtgggaatttcagattggaccttgtgaaggaatcagcatgggagatcatctctgggtggcccgtttcatcttgcatcgtgtgtgtgaagactttggagtgatagcaacctttgatcctaagcccattcctgggaactggaatggtgcaggctgccataccaacttcagcaccaaggccatgcgggaggagaatggtctgaagtacatcgaggaggccattgagaaactaagcaagcggcaccagtaccacatccgtgcctatgatcccaagggaggcctggacaatgcccgacgtctaactggattccatgaaacctccaacatcaacgacttttctgctggtgtagccaatcgtagcgccagcatacgcattccccggactgttggccaggagaagaagggttactttgaagatcgtcgcccctctgccaactgcgaccccttttcggtgacagaagccctcatccgcacgtgtcttctcaatgaaaccggcgatgagcccttccagtacaaaaattaagtggactagacctccagctgttgagcccctcctagttcttcatcccactccaactcttccccctctcccagttgtcccgattgtaactcaaagggtggaatatcaaggtcgtttttttcattccatgtgcccagttaatcttgctttctttgtttggctgggatagaggggtcaagttattaatttcttcacacctaccctcctttttttccctatcactgaagctttttagtgcattagtggggaggagggtggggagacataaccactgcttccatttaatggggtgcacctgtccaataggcgtagctatccggacagagcacgtttgcagaagggggtctcttcttccaggtagctgaaaggggaagacctgacgtactctggttaggttaggacttgccctcgtggtggaaacttttcttaaaaagttataaccaacttttctattaaaagtgggaattaggagagaaggtaggggttgggaatcagagagaatggctttggtctcttgcttgtgggactagcctggcttgggactaaatgccctgctctgaacacgaagcttagtataaactgatggatatccctaccttgaaagaagaaaaggttcttactgcttggtccttgatttatcacacaaagcagaatagtatttttatatttaaatgtaaagacaaaaaactatatgtatggttttgtggattatgtgtgttttgctaaaggaaaaaaccatccaggtcacggggcaccaaatttgagacaaatagtcggattagaaataaagcatctcattttgagtagagagcaagggaagtggttcttagatggtgatctgggattaggccctcaagacccttttgggtttctgccctgcccaccctctggagaaggtgggcactggattagttaacagacaacacgttactagcagtcacttgatctccgtggctttggtttaaaagacacacttgtccacataggtttagagataagagttggctggtcaacttgagcatgttactgacagagggggtattggggttattttctggtaggaatagcatgtcactaaagcaggccttttgatattaaattttttaaaaagcaaaattatagaagtttagattttaatcaaatttgtagggtttctaggtaatttttacagaattgcttgtttgcttcaactgtctcctacctctgctcttggaggagatggggacagggctggagtcaaaacacttgtaattttgtatcttgatgtctttgttaagactgctgaagaattattttttttcttttataataaggaataaaccccacctttattccttcatttcatctaccattttctggttcttgtgttggctgtggcaggccagctgtggttttcttttgccatgacaacttctaattgccatgtacagtatgttcaaagtcaaataactcctcattgtaaacaaactgtgtaactgcccaaagcagcacttataaatcagcctaacataagatctctctgatgtgtttgtgattctttcaaatccctatgtgccattatatttctttatttcctaaaacaggcaaaataagctcaagtttatgtactctgagtttttaaaacactggagtgatgttgctgaccagccgtttcctgtacctctctaagttgggtatttgggacttaagggattaagtttttcacctagacttagttacacacaatcttggcatttcctagcctagaggtttgtagcagggtacaagccccactcctcccccttcctttgctcccctgagtttggttttggcttaccataacattgttttgaccattcctagcctaatacaatagcctaacataatgtaagatt

SEQ ID NO: 891 - DNA, 4125 bp, Homo sapiens
cgactgggccaggcgccggggcaggaagggaggcggccgccgtgccattcttaaaggcgcccgagtgtaggcgacaggccgctgacggccggaaggaaaatgagtgagtctttggttgtttgtgatgttgccgaagatttagtggaaaagctgagaaagtttcgttttcgcaaagaaacgaacaacgctgctattataatgaagattgacaaggataaacgcctggtggtactggatgaggagcttgagggcatttcaccagatgaacttaaagatgaactacctgaacgacaacctcgcttcattgtgtatagttataaatatcaacatgatgatggaagagtttcatatcctctgtgctttattttctccagtcctgttggatgtaagcctgaacaacagatgatgtatgctggaagtaagaataagctagtccagacagctgaactaaccaaggtatttgaaataagaaataccgaagacctaactgaagaatggttacgtgagaaacttggattttttcactaatgtgaacttctgtgtttctaaagtatttatgtattaacctgaccatactggaatcagacataaatacttatttatgcctaaaaatgcactgttacttacagtttgtttcctgcagtaaagaaaaattcttcatttgtgcaaaatttgaacaaagaggaaatcatcttcatagtaatgaaactttgtaaagtgtttccttatattggtaattgttaggtggactacttttctccagggactttttgcactcttgtgactaatttctataacttatggttcggaatttgttactatttacagacaccattggaaagtggatatattagattgtgagagacaacagttgcctccttttgacaaatactggatattagcagtttatttatgaaaatagcgtattatcacttgtcaaatcattgaaattcatttggggtcaaagacttgagtgacccagtattgagccatgaataatttagtgtaacctgtattacaagtacattgatgaattctgtatcttctttggtttcctgtatctttttaatcaagtctagaaactatgttcatcagtcactcatttttaaggtcgggagttagattttatgatagaattatgactgttagcttttctccttatagcatcttagtcttagaaattggtgggttgtaataatcaagggcttcattccttttatgtcatttctagacagttttgaatctaggttaataacactttatttataaagcacctcaatgtcctgtgaacactaattattttaaatgtgttaatactgtgcctttgatttgttagctttaaagttagtttaagacttttacactgccagtattccacatttggtgaaattaatacttttttaaagggtccaaataaaataattttctaatgtgtatatctgaaatttgtaataaaatcaacttcatattttaaaaattccaactatctgcttgcattggtgaatatatggcagtcgagagttataattttgggtatacttgtggttagttttgtgccataggaaaaaattatcttaaaactttggccatagttaataacattaacacttcaatagcaatcacatcttatatcctaaatgtcagaagatattctgaactggatgcctgaatagttaactaaaccagtcttgttagatgatggtactcttggcataaagcgaggattctgatatttggcatacttgtaaaaacaaatacataagtaaccattgaacattaatttgataataggtctagagactctaaaaactaaccaaacttggtgagtgtattcttatattaagaatatcttagtcatctcaaaactagcaaaatttaaattttggcatgttttccattcatatgttctttgcattttatttttgaggtttctgtgagaagtaaagatagttggaatttttgcgatattgaatagaacatcttctgttcccaacactgtttggcttcactaatttagaagtcaggaagcaatagaaagttggagatgaggaagtgctagagtaggtgtttgttttggttcttggagggaaaagattctttattccaatttccagagagaagagaaaactcacccaggaagtttaaaaattctttaaacaggtattttgatattggagaataacatgcatataattctgtaggaatgcacatgtaatccaagtgagtggagagtgtttttaatgtttttgaatgaaggaaatgaggttttgtttcacctgttttgcagcagtaagagaaactagtgctgcaagaatgtattttttaatgaagttccttattttgtcttgcatgttttagttttgcttatttttaaatttggaggtcctccataatgtcagataatattgacctgccatacgttagcactcttagttccgctactgtctttaacaggagcaaagagctgtgataaaccatgcttttttgagcttgtctgactcctaattaataacatgtttttggcaagacaacagattgaggttagaggatcagtaggacatttttattccatctgtcctatggggaaatttacaaatcccgtgctctaaaatgttctcaaacatttatatagatttccctttcatcttactaaattttgcattgttcttttcaagtatgtttcgtatttactgtctttttttctgccatttcccaaataataactccagatttcataattccagtttttacattccgttatctttctggtacaaccattcccattcagccttaaatctgagtcctttttagcagcaacttttttcctgggatcctccttcgtggtcttctaagtcagtgttagttttgaaatttttggccctgcataagttctgcatagcatctaatgtcaaaatagaaccaactggtaatcacagtattatttagtgtggtttccatgacaacaaaaatacatacgaagaaaacttctcaggttactatgctgaaattccaaaatgtctgagttttgaatagtgatcactttgttctggtattgacgcaattatattaggaaaaaagttggttgactgtttttgtttaattgacttctaaaatgttcaaattgtctagttctaaaagtttactaaatgcctagtgcagttaaacatactcttgtttaagtgtgtgttgctaaattttttactgtcattactaaataatctgtgtggcaaaatgtgtgtcagcacttttccctccttttttatctcctattttcaggagtcaaatgtagccataaactgtatccttgtctgacactttagctaaaaatttccagttaggggagtttattgccaaattaaatttggctgttccccccaacccatatagatattaaggaaggtgtacttaaaaaatgtttggactgcttttaaaacctgagcaatgtcattaatccatatgtggactagtgatgaatagatattttcataagagtttaaatgctgatatttggtggaagtagagagtaactcatattctatcaattcaagtattcttactatggttgctttccctatttgttcaatagactgataatactggaatttatagagtttgagccattacaacttttgtgaggatgtgtttcaaacatttctggacaaatcttattttgtatttctggaagaatgtagtaatcttctagaccgcttaaaaccaatgctcccaagctgaatattcttgagaaatttgtttttattatgccatttgacatttcaaatcagtgctcatatacagtaaacttgtgatagaaattgtattttattgctttttggattataattcatataaatataattacttgaatattgtttgagatcattaacatgccagggcagttcccactgatttagatggtccaagataatctcattcaggaggcttgaaacattaatggtttagtcttgtgaattttaacagttctctgtcatcgtttaacaaaaccaacaactgacacaactccttaagctgtggtttcagtctctgctagttcatattgcatgtttattttggacagtcttttgttaagcatggtgcttgtactggtttaaataaaatgttaacatt

SEQ ID NO: 892 - DNA, 964 bp, Homo sapiens
gagaacacaaagtaaaacttctgctgttcccagtcctgcagccccagcccagccgtcccccgcgggcgtggcaggtcctgagtcagggcctgtccgtggccagcatccctgctgggcgattgagcagcgggaagctgcttggacccagtctcaaacttaaccctcatctagcacccgggcaggcctcctgggttgcagggacttgagaaaaggcagagttctcaggtcctaggaagctggggcacgctggcgtgacaagcgtcccggagaaagccaagccctcggggagctggggaccgcagcagggctgcagtcacatcctgcgcgggtgggcggcgggccaggccttcagttgtttcgggacgcgccgagcttcgccgctcttccagcggctccgctgccagagctagcccgagcccggttctggggcgaaaatgcctgcccttcacatcgaagatttgccagagaaggaaaaactgaaaatggaagttgagcagcttcgcaaagaagtgaagttgcagagacaacaagtgtctaaatgttctgaagaaataaagaactatattgaagaacgttctggagaggatcctctagtaaagggaattccagaagacaagaacccctttaaagaaaaaggcagctgtgttatttcataaataacttgggagaaactgcatcctaagtggaagaactagtttgttttagttttcccagataaaaccaacatgctttttaaggaaggaagaatgaaattaaaaggagactttcttaagcaccatatagatagggttatgtataaaagcatatgtgctactcatctttgctcactatgcagtcttttttaagagagcagagagtatcagatgtacaattatggaaataagaacattacttgagcatgacacttctttcagtatattgcttgatgcttcaaataaagttttgtcttgggaaaaaaaaaaaa

SEQ ID NO: 893 - DNA, 698 bp, Homo sapiens
cacaaactgggaggaaaactgagacctcctggtacccgccgccgggccttttagaaactcccacaagctctgccttccctccctggtcctcttcagaccccctcttagttcttcgcggctaacggctcgcgctcggggccgggtgtggagctggaacagagggctggcaaggcgcgcatcggaccgagggtggagccgctgagcacagaaccggaaacttagagacaaagttcggagccccgcccccgccgcgcgccgctgagttgtctggccccgccgacccacggcccacgacccaccgacccacgaatcggcccggccgtcgcgtgcaccatgtctggctcctccagcgtcgccgctatgaagaaagtggttcaacagctccggctggaggccggactcaaccgcgtaaaagtttcccaggcagctgcagacttgaaacagttctgtctgcagaatgctcaacatgaccctctgctgactggagtatcttcaagtacaaatcccttcagaccccagaaagtctgttcctttttgtagtaaaatgaatctttcaaaggtttcccaaaccactccttatgatccagtgatattcaagagagctacatttgaagcctgtacaaaagcttatccctgtaacacatgtgccataatatacaaacttctactttcgtcagtccttaacatctacctctctg

SEQ ID NO: 894 - DNA, 4264 bp, Homo sapiens
gagtgtcggccccgcccccgcagaggggagcgagcgctcgcgggccggggcggagggttcggctgcgcggcggggctgaggcggccgcggggcccgagcgcagggagtggagcttggtttcgggatctcggtgctgcagacggcgagacctcctgcacagggtgtacagcaagctgtgattcctgggaaaactaaaaaagctctctgaacaacggggcccagagctgatggcagacaatgtcagccactaacaacatagcccaggcccggaagctggtggaacagctacgcatagaagccgggattgagcgcatcaaggtctccaaagcggcgtctgacctcatgagctactgtgagcaacatgcccggaacgaccccctgctggtcggagtccctgcctcggagaacccctttaaggacaagaaaccttgtattattttataactgtgttctcatatgttctctctctctctctctctttctctctctctctctctgtctctgtctctgtctcaggcagggcatcattcagtaattagctcaaacaaaacatctcaagtccccaaaacctttaattccaaaagaaatcccccctctccccgccaaaaaaggcgttcccaccgcccggatggggtagaatggaccttgtaggtggagatgaattttcaggtccgaccccatggccctctcagtttgggccaaaagggatggaggctttacggccacttcccgttcggaataactgaaatcccccagcgatggggtaacaattttttaaaactctcgattgccgtttcaattgtggaccggcgccgagggggaaagggaggtgacttcgcccggtggcaatagttccgggagaattggccattggtaaaaagacttcatagggtcactggaatgctttgtgttgtttttaagtagaggtaaaattgagatggggggcgggaggtgacatcatgaagttttttggaaatatctctttatttaaaaaattgttactccatacggctaaactcggattgtgatggttgaacccgtcgctaaactgcacgatcctgcaatgaatgcacgatggagtgtgggggtctggagggggcttcgtctatgaaaagttgccaagtgtgactcccctgcatgatgttagccatgggtcctttctgcagggtcccctctgtgccagaaatgggttttcgggacttgccccagggaagccgtcaccggcccggcccatcatgtttttggattttttttttttttctttttttgagatggagtttcattcttgttacccaggctggagtgcagctgcatgatttcagctcaccgcaacctctgcctccccggttcaagcgattctcctgcctcagcctcccgagtagctgagactacaggcgtgtgccactacgcccggctaattgttgtatttttagtagagacggggtttcaccgtattggccaggccgctctcaaactcctgacctcgggatccgcccacctcggcctcccaaagtgctgggattacaggcatgagccaccgcgcccagtgtgttttaagcatgaggcatccgcgtggctgggagaggctttgaccatccttggctcttccaggttgtcctaccctctggcatccaccatagacgtttttcaaacagaaaatgcaggctggggagccgcggcagggcgggtggggctaccctgtgctgctgtgtgtacaaaattgttccatgatcttggagtgactctgaaggactctgggaggtgagacgttgtcccggagatcaaaacgtccgctcaaaacgttaccctgtcgctcgaacccgatctttttgcttttccacccccgtgcaacccaggacggctgtctgaggccgggagatgccttagacgcaggatgggccactcctcccagcggcaagtggaaatcgaagatgtcatggggtcggggggaggcttctgaaagatgactgcgtcctcctctgcggcacggacgggagcaggtgcagccacatcttccagggcctgccggcatcacctgcggccacacctgagatggaccccacgcagccctgatcgcaggaggcctggccgccccgaccccctccacggggctggcctagaagcaagtagtagaataaaactagcctagtcctgtccctccggccccagtggagacaggcgtctaagaacccgtgccgagagggttcctggacggccgcccaggtcctccgtgcaggcccgtgaggcggggatccctgcttggctcacttcctgagctggtgactgccagggttcccacctcgccaaggctagagggctccgggtgtgtgtgcaggtgtcgggggagtgacctccactcctcaacctcgggcagctcccacaggccacagccgggctccccacccccggcacccagctctctacggcaggtccgggagggctggggcttcggggagccctacccgccaaacctgctgttggcccgggagagccccagaggctcccggagactgcagcctcctgtggttgggctgggagccggcagggtttggggtgtgggcgtccccaccacgcatagcaggaatggcaggaagggacaaaagcctgttccagagaccctgggaggaccccaggcagggagagcccgcctgcctccaccctttccaacaagccatcttggtaactgggaacaaacacaccccaccccgtttttccttaaaagaggccttaatccccgagcccccgctgccagggcagagggaggagggggcacagctgtgccaagcccggccccactggtgtgtcctcacaatgtgaccccagaaatgccagcagggaacggaggctgctgcagagacgcagccccaggcagccggggctcctaggctggtgcagatggtggggttaaacgggctgagcgttccaggtaaactgaggctcggggaggggaaggacaggctggcctctccttcactgtccacagggccttgggttccctgagctgtccagaccccaccatctcccggaccccagggaggtggccattgccagaagcctgtgggtttctttctagcttgggggattaaaaaaaaaattctccacttttttttttcttgagtagacttcagtgaccacactgtggaaaatacctttgcagacgtggcacccgagtgcacacaccgaccgccacatgtgcttttctgccgggaatccctggggtgaacgcatgttttatgggcgtttccaggagcgcgcgtgcacctccagacggggagctggcgggcgggggtggcagcagcagctctagccttggggggacaagcctctctcagctacgccaggggaaaagagagttaaggacactcacccccacccacgcacacacacaaggcagcgtcgggtgggagagagaaggccgtttctccttctgtagcctgggtctcccacgggccttccccgctgctgagcgagacaccagtagccaggtgaagggccacagcgggccaggccccgaccctgttgtgacccacctgggcaccttcccggaccagctccgcctcccctgccctcctctctccaggaaggagccagaaccctcacccctctcccaccctccccaggggtaaccccaggccaagcacagatagctcagctgcgacctctggcctctggggacataaacggggcggctgggccagggcggaaggtgctcctgtttccctccttctgcgtggtccctttgacgggccggccaccgtgtccgaggcgcaacgctaggcctccaggccacgcatccatctccaagttaacagcccgtcctgcccaagttctggggcaggtaggagagggccgtcacacacctgtccgcccgtgagtgacccgggggggcttccgggtggaggtggagccaccacgcccttcctcaaggggtcacttattaaaaagtccacggcctgaggccaggccctctgcacagaagccatatgccggccagccgcgcctcctcctctgtccacggaaccgctgcccatctaaccttcgtaaagacctgtctcctgtttccagccgccgcctgtggttctagcaggttctatgccatctgcattgggatgtctggttgtttttatttctgacttttttaaaattccaggtgtgccgcacccactttctcgcagtgttttaatattgtgtggagttgtcgataccacgtgaattcatacacaataaaaagcctcactctccctttaaaaaaaaaaaaaaaaaa

SEQ ID NO: 895 - DNA, 738 bp, Homo sapiens
gtatctgtggtaaacccagtgacacgggggagatgacatacaaaaagggcaggacctgagaaagattaagctgcaggctccctgcccataaaacagggtgtgaaaggcatctcagcggctgccccaccatggctacctgggccctcctgctccttgcagccatgctcctgggcaacccaggtctggtcttctctcgtctgagccctgagtactacgacctggcaagagcccacctgcgtgatgaggagaaatcctgcccgtgcctggcccaggagggcccccagggtgacctgttgaccaaaacacaggagctgggccgtgactacaggacctgtctgacgatagtccaaaaactgaagaagatggtggataagcccacccagagaagtgtttccaatgctgcgacccgggtgtgtaggacggggaggtcacgatggcgcgacgtctgcagaaatttcatgaggaggtatcagtctagagttacccagggcctcgtggccggagaaactgcccagcagatctgtgaggacctcaggttgtgtataccttctacaggtcccctctgagccctctcaccttgtcctgtggaagaagcacaggctcctgtcctcagatcccgggaacctcagcaacctctgccggctcctcgcttcctcgatccagaatccactctccagtctccctcccctgactccctctgctgtcctcccctctcacgagaataaagtgtcaagcaag

SEQ ID NO: 896 - DNA, 853 bp, Homo sapiens
cctgggccctcctgctccttgcagccatgctcctgggcaacccagcccctgcctccgcatctgcgtggtgaaggccattggcctcatcggtggatctgcgtttcctcgggcccacactgtctaggattgtgcggggctggtgagagaacaagatctcttccgtgttcaaggcagacttcctgccccctgcaccctgctctctcccgggccttgaggtcagtgtgagccccaagggcaagaacacttctggaagggagagtggatttggctgggcctctggatggaaggtctggtcttctctcgtctgagccctgagtactacgacccggcaagagcccacctgcgtgatggggagaaatcctgcccgtgcgggcaggagggcccccagggtgacctgttgaccaaaacacaggagctgggccgtgactacaggacctgtctgacgatagtccaaaaactgaagaagatggtggataagcccacccagagaagtgtttccaatgctgcgacccgggtgtgtaggacggggaggtcacgatggcgcgacgtctgcagaaatttcatgaggaggtatcagtctagagttatccaaggcctcgtggccggagaaactgcccagcagatctgtgaggacctcaggttgtgtataccttctacaggtcccctctgagccctctcaccttgtcctgtggaagaagcacaggctcctgtcctcagatcccgggaacgtcagcaacctctgccggctcctcgcttcctcgatccagaatccactctccagtctccctcccctgactccctctgctgtcctcccctctcaggggaataaagtgtcaagcaagattttagccgc

SEQ ID NO: 897 - DNA, 2687 bp, Homo sapiens
cgcgactgcgcgcatgcgctgcagggccctgcgcggcttccgtcctggctgagatggcggcgcccgggatcctgtgtagcggctgcagagggtgccgccgccctaggcgaagtagggccgtcctgagcgaaagaaccgcccccagcaggagcaccaccacggcttagcaaagaatcccagaccccgcccgggaaggcagccgcaccatggagtcttccagttcatctaactcttatttctccgttggcccaaccagtcccagcgctgtcgtgctcctctactcgaaggagctcaaaaagtgggatgagtttgaagatattttagaagagaggaggcatgtcagtgacttgaaatttgcaatgaaatgctacacacctcttgtctataagggaattactccatgtaaaccaattgatattaaatgtagtgttctcaattctgaggagattcattatgtcattaaacagctttccaaggaatcccttcaatctgtggatgtcctccgagaggaagtgagtgagatcttagatgaaatgagtcacaaactgcgtcttggagccattcggttttgtgccttcaccctgagcaaagtatttaaacaaattttctcgaaggtgtgtgtaaatgaagaaggtattcagaaactacaaagagccatccaggagcatcctgttgttctgctgcctagtcatcgaagttacattgacttcctcatgttgtcttttcttctatacaattatgatttgcctgtgccagttatagcagcaggaatggacttcctgggaatgaaaatggttggtgagctgctacgaatgtcgggtgcctttttcatgcggcgtacctttggtggcaataaactctactgggctgtattctctgaatatgtaaaaactatgttacggaatggttatgctcctgttgaatttttcctcgaagggacaagaagccgctctgccaagacattgactcctaaatttggtcttctgaatattgtgatggagccattttttaaaagagaagtttttgatacctaccttgtcccaattagtatcagttatgataagatcttggaagaaactctttatgtgtatgagcttctaggggttcctaaaccaaaagagtctacaactgggttgctgaaagccagaaagattctctctgaaaattttggaagcatccatgtgtactttggagatcctgtgtcacttcgatctttggcagctgggaggatgagtcggagctcatataacttggttccaagatacattcctcagaaacagtctgaggacatgcatgcctttgtcactgaagttgcctacaaaatggagcttctgcaaattgaaaacatggttttgagcccctggaccctaatagttgctgttctgcttcagaaccggccatccatggactttgatgctctggtggaaaagactttatggctaaaaggcttaacccaggcatttggagggtttctcatttggcctgataataaacctgctgaagaagttgtcccggccagcattcttctgcattccaacattgccagccttgtcaaagaccaggtgattctgaaagtggactccggagactcggaagtggtcgatgggcttatgctccagcacatcactctcctcatgtgctcagcttataggaaccagctgctcaacatttttgtgcgcccatccttagtagcagtagcattgcagatgacaccagggttcaggaaagaggatgtctacagttgctttcgcttcctacgtgatgtttttgcagatgagttcatcttccttccaggaaacacactaaaggactttgaagaaggctgttacctgctttgtaaaagtgaagccatacaagtgactacgaaagacatcctagttacagagaaaggaaatactgtgttagaatttttagtaggactctttaaaccttttgtggaaagctatcagataatttgcaagtaccttttgagtgaagaagaggaccacttcagtgaggaacagtacttggctgcagtcagaaaattcacaagtcagcttctcgatcaaggtacctctcaatgttatgatgtattatcttctgatgtgcagaaaaacgccttagcagcctgtgtgaggctcggagtagtggagaagaagaagataaataataactgtatatttaatgtgaatgaacctgccacaaccaaattagaagaaatgcttggttgtaagacaccaataggaaaaccagccactgcaaaactttaataatcaacaaatagttatggaaaattcggtcacgtaattactctcatcgaaggactcattacaacaaacagggaagtaaaggaagagacacatcctctcatactccctgagactctgagaacagtggacgcagagggaagagatgatcattggaagcaatcagtttactcttccccaccacagtggttaaaaggcgtttgtatctgacactatgtgtgtgttttaaaataaacttttggaaacatgtttggaaaagcaaagctcagctcatttcactaacacttttcagcttactatatgtattaaacttttatgttgacttttgaattaaagtatgacaacactgaaagctctggatattaaaagaaaatgaaaagggcatatctacgttacttgtagcttgctttaattaaagttgcctcaaacaagtaaaaaaaa

SEQ ID NO: 898 - DNA, 3942 bp, Homo sapiens
cgggtggcgccttggcctccgcctccgctcgcctgcgcgcggccctgcgtgagggggcagaggcgaggtggaggcgttggcgctgccacgtctgggccgcggttcccaactgtggcgcgggcggtggaggaggaggtggggctggcgctgaagccggatccggatccggtgctgtgcacactggtgggggagagtccgacgcgcctggctaggagcgccgaccgcagggcctctacggaccttactagaaaaatgaaacctgatgaaactcctatgtttgacccaagtctactcaaagaagtggactggagtcagaatacagctacattttctccagccatttccccaacacatcctggagaaggcttggttttgaggcctctttgtactgctgacttaaatagaggtttttttaaggtattgggtcagctaacagagactggagttgtcagccctgaacaatttatgaaatcttttgagcatatgaagaaatctggggattattatgttacagttgtagaagatgtgactctaggacagattgttgctacggcaactctgattatagaacataaattcatccattcctgtgctaagagaggaagagtagaagatgttgttgttagtgatgaatgcagaggaaagcagcttggcaaattgttattatcaacccttactttgctaagcaagaaactgaactgttacaagattacccttgaatgtctaccacaaaatgttggtttctataaaaagtttggatatactgtatctgaagaaaactacatgtgtcggaggtttctaaagtaaaaatcttgtaagaaaattgtcaaaggggctaatgctacaaggctacactcttcctagagttgaaatattttgttgctgcagccgagtgacctccataaatactggactgaaaaaacattgtaatactacaagtataatgacatttagaagattactttgggctggtgggacatgctgtgaatttagattacaaatgaatattataaaggggatgatttttaaccaaaggaatatatttttaacttgaatcttttcttgcattgtatttttctaaaagtttggcttcctttcttggtagtcaagagtatgggtaataaggagttatatgtctgctatctgtgttgctcatttaaaaaaagtatacattgaataaggctgtttatcacatgcataaaattaaatatttttgtttcaaagaaacatctcaatacacttaggggtgtattgtttcccacatattaagtcagggtggataaattagttattataactaaacatagtatagtccaacattcgttgatcccaatacaggcaaacaacctggtcaaccttttgaagtagaagaaatgaaaattacttgacaagattaaaagtaaaacaatttaaatgttttactgaaagtttatatagtatagtctatgtagataaaaagtaccacttgtcttttctgtgaattatgactattcatttgttaaaaatacctaagagcaattatagtgggacatctaaggtcctctgtaaacagtgaattagcaaacctcagcctatgtgtttctaccctgatttttttcttttcatgggtatctgaagcctctaagttttttcaaaaatggagtatcacaaaattgagtgaaacacaatacttaatgtattgtactagattgccaaattcataaaatgttaatggaagctttttgatgtgattataatggcactattctggtcattatcctattttgattttatttaattttttaaagttgaagaattaaatattttaatggttctaatcttttgcattccatgttgcattaaacctgtttatatgagtagtcttctgttagaatcacatctgtgcttttcttgagtctgctgttgaactattagattaagtcataattcataaaattttagtttaatgtgctctttgtaaaatgaaattgtaaagaaaataccagtgtttctcatcccattgactcacaccacgtcatctggattttggatttccctccatgcagccagctatagttggctttccaaaacaacagaaatccttcaccaatagagtgcactacttacctgcttatagcctatacagacgaactgatctgtccttcgtgaaacgcaacaaagctagttctgtcttttcagaagtcctacaaccttgacaaagagtagttttatcaggtaaatcctggtaattaaaaacgcatgtttttaaaaattagcctggtaaggccgggtgcagtggctcacgcctgtaatcccagcactttgggaggctgaggtgggcagatcacaaggtcaggagtttgagaccagcctgaccaaaatggtgaaaccctgtctctactaaaaaaaagaaaaattagccagacgtggtggcatgcgcctgtgatcccggctactcaggaggctgaggcgagagaatcgcttgaacccgggaggcaaaggttgcagtgagctgagatcacaccactgcactccagcctggcgacagagagagactccatctcaaaacaaaacaaaaaaaattagcctacttaaaggcacaactaaatgctttattacctttcttaccactggacaatttgaggtaaaatcattcacaaggttggcacttcagtaaatccctttaaatagtgttcctaagatatctcttaaatcctcccataggaaatagaattacaggtaaggtacaccatacaaaaattgtgtcattgaggacaatggtgatctgtaattttagttgagtatgtttatgatttttgaagccatatggtgagtaaatgtaaatatgaaaaaagtgctacataaaacacttcttaaactttttttttttaaaaactgctccttgtggagcaggactaccccataggcagtgtacccacaatagatagccttttgttgttgttgttgttgagacaaggtctcgctgttgcccaggctagagcgcaggagcacaatcaccacacactgccgcttcaatctcctgggctcaaatgatccttccacctcagcctcccatgtggctgggactataggtgcatgccaccacacccagctaattaaaaaaattttttgtgtggagtctatgttgcccaggctggtctcttaactcctaggctcaagtgatcctcccacctcagcctcccaaagtgcttggatgacaggtgcgagccactgcacctggcccacattttttaaagagacactgtcccactccatcacccaggctggagtccagtggtgtgatcatagctcactgcatcctccagttcctgggttcaagccatccctcctgcctcagcctccccagtagctggaactacaggtgtgtgccatcacacctggctttacatttttctgtggggtcttactatattgcccaagccggtctcaaactcctgagctcaagtgatcctctgcctcagcctccagagtatctgggattacatatgtcggctaccgtgtctggccgttcacatctttggccactatttgcttgtgaaaaggtataatgaggtggtacttatcatttttactgtgtctcatgttttgtatatttttgtttcatcaactaagatgcactgtaacatctctgaaatctggatatattatcaatggtttatcatagttttgttagcaatacactgtcttttagtggtgcctaaaataatggtatagttgtgaggtgatcttagatttgatgaagcacagtatgcaggtaggcctaatgggggaagatggtaatataaaagcaagaagtattttttttttgtaatgactgaaagctgttctgtggatgacctaccctttcctttaaacacgattctctcacttccaactccaaacttgctcaactaatccttaaaaataaacttgagctggaatttgaaaaaaaaaaaaaaaaaa

SEQ ID NO: 899 - DNA, 2676 bp, Homo sapiens
atattggaaaggcgccgccgccgcctccgccttggagctcggggtgtttcggggactgcggccacaggcaggaaggcgctcctctcctgccccgccgacgcccggccagcccgcttcgccctgacctgtttcctcatgactgcccccggccctgctgccgacggacgtcgccccggcgtccggatttaacacggaaacccggatcggaggccgcgcggggaggaggagggcgacccggtcggtcctgcgaccctctcggcccggctcggcgcctcggcgggagccatgacctcgctgacccagcgcagctccggcctggtgcagcggcgcaccgaggcctcccgcaacgccgccgacaaggagcgggcggcgggcggcggcgccggcagcagcgaggacgacgcgcagagccgccgcgacgagcaggacgacgacgacaagggcgactccaaggaaacgcggctgaccctgatggaggaagtgctcctgctgggcctcaaggaccgcgagggttacacatcattttggaatgactgtatatcatctggattacgtggctgtatgttaattgaattagcattgagaggaaggttacaactagaggcttgtggaatgagacgtaaaagtctattaacaagaaaggtaatctgtaagtcagatgctccaacaggggatgttcttcttgatgaagctctgaagcatgttaaggaaactcagcctccagaaacggtccagaactggattgaattacttagtggtgagacatggaatccattaaaattgcattatcagttaagaaatgtacgggaacgattagctaaaaacctggtggaaaagggtgtattgacaacagagaaacagaacttcctactttttgacatgacaacacatcccctcaccaataacaacattaagcagcgcctcatcaagaaagtacaggaagccgttcttgacaaatgggtgaatgaccctcaccgcatggacaggcgcttgctggccctcatttacctggctcatgcctcggacgtcctggagaatgcttttgctcctcttctggacgagcagtatgatttggctaccaagagagtgcggcagcttctcgacttagaccctgaagtggaatgtctgaaggccaacaccaatgaggttctgtgggcggtggtggcggcgttcaccaagtaactctgctcggggtgaaccattctcctttctctcaagtaaaccagtagtttttcttctgttgacttctggttttctgtaatttgtactttcccacactataattggcttctgttttacaaaatggtgggtggctttttcttttttgtacgtgtacaggattctgctggtacgagaggccttcctctttctgtttttaaaaaaagttttactgccatattggcattccattccctgttgccatcctcactgttacctgttttgggtttctggtctactttgactttcaaagtacctccagcctcctcatacgcacagcttttggatgacctcagcttgagtttctccatatgtgcatgtacatctagcattctgcctacagttcagacagaagtcacaaaaaggccttcaactcaccaaaggtaaatatctgtatctattaggacattttttacatagacttcagttgagatgtatacttagcaaaattatttttaaattgaaacagcacagtaaatacttaatataaaatgtcccttggattttgcttcccatgtaaatctattgtattattacacttgttataattttaactataaaggtccaattgtttcacagagccagtttgggatgggctgcattccatttatgctgtatatagtttgaattatatataaattaccccttcttctggccacccctgctcccatcttagtattttgcaagatctaatcagttgtacacctggtgcccctcgcttgcttcaatcatggttatttgatggcaaaatcgacctcttgtcgctgaaggagagagaaaagatgtgtgtctgattggtcctgggattttttgagctgtgccatttatggtactctttgcctatgcatccccttgttagattttttttaaattttatcttactgtttttataatttctattgggaagaggcttgtgaccagtaccaatcttgagtttctttttctgtccacaagtaaattaatatctgctctgaaatgtcatttatctactcacacattcttggggaaaaaaatcaaatgtcagtcctagcagatgttgcatgtaaattggtagcaagtaatgattacaacccagaggattaagaattttgtaacagaaagctctatgttttaattttttatatacaattaggataattagcattgtcagactataaacctttgctttttaaagtttatttttactatttctttatcactttattgtatcatcaccattggtttcataatgtaaatactatatgttgaacaaattaaatgtcaaaattttttattaccatagtccatgttaatagtggggctttcaggtgtttagagattttttttgttgttgttaacattcattgcaaaagtactagatggtgtataactctagagttgaattttaagggattccctaatatgtatactatctttttatctgaagtaataaataaacaatgatcttgaaagtgcctg

SEQ ID NO: 900 - DNA, 2032 bp, Homo sapiens
caccccgcagcccggcctcggcctccgccgcttgttgtcgcgccccgcccgcgagcccgccccgcacgtcccccgccggcggccaccatgagcacaggcctgcggtacaagagcaagctggcgaccccagaggacaagcaggacattgacaagcagtacgtgggcttcgccacactgcccaaccaggtgcaccgcaagtcggtgaagaaaggctttgacttcacactcatggtggctggtgagtcaggcctggggaagtccacactggtccacagcctcttcctgacagacttgtacaaggaccggaagctgctcagtgctgaggagcgcatcagccagacggtagagattctaaaacacacggtggacattgaggagaagggagtcaagctgaagctcaccatcgtggacacgccgggattcggggacgctgtcaacaacaccgagtgctggaagcccatcaccgactatgtggaccagcagtttgagcagtacttccgtgatgagagcggcctcaaccgaaagaacatccaagacaaccgagtgcactgctgcctatacttcatctcccccttcgggcatgggctgcggccagtggatgtgggtttcatgaaggcattgcatgagaaggtcaacatcgtgcctctcatcgccaaagctgactgtcttgtccccagtgagatccggaagctgaaggagcggatccgggaggagattgacaagtttgggatccatgtataccagttccctgagtgtgactcggacgaggatgaggacttcaagcagcaggaccgggaactgaaggagagcgcgcccttcgccgttataggcagcaacacggtggtggaggccaaggggcagcgggtccggggccgactgtacccctgggggatcgtggaggtggagaaccaggcgcattgcgacttcgtgaagctgcgcaacatgctcatccgcacgcatatgcacgacctcaaggacgtgacgtgcgacgtgcactacgagaactaccgcgcgcactgcatccagcagatgaccagcaaactgacccaggacagccgcatggagagccccatcccgatcctgccgctgcccaccccggacgccgagactgagaagcttatcaggatgaaggatgaggaactgaggcgcatgcaggagatgctgcagaggatgaagcagcagatgcaggaccagtgacgctcgccgcggacacaccgtccgtctccgggacgccctcgcacccctggacaccagaccggactgttcccgacccggagacgcggggccacagcccccagctgaccctaatttattctcagcaccaccccctcccaggtcattgtgtctgtttccgaggggcctggaccgtagcccccgcccagctggccctctctgaccttgggggatcaggagcgaagttgggcgggacttcagagatccgcctcccttgcccttcccccgcccccggacggtcacagcacccaaaccgcaggccctgctctggcaggcaggcaaagctaggcagaagaggattcccaggatcctgggtctgttccctgccccagtgctgcagaacggacttgggagccctcctttgcctgctcccgcgggtcacccagcgagtgctgagaccccattttctgtcgaggcgggccgagtcttcccttatccccagacgcctagcgggcagggttgggctgaatcaaatgggagccctccagacataaggaggccagaggctgcaaggagcggggtcgtgaccgcttacaccccttctccacagcccggcccgacctggagggcccccggggcactgggcggtgagccacctcctggcaactctcggtgccgtcccctgccctcgctcgaggcctcttctccccagcaccgctgtggtgtgccgggatcctgagcctaggcctcccgatgttcccacccgcatgatcccttcccgccacacgatgctccgttttcttccgttgtgaatgccgcgtcctgtcctggtgacaggagaacaatgttggtgaacgtc

SEQ ID NO: 901 - DNA, 888 bp, Homo sapiens
cagctgtatcccatagagttgccacccaggcctcagccaggacctttcaggccagacaggagcacctgaccaaaggcttcacagccgccctcaccgcccggccttctacggtgtccagagacagttagccaggcctgggctgggcacactccaccttccctagtcaccagctggtttcccagaggagaaggctgagacccgagaagggagccagcctgtcccatgcctgcctggggagccctgttcctgctctgggccacagcagaggccaccaaggactgccccagcccatgtacctgccgcgccctggaaaccatggggctgtgggtggactgcaggggccacggactcacggccctgcctgccctgccggcccgcacccgccaccttctgctggccaacaacagccttcagtccgtgcccccgggagcctttgaccacctgccccagctgcagaccctcgatgtgacgcagaacccctggcactgtgactgcagcctcacctatctgcgcctctggctggaggaccgcacgcccgaggccctgctgcaggtccgctgtgccagccccagcctcgctgcccatggcccgctgggccggctgacaggctaccagctgggcagctgtggctggcagctgcaggcgtcctgggtgcgcccgggggtcttgtgggacgtggcgctggtcgccgtggccgcgctgggcctggctcttctggctggcctgctgtgtgccaccacagaggccctggattgagccaggcccccagaacctggctccagccagggggccagtccctgaggcaggtccccagactccaccaagcctggtcagcccaaaccaccagaagcccagaataaactggcagctcagctgttttatataagc

SEQ ID NO: 902 - DNA, 3390 bp, Homo sapiens
caggcatcggtgtcgcctcgcagggaacagttgggtggcttccagcttatgccaggagtctcctcctcacccgcacatcgcggggctaggatgggatgtcgtggctgccaaatcctccgaggcaactcctgcctgggacggcctaccacaggatgggcctgagaatccggagcgcaggctcgggccgctaggacaccttcccccgcccgcggacccagccttccagcatcaccggggttcgcggaggagaaagaggaaaggcgtttggcctgccaaggccgccgtagcgagggggcggggcccggaagagcaggatggcggcgcgggacagtgacagcgaagaagatctggtcagctatgggaccgggctggagcctctggaagaaggtgaaagaccaaagaaaccaatccctcttcaggatcagactgtcagagatgaaaaaggaaggtataaacgattccacggggcctttagtggaggtttctctgctggatacttcaatactgttggctcaaaagaaggatggacaccctctacctttgtgtcttcacgacagaacagagcagacaaatctgttcttggtcctgaagattttatggatgaagaggatcttagtgaatttgggatagcacctaaagcgattgtcaccacagacgattttgcctccaaaaccaaagacagaatacgagaaaaggctaggcagttggccgctgctactgcccctattcctggagccaccctccttgatgacctcataacgccagcaaaattatctgttggtttcgaattgctaagaaaaatgggttggaaagaaggacaaggagttggtcctcgagtaaagagacggccacgccgacagaaacctgatcctggagtcaaaatctatggctgtgcattaccccctggaagctcggaaggatctgagggtgaagatgatgactacttgcctgataatgtgacctttgcacccaaagatgtcacacctgtggatttcacacctaaagataatgtgcatggtctagcttacaagggcctggatccccaccaggcactgtttggaacttcgggagaacattttaatcttttcagtggtggttctgagagagctggcgatcttggagaaattggactgaataaaggaagaaaattgggaatttcaggccaggcttttggtgtaggtgccctggaagaggaagatgatgatatctatgccacagaaactctatccaagtatgacactgttctgaaggacgaggagcctggagacggactctatggctggacagcacccaggcagtataaaaaccagaaagaatcagagaaagaccttcggtacgttggcaaaattttggatggattttccttggcttctaaacctttatcttctaagaaaatctatccacctccagagctgccaagagactatcgaccagtgcattatttcagacccatggtggccgccacctccgagaactcacacttactgcaggtattatcagagtcagctggaaaggcaacgcctgacccagggacacacagtaagcaccaactgaatgcctccaaacgggctgagttgcttggagagacgcctattcaaggttcagctacttcagtgttagaatttctgtcccaaaaagacaaagagagaatcaaagaaatgaagcaggcaactgacctgaaagcagctcagctcaaggccaggagtctggcccagaacgctcagagcagcagagcccagctctcccctgcagcggctgctgggcactgctcttggaacatggcattaggtggtgggacggccaccttaaaagccagcaacttcaagcctttcgccaaagatccggaaaagcaaaagcgatacgacgagttcttagtacacatgaaacagggtcagaaagatgctctggaacgctgtctggaccccagcatgacagagtgggagcgaggccgtgagcgggatgagtttgcccgggcggccctgctgtacgcatcttcccattcgaccttgtcctccaggttcactcacgccaaggaggaggatgactcagatcaggttgaagtccctcgagaccaagagaatgatgtcggggataagcagtcggctgtgaagatgaagatgtttgggaagctcacccgagacacgtttgagtggcaccctgacaagcttctatgtaagagatttaatgtccctgacccttatccagattcaactttagttggcttaccaagagtgaagcgtgacaagtactcagtcttcaactttctgacgctcccagagacagcttccttgcccaccactcaagcatcaagtgaaaaagtatcacagcaccgaggtcccgacaaatcaagaaaaccatccagatgggatacctctaaacacgaaaagaaagaagattccattagtgaatttttaagtttggctagatcaaaagccgagccacctaaacaacagtccagccccttagtaaacaaagaggaagagcatgcaccagaattatccgcaaatcagaccgtcaacaaagatgtggacgcacaggctgaaggagaagggagccgcccatccatggacttattcagggccatctttgccagttcctcagatgaaaagtcctcatcctccgaggatgagcaaggtgacagtgaagatgatcaggcaggctctggggaggccaacttccaaagctcccaagacactgacttgggggaaacatcatctgtggctcacgctcttgtgccagcaccccaggagccgccaccttccttcccgatacaaaagatgcagatagatgaaagagaagagttcggcccgcggctgcctcccgtcttctgccccaatgctcgtcagacacttgaggttcctcaaaaagagaaacataaaaagaacaaagacaagcacaaggccaagaaagagcacaggcggaagaaagagaagaaaaagaaacacaggaagcacaaacacaaaggcaagcaaaagaataaaaaaccagagaaaagtagtagctccgagagttccgacagcagcgacagccagagtgacgaggaaaccgcagacgtgtcgccccaggagctgctgagacggctgaaaagtcttccactaagaaggcagtaattgaatgctgccctggctcgtcctagaatcatttctcctccatgatggaagcccagtgattgttcagttaacgcattgtacagagtgtatttatatgtaaattcctgctgtaaaataatttttaaaaccttgacatttcaaagactgccttgaaaggtcgcagaaattgatttctatttttaatttcagttagtatcgggggaaaaaaatccagactgaacagtttaattaaagtggaatttttctattttcaaaaaaaaaaaaaaaaaaaaaaaaaaaa

SEQ ID NO: 903 - DNA, 2934 bp, Homo sapiens
ctgctgcgagccgagccgggcggcggcggcagtggcggcagtggcggcagcggcagcagttgcagcagtggtggccagagcggatgcttgcgggctccctgcggctccactagttttcttcgccccgcccagccgcccactcttctcggctagggaagaagaccagagggtgctcagctggaaaactctggtgtctcagcttagggcctcctccgggaagagctaactgctcccaggtgaagccggtgcccgcgggcggtccgtacaccccgcagccggctcgcaccgctcgagagcctcggccgctgtgtcttccacgtctgcagctcagccagggcgcgcagggcgagtggggtccactggcgggtaaaggggaccaggacggcgaggatggacgcacagacctggcccgtgggctttcgctgcctcctccttctggccctggttgggtccgcccgcagcgagggcgtgcagacctgcgaagaagttcggaaacttttccagtggcggctgctgggagctgtcagggggctgccggattcgccgcgggcaggacctgatcttcaggtttgcatatccaaaaagcctacatgttgcaccaggaagatggaggagagatatcagattgcggctcgccaggatatgcagcagtttcttcaaacgtccagctctacattaaagtttctaatatctcgaaatgcggctgcttttcaagaaacccttgaaactctcatcaaacaagcagaaaattacaccagtatacttttttgcagtacctacaggaacatggccttggaggctgctgcttcggttcaggagttcttcactgatgtggggctgtatttatttggtgcggatgttaatcctgaagaatttgtaaacagattttttgacagtctttttcctctggtctacaaccacctcattaaccctggtgtgactgacagttccctggaatactcagaatgcatccggatggctcgccgggatgtgagtccatttggtaatattccccaaagagtaatgggacagatggggaggtccctgctgcccagccgcacttttctgcaggcactcaatctgggcattgaagtcatcaacaccacagactatctgcacttctccaaagagtgcagcagagccctcctgaagatgcaatactgcccgcactgccaaggcctggcgctcactaagccttgtatgggatactgcctcaatgtcatgcgaggctgcctggcgcacatggcggagcttaatccacactggcatgcatatatccggtcgttggaagaactctcggatgcaatgcatggaacatacgacattggacacgtgctgctgaactttcacttgcttgttaatgatgctgtgttacaggctcacctcaatggacaaaaattattggaacaggtaaataggatttgtggccgccctgtaagaacacccacacaaagcccccgttgttcttttgatcagagcaaagagaagcatggaatgaagaccaccacaaggaacagtgaagagacgcttgccaacagaagaaaagaatttatcaacagccttcgactgtacaggtcattctatggaggtctagctgatcagctttgtgctaatgaattagctgctgcagatggacttccctgctggaatggagaagatatagtaaaaagttatactcagcgtgtggttggaaatggaatcaaagcccagtctggaaatcctgaagtcaaagtcaaaggaattgatcctgtgataaatcagattattgataaactgaagcatgttgttcagttgttacagggtagatcacccaaacctgacaagtgggaacttcttcagctgggcagtggtggaggcatggttgaacaagtcagtggggactgtgatgatgaagatggttgcgggggatcaggaagtggagaagtcaagaggacactgaagatcacagactggatgccagatgatatgaacttcagtgatgtaaagcaaatccatcaaacagacactggcagtactttagacacaacaggagcaggatgtgcagtggcgactgaatctatgacattcactctgataagtgtggtgatgttacttcccgggatttggtaactgaactcttctgtcctgacataccttactgaagtctcgatttcttctctctctgcatatgcctggaataagagatcctttttcaatgtaacaattatatttatgaaaagatatgttacactaacttctcagaagccaagctgaaatattcataaagtccctaaaactcaacgtttaaatgacacactttaaaaatatgtcttttttcaatctaactgaaaaccttcttaacttctaatatattaaatctgaagatgtgaagggcacagaagtgactttgaataagaagaatttagtgtatctgtaattttattatcaattccaagccccttcctttctaaattaaaaatgttttcatttgaaagtgtatttgccagacaatgaaaacagtatgcagtatttcttaaagtattgaaattagaatatcatgaaataaatcaaaacatacaatggcaagtagtatgcatgcatattcaagagactcttccatttttgcaagctgtagaaggaaatgtctgaatgtctataagttatggggtagattcttgagaagcatttcatataatttcactgaagaaccttgataattttgacccactgtaacttagccactgatgaaccttaaagctgagtattttattaacacctgatttgtattccattatattcaaaatgcatctttggtattgtgcctctgctcccatctctctctttgcctcatagatttagctatgttgggaagcacatgcttgctctaggaatatctccaataaagctgttaactatttggtggaaaaaaaaaaaaaaaaaaaaaaaaaaaaaaaa

SEQ ID NO: 904 - DNA, 1669 bp, Homo sapiens
gagcaagatggctgactccaaagagggtgttttgccgctgacggctgcttccactgccccaatttcattcggcttcactcgcacgtccgcacggaggcggctggccgactcgggagacggcgcggggccatctccggaggagaaggatttcttgaaaaccgtggaagggagggagctgcagagtgtgaagccccaggaggcccccaaggaactcgtcatccctttgatccagaatggccatcgcaggcagccaccagcccggccccctgggccatccacagatactggggccttggcggatggggtggtgtcccaggctgtgaaggagctcattgcggaatccaagaagtctctggaagagagagagaatgcgggtgtcgaccccacgctcgctatccccatgatccagaaaggatgcacccccagcggggaaggggcagacagcgaaccccgggcagagacagtgccagaggaggctaattatgaggcggtccccgtggaggcctatgggctggccatgctgcggggcatgggctggaaacctggcgagggcatcggccgcaccttcaatcaagtagtgaagccccgtgtcaactcactgaggcccaaggggttagggctgggtgccaacctgaccgaggcccaggccttgacccccactggcccctcccgcatgccaagaccagatgaggagcaagagaaagataaggaagatcagcctcaagggctggtgcctggaggagctgtggtggttctttctggccctcaccgaggcctctatgggaaggtggaaggccttgatcctgacaatgttcgggccatggttcgtctggctgtggggagccgggtggtgactgttagtgagtactacctgcggcctgtctcccagcaggagtttgacaagaacaccttggatctcaggcaacagaacggaactgcctcatcacggaagaccctctggaatcaagaactctacatccagcaggacaactcagagaggaagcggaaacaccttccagaccgacaggatgggcctgcagccaagagtgagaaagcagcccccagaagtcagcactggttgcacagggacctgcgtgtgcggtttgtggacaacatgtacaaaggaggccaatattacaacaccaagatgataattgaagatgtcctaagcccagatacctgtgtatgtcggacagatgaaggccgagtcctggaaggcctgagggaagacatgctggagaccctggttcccaaggcagagggtgaccgtgtgatggtggtgctgggcccacagactggaagggtgggacatttgctgagccgggacagagcacggagccgggctttggtgcaactgccaagagaaaatcaggtggtggagcttcactacgatgccatctgccagtacatgggccctagtgacacagatgatgactgacccatgggactcctcccatcccccaggctggtaccagttctgtaccatatgagaaagttgccttcagaaggtgggaagatcattgttccatcctctacttctggtgcagtcctgggacaaggacaagggaaagggatgggtgaaccagtagggaagctagaaacaaacccaatatttaccaaaatttagggtataataaaaaccatttcaagtaaaaaaaaaaaaaaaaaa

SEQ ID NO: 905 - DNA, 1527 bp, Homo sapiens
atgacgtccacctgcaccaacagcacgcgcgagagtaacagcagccacacgtgcatgcccctctccaaaatgcccatcagcctggcccacggcatcatccgctcaaccgtgctggttatcttcctcgccgcctctttcgtcggcaacatagtgctggcgctagtgttgcagcgcaagccgcagctgctgcaggtgaccaaccgttttatctttaacctcctcgtcaccgacctgctgcagatttcgctcgtggccccctgggtggtggccacctctgtgcctctcttctggcccctcaacagccacttctgcacggccctggttagcctcacccacctgttcgccttcgccagcgtcaacaccattgtcgtggtgtcagtggatcgctacttgtccatcatccaccctctctcctacccgtccaagatgacccagcgccgcggttacctgctcctctatggcacctggattgtggccatcctgcagagcactcctccactctacggctggggccaggctgcctttgatgagcgcaatgctctctgctccatgatctggggggccagccccagctacactattctcagcgtggtgtccttcatcgtcattccactgattgtcatgattgcctgctactccgtggtgttctgtgcagcccggaggcagcatgctctgctgtacaatgtcaagagacacagcttggaagtgcgagtcaaggactgtgtggagaatgaggatgaagagggagcagagaagaaggaggagttccaggatgagagtgagtttcgccgccagcatgaaggtgaggtcaaggccaaggagggcagaatggaagccaaggacggcagcctgaaggccaaggaaggaagcacggggaccagtgagagtagtgtagaggccaggggcagcgaggaggtcagagagagcagcacggtggccagcgacggcagcatggagggtaaggaaggcagcaccaaagttgaggagaacagcatgaaggcagacaagggtcgcacagaggtcaaccagtgcagcattgacttgggtgaagatgacatggagtttggtgaagacgacatcaatttcagtgaggatgacgtcgaggcagtgaacatcccggagagcctcccacccagtcgtcgtaacagcaacagcaaccctcctctgcccaggtgctaccagtgcaaagctgctaaagtgatcttcatcatcattttctcctatgtgctatccctggggccctactgctttttagcagtcctggccgtgtgggtggatgtcgaaacccaggtaccccagtgggtgatcaccataatcatctggcttttcttcctgcagtgctgcatccacccctatgtctatggctacatgcacaagaccattaagaaggaaatccaggacatgctgaagaagttcttctgcaaggaaaagcccccgaaagaagatagccacccagacctgcccggaacagagggtgggactgaaggcaagattgtcccttcctacgattctgctacttttccttga

SEQ ID NO: 906 - DNA, 1260 bp, Homo sapiens
atgctggcagctgcctttgcagactctaactccagcagcatgaatgtgtcctttgctcacctccactttgccggagggtacctgccctctgattcccaggactggagaaccatcatcccggctctcttggtggctgtctgcctggtgggcttcgtgggaaacctgtgtgtgattggcatcctccttcacaatgcttggaaaggaaagccatccatgatccactccctgattctgaatctcagcctggctgatctctccctcctgctgttttctgcacctatccgagctacggcgtactccaaaagtgtttgggatctaggctggtttgtctgcaagtcctctgactggtttatccacacatgcatggcagccaagagcctgacaatcgttgtggtggccaaagtatgcttcatgtatgcaagtgacccagccaagcaagtgagtatccacaactacaccatctggtcagtgctggtggccatctggactgtggctagcctgttacccctgccggaatggttctttagcaccatcaggcatcatgaaggtgtggaaatgtgcctcgtggatgtaccagctgtggctgaagagtttatgtcgatgtttggtaagctctacccactcctggcatttggccttccattattttttgccagcttttatttctggagagcttatgaccaatgtaaaaaacgaggaactaagactcaaaatcttagaaaccagatacgctcaaagcaagtcacagtgatgctgctgagcattgccatcatctctgctctcttgtggctccccgaatgggtagcttggctgtgggtatggcatctgaaggctgcaggcccggccccaccacaaggtttcatagccctgtctcaagtcttgatgttttccatctcttcagcaaatcctctcatttttcttgtgatgtcggaagagttcagggaaggcttgaaaggtgtatggaaatggatgataaccaaaaaacctccaactgtctcagagtctcaggaaacaccagctggcaactcagagggtcttcctgacaaggttccatctccagaatccccagcatccataccagaaaaagagaaacccagctctccctcctctggcaaagggaaaactgagaaggcagagattcccatccttcctgacgtagagcagttttggcatgagagggacacagtcccttctgtacaggacaatgaccctatcccctgggaacatgaagatcaagagacaggggaaggtgttaaatag

SEQ ID NO: 907 - DNA, 2684 bp, Homo sapiens
ccgccgccagcatgccccggcccgcgggccgctccgccgccagccacccccgcggccctcggcggcctgcgctcggcccgggggcgcgggaaccgcagccggagccggaggcgggagcagcgagccggagccccgggcgctcgaatgcaggatgctcgtggtccccagcatccttgagccaccaggagtgagggctgctgctccctgagacctggctccaaggaggatgccacagccgcctgccagctccggtctgcaccatgagtgatgagcggcggctgcctggcagtgcagtgggctggctggtatgtgggggcctctccctgctggccaatgcctggggcatcctcagcgttggcgccaagcagaagaagtggaagcccttggagttcctgctgtgtacgctcgcggccacccacatgctaaatgtggccgtgcccatcgccacctactccgtggtgcagctgcggcggcagcgccccgacttcgagtggaatgagggtctctgcaaggtcttcgtgtccaccttctacaccctcaccctggccacctgtttctctgtcacctccctctcctaccaccgcatgtggatggtctgctggcctgtcaactaccggctgagcaatgccaagaagcaggcggtgcacacagtcatgggtatctggatggtgtccttcatcctgtcggccctgcctgccgttggctggcacgacaccagcgagcgcttctacacccatggctgccgcttcatcgtggctgagatcggcctgggctttggcgtctgcttcctgctgctggtgggcggcagcgtggccatgggcgtgatctgcacagccatcgccctcttccagacgctggccgtgcaggtggggcgccaggccgaccaccgcgccttcaccgtgcccaccatcgtggtggaggacgcgcagggcaagcggcgctcctccatcgatggctcggagcccgccaaaacctctctgcagaccacgggcctcgtgaccaccatagtcttcatctacgactgcctcatgggcttccctgtgctggtggtgagcttcagcagcctgcgggccgacgcctcagcgccctggatggcactctgcgtgctgtggtgctccgtggcccaggccctgctgctgcctgtgttcctctgggcctgcgaccgctaccgggctgacctcaaagctgtccgggagaagtgcatggccctcatggccaacgacgaggagtcagacgatgagaccagcctggaaggtggcatctccccggacctggtgttggagcgctccctggactatggctatggaggtgattttgtggccctagataggatggccaagtatgagatctccgccctggaggggggcctgccccagctctacccactgcggcccttgcaggaggacaagatgcaatacctgcaggtcccgcccacgcggcgcttctcccacgacgatgcggacgtgtgggccgccgtcccgctgcccgccttcctgccgcgctggggctccggcgaggacctggccgccctggcgcacctggtgctgcctgccgggcccgagcggcgccgcgccagcctcctggccttcgcggaggacgcaccaccgtcccgcgcgcgccgccgctcggccgagagcctgctgtcgctgcggccctcggccctggatagcggcccgcggggagcccgcgactcgccccccggcagcccgcgccgccgccccgggcccggcccccgctccgcctcggcctcgctgctgcccgacgccttcgccctgaccgccttcgagtgcgagccacaggccctgcgccgcccgcccgggcccttccccgctgcgcccgccgcccccgacggcgcagatcccggagaggccccgacgcccccaagcagcgcccagcggagcccagggccacgcccctctgcgcactcgcacgccggctctctgcgccccggcctgagcgcgtcgtggggcgagcccggggggctgcgcgcggcgggcggcggcggcagcaccagcagcttcctgagttccccctccgagtcctcgggctacgccacgctgcactcggactcgctgggctccgcgtcctaggaccgccggcgcctccccacggacgccaggcaggccaggccgctctccggggccgcagcaccaaagacgcccgcctcccccccgcgcgcagacatgcgccacccctcccaggggtgagggggcgttggcctcagcgtttgtcttccggctcctcccagctggccttgtcccaggggcgacggctgccccggacgactgcgctgggcaccgcatgtcccgggccgagtgaggtcgggcctggggagctgagtgacatcccaagcttgggcttgggtagtgagtgacatgtgcacacgtccagctgcgccatcaccagccctgcgcaacaggacgtcgggagcagggaacctgagacagggccactgcgggatcggacaaagccccgctttggagaggctgagctggagccattggcctccccaggggctttccacccacactgcaccataaccgccacacccttcggggggggggagggtacagagggtctctaagcacaggggtgttcagagcccgaacaagctttgatcaggtttccctgcaaaaaaaaaaaaaaaaaaaaaaaaaaaaaaaaaaaaaaaaaaaaaaaaaaaa

SEQ ID NO: 908 - DNA, 1239 bp, Homo sapiens
atgggcagcccctggaacggcagcgacggccccgagggggcgcgggagccgccgtggcccgcgctgccgccttgcgacgagcgccgctgctcgccctttcccctgggggcgctggtgccggtgaccgctgtgtgcctgtgcctgttcgtcgtcggggtgagcggcaacgtggtgaccgtgatgctgatcgggcgctaccgggacatgcggaccaccaccaacttgtacctgggcagcatggccgtgtccgacctactcatcctgctcgggctgccgttcgacctgtaccgcctctggcgctcgcggccctgggtgttcgggccgctgctctgccgcctgtccctctacgtgggcgagggctgcacctacgccacgctgctgcacatgaccgcgctcagcgtcgagcgctacctggccatctgccgcccgctccgcgcccgcgtcttggtcacccggcgccgcgtccgcgcgctcatcgctgtgctctgggccgtggcgctgctctctgccggtcccttcttgttcctggtgggcgtcgagcaggaccccggcatctccgtagtcccgggcctcaatggcaccgcgcggatcgcctcctcgcctctcgcctcgtcgccgcctctctggctctcgcgggcgccaccgccgtccccgccgtcggggcccgagaccgcggaggccgcggcgctgttcagccgcgaatgccggccgagccccgcgcagctgggcgcgctgcgtgtcatgctgtgggtcaccaccgcctacttcttcctgccctttctgtgcctcagcatcctctacgggctcatcgggcgggagctgtggagcagccggcggccgctgcgaggcccggccgcctcggggcgggagagaggccaccggcagaccgtccgcgtcctgctggtggtggttctggcatttataatttgctggttgcccttccacgttggcagaatcatttacataaacacggaagattcgcggatgatgtacttctctcagtactttaacatcgtcgctctgcaacttttctatctgagcgcatctatcaacccaatcctctacaacctcatttcaaagaagtacagagcggcggcctttaaactgctgctcgcaaggaagtccaggccgagaggcttccacagaagcagggacactgcgggggaagttgcaggggacactggaggagacacggtgggctacaccgagacaagcgctaacgtgaagacgatgggataa

SEQ ID NO: 909 - DNA, 923 bp, Homo sapiens
cggcggccccatggacctgcccccgcagctctccttcggcctctatgtggccgcctttgcgctgggcttcccgctcaacgtcctggccatccgaggcgcgacggcccacgcccggctccgtctcacccctagcctggtctacgccctgaacctgggctgctccgacctgctgctgacagtctctctgcccctgaaggcggtggaggcgctagcctccggggcctggcctctgccggcctcgctgtgccccgtcttcgcggtggcccacttcttcccactctatgccggcgggggcttcctggccgccctgagtgcaggccgctacctgggagcagccttccccttgggctaccaagccttccggaggccgtgctattcctggggggtgtgcgcggccatctgggccctcgtcctgtgtcacctgggtctggtctttgggttggaggctccaggaggctggctggaccacagcaacacctccctgggcatcaacacaccggtcaacggctctccggtctgcctggaggcctgggacccggcctctgccggcccggcccgcttcagcctctctctcctgctcttttttctgcccttggccatcacagccttctgctacgtgggctgcctccgggcactggcccgctccggcctgacgcacaggcggaagctgcgggccgcctgggtggccggcggggccctcctcacgctgctgctctgcgtaggaccctacaacgcctccaacgtggccagcttcctgtaccccaatctaggaggctcctggcggaagctggggctcatcacgggtgcctggagtgtggtgcttaatccgctggtgaccggttacttgggaaggggtcctggcctgaagacagtgtgtgcggcaagaacgcaagggggcaagtcccagaagtaacgccactgct

SEQ ID NO: 910 - DNA, 2901 bp, Homo sapiens
cagcctccctctcccacctctgtctgcccgctgcctcttgtctagctgctgtcaggagctgactgcctccagggctggaatcctgtgctccctctgtgcccagagccccacgatgtcggccaacgccacactgaagccactctgccccatcctggagcagatgagccgtctccagagccacagcaacaccagcatccgctacatcgaccacgcggccgtgctgctgcacgggctggcctcgctgctgggcctggtggagaatggagtcatcctcttcgtggtgggctgccgcatgcgccagaccgtggtcaccacctgggtgctgcacctggcgctgtccgacctgttggcctctgcttccctgcccttcttcacctacttcttggccgtgggccactcgtgggagctgggcaccaccttctgcaaactgcactcctccatcttctttctcaacatgttcgccagcggcttcctgctcagcgccatcagcctggaccgctgcctgcaggtggtgcggccggtgtgggcgcagaaccaccgcaccgtggccgcggcgcacaaagtctgcctggtgctttgggcactagcggtgctcaacacggtgccctatttcgtgttccgggacaccatctcgcggctggacgggcgcattatgtgctactacaatgtgctgctcctgaacccggggcctgaccgcgatgccacgtgcaactcgcgccaggcggccctggccgtcagcaagttcctgctggccttcctggtgccgctggcgatcatcgcctcgagccacgcggccgtgagcctgcggttgcagcaccgcggccgccggcggccaggccgcttcgtgcgcctggtggcagccgtcgtggccgccttcgcgctctgctgggggccctaccacgtgttcagcctgctggaggcgcgggcgcacgcaaacccggggctgcggccgctcgtgtggcgcgggctgcccttcgtcaccagcctggccttcttcaacagcgtggccaacccggtgctctacgtgctcacctgccccgacatgctgcgcaagctgcggcgctcgctgcgcacggtgctggagagcgtgctggtggacgacagcgagctgggtggcgcgggaagcagccgccgccgccgcacctcctccaccgcccgctcggcctcccctttagctctctgcagccgcccggaggaaccgcggggccccgcgcgtctcctcggctggctgctgggcagctgcgcagcgtccccgcagacgggccccctgaaccgggcgctgagcagcacctcgagttagaacccggcccacgtagggcggcactcacacgcgaaagtatcaccagggtgccgcggttcaattcgatatccggactcctgccgcagtgatcaaagtccgaggggcgggacccaggcacctgcattttaaagcgccccgggagactctgaatctttttcagaaacagtgagttaaagcagtgcttctcaaaccttgatgtgcctgtgaatcacctaggggtcttgttaagtgcagtctgatccaggaggccggggccgggtactgagagtctgcacttaacaagctcccaggccgagaagccagtgcggcaggttcacaggcgaggcctggagtaacacaaagtgaaactcgtaatagacttcccactctagggcagtggagtcggaagggcacacggggtgcgtctccccggagttcagttttaccagatgatgggggaggggggaaggagttttatgttaaaccatccatgtatttttggagaagagagaggaaaggtttgagaagcactgttccagcctgccctcttcatttagccaatgcttactgcgctagacgcttcatcccacaatcttaaggggcagcttctattagccagtctttacagctgagcacattctggctcagggaggttaagtgacttgcccagtttcagggctaacgaccacagggtctgcactctaaccctaggcatcacatgctcaatgactctctggtgagcgaggacattctctgacctactcgagggacttaagatgctaccttgtgacccagcactgcccaaagtgcttccaaggcagaagcagcaggggatggcgtggtcaagcactcgggaaacctggggctaatcaaatccaatgggggaaatgactaaaagtcttcggtcgttagaagttgaatgggcacagcaactctaagactacagcacacgtcatttcttagctaagcggaccagcctccctgtcggcctggtgttctgtgggatccctctgggcactggtaatcccaagatctgtgcagccccgcctccaggccacatggggctgggcagctaccatttcccttttgcggatgggaggggtaacttgcacctctgacctatcacttccactgcaccccgtctcattcctccacctgccgtggacttggggtcagagactgctgtgtttgagctctgcagcccagggaccgaaaagttggtgtcaatgaattttgcttggtggatgaaatgtcagtggaagaagcagatgagaaactcttgagatcttggtcctgtgttttttctgccaccaaaggccagggtcactgaaggcctggcccacagcaggtgctgagcaaagggaacagtgaggtgcccagctagctgcagagccaccctgtgttgacacctcgcccctgctccctcccatcccttccccctttactcatagcacttcccccattggacacgtggtgcattttgcttgtttattatgttttctctccatcagaatgaaagctcctcgagggcagggactttggtctattgtctgtatttgccggtgcctaggattgtgcctgtatgcaacaggcactcaataaatatttttgctgtagactgg

SEQ ID NO: 911 - DNA, 2010 bp, Homo sapiens
gtcatttgctctctgactctcagagagggaggcacgctttcctggagctcctggtgacagaacaggtgtttgctgtctggacctggctgctgatcctgagcctgctgggagatcttaacgatccccaggagcaacatggggcccaccctagcggttcccaccccctatggctgtattggctgtaagctaccccagccagaatacccaccggctctaatcatctttatgttctgcgcgatggttatcaccatcgttgtagacctaatcggcaactccatggtcattttggctgtgacgaagaacaagaagctccggaattctggcaacatcttcgtggtcagtctctctgtggccgatatgctggtggccatctacccataccctttgatgctgcatgccatgtccattgggggctgggatctgagccagttacagtgccagatggtcgggttcatcacagggctgagtgtggtcggctccatcttcaacatcgtggcaatcgctatcaaccgttactgctacatctgccacagcctccagtacgaacggatcttcagtgtgcgcaatacctgcatctacctggtcatcacctggatcatgaccgtcctggctgtcctgcccaacatgtacattggcaccatcgagtacgatcctcgcacctacacctgcatcttcaactatctgaacaaccctgtcttcactgttaccatcgtctgcatccacttcgtcctccctctcctcatcgtgggtttctgctacgtgaggatctggaccaaagtgctggcggcccgtgaccctgcagggcagaatcctgacaaccaacttgctgaggttcgcaattttctaaccatgtttgtgatcttcctcctctttgcagtgtgctggtgccctatcaacgtgctcactgtcttggtggctgtcagtccgaaggagatggcaggcaagatccccaactggctttatcttgcagcctacttcatagcctacttcaacagctgcctcaacgctgtgatctacgggctcctcaatgagaatttccgaagagaatactggaccatcttccatgctatgcggcaccctatcatattcttctctggcctcatcagtgatattcgtgagatgcaggaggcccgtaccctggcccgcgcccgtgcccatgctcgcgaccaagctcgtgaacaagaccgtgcccatgcctgtcctgctgtggaggaaaccccgatgaatgtccggaatgttccattacctggtgatgctgcagctggccaccccgaccgtgcctctggccaccctaagccccattccagatcctcctctgcctatcgcaaatctgcctctacccaccacaagtctgtctttagccactccaaggctgcctctggtcacctcaagcctgtctctggccactccaagcctgcctctggtcaccccaagtctgccactgtctaccctaagcctgcctctgtccatttcaaggctgactctgtccatttcaagggtgactctgtccatttcaagcctgactctgttcatttcaagcctgcttccagcaaccccaagcccatcactggccaccatgtctctgctggcagccactccaagtctgccttcagtgctgccaccagccaccctaaacccaccactggccacatcaagccagctaccagccatgctgagcccaccactgctgactatcccaagcctgccactaccagccaccctaagcccactgctgctgacaaccctgagctctctgcctcccattgccccgagatccctgccattgcccaccctgtgtctgacgacagtgacctccctgagtcggcctctagccctgccgctgggcccaccaagcctgctgccagccagctggagtctgacaccatcgctgaccttcctgaccctactgtagtcactaccagtaccaatgattaccatgatgtcgtggttattgatgttgaagatgatcctgatgaaatggctgtgtgaaaaatgctctcgtaggtggcc

SEQ ID NO: 912 - DNA, 2834 bp, Homo sapiens
tgcccgacgtgggtggggggggcgtggaatcggagcacaacttggccctgcgttcccaggaagggacccgaagacctccccaggccaccccgccatctgcgtgcgcgctggcaagaggaggggcgcggggtaatggtggccggcgccacagccccgcgccgcgcagggtcttgcccaccaccagcgatgcccagcccttggtagagcttgaaccaccttctataaacaggatggcggtggagagacaggcccagtccctgagcccatgaggagtgtggccccttcaggcccaaagatggggaacatcactgcagacaactcctcgatgagctgtaccatcgaccataccatccaccagacgctggccccggtggtctatgttaccgtgctggtggtgggcttcccggccaactgcctgtccctctacttcggctacctgcagatcaaggcccggaacgagctgggcgtgtacctgtgcaacctgacggtggccgacctcttctacatctgctcgctgcccttctggctgcagtacgtgctgcagcacgacaactggtctcacggcgacctgtcctgccaggtgtgcggcatcctcctgtacgagaacatctacatcagcgtgggcttcctctgctgcatctccgtggaccgctacctggctgtggcccatcccttccgcttccaccagttccggaccctgaaggcggccgtcggcgtcagcgtggtcatctgggccaaggagctgctgaccagcatctacttcctgatgcacgaggaggtcatcgaggacgagaaccagcaccgcgtgtgctttgagcactaccccatccaggcatggcagcgcgccatcaactactaccgcttcctggtgggcttcctcttccccatctgcctgctgctggcgtcctaccagggcatcctgcgcgccgtgcgccggagccacggcacccagaagagccgcaaggaccagatccagcggctggtgctcagcaccgtggtcatcttcctggcctgcttcctgccctaccacgtgttgctgctggtgcgcagcgtctgggaggccagctgcgacttcgccaagggcgttttcaacgcctaccacttctccctcctgctcaccagcttcaactgcgtcgccgaccccgtgctctactgcttcgtcagcgagaccacccaccgggacctggcccgcctccgcggggcctgcctggccttcctcacctgctccaggaccggccgggccagggaggcctacccgctgggtgcccccgaggcctccgggaaaagcggggcccagggtgaggagcccgagctgttgaccaagctccacccggccttccagacccctaactcgccagggtcgggcgggttccccacgggcaggttggcctagcctgggtcctccgcgggtggctccacgtgaggcctgagccttcagcccacgggcctcagggcctgccgcctcctgcttccctcgctgcggaggcagggaagcccctgtaactccggaagcctgctctcgcttgctgagcccgctgggaccgccgagggtgggaataagccccggttggctcgtgggaataagccgtgtcctctgccgcggctgcgatgtggccaggctggggctgctggtcgggggaagacagtgaactgcgttccctggcctgcttcctgcagagtttgtgcatggggagtgtgaggacatggagggtgggaggctgggcgttcagctgccagggccttccaatgccaccgttgtcacagacaatgcctgtccaaacgtcccggtgggatcagcactgcagcccgcccacaacagggtgggaagggaagactggagggggaaggaaggcaggagggggaaggaagaaagagggggaaggaaagaaagaggggggaaggaaaggaggaaggggagaaggaagggaggaggaaagaaggaaggtagggggtgttgggttgggagaattgagggagttataggcagaggaggatcctagctccagccataagaactgggagagccgcctgctgctccagaagacctgcccacctccacagaaatgctagcccttcagaccttctggtcagtgaactgggaccagctctgactaaggatgccttccatggcctgggactcgagttcttcagaaccaagaggctaactgggcttcctccaagaagggaccaggggctagaagcagaagttggcatcagcaaacatttctggaatctaccaaagggaggcccaggcagaaccccttcctcagtctcccttcccctcttccccccagccttgaagaggttgatcctttgtgctgtgtctcttagccctttcatcggggatgcccagaggcaacagcccaggctggaggtgccccagggaagggtgctcacagtggtcccagggctacacttggctttgactgcacagcccctgctcagatccttgtggagggtgtccgatgacttggggaggttctcttccccttcctagaggaggaagtgaccaagtttgaaggcggcagaaatggccacacagccaagaagagcccatgcaactcagtccaggattttactgggtcagtgacattggtggaagccttcatgcctcctcattccacagcacttcctcctatgttgaccttaaacactggcttcccactgatacagactgggatgagctgagggcagtctcatttactgtcaagagttgtatttttgtattgtcctttttgccaagtctacatgtgttgactctgtaatggatttatgtagcccacttcagtctgcaaataaagcaaagtaactggaaaaaaaaaaaaaaaaaaaaa

SEQ ID NO: 913 - DNA, 2402 bp, Homo sapiens
gtatgagggtcagggctgcgcggacccctatcccgcctgcggtcctcccggcaagcccagcgggagcgcccgctcggctgggtccccgcctccagcggcgccggggccgcccagaccctgggctcagcctcgcgccccggtgcccacctgaggaggcagcggtcccggcctcgcgtcccggatgggacggcgcgggagcaatgccagtggccccgagcgccccgggccacgcgcggggccggccagccgctctcgcgccctccccgccccctccgcgccttgcctcgccgcccgcggcccccacccaccggccgctcctcccctctccccaccctcctcctccgccccctcccctcccccgccgcctcgcagatagctcggccgcgcgtctcagccgccggggccccgagcgcaggcggcgaggccaccacacctgcagagcgctcgggctgcctagccggcacctcgcctcccgccgcgcaaaccccttctccccacgcgccgagtctcccatgacgcccgagccccccggccggcgacaatgaccacttccctgcaagatgggcagagcgccgcgagcagggcggctgcccgggattcgccgctggccgcccaggtgtgtggcgctgcccaggggaggggcgacgcccacgacctggcgccggccccctggctgcacgcgcgagcgctcctgccccttccggacgggacccgcggctgtgctgcagacaggagaaaaaagaaagatcttgatgttccggaaatgccatctattccaaacccttttcctgagctatgctgttctccatttacatctgtgttgtcagcagacctatttcccaaagcaaattcaaggaaaaaacaggtgattaaagtatacagtgaagatgaaaccagcagggctttagatgtacccagtgacataacggctcgagatgtttgtcagctgttgatcctgaagaatcattacattgatgaccacagctggaccctttttgagcacctgcctcacataggtgtagaaagaacaatagaagaccacgaactggtgattgaagtgctatccaactgggggatagaagaagaaaacaaactatactttagaaaaaattatgccaaatatgagttctttaaaaacccaatgtatttttttccagagcatatggtatcttttgcaactgaaaccaatggtgaaatatcccccacacagattttgcagatgtttctgagttcaagcacatatcctgaaattcatggtttcttacatgcgaaagaacagggaaagaagtcttggaaaaaaatttacttttttctaagaagatctggtttatatttttctactaaaggaacatcaaaggaaccgcggcatttgcagtttttcagcgaatttggcaatagtgatatttatgtgtcactggcaggcaaaaaaaaacatggagcaccgactaactatggattctgctttaagcctaacaaagcgggagggccccgagacctgaaaatgctctgtgcagaagaagagcagagtaggacgtgctgggtgaccgcgattagattgcttaagtatggcatgcagctgtaccagaattatatgcatccatatcaaggtagaagtggctgcagttcacagagcatatcacctatgagaagtatatcagagaattccctggtagcaatggacttctcaggccagaaaagcagagttatagaaaatcccactgaagccctttcagttgcggttgaagaaggactcgcttggaggaaaaaaggatgtttacgcctgggcactcacggtagccccactgcctcttcacagagctctgccacaaacatggctatccaccggtcccagccatggtttcaccacaaaatttctagagatgaggctcagcgattgattattcagcaaggacttgtggatggagttttcttggtacgggatagtcagagtaaccccaaaactttcgtactgtcaatgagtcatggacaaaaaataaagcactttcaaattataccagtagaagatgacggtgaaatgttccacacactggatgatggccacacaagatttacagatctaatacagctggtggagttctatcaactcaataagggcgttcttccttgcaagttgaaacattattgtgctaggattgctctctagacaagccagaagtgacttattaaactattgaaggaaaaggactcaagaaaaataataaaagaccataaataagggcgaaaacattaccatgtgaaaagaatgtatttcacctgcaagttacaaaaaaatagtttgtgcattgcaaataagcaaagacttggattgactttacattcatcatttaaaattcattagttaaaattaaaccttaggaaaaaaatgaaaaaaaaaaaaaaaa

SEQ ID NO: 914 - DNA, 8482 bp, Homo sapiens
aaataaagttttttcaatggaaggcttgcagctcttgaggacctgccaaatggaagaaggacagagacctggagccctatggaaagttctgacaccatgtgtggaaggacatggcttttaacacgtgtggtgactggagtagctgcagctgaggacagccaccctttcttcgtctctgctgagcgaaggctacacggcccttcctccttgcagctgtttcaccttctaccttgcgtggagccaggcttttgcaccgaatctgagatgccattttaaacagaagactccatcctcttgaagatgggaaattcttacgctggacagctgaagacgacacgctttgaagaggtcttgcacaattccatcgaggcatccctgcggtccaacaacctggtgcccaggcccatcttttcccagctgtacctggaagctgagcagcagcttgccgctctagaaggtggtagccgagtggacaatgaggaagaggaagaagagggagaaggagggctggaaacaaatggccccccaaaccctttccagctgcaccctctgcctgaaggatgctgtaccacagacgggttttgccaggccgggaaggacctgcgccttgtctccatttccaacgagcccatggatgtccctgcgggctttctcctcgtgggggtcaagtcccccagcctgccggaccatctcctggtgtgcgccgttgacaagaggttcttgccagatgacaatggccacaatgctcttcttggtttctctgggaattgtgttggctgtggaaagaaaggcttctgttacttcacggaattctccaatcatataaatctgaaactgaccactcaacccaagaagcagaaacacttgaagtattacctggtccgtaatgcacaagggactctaaccaaaggacctttaatctgttggaaaggctcagagtttagaagccggcagatccccgccagtacttgttccagttccctcttcccagccctggagagcacggctgccttccccagcgagcccgttcctgggacgaaccccagcatcctgatgggagctcagcaggcaggaccagcttctgatcacccctcactaaacgcagcaatgggtccggctgttttcaacggcaaagattccccgaagtgccaacaactggcaaagaataacctgttggccctgccgcgaccatcggctttaggtatcttgtcaaactccgggccccccaaaaaacgccacaaagggtggtctccagaatctccatcagctccagatggtggctgcccccaaggtggtgggaacagagctaagtatgagagcgcaggcatgtcctgcgtgccgcaggttggcttggtgggaccagcttcagtcacctttccagtggtggcctctggagaaccagtgtctgttcctgacaacttgctgaaaatatgcaaggccaagccagtgatatttaaaggccatgggaacttcccttacctctgtgggaacctgaatgacgtcgtggtcagccccctcttgtacacgtgctaccagaattcccagtctgtctcacgggcatacgagcagtacggcgcctctgccatccagcccatctccgaggagatgcagctcctgcttaccgtctactacctggtccagctggccgcggaccaggtgcccttgatggaggacctggagcagatcttcctgcgctcttggcgcgagtcgcacctgaccgagatccggcagtaccagcaggcgccgccgcagcccttcccgcccgcgcccagcgccgcggcacccgtgacctccgcgcagctgccctggctggccagcctggccgccagctcctgcaacgacagcgtgcacgtcatcgagtgtgcttactccctggccgagggcctctccgagatgttccggctgttggtcgagggcaagcttgccaagaccaactacgtggtcatcatctgcgcctgccgcagcgcggccatcgactcctgcatcgccgtcaccggaaaataccaagcccggattctttccgagagccttctcactcctgcggagtaccagaaggaagtcaattacgagctggttacggggaaggtagactcgctgggggccttctttagcaccctctgtccagagggtgacattgacattttgctggacaaatttcaccaggaaaatcaaggccatatttcttcctcactcgctgcctcttctgtcactaaagcagcatccctggatgtcagtgggacaccggtgtgcacaagttacaatctggagccacacagcatccggcccttccagctggcagtagcgcagaagctcctctcccatgtgtgttccattgcggattccagcacccaaaatctggacctgggatcctttgagaaggtggactttctcatttgcattcccccctcagaagtgacctaccagcagactctgctccatgtgtggcattcaggggttttgctggagcttggtctgaagaaagagcacatgacgaagcagagggtggaacagtatgttctgaagctagacacggaggcacagacaaaatttaaggcttttctgcaaaactccttccagaacccgcatacactttttgtcctaatccatgaccatgcgcactgggatcttgtgagtagcactgttcataacctctattctcaaagtgacccgtcggtgggattggtggaccgattgctcaactgcagggaggtgaaggaggcccccaacattgtgacacttcacgtgacctccttcccgtatgcactgcagacacagcacaccctcatcagcccctacaacgagatccactggcctgcctcctgcagtaatggagtggacttatatcatgaaaataagaagtacttcgggctgtcggagtttattgaatccaccctttcaggacacagcctccccttgctcagatacgatagctcctttgaggccatggtcactgcattaggaaaaaggttcccccgcctgcacagcgcggtgatcaggacctttgttctcgtgcagcactacgcggccgccctgatggccgtaagcggcctcccgcagatgaagaactacacgtcggtggagacgctggagatcacgcagaacctcctcaactccccgaagcagtgcccctgcggccacgggctcatggtcctgctgcgggtgccctgttcgcccctggcggtggtggcctatgagcggctggcccacgtgcgggcccggctggcgctggaggagcactttgagatcatcctgggcagtcccagctcaggcgtcaccgtggggaagcacttcgtaaagcagctcaggatgtggcagaaaattgaggatgtggagtggagaccccagacttacttggagctggagggtctgccttgcatcctgatcttcagtgggatggacccgcatggggagtccttgccgaggtctttgaggtactgtgacctgcgattgataaactcctcctgcttggtgagaacagccttggagcaggagctgggcctggctgcctactttgtgagcaacgaggttcccttggagaagggggctaggaacgaggccttggagagtgatgctgagaagctgagcagcacagacaacgaggatgaggagctggggacagaaggctctacctcggagaagagaagccccatgaaaagggagaggtcccgctcccacgactcagcatcctcatccctctcctccaaggcttccggttcagcgctcggtggcgagtcctcggctcagcccacagcactcccccagggagagcatgccaggtcgccccagccccgtggccccgcagaggagggcagagcccctggtgagaaacagaggccccgggcaagtcaggggccaccctcggccatcagcaggcacagtcccgggccgacgccccagcccgactgtagcctcaggaccggccagaggagcgtccaggtgtcggtcacctcgtcgtgctcccagctgtcctcctcctcgggctcatcctcctcatccgtggcgcccgctgccggcacgtgggtcctgcaggcctcccagtgctccttgaccaaggcctgccgccagccacccattgtcttcttgcccaagctcgtgtacgacatggttgtgtccactgacagcagtggcctgcccaaggccgcctccctcctgccctccccctcggtcatgtgggccagctctttccgccccctgctcagcaagaccatgacatccaccgagcagtccctctactaccggcagtggacggtgccccggcccagccacatggactacggcaaccgggccgagggccgcgtggacggcttccacccccgcaggctgctgctcagcggcccccctcagatcgggaagacaggtgcctacctgcagttcctcagtgtcctgtccaggatgcttgttcggctcacagaagtggatgtctatgacgaggaggagatcaatatcaacctcagagaagaatctgactggcattatctccagcttagcgacccctggccagacctggagctgttcaagaagttgccctttgactacatcattcacgacccgaagtatgaagatgccagcctgatttgttcgcactatcagggtataaagagtgaagacagagggatgtcccggaagccggaggacctttatgtgcggcgtcagacggcacggatgagactgtccaagtacgcagcgtacaacacttaccaccactgtgagcagtgccaccagtacatgggcttccacccccgctaccagctgtatgagtccaccctgcacgcctttgccttctcttactccatgctaggagaggagatccagctgcacttcatcatccccaagtccaaggagcaccactttgtcttcagccaacctggaggccagctggagagcatgcgactacccctcgtgacagacaagagccatgaatatataaaaagtccgacattcactccaaccaccggccgtcacgaacatgggctctttaatctgtaccacgcaatggacggtgccagccatttgcacgtgctggttgtcaaggaatacgagatggcaatttataagaaatattggcccaaccacatcatgctggtgctccccagtatcttcaacagtgctggagttggtgctgctcatttcctcatcaaggagctgtcctaccataacctggagctcgagcggaaccggcaggaggagctgggaatcaagccgcaggacatctggcctttcattgtgatctctgatgactcctgcgtgatgtggaacgtggtggatgtcaactctgctggggagagaagcagggagttctcctggtcggaaaggaacgtgtctttgaagcacatcatgcagcacatcgaggcggcccccgacatcatgcactacgccctgctgggcctgcggaagtggtccagcaagacccgggccagcgaggtgcaagagcccttctcccgctgccacgtgcacaacttcatcatcctgaacgtggacctgacccagaacgtgcagtacaaccagaaccggttcctgtgtgacgatgtagacttcaacctgcgggtgcacagcgccggcctcctgctctgccggttcaaccgcttcagcgtgatgaagaagcagatcgtggtgggcggccacaggtccttccacatcacatccaaggtgtctgataactctgccgcggtcgtgccggcccagtacatctgtgccccggacagcaagcacacgttcctcgcagcgcccgcccagctcctgctggagaagttcctgcagcaccacagccacctcttcttcccgctgtccctgaagaaccatgaccacccagtgctgtctgtcgactgttacctgaacctgggatctcagatttctgtttgctatgtgagctccaggccccactctttaaacatcagctgctcggacttgctgttcagtgggctgctgctgtacctctgtgactcttttgtgggagctagctttttgaaaaagtttcattttctgaaaggtgcgacgttgtgtgtcatctgtcaggaccggagctcactgcgccagacggtcgtccgcctggagctcgaggacgagtggcagttccggctgcgcgatgagttccagaccgccaatgccagggaagaccggccgctcttttttctgacgggacgacacatctgaggaagacagcggcgagttttctgaagagatgagtgctcagagccctcatgctgttgaggctaaagggaggcctggaacggtggggcgtttgactggaatggaccccagggactgtccaggtgcagcccctcctagtacacatgggcccccgaggccgtggtcctgggagccaggaagactccgcagtgggtgagaatgaaaacttgagactcccaagttctgggccagcccattgctctgggctgttttaaagcccatttcacgaggaacaaagatttacttcctgtcctgccattcgtgtgcttccatggacaaacctgatttttttctcttagttctaaagaatcttgggttattttgtagcggtgccagtatttcagtagatgggatttcagccaagtaggttcccctgtaacctcctacaaagcaatattccaaaggaacattttaactgtaaaggctggagacaagaaaaaataagtagatcgttttaataacaattatttaattgcctataagtttgctgtttcagaggctagcccaaaggcatcaaatttaataaagttaaacaaattgatttacttcagagcaaatatgatcctattaaaataatatagggtaaataccctacctcttagaaagggcaaaaatgcaaagaagctttctttaaaactaaaagggttttttggggggggagttggcggggaggaaataaggctaacagaggttgacctaaaattagccttacaaaggagaaaggaccacattgcttacttgaaacagacaatgaaaacaaccaaagtgatatataaaatagttgatgagaactagacttatgactgtagtttactagagtttagttttcagttgctgaagtagctcattttctcttactaatgtttggttcctcagggaagaatctcacttgactagagaggaggtgggaacagaagagagaaggaggcagggagatgtatttcttagggctcaccccttcacagactgacagaatggttttgttttgttttgttttgttttgttttgtttttgagatggactctagctctgtcacccaggctggagtgcagtggtgcgatctcggctcactgcaagctccgcctcccgggttctcaccattctcctgcctcagcctcccgagtagctgggactacaggcgcccaccaccacgcccggctaattttttgtattttttagtagagacggggtttcaccatgttagccaggatggtctcgatctcctgacctcgtgatccgcccgcctcggcctcccaaagtgctgggattacaggcgtgagccaccgtgcctgccccagaatggtttttaaagccacagttgagaggccacccattgcccggcgcctggacagtgatcatcttgttcatcttgttcagtcctttcttgtgtgattggaattattcatcccctttgaaagatgagaaggttgagatgcaaagagtctacctttccaagttctcactgctggaaagagctagaagcacagttcaaagttctggcttctggactctgcagtccaggtctcccttctcccacttgcctaccctcaatgccacactgtttttgaagtggcccataacttgaaggaaaagtttaaagacagttcaatttaatcatcagaatgcattcttttttttttcggagacggagtttcactcttgctgcccaggctggagtgcaatggtgcaatgacctcggctcactgcaacctctgcctcctgggttcaagtgattctccagcctcagcctcccgagtagctgggattatgggcgcccaccaccatgcccagctaatttttgtattttttttttttagtagagatggggtttcgccaggttggccaggctggtcttgtgaactcctggcctcaggtgatctgcccacctcatcctccaaaagtgctgggattacaggcatgagccactgcgcctggcctcagaatgcattcttacacatctatcctagacatttataagcactctaatggataacaatccaagaataaatgattgtaaaagatgatgccgaagagttgatgtcaatctttttttcctaagaaaaaaagtccgcgagtattaaatatttagatcaatgtttataaaatgattactttgtatatctcattattcctattttggaataaaaactgaccttctttaatcatatacttgtcttttgtaaatagcagcttttgtgtcattctccccactttattagttaatttaaattggaaaaaaccctcaaactaatattcttgtctgttccagtcttataaataaaacttataatgcatg

SEQ ID NO: 915 - DNA, 4639 bp, Homo sapiens
cggatgctctccgactaacatggatgtcccaccattccttgcagtggaaggttgttccttggcgcagtgagtgaagaacatgcagcgattgctaatgggtttgggaagcggagactccttcctctctctatgaccatgccgtgatcgtgtctgcggtcaccactcgacgcatcctcatttctacccgaacccaggagccgaacgctagatcggggaagtgggtgccgtgcgtgtgggcacagaaacaccatgaagattattttcccgattctaagtaatccagtcttcaggcgcaccgttaaactcctgctctgtttactgtggattggatattctcaaggaaccacacatgtattaagatttggtggtatttttgaatatgtggaatctggcccaatgggagctgaggaacttgcattcagatttgctgtgaacacaattaacagaaacagaacattgctacccaatactacccttacctatgatacccagaagataaacctttatgatagttttgaagcatccaagaaagcctgtgatcagctgtctcttggggtggctgccatcttcgggccttcacacagctcatcagcaaacgcagtgcagtccatctgcaatgctctgggagttccccacatacagacccgctggaagcaccaggtgtcagacaacaaagattccttctatgtcagtctctacccagacttctcttcactcagccgtgccattttagacctggtgcagtttttcaagtggaaaaccgtcacggttgtgtatgatgacagcactggtctcattcgtttgcaagagctcatcaaagctccatcaaggtataatcttcgactcaaaattcgtcagttacctgctgatacaaaggatgcaaaacccttactaaaagaaatgaaaagaggcaaggagtttcatgtaatctttgattgtagccatgaaatggcagcaggcattttaaaacaggcattagctatgggaatgatgacagaatactatcattatatctttaccactctggacctctttgctcttgatgttgagccctaccgatacagtggtgttaacatgacagggttcagaatattaaatacagaaaatacccaagtctcctccatcattgaaaagtggtcgatggaacgattgcaggcacctccgaaacccgattcaggtttgctggatggatttatgacgactgatgctgctctaatgtatgatgctgtgcatgtggtgtctgtggccgttcaacagtttccccagatgacagtcagttccttgcagtgtaatcgacataaaccctggcgcttcgggacccgctttatgagtctaattaaagaggcacattgggaaggcctcacaggcagaataactttcaacaaaaccaatggcttgagaacagattttgatttggatgtgatcagtctgaaggaagaaggtctagaaaagattggaacgtgggatccagccagtggcctgaatatgacagaaagtcaaaagggaaagccagcgaacatcacagattccttatccaatcgttctttgattgttaccaccattttggaagagccttatgtcctttttaagaagtctgacaaacctctctatggtaatgatcgatttgaaggctattgcattgatctcctcagagagttatctacaatccttggctttacatatgaaattagacttgtggaagatgggaaatatggagcccaggatgatgccaatggacaatggaatggaatggttcgtgaactaattgatcataaagctgaccttgcagttgctccactggctattacctatgttcgagagaaggtcatcgacttttccaagccctttatgacacttggaataagtattttgtaccgcaagcccaatggtacaaacccaggcgtcttctccttcctgaatcctctctcccctgatatctggatgtatattctgctggcttacttgggtgtcagttgtgtgctctttgtcatagccaggtttagtccttatgagtggtataatccacacccttgcaaccctgactcagacgtggtggaaaacaattttaccttgctaaatagtttctggtttggagttggagctctcatgcagcaaggttctgagctcatgcccaaagcactgtccaccaggatagtgggaggcatttggtggtttttcacacttatcatcatttcttcgtatactgctaacttagccgcctttctgacagtggaacgcatggaatcccctattgactctgctgatgatttagctaaacaaaccaagatagaatatggagcagtagaggatggtgcaaccatgacttttttcaagaaatcaaaaatctccacgtatgacaaaatgtgggcctttatgagtagcagaaggcagtcagtgctggtcaaaagtaatgaagaaggaatccagcgagtcctcacctctgattatgctttcctaatggagtcaacaaccatcgagtttgttacccagcggaactgtaacctgacacagattggcggccttatagactctaaaggttatggcgttggcactcccatgggttctccatatcgagacaaaattaccatagcaattcttcagctgcaagaggaaggcaaactgcatatgatgaaggagaaatggtggaggggcaatggttgcccagaagaggagagcaaagaggccagtgccctgggggttcagaatattggtggcatcttcattgttctggcagccggcttggtgctttcagtttttgtggcagtgggagaatttttatacaaatccaaaaaaaacgctcaattggaaaaggaatcttctatttggttagtgccaccataccatccagacactgtttagtaatcttttgaaacttactaaaagaggtttttaataatgaggtccttctgtagtgccatggtagaagaattgaggatgtccctgaagtgccagcgtcggttaaaacataagccacaggccccagttattgtgaaaacagaagaagttatcaacatgcacacatttaacgacagaaggttgccaggtaaagaaaccatggcataaagctgggaggccaaacacccaagcacaaactgtcgtctttttccaaacaatttagccagaatgtttcctgtggaaatatgcaacctgtgcaaaataaaatgagttacctcatgccgctgtgtctatgaactagagactctgtgatctaagcagttgcaatgatcagacttgatttacaagcatcatggatcaaccaagttacacggggttacactgttaatcatgggttcctcccttcttctgagtgaatgttaacatgcgcattttgtggctgatttcaaatgcagtccagtgagaaattacaggttccttttgaagctcaactgttgccaggagatggaatatcaatgcccaacagggcaaccaataaaagtgtcactaagaatataaatatttggaatcagcaaaaactgtagtgttacaggaaacagtacagtcttctgaacacccagatcatagaggtgatgatgttactagcccccaactactcagtataattattgtctgaatgcaaagtatgtgtttataggatgtgaaaaaatgtaatgcaaaacaaatttgaatcccatggcagttggaatataaagcagatgttcatcacttattttccttttttcttttcttatttttttttttgacagtctgtgtcactgattgagatagaaatgccaattatcaaggaaataatgttttcttaagttccctaaggcagaagatttaacatgcaattctaccagatcccttcctattcccccaacaccttttctctaacccccatatcccaaataataataataataataataataataataataataataataaaagcagttggttcagtgattctgaattaaaaggataatgttttgcaatgttcaagttgtaaaaactggccgagtattggctgtgtggaagactaaagctttcattctaacattcagacatagcaatccaaacccttgttcctgctgtaaatgaacttgatggagcatgggcagatttcagtgatacgagaaaggggactggtcatctatagaaaaatctgtgagagaacttggaagtggactgcgtttatcaatacagtcacaatgttaaatgaacaaaattcttgaacagttttttttcaaaaaatgttcaggtttatttgtggaaatgcaagatttctatgaaaatagtttttgtatggaaatttttgtaatactttttatcaacaaaacaagaacatgtgttcctgtcaggggtgtgatgtcaagcatgaatggtagtgcgtgtgcaccaccaacgtttggtgaaaactatttttatcaagaaaaaaggaatcatagaagagaaatattttcaagttagataatataaaagctaggtgcactaccaccactgcttaccatgccacacccctggtttccacgaggctgacaacatactgtaatgaacaattgtgtgtaaaatggtaaaagacacagacctcttgacaacattgtgataacagttgagtgcacacagtttgctgtttgaatccaatgcacaaaattaaaaaaaatcattaaaactatgttcattttactttcaaaaa

SEQ ID NO: 916 - DNA, 4339 bp, Homo sapiens
cccttaataagatttgccacgtacactcgagccatcgcgagtgtccttgagccgcgggtgacggtggctctcgctgctcgcgccccctcctcccgcggggggagcctgatgccacgttccctatgaattatttatcgccggcctaaaaataccccgaacttcacagcccgagtgaccctccggtggacatgggtggggccctggggccggccctgttgctcacctcgctcttcggtgcctgggcagggctgggtccggggcagggcgagcagggcatgacggtggccgtggtgtttagcagctcagggccgccccaggcccagttccgtgcccgcctcaccccccagagcttcctggacctacccctggagatccagccgctcacagttggggtcaacaccaccaaccccagcagcctcctcacccagatctgcggcctcctgggtgctgcccacgtccacggcattgtctttgaggacaacgtggacaccgaggcggtggcccagatccttgacttcatctcctcccagacccatgtgcccatcctcagcatcagcggaggctctgctgtggtcctcacccccaaggagccgggctccgccttcctgcagctgggcgtgtccctggagcagcagctgcaggtgctgttcaaggtgctggaagagtacgactggagcgccttcgccgtcatcaccagcctgcacccgggccacgcgctcttcctggagggcgtgcgcgccgtcgccgacgccagccacgtgagttggcggctgctggacgtggtcacgctggagctgggcccgggagggccgcgcgcgcgcacgcagcgcctgctgcgccagctcgacgcgcccgtgtttgtggcctactgctcgcgcgaggaggccgaggtgctcttcgccgaggcggcgcaggccggtctggtggggcccggccacgtgtggctggtgcccaacctggcgctgggcagcaccgatgcgccccccgccaccttccccgtgggcctcatcagcgtcgtcaccgagagctggcgcctcagcctgcgccagaaggtgcgcgacggcgtggccattctggccctgggcgcccacagctactggcgccagcatggaaccctgccagccccggccggggactgccgtgttcaccctgggcccgtcagccctgcccgggaggccttctacaggcacctactgaatgtcacctgggagggccgagacttctccttcagccctggtgggtacctggtccagcccaccatggtggtgatcgccctcaaccggcaccgcctctgggagatggtggggcgctgggagcatggcgtcctatacatgaagtaccccgtgtggcctcgctacagtgcctctctgcagcctgtggtggacagtcggcacctgacggtggccacgctggaagagcggccctttgtcatcgtggagagccctgaccctggcacaggaggctgtgtccccaacaccgtgccctgccgcaggcagagcaaccacaccttcagcagcggggacgtggccccctacaccaagctctgctgtaagggattctgcatcgacatcctcaagaagctggccagagtggtcaaattctcctacgacctgtacctggtgaccaacggcaagcatggcaagcgggtgcgcggcgtatggaacggcatgattggggaggtgtactacaagcgggcagacatggccatcggctccctcaccatcaatgaggaacgctccgagatcgtagacttctctgtaccctttgtggagacgggcatcagtgtgatggtggctcgcagcaatggcaccgtctccccctcggccttcttggagccatatagccctgcagtgtgggtgatgatgtttgtcatgtgcctcactgtggtggccatcaccgtcttcatgttcgagtacttcagccctgtcagctacaaccagaacctcaccagaggcaagaagtccgggggcccagctttcactatcggcaagtccgtgtggctgctgtgggcgctggtcttcaacaactcagtgcccatcgagaacccgcggggcaccaccagcaagatcatggttctggtctgggccttctttgctgtcatcttcctcgccagctacacggccaacctggccgccttcatgatccaagagcaatacatcgacactgtgtcgggcctcagtgacaagaagtttcagcggcctcaagatcagtacccacctttccgcttcggcacggtgcccaacggcagcacggagcggaacatccgcagtaactaccgtgacatgcacacccacatggtcaagttcaaccagcgctcggtggaggacgcgctcaccagcctcaagatggggaagctggatgccttcatctatgatgctgctgtcctcaactacatggcaggcaaggacgagggctgcaagctggtcaccattgggtctggcaaggtctttgctaccactggctacggcatcgccatgcagaaggactcccactggaagcgggccatagacctggcgctcttgcagttcctgggggacggagagacacagaaactggagacagtgtggctctcagggatctgccagaatgagaagaacgaggtgatgagcagcaagctggacatcgacaacatggcaggcgtcttctacatgctgctggtggccatggggctggccctgctggtcttcgcctgggagcacctggtctactggaagctgcgccactcggtgcccaactcatcccagctggacttcctgctggctttcagcaggggcatctacagctgcttcagcggggtgcagagcctcgccagcccaccgcggcaggccagcccggacctcacggccagctcggcccaggccagcgtgctcaagatgctgcaggcagcccgcgacatggtgaccacggcgggcgtaagcagctccctggaccgcgccactcgcaccatcgagaattggggtggcggccgccgtgcgcccccaccgtccccctgcccgaccccgcggtctggccccagcccatgcctgcccacccccgacccgcccccagagccgagccccacgggctggggaccgccagacgggggtcgcgcggcgcttgtgcgcagggctccgcagcccccgggccgccccccgacgccggggccgcccctgtccgacgtctcccgagtgtcgcgccgcccagcctgggaggcgcggtggccggtgcggaccgggcactgcgggaggcacctctcggcctccgagcggcccctgtcgcccgcgcgctgtcactacagctcctttcctcgagccgaccgatccggccgccccttcctcccgctcttcccggagcccccggagctggaggacctgccgctgctcggtccggagcagctggcccggcgggaggccctgctgcacgcggcctgggcccggggctcgcgcccgcgtcacgcttccctgcccagctccgtggccgaggccttcgctcggcccagctcgctgcccgctgggtgcaccggccccgcctgcgcccgccccgacggccactcggcctgcaggcgcttggcgcaggcgcagtcgatgtgcttgccgatctaccgggaggcctgccaggagggcgagcaggcaggggcccccgcctggcagcacagacagcacgtctgcctgcacgcccacgcccacctgccattttgctggggggctgtctgtcctcaccttccaccctgtgccagccacggctcctggctctccggggcctgggggcctctggggcacaggggcaggactctggggctgggcacaggctacagagacagtgggggactggacgagatcagcagtgtagcccgtgggacgcaaggcttcccgggaccctgcacctggagacggatctccagtctggagtcagaagtgtgagttatcagccactcaggctccgagccagctggattctctgcctgccactgtcagggttaagcggcaggcaggattgggcttttctggcttctaccatgaaatcctggccatgggaccccagtgacagatgatgtcttccatggtcatcagtgacctcagtagcctcaaatcatggtgagggctgggcttttgctgtcctcttctcacgcagagttctgccaggagggtgtgctgtgggggtcagactcctgaggctctcccttccctggggctagccagttactggtcatgcctgctgtgggcatggaggctggaacttgtggttgaggcagggccatcccgatccttgctctacctggctagagtttcttctcatcagagcactgggacattaaacccaccttttcccagaaaaaaaaaaaaaaaaaaaaaaaaaaaaa

SEQ ID NO: 917 - DNA, 2100 bp, Homo sapiens
acaggccacaggccaagggcagcagtcaggcctgctctgtctgtgaacgctcccggcttggcctcggctgatgggccctcacgcctgaagcgggcaggaagctccgggatggatttcgggtctttggagaccgtggtggccaactctgccttcatcgccgcccgaggcagctttgacggcagcagctcccaaccctcccgggacaagaagtacctggccaagctcaagctgcccccgctgtccaagtgtgagtccctccgcgacagcctcagcctggagtttgagagtgtgtgcttggagcagcccatcggcaagaagctctttcagcagttcctacaatcggcagagaagcacctgccggccctggagctctggaaagacatcgaggactatgacacggcagacaatgacctccagccacagaaggcccagaccatcctggcccagtacctggacccccaggccaaactcttctgcagcttcctggatgaggggatagtggcgaagtttaaggaggggcctgtggagatccaggacgggctcttccagcccctgctgcaggccaccctggcacacctgggccaagcccccttccaggagtacctgggcagcctgtacttcctgaggttcctgcagtggaagtggctggaagcccagcccatgggggaggactggttcctggacttcagggtcctggggaaagggggcttcggggaggtgtcggcctgccagatgaaggcgaccggcaagctgtatgcctgcaagaagctgaacaagaagcggctgaagaagaggaagggctaccagggtgctatggtggagaagaagattctgatgaaagtacacagcaggttcatcgtgtctctggcctatgcgtttgaaaccaaagccgacctctgtctggtgatgaccatcatgaacggaggtgacatcaggtaccacatctacaacgtgaatgaggagaaccctggcttcccggagccgcgcgccctcttctacacggcgcagatcatctgcggcctggagcacctgcaccagaggcggatcgtctaccgcgacctcaagcccgagaacgtgctgctggacaatgacggcaatgtccggatctctgaccttgggctggccgtggagctgctggacggacagagcaagaccaagggctacgcagggaccccaggtttcatggcccccgagctcctgcagggcgaggagtacgacttctccgtggactactttgccctgggggtcaccctgtatgagatgattgcggccagaggacccttccgagcccgtggagagaaggtggagaacaaggagctgaagcaccggatcatctcagagcccgtgaagtaccctgataagttcagccaggccagcaaggacttctgcgaggcgctgctggagaaggacccggagaagcgcctggggttcagagatgagacctgcgacaagctccgtgcccaccccctcttcaaggaccttaactggaggcagctggaggctgggatgctgatgccccctttcatcccagactccaaaactgtctacgcaaaggatattcaggacgtgggtgccttttccaccgtcaaaggtgtggcctttgacaaaacagacacagaattctttcaggaatttgccactggcaactgccccatcccctggcaggaggagatgatcgagacgggcatctttggcgagctgaacgtgtggcgctcggacggtcagatgccggacgacatgaagggcatctccgggggctccagctcctcgtccaagtcagggatgtgtctggtttcctaggtgacgccccagagtccacgtggaggaaaaggacccatacggctcgatgggggccgcctgcctccgtggtgccagcctggggtctgctagcaaggggacacgtggttccctccacccaggtccccatcacgccatctccttgcggcccaaggaggagaaagccacgtcggcctgagccgccagatgcacatgctggtgccgtgagcccccgactgcatatttcacgtcttttgctccatctcactgagaagacataagatgctctccagagggagtaagccaaaaatctacaaactctta

SEQ ID NO: 918 - DNA, 2321 bp, Homo sapiens
agccgttagcgccgagcccgcccgggagcgggtcgccggccgcggcgggcgcccctgccagtgagcccctgtccgaagtgagccacggcattgactcggggctgcccgggggcagggcactgaggagggagttgcgcgcgcgaggcgagggcgatggggccaagaagaaccggggcgatagcgcggcagcggtgacagctgggacccgccgcggtcgggctgccccctcccctcgccccgaccgctcccctgctggtgagggcctgcggaggcggcggcggcggcgcccttggtggcagtggtggcggcggagcagcctcccgggatcgtgtccggagctcgaggagagggtggtgcccggcgagctatgcacgggggcggcggcgtctcctcctgttccgcctcctcagtctcctcggtctcgcagaatccgccggcggcggcggcgccaggacatggagctcgagaacatcgtggccaactcgctgctgctgaaagcgcgtcaaggaggatatggcaaaaaaagtggtcgtagtaaaaaatggaaggagatactgacactgcctcctgtcagccagtgcagtgagcttagacattccattgaaaaggattatagcagtctttgtgacaagcaaccgataggaagacgtctcttcaggcagttctgtgataccaaacccactctaaagaggcacattgaattcttggatgcagtggcagaatatgaagttgccgatgatgaggaccgaagtgattgtggactgtcaatcttagatagattcttcaatgataagttggcagcccctttaccagaaatacctccagatgttgtgacagaatgtagattgggactgaaggaggagaacccttccaaaaaagcctttgaggaatgtactagagttgcccataactacctaagaggggaaccatttgaagaataccaagaaagctcatatttttctcagtttttacaatggaaatggctggaaaggcaacccgtaacaaagaacacatttagacattacagagttctaggaaaaggcggatttggagaggtttgcgcctgtcaagtgcgagccacaggaaaaatgtatgcctgcaaaaagctacaaaaaaaaagaataaagaagaggaaaggtgaagctatggctctaaatgagaaaagaattctggagaaagtgcaaagtagattcgtagttagtttagcctacgcttatgaaaccaaagatgccttgtgcttggtgctcaccattatgaatggaggggatttgaagtttcacatttacaacctgggcaatcccggctttgatgagcagagagccgttttctatgctgcagagctgtgttgcggcttggaagatttacagagggaaagaattgtatacagagacttgaagcctgagaatattctccttgatgatcgtggacacatccggatttcagacctcggtttggccacagagatcccagaaggacagagggttcgaggaagagttggaacagtcggctacatggcacctgaagttgtcaataatgaaaagtatacgtttagtcccgattggtggggacttggctgtctgatctatgaaatgattcagggacattctccattcaaaaaatacaaagagaaagtcaaatgggaggaggtcgatcaaagaatcaagaatgataccgaggagtattctgagaagttttcagaggatgccaaatctatctgcaggatgttactcaccaagaatccaagcaagcggctgggctgcaggggcgagggagcggctggggtgaagcagcaccccgtgttcaaggacatcaacttcaggaggctggaggcaaacatgctggagccccctttctgtcctgatcctcatgccgtttactgtaaggacgtcctggatatcgagcagttctcggtggtgaaagggatctacctggacaccgcagatgaagacttctatgctcggtttgctaccgggtgtgtctccatcccctggcagaatgagatgatcgaatctgggtgtttcaaagacatcaacaaaagtgaaagtgaggaagctttgccattagatctagacaagaacatacataccccggtttccagaccaaacagaggcttcttctatagactcttcagaagagggggctgcctgaccatggtccccagtgagaaggaagtggaacccaagcaatgctgagcaccccggtgcggaccacagagcagaccctggcgccaggaaggagcatgtgttagcgtctcgtcccacctggaattgtaataaatacatctaaataaaacatgccttgggagtgtacagacaaaaaaa

SEQ ID NO: 919 - DNA, 2225 bp, Homo sapiens
agccgttagcgccgagcccgcccgggagcgggtcgccggccgcggcgggcgcccctgccagtgagcccctgtccgaagtgagccacggcattgactcggggctgcccgggggcagggcactgaggagggagttgcgcgcgcgaggcgagggcgatggggccaagaagaaccggggcgatagcgcggcagcggtgacagctgggacccgccgcggtcgggctgccccctcccctcgccccgaccgctcccctgctggtgagggcctgcggaggcggcggcggcggcgcccttggtggcagtggtggcggcggagcagcctcccgggatcgtgtccggagctcgaggagagggtggtgcccggcgagctatgcacgggggcggcggcgtctcctcctgttccgcctcctcagtctcctcggtctcgcagaatccgccggcggcggcggcgccaggacatggagctcgagaacatcgtggccaactcgctgctgctgaaagcgcgtcaagaaaaggattatagcagtctttgtgacaagcaaccgataggaagacgtctcttcaggcagttctgtgataccaaacccactctaaagaggcacattgaattcttggatgcagtggcagaatatgaagttgccgatgatgaggaccgaagtgattgtggactgtcaatcttagatagattcttcaatgataagttggcagcccctttaccagaaatacctccagatgttgtgacagaatgtagattgggactgaaggaggagaacccttccaaaaaagcctttgaggaatgtactagagttgcccataactacctaagaggggaaccatttgaagaataccaagaaagctcatatttttctcagtttttacaatggaaatggctggaaaggcaacccgtaacaaagaacacatttagacattacagagttctaggaaaaggcggatttggagaggtttgcgcctgtcaagtgcgagccacaggaaaaatgtatgcctgcaaaaagctacaaaaaaaaagaataaagaagaggaaaggtgaagctatggctctaaatgagaaaagaattctggagaaagtgcaaagtagattcgtagttagtttagcctacgcttatgaaaccaaagatgccttgtgcttggtgctcaccattatgaatggaggggatttgaagtttcacatttacaacctgggcaatcccggctttgatgagcagagagccgttttctatgctgcagagctgtgttgcggcttggaagatttacagagggaaagaattgtatacagagacttgaagcctgagaatattctccttgatgatcgtggacacatccggatttcagacctcggtttggccacagagatcccagaaggacagagggttcgaggaagagttggaacagtcggctacatggcacctgaagttgtcaataatgaaaagtatacgtttagtcccgattggtggggacttggctgtctgatctatgaaatgattcagggacattctccattcaaaaaatacaaagagaaagtcaaatgggaggaggtcgatcaaagaatcaagaatgataccgaggagtattctgagaagttttcagaggatgccaaatctatctgcaggatgttactcaccaagaatccaagcaagcggctgggctgcaggggcgagggagcggctggggtgaagcagcaccccgtgttcaaggacatcaacttcaggaggctggaggcaaacatgctggagccccctttctgtcctgatcctcatgccgtttactgtaaggacgtcctggatatcgagcagttctcggtggtgaaagggatctacctggacaccgcagatgaagacttctatgctcggtttgctaccgggtgtgtctccatcccctggcagaatgagatgatcgaatctgggtgtttcaaagacatcaacaaaagtgaaagtgaggaagctttgccattagatctagacaagaacatacataccccggtttccagaccaaacagaggcttcttctatagactcttcagaagagggggctgcctgaccatggtccccagtgagaaggaagtggaacccaagcaatgctgagcaccccggtgcggaccacagagcagaccctggcgccaggaaggagcatgtgttagcgtctcgtcccacctggaattgtaataaatacatctaaataaaacatgccttgggagtgtacagacaaaaaaa

SEQ ID NO: 920 - DNA, 2575 bp, Homo sapiens
gggacacagagggaggaagaagcggcggcggcggcggcggcggcggcggctcctctttgcagagggggaaactcttgggctgagagcaggaataatgcggtaggcaaggcgggctgctggctcccccggctccggcagcagcggcggcagcccgagcagcggcagcagcagcggcagcaccccaggcgctgacagccccgccggccggctccgttgctgaccgccgactgtcaatggagctggaaaacatcgtggccaacacggtcttgctgaaagccagggaagggggcggaggaaagcgcaaagggaaaagcaagaagtggaaagaaatcctgaagttccctcacattagccagtgtgaagacctccgaaggaccatagacagagattactgcagtttatgtgacaagcagccaatcgggaggctgcttttccggcagttttgtgaaaccaggcctgggctggagtgttacattcagttcctggactccgtggcagaatatgaagttactccagatgaaaaactgggagagaaagggaaggaaattatgaccaagtacctcaccccaaagtcccctgttttcatagcccaagttggccaagacctggtctcccagacggaggagaagctcctacagaagccgtgcaaagaactcttttctgcctgtgcacagtctgtccacgagtacctgaggggagaaccattccacgaatatctggacagcatgttttttgaccgctttctccagtggaagtggttggaaaggcaaccggtgaccaaaaacactttcaggcagtatcgagtgctaggaaaagggggcttcggggaggtctgtgcctgccaggttcgggccacgggtaaaatgtatgcctgcaagcgcttggagaagaagaggatcaaaaagaggaaaggggagtccatggccctcaatgagaagcagatcctcgagaaggtcaacagtcagtttgtggtcaacctggcctatgcctacgagaccaaggatgcactgtgcttggtcctgaccatcatgaatgggggtgacctgaagttccacatctacaacatgggcaaccctggcttcgaggaggagcgggccttgttttatgcggcagagatcctctgcggcttagaagacctccaccgtgagaacaccgtctaccgagatctgaaacctgaaaacatcctgttagatgattatggccacattaggatctcagacctgggcttggctgtgaagatccccgagggagacctgatccgcggccgggtgggcactgttggctacatggctccagaggtcctgaacaaccagaggtacggcctgagccccgactactggggccttggctgcctcatctatgagatgatcgagggccagtcgccgttccgcggccgcaaggagaaggtgaagcgggaggaggtggaccgccgggtcctggagacggaggaggtgtactcccacaagttctccgaggaggccaagtccatctgcaagatgctgctcacgaaagatgcgaagcagaggctgggctgccaggaggagggggctgcagaggtcaagagacaccccttcttcaggaacatgaacttcaagcgcttagaagccgggatgttggaccctcccttcgttccagacccccgcgctgtgtactgtaaggacgtgctggacatcgagcagttctccactgtgaagggcgtcaatctggaccacacagacgacgacttctactccaagttctccacgggctctgtgtccatcccatggcaaaacgagatgatagaaacagaatgctttaaggagctgaacgtgtttggacctaatggtaccctcccgccagatctgaacagaaaccaccctccggaaccgcccaagaaagggctgctccagagactcttcaagcggcagcatcagaacaattccaagagttcgcccagctccaagaccagttttaaccaccacataaactcaaaccatgtcagctcgaactccaccggaagcagctagtttcggctctggcctccaagtccacagtggaaccagcccagacccttctccttagaagtggaagtagtggagcccctgctctggtggggctgccaggggagaccccgggagccggggaaggaggccgtccatcccgtcgacgtagaacctcgaggtttctcaaagaaatttccactcaggtctgttttccgaggcggccccggccggggtggattggatttgtctttggtgaacattgcaatagaaatccaattggatacgacaacttgcacgtattttaatagcgtcataactagaactgaattttgtctttatgatttttaaagaaaagttttgtaaatttctctactgtctcagtttacattttgtatatttgtatttaaatgaaagtgagactttgagggtgtatattttctgtgcagccactgttaagccatgtgttccaaggcattttagcggggagggggttatcaaaaaaaaaaaaatgtgactcaagacttccagagcctcaaatgagaaaatgtctttattaaatgtagaaagtgatccataaaaaaaaaaaaaaaaaa

SEQ ID NO: 921 - DNA, 1823 bp, Homo sapiens
cctgggcgggccctgcgtcaggttgcagtttcacttttagctctgggcacctccagctcctgctcgccggacggctcccagggagagcagacgcgccagacgcgccaccctcggggcgccgacggtcacggagcatggggtcggcctttgagcgggtagtccggagagtggtccaggagctggaccatggtggggagttcatccctgtgaccagcctgcagagctccactggcttccagccctactgcctggtggttaggaagccctcaagctcatggttctggaaaccccgttataagtgtgtcaacctgtctatcaaggacatcctggagccggatgccgcggaaccagacgtgcagcgtggcaggagcttccacttctacgatgccatggatgggcagatacagggcagcgtggagctggcagccccaggacaggcaaagatcgcaggcggggccgcggtgtctgacagctccagcacctcaatgaatgtgtactcgctgagtgtggaccctaacacctggcagactctgctccatgagaggcacctgcggcagccagaacacaaagtcctgcagcagctgcgcagccgcggggacaacgtgtacgtggtgactgaggtgctacagacacagaaggaggtggaagtcacgcgcacccacaagcgggagggctcgggccggttttccctgcccggagccacgtgcttgcagggtgagggccagggccatctgagccagaagaagacggtcaccatcccctcaggcagcaccctcgcattccgggtggcccagctggttattgactctgacttggacgtccttctcttcccggataagaagcagaggaccttccagccacccgcgacaggccacaagcgttccacgagcgaaggcgcctggccacagctgccctctggcctctccatgatgaggtgcctccacaacttcctgacagatggggtccctgcggagggggcgttcactgaagacttccagggcctacgggcagaggtggagaccatctccaaggaactggagcttttggacagagagctgtgccagctgctgctggagggcctggagggggtgctgcgggaccagctggccctgcgagccttggaggaggcgctggagcagggccagagccttgggccggtggagcccctggacggtccagcaggtgctgtcctggagtgcctggtgttgtcctccggaatgctggtgccggaactcgctatccctgttgtctacctgctgggggcactgaccatgctgagtgaaacgcagcacaagctgctggcggaggcgctggagtcgcagaccctgttggggccgctcgagctggtgggcagcctcttggagcagagtgccccgtggcaggagcgcagcaccatgtccctgccccccgggctcctggggaacagctggggcgaaggagcaccggcctgggtcttgctggacgagtgtggcctagagctgggggaggacactccccacgtgtgctgggagccgcaggcccagggccgcatgtgtgcactctacgcctccctggcactgctatcaggactgagccaggagccccactagcctgtgcccgggcatggcctggcagctctccagcagggcagagtgtttgcccaccagctgctagccctaggaaggccaggagcccagtagccatgtggccagtctaccatggggcccaggagttggggaaacacaataaaggtggcatacgaaggaaaaaaaaaaaaaaaaaaaaaccaaaaaaaaaaaaaaaaaaaaaaaaaaaaaaaaaaaaaaaaaaaaaaaaaaaaaaaa

SEQ ID NO: 922 - DNA, 1639 bp, Homo sapiens
atcatctatatgttaaatatccgtgccgatctgtcttgaaggagaaatatatcgcttgttttgttttttatagtatacaaaaggagtgaaaagccaagaggacgaagtctttttctttttcttctgtgggagaacttaatgctgcatttatcgttaacctaacaccccaacataaagacaaaaggaagaaaaggaggaaggaaggaaaaggtgattcgcgaagagagtgatcatgtcagggcggcccagaaccacctcctttgcggagagctgcaagccggtgcagcagccttcagcttttggcagcatgaaagttagcagagacaaggacggcagcaaggtgacaacagtggtggcaactcctgggcagggtccagacaggccacaagaagtcagctatacagacactaaagtgattggaaatggatcatttggtgtggtatatcaagccaaactttgtgattcaggagaactggtcgccatcaagaaagtattgcaggacaagagatttaagaatcgagagctccagatcatgagaaagctagatcactgtaacatagtccgattgcgttatttcttctactccagtggtgagaagaaagatgaggtctatcttaatctggtgctggactatgttccggaaacagtatacagagttgccagacactatagtcgagccaaacagacgctccctgtgatttatgtcaagttgtatatgtatcagctgttccgaagtttagcctatatccattcctttggaatctgccatcgggatattaaaccgcagaacctcttgttggatcctgatactgctgtattaaaactctgtgactttggaagtgcaaagcagctggtccgaggagaacccaatgtttcgtatatctgttctcggtactatagggcaccagagttgatctttggagccactgattatacctctagtatagatgtatggtctgctggctgtgtgttggctgagctgttactaggacaaccaatatttccaggggatagtggtgtggatcagttggtagaaataatcaaggtcctgggaactccaacaagggagcaaatcagagaaatgaacccaaactacacagaatttaaattccctcaaattaaggcacatccttggactaaggattcgtcaggaacaggacatttcacctcaggagtgcgggtcttccgaccccgaactccaccggaggcaattgcactgtgtagccgtctgctggagtatacaccaactgcccgactaacaccactggaagcttgtgcacattcattttttgatgaattacgggacccaaatgtcaaactaccaaatgggcgagacacacctgcactcttcaacttcaccactcaagaactgtcaagtaatccacctctggctaccatccttattcctcctcatgctcggattcaagcagctgcttcaacccccacaaatgccacagcagcgtcagatgctaatactggagaccgtggacagaccaataatgctgcttctgcatcagcttccaactccacctgaacagtcccgagcagccagctgcacaggaaaaaccaccagttacttgagtgtcactcagcaacactggtcacgtttggaaagaatattaaaaaaaaaaaaaaaaaa

SEQ ID NO: 923 - DNA, 2585 bp, Homo sapiens
cacacacgaggaggagggttgagctgctgccgccgccgcctctgtcgtcgtcgcgagtgtggagtcgggactggagctgctgccgcggcgacgccggggatctttgtcgctagctcccggcccttctgccccgccgccttccctcagtcagcgttgcccactcctctccggccgggcgcccctgcctccatttctcgctctctgtccaccacacacacggcccccccgatcatggatccgggcagtggcggcggcggcggcggcggcggcggcggcgggagcagcagcggcagcagcagcagcgactcggcgcctgactgctgggaccaggcggacatggaagcccccgggccgggcccttgcggcggcggcggcttccctggcggcggcggccgaggcccagcgggagaacctcagcgcggccttcagccggcaactcaacgtcaacgccaagcccttcgtgcccaacgtccacgccgccgagttcgtgccgtccttcctgcggggcccggcagcgccgccacccccagctggcggcgccgccaataaccacggagccggcagcggcgcgggaggccgtgcggcacctgtggaatcctctcaagaggaacagtcattgtgtgaaggttcaaattcagctgttagcatggaactttcagaacctattgtagaaaatggagagacagaaatgtctccagaagaatcatgggagcacaaagaagaaataagtgaagcagagccagggggtggttccttgggagatggaaggccgccagaggaaagtgcccatgaaatgatggaggaggaagaggaaatcccaaaacctaagtctgtggttgcaccgccaggtgctcctaagaaagagcatgtaaatgtagtattcattgggcacgtagatgctggcaagtcaaccattggaggacaaataatgtatttgactggaatggttgacaaaaggacgcttgaaaagtatgaaagagaagctaaagagaaaaacagagaaacttggtacttgtcttgggccttagacacaaatcaggaagaacgagacaagggtaaaacagtagaagtgggtcgtgcctattttgaaaccgaaaagaagcatttcacaattctagatgcccctggccacaagagttttgtcccaaatatgattggtggtgcctctcaagctgatttggctgtgctggtaatctcagccaggaaaggagagtttgaaactggatttgaaaaaggaggacagacaagagaacatgcaatgttggcaaagacagcaggtgtaaaacacctaattgtgctaattaataagatggatgatccaacagtaaattggagcaatgagagatatgaagaatgtaaggagaaactagtgccatttttgaaaaaagttggcttcaatcccaaaaaggacattcactttatgccctgctcaggacttactggagcaaatctcaaagagcagtcggatttctgtccttggtacattggattaccgtttattccatatctggataatttgccgaacttcaatagatcagttgatggaccaatcaggctgccaattgtggataagtacaaggatatgggcactgtggtcctgggaaagctggaatcaggatctatttgtaaaggccagcagcttgtgatgatgccaaacaagcacaacgtggaagttcttggaatactttccgatgatgtagagactgataccgtagccccaggtgaaaacctcaaaatcagactgaaaggaattgaagaagaggagattcttccagggtttatactttgtgatcctaataatctttgtcattctggacgcacatttgatgcccagatagtgattatagagcacaaatccatcatctgcccaggctataatgcggtgctgcatattcatacctgtattgaggaggtggaaataacagccttaatctgcttggtagacaaaaaatcaggagaaaaaagtaagacccgaccccgttttgtgaaacaagatcaagtatgcattgctcgcttaaggacagcaggaaccatctgccttgagacctttaaagacttccctcagatgggtcgtttcaccttaagagatgagggtaagaccattgcaattggaaaagttctgaaactggttccagagaaagactaagcattttcttgatgaccctgcacaatactgtgaggaaaattgactgcagaagcctacttcacaccgccttctcttattttctgcccattgataaacctctccccatattttgcaaagaggaaattcacagcaaaagtccacattatgtcagctttctcatattgagagctctgctatgccactgttgaatttttcccaagattcctgtccctagccctcacttcaaactctgcttccttggacagatttggcaatagctttgtaagtgatgtggacataattgcctacaataatgaaaacctacaggaatttttttatttttcattttccccttaggcatatttagtatttttcccccaggccagatcattcgtgagtgtgcgagtgtgtgtgcacatgttacaaaggcaactaccatgttaataaaatattcaatttg

SEQ ID NO: 924 - DNA, 2503 bp, Homo sapiens
gttgagccgccatatctgctgctgccgccgcagttgcgaatgcagcatcggcgcttagctgcctccgcggtgcagctaaggttcgtgtcgctaccccttggcccttcgctcttgctgccttaaccccgccggcggagcccgctcttctggcctgttgagcccgctccctcactgccacacagcaagttccgagaccatggattcgggcagcagcagcagcgactcggcgcccgattgctgggaccaggtggacatggaatccccggggtcggccccgagcggggatggagtctcctctgcggtggccgaggcccagcgcgagcccctcagctcggctttcagccgtaagctcaacgtcaacgccaagcccttcgtgcctaacgtacacgccgcggagttcgtgccgtccttcctgcggggcccgactcagccgcccaccctcccggccggctccggcagcaacgatgaaacctgcaccggcgcgggataccctcaaggtaaaaggatgggacggggggcacctgtggaaccttcccgagaggaaccgttagtgtcgcttgaaggttccaattcagccgttaccatggaactttcagaacctgttgtagaaaatggagaggtggaaatggccctagaagaatcatgggagcacagtaaagaagtaagtgaagccgagcctgggggtggttcctcgggagattcagggcccccagaagaaagtggccaggaaatgatggaggaaaaagaggaaataagaaaatccaaatctgtgatcgtaccctcaggtgcacctaagaaagaacacgtaaatgtagtattcattggccatgtagacgctggcaagtcaaccatcggaggacagataatgtttttgactggaatggttgacaaaagaacactggagaaatatgaaagagaagctaaggaaaaaaacagagaaacctggtatttgtcctgggccttagatacaaatcaggaggaacgagacaagggtaaaacagtcgaagtgggtcgtgcctattttgaaacagaaaggaaacatttcacaattttagatgcccctggccacaagagttttgtcccaaatatgattggtggtgcttctcaagctgatttggctgtgctggtcatctctgccaggaaaggagagtttgaaactggatttgaaaaaggtggacagacaagagaacatgcgatgttggcaaaaacggcaggggtaaaacatttaatagtgcttattaataagatggatgatcccacagtaaattggagcatcgagagatatgaagaatgtaaagaaaaactggtgccctttttgaaaaaagtaggcttcagtccaaaaaaggacattcactttatgccctgctcaggactgaccggagcaaatattaaagagcagtcagatttctgcccttggtacactggattaccatttattccgtatttggataacttgccaaacttcaacagatcaattgatggaccaataagactgccaattgtggataagtacaaagatatgggcactgtggtcctgggaaagctggaatccgggtccatttttaaaggccagcagctcgtgatgatgccaaacaagcacaatgtagaagttcttggaatactttctgatgatactgaaactgattttgtagccccaggtgaaaacctcaaaatcagactgaagggaattgaagaagaagagattcttccaggattcatactttgtgatcctagtaacctctgccattctggacgcacgtttgatgttcagatagtgattattgagcacaaatccatcatctgcccaggttataatgcggtgctgcacattcatacttgtattgaggaagttgagataacagcgttaatctccttggtagacaaaaaatcaggagaaaaaagtaagacacgaccccgcttcgtgaaacaagatcaagtatgcattgctcgtttaaggacagcaggaaccatctgcctcgagacgttcaaagattttcctcagatgggtcgttttactttaagagatgagggtaagaccattgcaattggaaaagttctgaaattggtcccagagaaggactaagcaattttcttgatgcctctgcaagatactgtgaggagaattgacagcaaaagttcaccacctactcttatttactgcccattgattgacttttcttcatattttgcaaagagaaatttcacagcaaaaattcatgttttgtcagctttctcatgttgagatctgttatgtcactgatgaatttaccctcaagtttccttcctctgtaccactctgcttccttggacaatatcagtaatagctttgtaagtgatgtggacgtaattgcctacagtaatgaaaaattaatgtactttaatttttcattttcttttaggatatttagaccacccttgttccacgcaaaccagagtgtgtcagtgtttgtgtgtgtgttaaaatgataactaacatgtgaataaaatactccatttgaaactc

SEQ ID NO: 925 - DNA, 1448 bp, Homo sapiens
ccgggagggttgggccagaggaggcggtcctggtagggagtgcgtagcagggtggagtcgctgtccggtcgcgcttcacttctgctccgccctccctgctccccataacagacccctccctccactaaggcttccaaacgtcgccccaagcctcccaatttctcgcagcccttcatgctcttctcttggccctagcaggagtggtcaccagcagtccctgtcccttggcaccaggagtccctgtagcctggctaggtaaggaaagggagttgcatctccaaataaggaagatccagttgtggccacccaattcctcctcttcgaaagacactttctgcccatcacctgctttctgtgccaggaccatctttactttctccacaaaagcccatcctctattcctatttccgaagctcctgctcatggagagttcgaattgctctggccttgaaaggcatcgactacgagacggtgcccatcaatctcataaaggatgggggccaacagttttctaaggacttccaggcactgaatcctatgaagcaggtgccaaccctgaagattgatggaatcaccattcaccagtcactggccatcattgagtatctagaggagatgcgtcccactccgcgacttctgcctcaggacccaaagaagagggccagcgtgcgtatgatttctgacctcatcgctggtggcatccagcccctgcagaacctgtctgtcctgaagcaagtgggagaggagatgcagctgacctgggcccagaacgccatcacttgtggctttaacgccctggagcagatcctacagagcacagcgggcatatactgtgtaggagacgaggtgaccatggctgatctgtgcttggtgcctcaggtggcaaatgctgaaagattcaaggtggatctcaccccctaccctaccatcagctccatcaacaagaggctgctggtcttggaggccttccaggtgtctcacccctgccggcagccagatacacccactgagctgagggcctagctcccaaatcctgccccgttggcacagggccacaggagcagaagctgggtgggctgaagaggcctggaaacgagagtcttaattgaggagatgggagactcgaactctagccctggatctgccttcctgctgaaacttgttccacctcagtcccctcatctgtcacacgcatgtggggtggagtagggagatgcggggagcagggtgggcaggaatactgttatctatgtgacggggcagtcgtgaggctgagatgagaatgcggattaaaatgcctggcgtgctcaccgtaacaccacggggaaggctgtgtgccttttctcatccgcttttgttgtgtgtgactccaaagaatgcccgcgctgaaatttggcgtgaattaaactgaagcccaggcctctaaaaaaaaaaaaaaaaaaaaaaaa

SEQ ID NO: 926 - DNA, 1231 bp, Homo sapiens
gccagaggcgaccggaaggatctttctagtccagcccctcgctttacccggacgaaagacacgggcctgattcgtcgagtctcactgagccttagtcgtcggcaggtcccaggcgcgaagtttctcggcctggaggagggggtcgcgcgaagtgccagatgcaggcggggaagcccatcctctattcctatttccgaagctcctgctcatggagagttcgaattgctctggccttgaaaggcatcgactacgagacggtgcccatcaatctcataaaggatgggggccaacagttttctaaggacttccaggcactgaatcctatgaagcaggtgccaaccctgaagattgatggaatcaccattcaccagtcactggccatcattgagtatctagaggagatgcgtcccactccgcgacttctgcctcaggacccaaagaagagggccagcgtgcgtatgatttctgacctcatcgctggtggcatccagcccctgcagaacctgtctgtcctgaagcaagtgggagaggagatgcagctgacctgggcccagaacgccatcacttgtggctttaacgccctggagcagatcctacagagcacagcgggcatatactgtgtaggagacgaggtgaccatggctgatctgtgcttggtgcctcaggtggcaaatgctgaaagattcaaggtggatctcaccccctaccctaccatcagctccatcaacaagaggctgctggtcttggaggccttccaggtgtctcacccctgccggcagccagatacacccactgagctgagggcctagctcccaaatcctgccccgttggcacagggccacaggagcagaagctgggtgggctgaagaggcctggaaacgagagtcttaattgaggagatgggagactcgaactctagccctggatctgccttcctgctgaaacttgttccacctcagtcccctcatctgtcacacgcatgtggggtggagtagggagatgcggggagcagggtgggcaggaatactgttatctatgtgacggggcagtcgtgaggctgagatgagaatgcggattaaaatgcctggcgtgctcaccgtaacaccacggggaaggctgtgtgccttttctcatccgcttttgttgtgtgtgactccaaagaatgcccgcgctgaaatttggcgtgaattaaactgaagcccaggcctctaaaaaaaaaaaaaaaaaaaaa

SEQ ID NO: 927 - DNA, 1145 bp, Homo sapiens
gccagaggcgaccggaaggatctttctagtccagcccctcgctttacccggacgaaagacacgggcctgattcgtcgagtctcactgagccttagtcgtcggcaggtcccaggcgcgaagtttctcggcctggaggagggggtcgcgcgaagtgccagatgcaggcggggaagcccatcctctattcctatttccgaagctcctgctcatggagagttcgaattgctctggccttgaaaggcatcgactacaagacggtgcccatcaatctcataaaggatgggggccaacagttttctaaggacttccaggcactgaatcctatgaagcaggtgccaaccctgaagattgatggaatcaccattcaccagtcaaacctgtctgtcctgaagcaagtgggagaggagatgcagctgacctgggcccagaacgccatcacttgtggctttaacgccctggagcagatcctacagagcacagcgggcatatactgtgtaggagacgaggtgaccatggctgatctgtgcttggtgcctcaggtggcaaatgctgaaagattcaaggtggatctcaccccctaccctaccatcagctccatcaacaagaggctgctggtcttggaggccttccaggtgtctcacccctgccggcagccagatacacccactgagctgagggcctagctcccaaatcctgccccgttggcacagggccacaggagcagaagctgggtgggctgaagaggcctggaaacgagagtcttaattgaggagatgggagactcgaactctagccctggatctgccttcctgctgaaacttgttccacctcagtcccctcatctgtcacacgcatgtggggtggagtagggagatgcggggagcagggtgggcaggaatactgttatctatgtgacggggcagtcgtgaggctgagatgagaatgcggattaaaatgcctggcgtgctcaccgtaacaccacggggaaggctgtgtgccttttctcatccgcttttgttgtgtgtgactccaaagaatgcccgcgctgaaatttggcgtgaattaaactgaagcccaggcctctaaaaaaaaaaaaaaaaaaaaaaaaaaaaaaaaaaaaaaaaaaaaaaaaaaaaaaaaaaaaa

SEQ ID NO: 928 - DNA, 1651 bp, Homo sapiens
acgactgcgtgggtgagtcgtctataaaaactcatctctgcgcgtctcttcgccacattcgcttcctgctttcggtgtgtctgttgtgtcttgttgcgggcaccgcagtcgccgtgaagatggcgtctaccagccgtttggatgctcttccaagagtcacatgtccaaaccatccagatgcgattttagtggaggactacagagccggtgatatgatctgtcctgaatgtggcttggttgtaggtgaccgggttattgatgtgggatctgaatggcgaactttcagcaatgacaaagcaacaaaagatccatctcgagttggagattctcagaatcctcttctgagtgatggagatttgtctaccatgattggcaagggcacaggagctgcaagttttgacgaatttggcaattctaagtaccagaatcggagaacaatgagcagttctgatcgggcaatgatgaatgcattcaaagaaatcactaccatggcagacagaatcaatctacctcgaaatatagttgatcgaacaaataatttattcaagcaagtatatgaacagaagagcctgaagggaagagctaatgatgctatagcttctgcttgtctctatattgcctgtagacaagaaggggttcctaggacatttaaagaaatatgtgccgtatcacgaatttctaagaaagaaattggtcggtgttttaaacttattttgaaagcgctagaaaccagtgtggatttgattacaactggggacttcatgtccaggttctgttccaacctttgtcttcctaaacaagtacagatggcagctacacatatagcccgtaaagctgtggaattggacttggttcctgggaggagccccatctctgtggcagcggcagctatttacatggcctcacaggcatcagctgaaaagaggacccaaaaagaaattggagatattgctggtgttgctgatgttacaatcagacagtcctatagactgatctatcctcgagccccagatctgtttcctacagacttcaaatttgacaccccagtggacaaactaccacagctataaattgaggcagctaacgtcaaattcttgaatacaaaactttgcctgttgtacatagcctatacaaaatgctgggttgagcctttcatgaggaaaaacaaaagacatggtacgcattccagggctgaatactattgcttggcattctgtatgtatatactagtgaaacatatttaatgatttaaatttcttatcaaatttcttttgtagcaatctaggaaactgtattttggaagatatttgaaattatgtaattcttgaataaaacatttttcaaaactcaagtttttgttatatgttacatgtaacttatgatacataattacaaataatgcaaatcattgcagctaataaagctgatagactttatttccattacttatatatacatagttttttattttaataaatttatggaaagagcaaaagcttttgagaaccattgttaacatcaacatcatagtttccagtttgaaaggatgtgtatgtgagatttattatgtatattattaaacaagaagtgatgagcttgggccttgaaaggcaccagcttgagagacattaaaatgttctaagtaaaaaaa

SEQ ID NO: 929 - DNA, 1560 bp, Homo sapiens
cccgatcgggaagtggcgggcggagtcccgggtccagtcgccgcctcagctaccgccgctgccgccgccgccgccgccaccgccagtggtgagaccccgacctggcgggtcagcgctgggcgtgcgtgcgggcaggcgggggcgctgacgagaagcaggaagagggtgcagtgccggcgtgggcggccggccgaggcggaggcgcaggaagggggcggcgagtcgtgcgaggctgcccttctcactcagcattatggatccaagcctgttgagagaaagggagctgttcaaaaaacgagctctttctactcctgtagtagaaaaacgttcagcatcttctgagtcatcatcatcatcgtcaaagaagaagaaaacaaaggtagaacatggaggatcgtcaggctctaaacaaaattctgatcatagcaatggatcatttaacttgaaagctttgtcaggaagctctggatataagtttggtgttcttgctaagattgtgaattacatgaagacacggcatcagcgaggagatacgcatcctctaaccttagatgaaattttggatgaaacacaacatttagatattggactcaagcagaaacaatggctaatgactgaggctttagtcaacaatcccaaaattgaagtaatagatgggaagtatgctttcaagcccaagtacaacgtgagagataagaaggccctacttaggctcttagatcagcatgaccagcgaggattaggaggaattcttttagaagacatagaagaagcactgcccaattcccagaaagctgtcaaggctttgggggaccagatactatttgtaaatcgtcccgataagaagaaaatacttttcttcaatgataagagctgtcagttttctgtggatgaagaatttcagaaactgtggaggagtgtcactgtagattccatggacgaggagaaaattgaagaatatctgaagcgacagggtatttcttccatgcaggaatctggaccaaagaaagtggcccctattcagagaaggaaaaagcctgcttcacagaaaaagcgacgctttaagactcataacgaacacttggctggagtgctgaaggattactctgacattacttccagcaaatagggaacagttttgccctggaacagagttacagatacacaatcaagagtgttcttgctgatgctcggggtctgaagactgtcttcctatctgcttcttgcggctgaggagaggagcagttcagtttacaaaacaagtgcaaattaccaaactcaaagcttatttgagtagaatgggctcatgggcaatgtgatgttccctgttaaccttctgttactccctgggagaaaggcgctgagcgtggcatgcaggtgtctttgctgtgtttttctccacttctaaatggttcctggttcctttcttcctcgtttgttactttagagcaagtttgcccatagtcttgaatgcaatatttgtttattccaaaagaacatatttataataaaatcactgtagaaggatttttaagaaaaaaaaaaaaaaaaaaaaaaaaa

SEQ ID NO: 930 - DNA, 3551 bp, Homo sapiens
gaaagaaagagaaaaaggagggcgagtggcgagcaggggcctcggccgccacccacacgccccgaagcgtgctcgtcccccgcgcggggctcccggccgccgccctcggccatcggctgctccccggtggcccaggcctcggactccgcggccggcccggcgcggcccagcgccctcagggatcatggcccaggtagcagtgtccaccctgcctgttgaagaagagtcctcctcagagaccaggatggtggtgacattcctcgtgtctgccctcgaatccatgtgtaaagaactggccaagtccaaggcagaagtggcctgcatcgcagtgtacgaaacagacgtgtttgtcgtcggaaccgagagaggatgcgcttttgttaatgccaggacggattttcagaaagattttgcaaaatactgcgttgcagagggactgtgtgaggtgaaacctccctgccctgtgaacgggatgcaggtccactcgggcgaaacggaaatactcaggaaggcagtggaggactatttctgcttttgttatggtaaagccttagggacaacagtgatggtgcctgttccctatgagaagatgctgcgagaccagtcggctgtggtagtgcaggggcttccggaaggcgttgcctttcaacaccctgagaattacgaccttgcaaccctgaaatggattttggagaacaaagcagggatttcattcatcataaatagacccttcctaggaccagagagtcagctgggtggccctgggatggtaacagatgcggagagatccatagtatcaccaagtgaaagctgcggccccatcaatgtgaaaactgaacccatggaagattctggcatttcactgaaagcagaagctgtctcagtcaagaaagaatcagaagatcctaattactatcaatataatatgcaaggaagccacccttcttccacaagcaatgaagtaatagaaatggaattaccaatggaagattccactccgctggtcccttcagaagaaccaaatgaggaccctgaagccgaggtgaaaatcgaaggaaacacaaattcatccagtgttacaaattctgcagcaggtgttgaagatcttaacatcgttcaagtgactgttccagataatgagaaggaaagattatcaagcattgaaaagattaaacagctaagagaacaagttaatgacctctttagccgaaaatttggtgaagcaattggcgtggatttccctgtgaaagttccctacaggaagatcacattcaaccctggctgtgtggtgattgatggcatgcccccgggggtggtattcaaggcccccggctatctggaaatcagttccatgaggaggatcttggaggcagctgagtttatcaaattcacagtcatcaggccgcttccagggcttgagctcagtaatgtgggaaaacgcaagatagaccaggagggccgtgtgtttcaagaaaagtgggagagagcgtatttcttcgtggaagtacagaatattccaacatgtctcatatgcaaacaaagcatgtctgtgtccaaagaatataacctaagacgccactatcaaaccaatcacagcaagcattatgaccagtatatggaaagaatgcgtgacgagaagcttcacgagctgaaaaaagggctcaggaagtatctcttaggcttgtcagacaccgagtgtcccgagcaaaaacaagtgtttgcacacccaagtccaacccagaaatcccccgtgcagcctgtagaggacctagctgggaacttatgggagaagttacgtgaaaaaatcaggtcttttgtggcatattctatcgcaatcgatgagatcacggatataaataataccacccagttggccatattcatccgtggtgtcgatgagaatttcgatgtgtccgaagaacttctggacacggtgcccatgacgggtacaaaatctggcaacgagatcttttcgcgtgttgagaagagcctgaaaaagttctgtatcgactggtcgaaattagtaagcgtggcctccactggcaccccagcgatggtggatgccaataacgggcttgtcacaaaactgaagtccagggtggcgacgttctgcaagggtgcggaactgaagtccatctgttgtataattcatccggaatcactctgtgctcagaagttgaagatggaccacgtcatggacgtggtagtgaagtccgtgaactggatatgctcccggggactgaaccacagtgagttcacaaccttgctctatgagctggacagccagtatggtagcctcctgtactacacggagattaagtggctcagtcgcgggctcgtgctaaagagatttttcgaatccttggaagaaatcgactccttcatgtcatccagagggaaacccctgcctcaactgagctccatagattggatccgagacctggccttcttggttgacatgacgatgcatctgaacgctttgaacatctctctccaaggacactcccaaatcgtcacgcagatgtatgacctgatccgggcgttcctagcaaaactgtgcctctgggagactcatttgacgaggaataatctggcccactttcccaccctgaaattggcttccagaaatgaaagcgatggcctgaactacattcccaaaatcgcggaactcaagaccgaattccagaaaaggctgtctgatttcaaactctacgaaagcgaactgactctgttcagctccccgttctccacgaagatcgacagtgtgcacgaggagctccagatggaggttatcgacctgcaatgcaacacggtcctgaagacgaaatacgacaaggtgggaataccagaattctacaagtacctctggggtagctacccgaaatacaagcaccattgcgcaaagattctttccatgttcgggagcacctacatctgcgaacagctgttctccattatgaaactgagcaaaacaaaatactgctcccagttaaaggattcccagtgggattctgtactccacatcgcaacgtgatggagagaaaactcctggcagggccctatggtgggaaaggctggagtcttctagtcccaagggattgggagatgacaaaatgaatttttttttcttttttgagatggagtcttgctctgtcgcccaggttggagtgcagtggcgtgatctcggcttactgcaacttccagctcctgggttcgaacgattctcctgcctcagcctcccgagcagctgggactacaggcgtgcgccaccatgcctggctaatttttgtattagtagagatgaggtttcaccatgttggccaggctggtctccaactcctgacctcaggtgatccacctgcctcgacctcacaaagtgctgggattacaggcatgaaccactgtgcccagctgacaaaatgagttcttaaacttttttttttttcagttttttttccactttgaatcagaaatataatctgcagtatcatacttgtttatattacattgtgtgcctcactattcattaaaaatcaagaaagttttattgt

SEQ ID NO: 931 - DNA, 1308 bp, Homo sapiens
cctccgcctccattgaaggcggggaaataccgcggcgcggacggtagttgctgtggtttccgttctgagctcgcagcttaggagctgaagatcgcggacttagcgttgccgcgtccgagtccggccatcagtggctgcagatccggaggccaggagctcaaccacccttcttcggaacagggccggcctgctgctgtgccctcgacgctcggtgcctgtatctactccggggcctaggtcggctccgggggcggcttaggagaaggccgccggcgagatgttcaaaaacacgttccagagcggcttcctctccatcctctacagcatcggcagcaagcctctgcaaatctgggacaaaaaggtacggaatggccacatcaaaagaatcactgataatgacatccagtccctggtgctagagattgaagggacaaatgtaagcaccacatatatcacatgccctgcagaccccaagaagacgctgggaattaaacttcctttccttgtcatgattatcaaaaacctgaagaagtattttaccttcgaagtgcaggtactagatgacaagaatgtgcgtcgtcgctttcgggcaagtaactaccagagcaccacccgggtcaaacccttcatctgcaccatgcccatgcggctggatgacggctggaaccagattcagttcaacttgctagacttcacacggcgagcatacggcaccaattacatcgagaccctcagagtgcagatccatgcaaattgtcgcatccgacgggtttacttctcagacagactctactcagaagatgagctgccggcagagttcaaactgtatctcccagttcagaacaaggcaaagcaataactggaattgtgactcgagggatagacccctggatgtgactcttctttttaaaaggaaactatgtggaggacgatgcaaaaacatatttatcttagtttgctctgctgtagttctgttatttatacttggtgttgcttgtcatggacaccggtgaacatgccgtaactctgtgactgcattgtaagtgcagtgggggtaagcagtcctgtgagtggcgcatgaacgctggagcttattccgccgcctgccccagtgtggggggagatacctttaccatgaacttacagaattaaagatggcccataaggaattccagaccaatatttcttcctgcggtttattctatgttttatatattatctaaatatatgtatatgctgtgtcatactcataatctggaaatgaataaagtgatatattcctggtttgtaaaaaaaaaaaaaaaaaaa

SEQ ID NO: 932 - DNA, 1075 bp, Homo sapiens
gagcccctcccctcggcccgcgcgggaggagtgtgacccaggtgccgcttcctctcgccgccgagggtcaggagcccgggagcgcgaccctcccccggcccggcctggcccggcctggccagtccccgcggtctctgcccgggctgacgcccaggaatgtggtcgacgagaagccccaacagcacggcgtggcctctcagcctcgagcctgatccggggatggcctctgcctccaccacaatgcatactaccaccattgcagagcctgatccagggatgtctggatggccggatggcagaatggagacctccacccccaccataatggacattgtcgtcattgcaggtgtgattgctgctgtggccatcgtcctagtctccctcctcttcgtcatgctgcgctacatgtaccggcacaagggcacgtaccacaccaatgaggccaagggcacggagtttgctgagagtgcagatgcagccctgcagggagaccctgccctccaagatgctggtgatagcagcagaaaggagtactttatttgagggacaacagacttcacttccctgaatgcctcccccatctccatcaggaaaaatacaccccatcgcccagcacccctgctgataccaccagacagagagagagagcacttgattcttcccgagatagccacctggaaacactaggtgcctgcccagggaggaacggaggaggactcgcgctacaagaggccactcccagggacccagggaggcgatggccaccccagaggccaccttttgctccacggaggtgggagaaaatctgggcacatggggccccctgggcagtgcaggacaacatcagctcactggcaggaaagtccttgttgagggtgagggggtgctggggtacccgggggctggggaagcaaggaaataagtcatctgtatgctgactggggataatggcatcaaatgtcagtccttgacatttggggggaacagcaggtgccagagctaaaaggtacctttgtctgccattgatccagctcagaacgattggaaataaatttgaaatgtaaccgagcaaaaa

SEQ ID NO: 933 - DNA, 1019 bp, Homo sapiens
gagcccctcccctcggcccgcgcgggaggagtgtgacccaggtgccgcttcctctcgccgccgagggtcaggagcccgggagcgcgaccctcccccggcccggcctggcccggcctggccagtccccgcggtctctgcccgggctgacgcccaggaatgtggtcgacgagaagccccaacagcacggcgtggcctctcagcctcgagcctgatccagggatgtctggatggccggatggcagaatggagacctccacccccaccataatggacattgtcgtcattgcaggtgtgattgctgctgtggccatcgtcctagtctccctcctcttcgtcatgctgcgctacatgtaccggcacaagggcacgtaccacaccaatgaggccaagggcacggagtttgctgagagtgcagatgcagccctgcagggagaccctgccctccaagatgctggtgatagcagcagaaaggagtactttatttgagggacaacagacttcacttccctgaatgcctcccccatctccatcaggaaaaatacaccccatcgcccagcacccctgctgataccaccagacagagagagagagcacttgattcttcccgagatagccacctggaaacactaggtgcctgcccagggaggaacggaggaggactcgcgctacaagaggccactcccagggacccagggaggcgatggccaccccagaggccaccttttgctccacggaggtgggagaaaatctgggcacatggggccccctgggcagtgcaggacaacatcagctcactggcaggaaagtccttgttgagggtgagggggtgctggggtacccgggggctggggaagcaaggaaataagtcatctgtatgctgactggggataatggcatcaaatgtcagtccttgacatttggggggaacagcaggtgccagagctaaaaggtacctttgtctgccattgatccagctcagaacgattggaaataaatttgaaatgtaaccgagcaaaaaa

SEQ ID NO: 934 - DNA, 1040 bp, Homo sapiens
aacacatttcatctgggcttcttaaatctaaatctttaaaatgactaagttttcttccttttctctgtttttcctaatagttggggcttatatgactcatgtgtgtttcaatatggaaattattggagggaaagaagtgtcacctcattccaggccatttatggcctccatccagtatggcggacatcacgtttgtggaggtgttctgattgatccacagtgggtgctgacagcagcccactgccaatatcggtttaccaaaggccagtctcccactgtggttttaggcgcacactctctctcaaagaatgaggcctccaaacaaacactggagatcaaaaaatttataccattctcaagagttacatcagatcctcaatcaaatgatatcatgctggttaagcttcaaacagccgcaaaactcaataaacatgtcaagatgctccacataagatccaaaacctctcttagatctggaaccaaatgcaaggttactggctggggagccaccgatccagattcattaagaccttctgacaccctgcgagaagtcactgttactgtcctaagtcgaaaactttgcaacagccaaagttactacaacggcgacccttttatcaccaaagacatggtctgtgcaggagatgccaaaggccagaaggattcctgtaagggtgactcagggggccccttgatctgtaaaggtgtcttccacgctatagtctctggaggtcatgaatgtggtgttgccacaaagcctggaatctacaccctgttaaccaagaaataccagacttggatcaaaagcaaccttgtcccgcctcatacaaattaagttacaaataattttattggatgcacttgcttcttttttcctaatatgctcgcaggttagagttgggtgtaagtaaagcagagcacatatggggtccatttttgcacttgtaagtcattttattaaggaatcaagttctttttcacttgtatcactgatgtatttctaccatgctggttttattctaaataaaatttagaagact

SEQ ID NO: 935 - DNA, 2336 bp, Homo sapiens
ggaagaaacacagatggcggcggcgcagcgccattccgggccgggagcaggcagccagcagccctgtcctcaccgcggtccgcccgccgccgctaaatacccggatgcgccgcccaagcgccagacgcggagctgggaaaagggaggcagaggaggcggaggcagaggcagaggcagaggcagagcccgagcccggtgccgagaccaagcgacagaccggcggggctgggcctcgcaaagccggctcggcgagctctcccgacacccgagccggggaggaaaagcagcgactcctcgctcgcatccccgggagccgcactccagactggcccggtagtcaggggctcaggagcagatcccgaggcaggctttgctcagcctccgacgagggctggccctttggaaggcgccttcaacagccggaccagacaggccaccatgaccgagaattccacgtccgcccctgcggccaagcccaagcgggccaaggcctccaagaagtccacagaccaccccaagtattcagacatgatcgtggctgccatccaggccgagaagaaccgcgctggctcctcgcgccagtccattcagaagtatatcaagagccactacaaggtgggtgagaacgctgactcgcagatcaagttgtccatcaagcgcctggtcaccaccggtgtcctcaagcagaccaaaggggtgggggcctcggggtccttccggctagccaagagcgacgaacccaagaagtcagtggccttcaagaagaccaagaaggaaatcaagaaggtagccacgccaaagaaggcatccaagcccaagaaggctgcctccaaagccccaaccaagaaacccaaagccaccccggtcaagaaggccaagaagaagctggctgccacgcccaagaaagccaaaaaacccaagactgtcaaagccaagccggtcaaggcatccaagcccaaaaaggccaaaccagtgaaacccaaagcaaagtccagtgccaagagggccggcaagaagaagtgacaatgaagtcttttcttgcggacactccctcctgtctcctattttctgtaaataattttctccttttttctctcttgatgctcaccaccaccttttgcccccttctgttctgactttataagagacaggatttggattcttcagaaattacagaataattcatttttccttaaccagttgtgcaaggacagcaacaaccaatctaatgatgagaatgtacttatattttgttttgctattaacctacttacggggttagggatttgcggggggggcttgtgtgttttgttggcttgtttgccatgaaggtagatgtgggtggggagaagacacaaggcagtttgttctggctagatgagagggaacccaggaattgtgaggttagcaggaatatctttagggtgagtgagttttctttgagttgggcacccgttgtgagagtttcagaacctttggccagcaggagagaggtggtagggagcagccagccggcaaaggaaggagggggaaaaaaaccgccaccgggctgacttccacctcccagtggtgagcagtgggggcccaaacccagtttccttctcatttttgttagtttgcgctttcggcctccctattttcttagggaaggggagtggggtccaagtgacagctggatgggagaagccatagtttctcccagtcagctaggatgtagccattgggggatctttgtggcttcagcaaattctcttgttaaaccggagtgaaaacttcaggggaagggtggggagtcagccaagtgcctcagtgtgccctgttgaaacttaggtttttccacgcaatcgatggattgtgtcctaggaagacttttcttttcctctggatttttgttcctcctgtacaagaggtgtctttgcttggtttggtggggctgcggccacttaaaacctcccgatctctttttgagtcctttattataagtagttgtagctgcgggagggggagggggagtgggcgggcagtggatagtaagacttactgcagtcgatttgggatttgctaagtagttttacagagctagatctgtgtgcatgtgtgtgtttgtgtatatatacatatctagggctagtacttagtttcacacccgggagctgggagaaaaaacctgtacagttgtctttctcttatttttaataaaatagaaaaatcgcgcacttgcgcgtcccccccccacccccttttttaaacaagtgttacttgtgccgggaaaattttgctgtctttgtaattttaaaactttaaaataaattggaaaagggagaaactgaaaaaaa

SEQ ID NO: 936 - DNA, 381 bp, Homo sapiens
atgccggagccagcgaagtccgctcccgcgcccaagaagggctcgaagaaagccgtgactaaggcgcagaagaaggacggcaggaagcgcaagcgcagccgcaaggagagctactccgtatacgtgtacaaggtgctgaagcaggtccaccccgacaccggcatctcctctaaggccatgggaatcatgaactccttcgtcaacgacatcttcgaacgcatcgcaggtgaggcttcccgcctgccgcattacaacaagcgctcgaccatcacctccagggagatccagacggccgtgcgcctgctgctgcccggggagttggccaagcacgccgtgtccgagggcaccaaggccgtcaccaagtacaccagcgctaagtaa

SEQ ID NO: 937 - DNA, 1052 bp, Homo sapiens
acgtccggcttaccgtcgtttacgacagtgtcaggatcgcgggcttgctttccggtagcgtgggctgacgcctcgctcaatttctcacagggctgcgcaggtttcccccgtctgcgaatggaccactggaggggttcaaaggttcgcgtcccagtacgggaatgagcctctttgatctcttccggggctttttcggctttcctggacctcggagcttcagcccaggaggagggatacgtttccacgataacttcggctttgatgacctagtacgagatttcaatagcatcttcagcgatatgggggcctggaccttgccttcccatcctcctgaacttccaggtcctgagtcagagacacctggtgagagactacgggagggacagacacttcgggactcaatgcttaagtatccagatagtcaccagcccaggatctttgggggggtcttggagagtgatgcaagaagtgaatccccccaaccagcaccagactggggctcccagaggccatttcataggtttgatgatgtatggcctatggacccccatcctagaaccagagaggacaatgatcttgattcccaggtttcccaggagggtcttggcccggttctacagccccagcccaaatcctatttcaagagcatctctgtgaccaagatcactaaaccagatgggatagtggaggagcgccggactgtggtggacagtgagggccggacagagactacagtaacccgacacgaagcagatagcagtcctaggggtgatccagaatcaccaagacctccagccctggatgatgccttttccatcctggacttattcctgggacgttggttccggtcccggtagccttgttaaccctcagaggccttcaagtcctttccacctctcacccattgcccaccattaataagcttagcttctcttgccacctcaggggcttggatatgtggaatagtgaactggggccatgtcagtttgtcactcacccaaactgaccaataaaacctttatttatgctaaaaaaaaaaaaaaaaaaaaaaa

SEQ ID NO: 938 - DNA, 2105 bp, Homo sapiens
gtcccagctcgggagcacatcagaggcttagaggcgagtgggaagggactcagacagtgcaggacgagaaacgcccgcggcaccaaagcccctcagagcgtcgcccccgcctctagttctagaaagtcagtttcccggcactggcaccccggaacctcaggggctgccgagctgggggggcgctcaagctgcgaggatccgggctgcccgcgagacgaggagcgggcgcccaggatggggtgcatgaagtccaagttcctccaggtcggaggcaatacattctcaaaaactgaaaccagcgccagcccacactgtcctgtgtacgtgccggatcccacatccaccatcaagccggggcctaatagccacaacagcaacacaccaggaatcagggaggcaggctctgaggacatcatcgtggttgccctgtatgattacgaggccattcaccacgaagacctcagcttccagaagggggaccagatggtggtcctagaggaatccggggagtggtggaaggctcgatccctggccacccggaaggagggctacatcccaagcaactatgtcgcccgcgttgactctctggagacagaggagtggtttttcaagggcatcagccggaaggacgcagagcgccaactgctggctcccggcaacatgctgggctccttcatgatccgggatagcgagaccactaaaggaagctactctttgtccgtgcgagactacgaccctcggcagggagataccgtgaaacattacaagatccggaccctggacaacgggggcttctacatatccccccgaagcaccttcagcactctgcaggagctggtggaccactacaagaaggggaacgacgggctctgccagaaactgtcggtgccctgcatgtcttccaagccccagaagccttgggagaaagatgcctgggagatccctcgggaatccctcaagctggagaagaaacttggagctgggcagtttggggaagtctggatggccacctacaacaagcacaccaaggtggcagtgaagacgatgaagccagggagcatgtcggtggaggccttcctggcagaggccaacgtgatgaaaactctgcagcatgacaagctggtcaaacttcatgcggtggtcaccaaggagcccatctacatcatcacggagttcatggccaaaggaagcttgctggactttctgaaaagtgatgagggcagcaagcagccattgccaaaactcattgacttctcagcccagattgcagaaggcatggccttcatcgagcagaggaactacatccaccgagacctccgagctgccaacatcttggtctctgcatccctggtgtgtaagattgctgactttggcctggcccgggtcattgaggacaacgagtacacggctcgggaaggggccaagttccccatcaagtggacagctcctgaagccatcaactttggctccttcaccatcaagtcagacgtctggtcctttggtatcctgctgatggagatcgtcacctacggccggatcccttacccagggatgtcaaaccctgaagtgatccgagctctggagcgtggataccggatgcctcgcccagagaactgcccagaggagctctacaacatcatgatgcgctgctggaaaaaccgtccggaggagcggccgaccttcgaatacatccagagtgtgctggatgacttctacacggccacagagagccagtaccaacagcagccatgatagggaggaccagggcagggccagggggtgcccaggtggtggctgcaaggtggctccagcaccatccgccagggcccacacccccttcctactcccagacacccaccctcgcttcagccacagtttcctcatctgtccagtgggtaggttggactggaaaatctctttttgactcttgcaatccacaatctgacattctcaggaagcccccaagttgatatttctatttcctggaatggttggattttagttacagctgtgatttggaagggaaactttcaaaatagtgaaatgaatatttaaataaaagatataaatgccaaagtctttaccaaaaaaaaaaaaaaaaaaaa

SEQ ID NO: 939 - DNA, 1755 bp, Homo sapiens
agctttgggagggccggccccgggatgctacacacaacccagctgtaccagcatgtgccagagacaccctggccaatcgtgtactcgccgcgctacaacatcaccttcatgggcctggagaagctgcatccctttgatgccggaaaatggggcaaagtgatcaatttcctaaaagaagagaagcttctgtctgacagcatgctggtggaggcgcgggaggcctcggaggaggacctgctggtggtgcacacgaggcgctatcttaatgagctcaagtggtcctttgctgttgctaccatcacagaaatcccccccgttatcttcctccccaacttccttgtgcagaggaaggtgctgaggccccttcggacccagacaggaggaaccataatggcggggaagctggctgtggagcgaggctgggccatcaacgtggggggtggcttccaccactgctccagcgaccgtggcgggggcttctgtgcctatgcggacatcacgctcgccatcaagtttctgtttgagcgtgtggagggcatctccagggctaccatcattgatcttgatgcccatcagggcaatgggcatgagcgagacttcatggacgacaagcgtgtgtacatcatggatgtctacaaccgccacatctacccaggggaccgctttgccaagcaggccatcaggcggaaggtggagctggagtggggcacagaggatgatgagtacctggataaggtggagaggaacatcaagaaatccctccaggagcacctgcccgacgtggtggtatacaatgcaggcaccgacatcctcgagggggaccgccttggggggctgtccatcagcccagcgggcatcgtgaagcgggatgagctggtgttccggatggtccgtggccgccgggtgcccatccttatggtgacctcaggcgggtaccagaagcgcacagcccgcatcattgctgactccatacttaatctgtttggcctggggctcattgggcctgagtcacccagcgtctccgcacagaactcagacacaccgctgcttccccctgcagtgccctgacccttgctgccctgcctgtcacgtggccctgcctatccgccccttagtgctttttgttttctaacctcatggggtggtggaggcagccttcagtgagcatggaggggcagggccatccctggctggggcctggagctggcccttcctctacttttccctgctggaagccagaagggcttgaggcctctatgggtgggggcagaaggcagagcctgtgtcccagggggacccacacgaagtcaccagcccataggtccagggaggcaggcagttaactgagaattggagaggacaggctaggtcccaggcacagcgagggccctgggcttggggtgttctggttttgagaacggcagacccaggtcggagtgaggaagcttccacctccatcctgactaggcctgcatcctaactgggcctccctccctccccttggtcatgggatttgctgccctctttgccccagagctgaagagctataggcactggtgtggatggcccaggaggtgctggagctaggtctccaggtgggcctggttcccaggcagcaggtgggaaccctgggcctggatgtgaggggcggtcaggaaggggtacaggtgggttccctcatctggagttccccctcaataaagcaaggtctggacctgcaaaaaaaaaaaaaaaaaaaaaaaaaaaaaaaaaaaa

SEQ ID NO: 940 - DNA, 1965 bp, Homo sapiens
gggaggggctggcggcggccgcgggcggcgggcggcggaggtgcggggcctgctcccgccggcaccatggccaagaccgtggcctatttctacgaccccgacgtgggcaacttccactacggagctggacaccctatgaagccccatcgcctggcattgacccatagcctggtcctgcattacggtctctataagaagatgatcgtcttcaagccataccaggcctcccaacatgacatgtgccgcttccactccgaggactacattgacttcctgcagagagtcagccccaccaatatgcaaggcttcaccaagagtcttaatgccttcaacgtaggcgatgactgcccagtgtttcccgggctctttgagttctgctcgcgttacacaggcgcatctctgcaaggagcaacccagctgaacaacaagatctgtgatattgccattaactgggctggtggtctgcaccatgccaagaagtttgaggcctctggcttctgctatgtcaacgacattgtgattggcatcctggagctgctcaagtaccaccctcgggtgctctacattgacattgacatccaccatggtgacggggttcaagaagctttctacctcactgaccgggtcatgacggtgtccttccacaaatacggaaattacttcttccctggcacaggtgacatgtatgaagtcggggcagagagtggccgctactactgtctgaacgtgcccctgcgggatggcattgatgaccagagttacaagcaccttttccagccggttatcaaccaggtagtggacttctaccaacccacgtgcattgtgctccagtgtggagctgactctctgggctgtgatcgattgggctgctttaacctcagcatccgagggcatggggaatgcgttgaatatgtcaagagcttcaatatccctctactcgtgctgggtggtggtggttatactgtccgaaatgttgcccgctgctggacatatgagacatcgctgctggtagaagaggccattagtgaggagcttccctatagtgaatacttcgagtactttgccccagacttcacacttcatccagatgtcagcacccgcatcgagaatcagaactcacgccagtatctggaccagatccgccagacaatctttgaaaacctgaagatgctgaaccatgcacctagtgtccagattcatgacgtgcctgcagacctcctgacctatgacaggactgatgaggctgatgcagaggagaggggtcctgaggagaactatagcaggccagaggcacccaatgagttctatgatggagaccatgacaatgacaaggaaagcgatgtggagatttaagagtggcttgggatgctgtgtcccaaggaatttcttttcacctcttggttgggctggagggaaaaggagtggctcctagagtcctgggggtcaccccagggcttttgctgactctgggaaagagtctggagaccacatttggttctcgaaccatctacctgcttttcctctctctcccaaggcctgacaatggtacctattagggatgagatacagacaaggatagctatctgggacattattggcagtgggccctggaggccagtccctagccccccttgccccttatttcttccctgcttccctcgaacccagagatttttgagggatgaacgggtagacaaggactgagattgcctctgacttcctcctcccctgggttctgacttcttcctccccttgcttccagggaagatgaagagagagagatttggaaggggctctggctccctaacacctgaatcccagatgatgggaagtatgttttcaagtgtggggaggatatgaaaatgttctgttctcacttttggctttatgtccattttaccactgtttttatccaataaactaagtcggtattttttgtacctttaaaaaaaaaaaaaaaaaaaa

SEQ ID NO: 941 - DNA, 4099 bp, Homo sapiens
gggcagtcccctgaggagcggggctggttgaaacgctaggggcgggatctggcggagtggaagaaccgcggcaggggccaagcctcctcaactatgacctcaaccggccaggattccaccacaaccaggcagcgaagaagtaggcagaacccccagtcgccccctcaggactccagtgtcacttcgaagcgaaatattaaaaagggagccgttccccgctctatccccaatctagcggaggtaaagaagaaaggcaaaatgaagaagctcggccaagcaatggaagaagacctaatcgtgggactgcaagggatggatctgaaccttgaggctgaagcactggctggcactggcttggtgttggatgagcagttaaatgaattccattgcctctgggatgacagcttcccggaaggccctgagcggctccatgccatcaaggagcaactgatccaggagggcctcctagatcgctgcgtgtcctttcaggcccggtttgctgaaaaggaagagctgatgttggttcacagcctagaatatattgatctgatggaaacaacccagtacatgaatgagggagaactccgtgtcctagcagacacctacgactcagtttatctgcatccgaactcatactcctgtgcctgcctggcctcaggctctgtcctcaggctggtggatgcggtcctgggggctgagatccggaatggcatggccatcattaggcctcctggacatcacgcccagcacagtcttatggatggctattgcatgttcaaccacgtggctgtggcagcccgctatgctcaacagaaacaccgcatccggagggtccttatcgtagattgggatgtgcaccacggtcaaggaacacagttcaccttcgaccaggaccccagtgtcctctatttctccatccaccgctacgagcagggtaggttctggccccacctgaaggcctctaactggtccaccacaggtttcggccaaggccaaggatataccatcaatgtgccttggaaccaggtggggatgcgggatgctgactacattgctgctttcctgcacgtcctgctgccagtcgccctcgagttccagcctcagctggtcctggtggctgctggatttgatgccctgcaaggggaccccaagggtgagatggccgccactccggcagggttcgcccagctaacccacctgctcatgggtctggcaggaggcaagctgatcctgtctctggagggtggctacaacctccgcgccctggctgaaggcgtcagtgcttcgctccacacccttctgggagacccttgccccatgctggagtcacctggtgccccctgccggagtgcccaggcttcagtttcctgtgctctggaagcccttgagcccttctgggaggttcttgtgagatcaactgagaccgtggagagggacaacatggaggaggacaatgtagaggagagcgaggaggaaggaccctgggagccccctgtgctcccaatcctgacatggccagtgctacagtctcgcacagggctggtctatgaccaaaatatgatgaatcactgcaacttgtgggacagccaccaccctgaggtaccccagcgcatcttgcggatcatgtgccgtctggaggagctgggccttgccgggcgctgcctcaccctgacaccgcgccctgccacagaggctgagctgctcacctgtcacagtgctgagtacgtgggtcatctccgggccacagagaaaatgaaaacccgggagctgcaccgtgagagttccaactttgactccatctatatctgccccagtaccttcgcctgtgcacagcttgccactggcgctgcctgccgcctggtggaggctgtgctctcaggagaggttctgaatggtgctgctgtggtgcgtcccccaggacaccacgcagagcaggatgcagcttgcggtttttgctttttcaactctgtggctgtggctgctcgccatgcccagactatcagtgggcatgccctacggatcctgattgtggattgggatgtccaccacggtaatggaactcagcacatgtttgaggatgaccccagtgtgctatatgtgtccctgcaccgctatgatcatggcaccttcttccccatgggggatgagggtgccagcagccagatcggccgggctgcgggcacaggcttcaccgtcaacgtggcatggaacgggccccgcatgggtgatgctgactacctagctgcctggcatcgcctggtgcttcccattgcctacgagtttaacccagaactggtgctggtctcagctggctttgatgctgcacggggggatccgctggggggctgccaggtgtcacctgagggttatgcccacctcacccacctgctgatgggccttgccagtggccgcattatccttatcctagagggtggctataacctgacatccatctcagagtccatggctgcctgcactcgctccctccttggagacccaccacccctgctgaccctgccacggcccccactatcaggggccctggcctcaatcactgagaccatccaagtccatcgcagatactggcgcagcttacgggtcatgaaggtagaagacagagaaggaccctccagttctaagttggtcaccaagaaggcaccccaaccagccaaacctaggttagctgagcggatgaccacacgagaaaagaaggttctggaagcaggcatggggaaagtcacctcggcatcatttggggaagagtccactccaggccagactaactcagagacagctgtggtggccctcactcaggaccagccctcagaggcagccacagggggagccactctggcccagaccatttctgaggcagccattgggggagccatgctgggccagaccacctcagaggaggctgtcgggggagccactccggaccagaccacctcagaggagactgtgggaggagccattctggaccagaccacctcagaggatgctgttgggggagccacgctgggccagactacctcagaggaggctgtaggaggagctacactggcccagaccacctcggaggcagccatggagggagccacactggaccagactacgtcagaggaggctccagggggcaccgagctgatccaaactcctctagcctcgagcacagaccaccagacccccccaacctcacctgtgcagggaactacaccccagatatctcccagtacactgattgggagtctcaggaccttggagctaggcagcgaatctcagggggcctcagaatctcaggccccaggagaggagaacctactaggagaggcagctggaggtcaggacatggctgattcgatgctgatgcagggatctaggggcctcactgatcaggccatattttatgctgtgacaccactgccctggtgtccccatttggtggcagtatgccccatacctgcagcaggcctagacgtgacccaaccttgtggggactgtggaacaatccaagagaattgggtgtgtctctcttgctatcaggtctactgtggtcgttacatcaatggccacatgctccaacaccatggaaattctggacacccgctggtcctcagctacatcgacctgtcagcctggtgttactactgtcaggcctatgtccaccaccaggctctcctagatgtgaagaacatcgcccaccagaacaagtttggggaggatatgccccacccacactaagccccagaatacggtccctcttcaccttctgaggcccacgatagaccagctgtagctcattccagcctgtaccttggatgaggggtagcctcccactgcatcccatcctgaatatcctttgcaactccccaagagtgcttatttaagtgttaatacttttaagagaactgcgacgattaattgtggatctccccctgcccattgcctgcttgaggggcaccactactccagcccagaaggaaaggggggcagctcagtggccccaagagggagctgatatcatgaggataacattggcgggaggggagttaactggcaggcatggcaaggttgcatatgtaataaagtacaagctgtt

SEQ ID NO: 942 - DNA, 2352 bp, Homo sapiens
aggctacggttcgcgccagcggccggcgctatggggctgagccgcgtgcgggcggttttctttgacttggacaacactctcatcgacacggccggggcgagcaggagaggcatgttggaggtgataaaactcttacaatcaaaataccattataaagaagaggctgaaatcatctgtgataaagttcaagttaaactcagcaaggaatgttttcatccttacaatacatgcattactgatttaaggacttcacattgggaagaagcaatccaggaaacaaaaggtggtgcagccaatagaaaattggctgaagaatgttatttcctttggaaatctacacgtttacagcatatgacactagcagaagacgtcaaagccatgcttactgaacttcgaaaggaggtccgcctacttctattaacgaatggggacagacagacccagagggagaagattgaggcttgtgcctgtcagtcctattttgacgctgttgttgtaggtggagagcagagagaggagaaaccagcaccgtccatattttattactgctgcaatcttctcggagtacaacctggggactgtgtgatggtcggtgacacattagaaaccgacatccaaggaggcctcaatgcaggattgaaagcaacagtctggatcaataaaaatggaatagtgccactgaagtcctccccagttccgcattacatggtttcttctgtgctagagttacctgctctcttacaaagtatagactgcaaagtcagtatgtccacttaaagcacataaaagggcatgattatgaatgttagaatcaatttgctgagtatgaaataagaaaagttagggcactccacttatgataatccagctctaagaataattttacttatgatttaatggccaatattttgaaggtcttcccaaccctattgcttctaagttgtaacaaccaaccattgagtggtacttatatctgaaaattcagattgcatgaattcaggtcagtagtatagcccagaaaatttaaggaaatatattatttgttagtctgtatctggagctttttaaaattatgttattaatcttttagtatcttggctgcataatgccaagcaggattgctttacacatggatgcacaaatgtaaggtttatcttctggcttaaaaatagatatttttaaaaaatagattttctaaaacacagatttatgaaagcaagtgaatctggttaatatgaaataagtactaagtcacatgcaaatcaaggtattatatagtgaaattattttgcatattttgaaaacataaaccatagtttttgcctactttggatgtatactttcttttatgaacctgatttttctgtatgacatttttttttttttcagagggcagggagcaatttttctatggcatgtgacagattcctccagttagaaaaagctgttaaaatcaacacatggtgctcttttaccgtgacattttctcacctgtgcacagtgagccgatagcttccttttagtcttcacctctcaaggaaatgtttttactgtcttttcccagacacacagtggggttgagggagctaggctgttttgctagagataattgcaaggcacgtggcactaaaagtcatttttcttctgtggatccataagaggaacatttcctcagtgtagcctaacaatgcagcccccaatctgttcctttttttttttgaaatgggatctctgtcgcccaggttggagtgccatggcaccatctcggctcactgcaacctctgcctcctgagctcaagtgatcctcccacctcagcctcccaagggtgtgtgtgactacaagtacacactaccacgcccagctaatgtgtttttttgtagagatgggattttgccatgttgcccaggctggtctcgaattcctggattcaagtgatcctcccacctcagcctcctaaagtcctaggattataggcatgagccactgtgcctggccctctcatctgatagaaaattagattttgctatgagccatttcctgagggccaatttaatactcgtgtgactcttcttagagttaccatctgccttaaatttcctctgtttttcacattcttggaaatatatcattgttttgcaaatttctatatctaattcagggtttaccaggagcttaataattaatggctacatagcaaggcatcgtcttggaaccggagaattttctctagactattaggctagacagtctcatgattatactaaccaaacctggagtaaagtggttgaaaaaaaagaaagtataaaggggcttattaaagtggttaataaatatgaaaaaaaaaaaaaaaa

SEQ ID NO: 943 - DNA, 537 bp, Homo sapiens
atggagagaatagtgcattgtgaaggtattgtgagttgggacaacttgtacagagaatataacacaatggcaagtacatttgggcctaaagatatcttagttctccctcttgccactgactctttttttgtgattggaaaagttacttcctctctctgggcctcagtttcctcgttcttaaataataaaaaaatccctcatggggcatggctcctctctccctgccttcactttctgcaggcactgctggtgtgtgctcaggtgtacctgcctcttcccgtcaggtccctgctttgcatttgcacctgccccccttttgtttgtagtctaagtgacacgggtctccctctctttcctccaactgcatcgctcaatcctgcaatgtgtcacaatggtgtggagctgtcattctggatgatgtggcgtgacctcacactgatgccattcccctcccaccaagccaacctggcttcctcctccacccatggaataagccagaatgctgaaagtgggagggaaatagagcaccaaggttaa

SEQ ID NO: 944 - DNA, 4894 bp, Homo sapiens
cgaaaacggagaaaccccgggtccggcgagaggggctgtgacagtcggagtcccaagctgcggttcggctgctgccgagaactgcaaggtgtggaatatttctggcttctagtccaatgccaagtgtgtgacctgtggctacatgattccctgaaagataagaacaatgttatgttggggatattggtctctgggccaacctggtatcagcaccaacctgcagggaattgtggctgagccccaggtgtgtgggttcatatctgacagaagtgtcaaggaagtggcctgtgggggaaaccactctgtgttcctgctggaagatggggaagtttacacatgtggtttgaacaccaaggggcaactgggccatgagagggaaggaaacaagccagaacaaattggagctctggcagatcagcatatcattcatgtggcatgtggcgagtcccacagtctggccctcagtgaccgaggccagctgttttcttggggtgcagggagtgatggtcagctaggactcatgactactgaggattctgtggcagtgcccaggttaatacaaaagctgaaccagcaaacaatattacaagtttcctgtggcaactggcattgcttggctcttgcggctgatggccagttcttcacctggggaaagaacagccatgggcagcttggcttagggaaggagttcccctcccaagccagcccacagagggtgaggtccctggaggggatcccactggctcaggtggctgccggaggggctcacagctttgccctgtctctctcaggagctgtttttggctgggggatgaataatgccgggcagctagggctcagtgatgaaaaagatcgagaatctccatgccatgtaaaactcttacgcacgcaaaaagttgtctatattagttgtggagaagaacacacagcagttctcacaaagagtggaggtgtgtttacctttggcgctggttcctgtgggcaacttggacacgactccatgaatgatgaggttaaccctagaagagttctagagctgatgggtagtgaagtaactcaaattgcttgtggcagacaacataccctagccttcgtgccttcttctggactcatctatgcatttggttgtggagcaagaggtcaattaggaactgggcacacttgtaatgttaagtgcccatctcctgtcaagggttactgggctgcccacagtggccagctttcagcccgagctgatcgctttaaatatcatatcgttaagcagatcttctctggaggagaccagacttttgtactttgctccaaatacgagaattattctcctgctgttgacttcaggactatgaaccaagcacattataccagtttaataaatgatgaaaccatagcagtttggagacaaaaactctcagaacacaacaatgcaaatacaatcaatggtgttgttcagatattatcttctgcagcctgttggaatggaagttttcttgaaaaaaaaattgatgaacattttaaaacgagtcccaaaatccctgggattgacctgaactcaactagggtgttatttgagaagttaatgaactctcagcactccatgattctagaacagattttgaacagttttgaaagttgtctgattccccagttgtcaagctcaccaccagatgttgaagccatgagaatctatttaatactacctgagtttcccctactccaggattccaagtattatataacattgactattcccttggctatggccattcttcggctggatacaaaccccagcaaagtactagataactggtggtctcaggtatgcccgaaatatttcatgaagctggtaaacctctataaaggtgcagtcctttatctactgaggggaagaaagacattcttaattcccgtactgtttaacaattatatcacagcagctctcaaactcttggagaagttatataaggtaaatcttaaagtgaagcatgtggaatatgatacattttacattcctgagatttccaatctcgtggacattcaggaagactacctcatgtggttcttgcatcaagcagggatgaaggctagaccatcaataatacaggatactgtaacactttgttcctaccctttcatctttgatgcccaagccaagaccaaaatgttacagacagatgctgaactacagatgcaggtggcagtcaatggagccaacctgcagaatgtcttcatgcttctcaccctggagcctctgctggccagaagccccttcctggtccttcacgttcgcaggaacaaccttgttggagatgccctaagagagctgagcattcattctgatattgatttgaaaaagcctctcaaagtaatctttgatggtgaagaagcagtggatgccggtggtgttacaaaggaattttttcttttgctgttaaaagaacttttgaatcccatctatggaatgtttacctactatcaagattcaaatctcttgtggttttcagacacgtgttttgtagagcacaactggtttcacttgattggtataacctgtggactagctatctacaactccactgtggtcgatctccacttcccattggctctctacaagaagttactcaatgtaaagcctggcttggaagacttaaaggagttgtcacccactgaaggaaggagtctccaagagcttttagattaccccggggaggatgtggaggagactttctgcctcaacttcacgatctgccgagaaagctatggagtgattgaacagaagaagctgatacctgggggagataatgtaactgtgtgcaaggataacaggcaggaatttgtggatgcttatgtgaattatgtcttccaaatctcagttcatgaatggtacacagccttctctagtggcttcctaaaggtgtgtggtggcaaagtacttgagctcttccagccttcagaactgagggctatgatggtggggaacagcaactacaactgggaagaactggaagagactgccatctacaagggagattactcggccacacatcccactgtaaaactattttgggaaacatttcatgagtttccattggaaaagaagaagaagtttctcttgttcctgacaggcagcgatcggattcccatctacggcatggccagtctgcagattgtcatccagtccacagccagcggggaggagtacttgccggtggcccacacttgctacaaccttcttgacctccccaagtacagcagcaaagagattctgagtgcccggctgacccaggcccttgacaactatgaagggtttagtttggcctgaggcttctcagcttgtccagtatttcccttcgttcctcagtgtccacattgaggcctatacagaaaatcatggggagtgatttctatttttttattgtctaagtgggttgggacttttaaatactgagcctggttgatgtgtttctgggattgtatagcagtaaacaacctttttgaaaaattagaggttggggatggggtgaaaaattggcccttgtatgggaggtgtttttgtttttgttttaaaccaaactacccagtattccttgcacttgtgaatgtgttgcactctgctggatgaaatggcagtggatttttaaactttaatttcccaaatgtctctctcagccctgatgttttctcacagtgcttccttgtccttctcttaacttctcattcctctataagaatgatttagactgacctgtccttttttatctgcgcatgcgagaacatcaccttcctctgtacacttggaaatgcctctggcttgttgcagccctcctttaacccaaaggaggaaaggactgcttcagaaactcccaattccaaaaagctgagtctgggtccattattttggcagaactcctaagaatttatgggagcctatataaacatatcttgcttttaaaaagttcttgagggaatagcaactttcccatggctgtgcctatttcctagaccttttaaaagatgtgcagagcagcttagcattcgttgcagctgagcctaattttttcttgctcatccttgtccctttgacaataaggttaattgatagacccaccacctcttgcactctcgcttttggagcaagttgcattaactattttgagtctctatattgtccaagaaaagtagaaataataaatttactttccctttttctatcaccttatgtcctctaccattttctccttcctcccttcccttattttctccttttcgtaccctgtgtcctccctgattttcctttcgtttcttctttattttatcccattctctgttacttgactcagtgctcccttcctctcctctccttctagtggatgcatgcagcctttttttcaatttttatttaaattgcaaaatttttactcagattttttttcctcttccctaattgctaagatttaaggacgttctttattatgaaactttatcacattcgaaatgtttgtttacagtgggattttaggggggattgtgtttaaatcaaatatatgtattttaaaaataatgacatgctcaaccttcctcatcatggagtaagaaaattctacatgattaaagaatccatgtaagtctaattttaaattcctagtaactagagaaaagacttatttatataaaatgaagtatttatgaactgtgataaagcatcaaatcttgatgaaggattgtagatttttgctttttctttttgtttttaaaacttattccaattgctaaattggtagtttttcagtctttataaatacaggattaaaaatatatatacagttatatgaaatgtttattttctatgtgtgtgcatatagttcaatattatgcaataaatttggtgttttaactt

SEQ ID NO: 945 - DNA, 2672 bp, Homo sapiens
gcgtggccggcgccggctcttgcggccgagcagagttgcggcgtgggaaagagccgctaggagcagaccgcgccgccgccggagccgcgcctgcccaggcccggggagggaggaggcgggcgtcagggtgctgcgccccgctcggcgtccgagcttccggccgggctgtgccccgcgcggtcttcgccgggatgaagcgcccctgcgaggagacgacctccgagagcgacatggacgagaccatcgacgtggggagcgagaacaattactcggggcaaagtactagctctgtgattagattgaattctccaacaacaacatctcagattatggcaagaaagaaaaggagagggattatagagaaaaggcgtcgggatcggataaataacagtttatctgagttgagaagacttgtgccaactgcttttgaaaaacaaggatctgcaaagttagaaaaagctgaaatattgcaaatgacagtggatcatttgaagatgcttcaggcaacagggggtaaaggctactttgacgcacacgctcttgccatggacttcatgagcataggattccgagagtgcctaacagaagttgcgcggtacctgagctccgtggaaggcctggactcctcggatccgctgcgggtgcggcttgtgtctcatctcagcacttgcgccacccagcgggaggcggcggccatgacatcctccatggcccaccaccatcatccgctccacccgcatcactgggccgccgccttccaccacctgcccgcagccctgctccagcccaacggcctccatgcctcagagtcaaccccttgtcgcctctccacaacttcagaagtgcctcctgcccacggctctgctctcctcacggccacgtttgcccatgcggattcagccctccgaatgccatccacgggcagcgtcgccccctgcgtgccacctctctccacctctctcttgtccctctctgccaccgtccacgccgcagccgcagcagccaccgcggctgcacacagcttccctctgtccttcgcgggggcattccccatgcttcccccaaacgcagcagcagcagtggccgcggccacagccatcagcccgcccttgtcagtatcagccacgtccagtcctcagcagaccagcagtggaacaaacaataaaccttaccgaccctgggggacagaagttggagctttttaaatttttcttgaacttcttgcaatagtaactgaatgtcctccatttcagagtcagcttaaaacctctgcaccctgaaggtagccatacagatgccgacagatccacaaaggaacaataaagctatttgagacacaaacctcacgagtggaaatgtggtattctcttttttttctctcccttttttgtttggttcaaggcagctcggtaactgacatcagcaacttttgaaaacttcacacttgttaccatttagaagtttcctggaaaatatatggaccgtaccatccagcagtgcatcagtatgtctgaattggggaagtaaaatgccctgactgaattctcttgagactagatgggacatacatatatagagagagagtgagagagtcgtgtttcgtaagtgcctgagcttaggaagttttcttctggatatataacattgcacaagggaagacgagtgtggaggataggttaagaaaggaaagggacagaagtcttgcaataggctgcagacattttaataccatgccagagaagagtattctgctgaaaccaacaggttttactggtcaaaatgactgctgaaaataattttcaagttgaaagatctagttttatcttagtttgccttctttgtacagacatgccaagaggtgacatttagcagtgcattggtataagcaattatttcatcagttctcagattaacaagcatttctgctctgcctgcaggcccccaggcacttttttttttggatggctcaaaatatggtgctgctttatataaaccttacatttatatagtgcacctatgagcagttgcctaccatgtgtccaccagaggctatttaattcatgccaacttgaaaactctccagtttgtaggagtttggtttaatttattcagtttcattaggactatttttatatatttatcctcttcattttctcctaatgatgcaacatctattcttgtcaccctttgggagaagttacatttctggaggtgatgaagcaaggagggagcactaggaagagaaaagctacaatttttaaagctctttgtcaagttagtgattgcatttgatcccaaaacaagatgaatgtatgcaatgggatgtacataagttatttttgcccatgcctaaactagtgctatgtaatggggttgtggttttgtttttttcgatttcgtttaatgacaaaataatctcttaatatgctgaaatcaagcacgtgagagtttttgtttaaaagataagagacacagcatgtattatgcacttcatttctctactgtgtggagaaagcaataaacattatgagaatgttaaacgttatgcaaaattatacttttaaatatttgttttgaaattactgtacctagtcttttttgcattactttgtaacctttttctatgcaagagtctttacataccactaattaaatgaagtcctttttgacta

SEQ ID NO: 946 - DNA, 3174 bp, Homo sapiens
ggctgagacgcgaccaggacgcggggaggacggaccagcaggacagaccgaccgggggcccggcgggcggagggcagcgcagccacgtcccccctggatccgccgtcagccgggcccggggctttcgacatgccccccaggagagtgtgctgggcagacgatgctggacacgatggaggcgcccggccactccaggcagctgctgctgcagctcaacaaccagcgcaccaagggcttcttgtgcgacgtgatcatcgtggtgcagaacgccctcttccgcgcgcacaagaacgtgctggcggccagcagcgcctacctcaagtccctggtggtgcatgacaacctgctcaacctggaccatgacatggtgagcccggccgtgttccgcctggtgctggacttcatctacaccggccgcctggctgacggcgcagaggcggctgcggccgcggccgtggccccgggggctgagccgagcctgggcgccgtgctggccgccgccagctacctgcagatccccgacctcgtggcgctgtgcaagaaacgcctcaagcgccacggcaagtactgccacctgcggggcggcggcggcggcggcggcggctacgcgccctatggtcggccgggccggggcctgcgggccgccacgccggtcatccaggcctgctacccgtccccagtcgggcctccgccgccgcctgccgcggagccgccctcgggcccagaggccgcggtcaacacgcactgcgccgagctgtacgcgtcgggacccggcccggccgccgcactctgtgcctcggagcgccgctgctcccctctttgtggcctggacctgtccaagaagagcccgccgggctccgcggcgccagagcggccgctggctgagcgcgagctgcccccgcgcccggacagccctcccagcgccggccccgccgcctacaaggagccgcctctcgccctgccgtcgctgccgccgctgcccttccagaagctggaggaggccgcaccgccttccgacccatttcgcggcggcagcggcagcccgggacccgagccccccggccgccccgacgggcctagtctcctctatcgctggatgaagcacgagccgggcctgggtagctatggcgacgagctgggccgggagcgcggctcccccagcgagcgctgcgaagagcgtggtggggacgcggccgtctcgcccggggggcccccgctcggcctggcgccgccgccgcgctaccctggcagcctggacgggcccggcgcgggcggcgacggcgacgactacaagagcagcagcgaggagaccggtagcagcgaggaccccagcccgcctggcggccacctcgagggctacccatgcccgcacctggcctatggcgagcccgagagcttcggtgacaacctgtacgtgtgcattccgtgcggcaagggcttccccagctctgagcagctgaacgcgcacgtggaggctcacgtggaggaggaggaagcgctgtacggcagggccgaggcggccgaagtggccgctggggccgccggcctagggcccccttttggaggcggcggggacaaggtcgccggggctccgggtggcctgggagagctgctgcggccctaccgctgcgcgtcgtgcgacaagagctacaaggacccggccacgctgcggcagcacgagaagacgcactggctgacccggccctacccatgcaccatctgcgggaagaagttcacgcagcgtgggaccatgacgcgccacatgcgcagccacctgggcctcaagcccttcgcgtgcgacgcgtgcggcatgcggttcacgcgccagtaccgcctcacggagcacatgcgcatccactcgggcgagaagccctacgagtgccaggtgtgcggcggcaagttcgcacagcaacgcaacctcatcagccacatgaagatgcacgccgtggggggcgcggccggcgcggccggggcgctggcgggcttgggggggctccccggcgtccccggccccgacggcaagggcaagctcgacttccccgagggcgtctttgctgtggctcgcctcacggccgagcagctgagcctgaagcagcaggacaaggcggccgcggccgagctgctggcgcagaccacgcacttcctgcacgaccccaaggtggcgctggagagcctctacccgctggccaagttcacggccgagctgggcctcagccccgacaaggcggccgaggtgctgagccagggcgctcacctggcggccgggcccgacggccggaccatcgaccgtttctctcccacctagagcgcccctcgccagcccgctctgtcgctgctgcgcggccctggcccgcaccccagggagcggcgggggcggcgcgcagggcccactgtgcccgggacaaccgcagcgtcgccacagtggcggctccacctctcggcggcctcacctggcctcactgcttcgtgccttagctcgggggtcgggggagaaccccgggacgggggtgggatggggtaagggaaatttatatttttgatatcagctttgaccaaaggagaccccaggcccctcccgcctcttcctgtggttcgtcggccccctcccccggctccgcgctgctcttagagggggaggggtgtcactgtcggggcactcctagccctacctccggcccttgcgaccacacccattctcactgtgaatctccccgctggggtcggagcgtcgggcagagttggggagtggggaggggactgagccggccggagggccccccgcacccccgctcccacccaccccgggactgataatgtgaagttcctcattttgcacaagtggcactagccccagggccaacccttccttcctcagtcaccaagggcggggagttctggagtcggaaggcgaagagcctaccaccaggtctcccactcccgcggtgccctcccttcccttccctgcggccccggaccatatttattgcatgcgccccggcggccccccatcccgagcccaggctgggctgggctggaacgcggtctctttagctccctcctcttcgtttgtatatttcctaccttgtacacaggctcttccagagccgcttccattttctatactcgaaccaaacagcaataaagcagtaaccaaggaaaaaaaaaaaaaaaaaa

SEQ ID NO: 947 - DNA, 3071 bp, Homo sapiens
atgacttttcctgaagcggacattttacttaaatcgggagagtgtgctgggcagacgatgctggacacgatggaggcgcccggccactccaggcagctgctgctgcagctcaacaaccagcgcaccaagggcttcttgtgcgacgtgatcatcgtggtgcagaacgccctcttccgcgcgcacaagaacgtgctggcggccagcagcgcctacctcaagtccctggtggtgcatgacaacctgctcaacctggaccatgacatggtgagcccggccgtgttccgcctggtgctggacttcatctacaccggccgcctggctgacggcgcagaggcggctgcggccgcggccgtggccccgggggctgagccgagcctgggcgccgtgctggccgccgccagctacctgcagatccccgacctcgtggcgctgtgcaagaaacgcctcaagcgccacggcaagtactgccacctgcggggcggcggcggcggcggcggcggctacgcgccctatggtcggccgggccggggcctgcgggccgccacgccggtcatccaggcctgctacccgtccccagtcgggcctccgccgccgcctgccgcggagccgccctcgggcccagaggccgcggtcaacacgcactgcgccgagctgtacgcgtcgggacccggcccggccgccgcactctgtgcctcggagcgccgctgctcccctctttgtggcctggacctgtccaagaagagcccgccgggctccgcggcgccagagcggccgctggctgagcgcgagctgcccccgcgcccggacagccctcccagcgccggccccgccgcctacaaggagccgcctctcgccctgccgtcgctgccgccgctgcccttccagaagctggaggaggccgcaccgccttccgacccatttcgcggcggcagcggcagcccgggacccgagccccccggccgccccgacgggcctagtctcctctatcgctggatgaagcacgagccgggcctgggtagctatggcgacgagctgggccgggagcgcggctcccccagcgagcgctgcgaagagcgtggtggggacgcggccgtctcgcccggggggcccccgctcggcctggcgccgccgccgcgctaccctggcagcctggacgggcccggcgcgggcggcgacggcgacgactacaagagcagcagcgaggagaccggtagcagcgaggaccccagcccgcctggcggccacctcgagggctacccatgcccgcacctggcctatggcgagcccgagagcttcggtgacaacctgtacgtgtgcattccgtgcggcaagggcttccccagctctgagcagctgaacgcgcacgtggaggctcacgtggaggaggaggaagcgctgtacggcagggccgaggcggccgaagtggccgctggggccgccggcctagggcccccttttggaggcggcggggacaaggtcgccggggctccgggtggcctgggagagctgctgcggccctaccgctgcgcgtcgtgcgacaagagctacaaggacccggccacgctgcggcagcacgagaagacgcactggctgacccggccctacccatgcaccatctgcgggaagaagttcacgcagcgtgggaccatgacgcgccacatgcgcagccacctgggcctcaagcccttcgcgtgcgacgcgtgcggcatgcggttcacgcgccagtaccgcctcacggagcacatgcgcatccactcgggcgagaagccctacgagtgccaggtgtgcggcggcaagttcgcacagcaacgcaacctcatcagccacatgaagatgcacgccgtggggggcgcggccggcgcggccggggcgctggcgggcttgggggggctccccggcgtccccggccccgacggcaagggcaagctcgacttccccgagggcgtctttgctgtggctcgcctcacggccgagcagctgagcctgaagcagcaggacaaggcggccgcggccgagctgctggcgcagaccacgcacttcctgcacgaccccaaggtggcgctggagagcctctacccgctggccaagttcacggccgagctgggcctcagccccgacaaggcggccgaggtgctgagccagggcgctcacctggcggccgggcccgacggccggaccatcgaccgtttctctcccacctagagcgcccctcgccagcccgctctgtcgctgctgcgcggccctggcccgcaccccagggagcggcgggggcggcgcgcagggcccactgtgcccgggacaaccgcagcgtcgccacagtggcggctccacctctcggcggcctcacctggcctcactgcttcgtgccttagctcgggggtcgggggagaaccccgggacgggggtgggatggggtaagggaaatttatatttttgatatcagctttgaccaaaggagaccccaggcccctcccgcctcttcctgtggttcgtcggccccctcccccggctccgcgctgctcttagagggggaggggtgtcactgtcggggcactcctagccctacctccggcccttgcgaccacacccattctcactgtgaatctccccgctggggtcggagcgtcgggcagagttggggagtggggaggggactgagccggccggagggccccccgcacccccgctcccacccaccccgggactgataatgtgaagttcctcattttgcacaagtggcactagccccagggccaacccttccttcctcagtcaccaagggcggggagttctggagtcggaaggcgaagagcctaccaccaggtctcccactcccgcggtgccctcccttcccttccctgcggccccggaccatatttattgcatgcgccccggcggccccccatcccgagcccaggctgggctgggctggaacgcggtctctttagctccctcctcttcgtttgtatatttcctaccttgtacacaggctcttccagagccgcttccattttctatactcgaaccaaacagcaataaagcagtaaccaaggaaaaaaaaaaaaaaaaaa

SEQ ID NO: 948 - DNA, 5259 bp, Homo sapiens
acgcgagctcgtggctcgggcgtatgggggctccaacgggagcggctgcgccgcccggccgggtcaacgtcgtgcgcatgcgccgacccggcgccattttggtggccgggcgcggaggtgattccacactgaggcgagcgcggcggccggggtggtagtggcagtgttcgtgtgctcaggtctgaatcgccgagggaggaggcggtggaggaagaggtggcggcggtggcggtggtcgtagcggtggcggaggaggcgggtacgaatcagctgcgggcggagacatggccaacatcgcggtgcagcgaatcaagcgggagttcaaggaggtgctgaagagcgaggagacgagcaaaaatcaaattaaagtagatcttgtagatgagaattttacagaattaagaggagaaatagcaggacctccagacacaccatatgaaggaggaagataccaactagagataaaaataccagaaacatacccatttaatccccctaaggtccggtttatcactaaaatatggcatcctaatattagttccgtcacaggggctatttgtttggatatcctgaaagatcaatgggcagctgcaatgactctccgcacggtattattgtcattgcaagcactattggcagctgcagagccagatgatccacaggatgctgtagtagcaaatcagtacaaacaaaatcccgaaatgttcaaacagacagctcgactttgggcacatgtgtatgctggagcaccagtttctagtccagaatacaccaaaaaaatagaaaacctatgtgctatgggctttgataggaatgcagtaatagtggccttgtcttcaaaatcatgggatgtagagactgcaacagaattgcttctgagtaactgaggcatagagagctgctgatatagtcaagcttgcctcttcttgaggagcaccaacatctgttatttttaggattctgcatagatttcttttaaactggcattcttgcctaatgatgttatctaggcaccattggagactgaaaaaaaaaaatccctgctctgtaaataaagctaattaaacgtctgtgtaaatttaaaaaggggaaatactttaattttttttcttaatagtgtaaaaattccctgagctaagctaaaaccatggaagaaacatgctactttagtgtttagcagtgtaccaagactagcaagagtttgcttcaggattttgttgaataattaagataatattttgagtgtgtcagggccattcaaattgttggtgttgcatcacagctaccttaactgtttttaacatggatcctctgtgcctgtgaatttacttgcatgcttgtacttgacttcttaggatgggtagctgaaaagaccaccattttaagcatttgagaattcttaaatatgaaatttattcagaattgaagatggtgacctattcagagcctttttgtccttgtcaacagactgggacagtgtctgattcccccttcaccccccccacccccgccttgccacacacagctaatattctaatggtaaatttctctgtatcaggtggggaaatgtgctgaaggacagtatgtatcccttgcttcatttttaggtcgtaggtttggaatgtcttgtcccagttcttcaaacactcttaaatttttcttaagtaatgtaaaaatggaactgccaattttatttctcttgcaaaaatagtaaatacttgatgttacattattcccaggtttaatgaaagaacccaacttagtttttcagtgaatttgacacctattttttagtgatgaaatttttctttgagaactggcaaggatgcagtcagctgtttgcagtttttagcctgattttggggtctatagagattgctttattggatacttcaagtcattcttgcttgcacttcccctattgacacatgaaagctgtgttggtgttttattgtacatacttcagatgcacataggaatagaagtgtgttataaatctagctttctttatgatgtttctgataatacgagaattgaaaactttaccttctcttgtacatagtcagactatttgtattaaatttacatttcattctaagttcaaaagtttgaaaattattagttttgcaagatcacacactaatgtaaccattttatgaaggttgaagtggatttatgcaggcagttctatatatagaaatacaattctttttaaatttttaggaccaatacaaaataacaaaaatgtaatggaatcagactgaattaaagtaaggctgtatattgaaagtcatattataaaaggtttgctttctttaagtgttatttatcttaaattataatcgttaaatgtttggaagataatttttgaatcataacgtcagcataacttcatttgacttctcaataatcttgatactagaagcaataaaagaaccattattaaatatattgtaatgttaaagatgtgaaggttcttccaaaaatttgtaaggctttcctaattaacagtaaactcttatagctgatattattacatactaaacacaagttgctgttttttccccatatgtttgcttacgcatgtctttatacaatcacctctttttattgctgtagtttattttctaaagatgccaaaggaaacaagatttttctttatttattttaaatacctgaaacctcgtactttatattttgaagtaaggtgggattgtgtgaaaatgtggatggtttttctccagtgttggttagaactactttttttaagtggagggcaacttggtagtattagtagaatttgggtttaaaaatatcagacacatctacccagtttattttttgcctgtattatcagggtatatttaattgtcctgtggttaaacaaaggtgagagagctcagaggtttctaaaggtcaagcattttacatatatacatacatacatgctcttggaggcagctatatcctgctttgatttttatgcacatgagccctatagggttatatactcatctaactacacttcagcatccccagtgcccaagaaattggaaagtacaatatttggtttgagacattcttcataaaagattctttattataaaaatttacctcatttacatttaatgtgatgatcttttttttcctttctggtatatttcccactgtactgtttggtttttgttattctcttgtctgtgggtagatttagttacccaaacatagaaactaaagcaattgcttttttcctctggtcttaaatatgtttggacaaaaagacactaaaaggtcaggcctaggggaaaagtaccctggtggaaattatttttgtaattcttaatatttttgagttggctccgtttgtcagttttaaaagcctcaaaaattatgttaaaaaaaaaatccagtgaaatcccatttagggcaggccgatttgttagaagtcactgatgctccagtaggcttttgttataatcaggcctgtttcctgagtatgtgcctcttttaaaagaagaaataattagctgtatagtatttcagtactgatgaatgaatgaatgaatgaatggcagttagtggacccaaataagtattcagtggtatataaatatttgaggaactaggtactgaattaggtgctctgagttggcaccccgaaatgtttggaatcacgactatgatttacttaaacacgtaacacattcaaggatatataaatggagtctaagtattttgcttttgaagagaataatctatgaaatggaagacttgattttttttttcattttttagaagtaatacacatttatgattgttggcacataaaactatgcaaaataattctttttaagtatctgtaagaaagaattggcagtttaaacggattttgcttatttatgcactacagaatgcagcatactgtattactgttgaggctgcttaataagtttaccaatgtgaaaagcagatcttgggtataagtgtatgcctgatttgagcttttaaaactgtgcagtaggtgtatggtaatgttttacaatcctatgtagcaaaataggaaattatgaatttttgttgttattgttttaaagatttaagatggattggggtagggaacagctggagccaggtataccttctagtatgtagagggaaacaatgtttagataggaaaaaggaagccgtctgtttacagttaactttatttcatggacttctacaaaatgttgtattaatcactttttctagttcaaggaatttcaattccagggtacaaaccattgatttaaaaattacgtttccattctttttagtatcagtttaaagtaaatgcttaccatcagccagttgctgtcactgggaagaaggcaacttgaagtatttactgataaaatagcctttattcccaagtgtgacttttcttcagtgtctacatattatgtcacacgttctatttgcactgctgcaatatagatcaaagatcttgtggcataggggtaggggagtgttagtatctcccttgtcccatttgttctgttactgcttcattggactgatacaccctcatgaacttgcaatcacctaaatggaagtcttgaatgtgtcaccttttgcttggttatttcaaccatgctgctatatataatcaggtgtggcacagtttgtcagtttgattataggtgtgagtggatagaaatcattacactgtgctgttaacgatccttgtctgcttgctgttacctactttttacaggcatcataataaaagctagactatttctttggggggaaagagacttatttaatgtaatttaaaaaacttttccaatagaaaatgaaatattattgaaaataatatctattttttagctttcagcaattgatggtgctttgttgtggtgtctgctggaagtctactgccattatagggaaccttgcttgttagcttctctagatctctattctaaacaatctgttagtgatgataaattctgtaggagggtctattctgagccgttaacttcctgtaaggggaaaatgggtgggttaccagaaataccattgaagcagggtgggctgtggggtggaaggttggggtatttgtcttgagaattaaaaactacgaaacacttttgtacacaactgattttttaaaaaataaacacatttttaaagatgttgaatttttccccccttattgggaattcttaaaaataaatgcatgcatgttttcccctgaaaaaaaaaaaaaaaaaa

SEQ ID NO: 949 - DNA, 4743 bp, Homo sapiens
ccgggaaggaagatgagggagacgggcccggcgcttagcagccagagcagcagcagcagcagcagcggtcgggggagggtgtttcgccgtttcctctcagccgccaggacaagatggcagcggccgcggagaggggctgagcccgggctgggtggtgccgcctgctgaagcgcctggctcccggtccccggcacggccctgcgccccaccccggacatgctcagggctgcggccgcccgaagaggagagagcgcgggcctctaggaaggtatggcctcacaagtcttggtctacccaccatatgtttatcaaactcagtcaagtgccttttgtagtgtgaagaaactcaaagtagagccaagcagttgtgtattccaggaaagaaactatccacggacctatgtgaatggtagaaactttggaaattctcatcctcccactaagggtagtgcttttcagacaaagataccatttaatagacctcgaggacacaacttttcattgcagacaagtgctgttgttttgaaaaacactgcaggtgctacaaaggtcatagcagctcaggcacagcaagctcacgtgcaggcacctcagattggggcgtggcgaaacagattgcatttcctagaaggcccccagcgatgtggattgaagcgcaagagtgaggagttggataatcatagcagcgcaatgcagattgtcgatgaattgtccatacttcctgcaatgttgcaaaccaacatgggaaatccagtgacagttgtgacagctaccacaggatcaaaacagaattgtaccactggagaaggtgactatcagttagtacagcatgaagtcttatgctccatgaaaaatacttacgaagtccttgattttcttggtcgaggcacgtttggccaggtagttaaatgctggaaaagagggacaaatgaaattgtagcaatcaaaattttgaagaatcatccttcttatgcccgtcaaggtcaaatagaagtgagcatattagcaaggctcagtactgaaaatgctgatgaatataactttgtacgagcttatgaatgctttcagcaccgtaaccatacttgtttagtctttgagatgctggaacaaaacttgtatgactttctgaaacaaaataaatttagtcccctgccactaaaagtgattcggcccattcttcaacaagtggccactgcactgaaaaaattgaaaagtcttggtttaattcatgctgatctcaagccagagaatattatgttggtggatcctgttcggcagccttacagggttaaagtaatagactttgggtcggccagtcatgtatcaaagactgtttgttcaacatatctacaatctcggtactacagagctccagagattatattggggttgccattttgtgaagccatagacatgtggtcattgggatgtgtgattgcagaattatttcttggatggccgctctacccaggagccttggagtatgatcagattcgatacatttctcagactcaaggtttgccaggagaacagttgttaaatgtgggtactaaatccacaagatttttttgcaaagaaacagatatgtctcattctggttggagattaaagacattggaagagcatgaggcagagacaggaatgaagtctaaagaagccagaaaatacattttcaacagtctggatgatgtagcgcatgtgaacacagtgatggatttggaaggaagtgatcttttggctgagaaagctgatagaagagaatttgttagtctgttgaagaaaatgttgctgattgatgcagatttaagaattactccagctgagaccctgaaccatccttttgttaatatgaaacatcttctagatttccctcatagcaaccatgtaaagtcctgttttcatattatggatatttgtaagtcccacctaaattcatgtgacacaaataatcacaacaaaacttcacttttaagaccagttgcttcaagcagtactgctacactgactgcaaattttactaaaatcggaacattaagaagtcaggcattgaccacatctgctcattcagttgtgcaccatggaatacctctgcaggcaggaactgctcagtttggttgtggtgatgcttttcagcagacattgattatctgtcccccagctattcaaggtattcctgcaacacatggtaaacccaccagttattcaataagggtagataatacagttccacttgtaactcaggccccagctgtgcagccactacagatccgaccaggagttctttctcagacgtggtctggtagaacacagcagatgctggtgcctgcctggcaacaggtgacacccctggctcctgctactactacactaacttctgagagtgtggctggttcacacaggcttggagactgggggaagatgatttcatgcagcaatcattataactcagtgatgccgcagcctcttctgaccaatcagataactttatctgcccctcagccagttagtgtggggattgcacatgttgtctggcctcagcctgccactaccaagaaaaataaacagtgccagaacagaggtattttggtaaaactaatggaatgggagccaggaagagaggaaataaatgctttcagttggagtaattcattacagaataccaatatcccacattcagcatttatttctccaaagataattaatgggaaagatgtcgaggaagtaagttgtatagaaacacaggacaatcagaactcagaaggagaggcaagaaattgctgtgaaacatctatcagacaggactctgattcatcagtttcagacaaacagcggcaaaccatcattattgccgactccccgagtcctgcagtgagtgtcatcactatcagcagtgacactgatgaggaagagacttcccagagacattcactcagagaatgtaaaggtagtctagattgtgaagcttgccagagcactttgaatattgatcggatgtgttcattaagtagtcctgatagtactctgagtaccagctcctcagggcagtccagcccatccccctgcaagagaccgaatagtatgtcagatgaagagcaagaaagtagttgtgatacggtggatggctctccgacatctgactcttccgggcatgacagtccatttgcagagagcacttttgtggaggacactcatgaaaacacagaattggtatcctctgctgacacagaaaccaagccagctgtctgttctgttgtggtgccaccagtggaactagaaaatggcttaaatgccgatgagcatatggcaaacacagattctatatgccagccattaataaaaggacgatctgcccctggaagattaaaccagccttctgcagtgggtactcgtcagcaaaaattgacatcagcattccagcagcagcatttgaacttcagtcaggttcagcactttggatctgggcatcaagagtggaatggaaactttgggcacagaagacagcaagcttatattcctactagtgttaccagtaatccattcactctttctcatggaagtcccaatcacacagcagtgcatgcccacctggctggaaatacacacctcggaggacagcctactctacttccatacccatcatcagccaccctcagtagtgctgcaccagtggcccacctgttagcctctccgtgtacctcaagacctatgttacagcatccaacttataatatctcccatcccagtggcatagttcaccaagtcccagtgggcttaaatccccgtctgttaccatccccaaccattcatcagactcagtacaaaccaatcttcccaccacattcttacattgcagcatcacctgcatatactggatttccactgagtccaacaaaactcagccagtatccatatatgtgaaaaacagtatattggggaagctcaatgatacaaacatttgattaaaaataaaaacatggtatttaatattagccatggcacaagaaaattatttttgaatcatgtagacttgggtgcaatttaaacaactttgagctttaaaaactcacttttgatgtgttttgcacatttggtataacttgtctttggtcatgttatcttcttatgtagtaactctagacaggtgacttatgggagcagaagtccagttttgctcctgctattttttataaattgccttctaactagtgcaagacacgtctacatttgggaagccattctgtgtacagacttagagcaacagatgcacatatgtcagaattacagcatacaagtgaattgtattatccgtgtcttagtgtataaatgttgggtcacttacctaagaaattgagctattgttctttacatttgcatgtgtcttttgcatgggcaaaatgttgcctagactttgctcttaaatgttgttctaataatctcagctgcattgtaaaccgttcctacacatagtgccttaaatatttgaggttgttaatgttattacctatatataaatgttgaggactgcagcacttaaaattcagacctactatttagtttccttttgatagcgtaatgttcatttttgtttttgtgtggtatgatttcaggtagtagctgtttttttccttattaagagggcagcatgtttgctatagctgaattctgctgtctgatttttcagaatgatctagcttcaagaaaagcaagcagttagtagtgcttaagaaaaattgattcagtatc

SEQ ID NO: 950 - DNA, 829 bp, Homo sapiens
gattattttctcaggtgtttgcaacagtgttctaactattaacgctacgatgcctgaacctaccaagtctgctcctgccccaaagaagggctccaagaaggcggtgactaaggctcagaagaaggacgggaagaagcgcaagcgcagccgcaaggagagctattcagtgtatgtgtacaaggtgctgaagcaggtccatcccgacaccggcatctcttccaaggcaatggggatcatgaattccttcgtcaacgacatcttcgagcgcatcgcaggcgaggcttcccgcctggcgcattacaacaagcgctcgaccatcacctccagggagatccagacggccgtgcgcctgctgcttccgggggagctggccaagcacgccgtgtcggagggcaccaaggccgtcaccaagtacaccagttccaagtaactttgccaagggagagacatgaagacagaggagaaatgaatgcataaaataactgataatatgaatctatacatagaacttaggaagtctcatctgcctgaaaatgactgtgtggatcccacccaaatccaactcatcctggtttgctgcacactggttcatcaaaagaaggttaccgaggggaaggaactaaaggtgtttgcacttcatgttactttttgagtttataaacataaaaacagaatttacttctgttacagacctagttactgggaattcattacttgccatggactacctttgctaagaaaagtctgaatgagaagatggcaggacgtctgaaaaaaaaagttataattaataaaatctgcggagaattgtaaaaaaaaaaaaaaaaaa

SEQ ID NO: 951 - DNA, 820 bp, Homo sapiens
ctcgatctgctgctcgtctcaggctcgtagttcgccttcaacatgccggaaccagcgaagtccgctcccgcgcccaagaagggctcgaagaaagccgtgactaaggcgcagaagaaggacggcaagaagcgcaagcgcagccgcaaggagagctactccgtatacgtgtacaaggtgctgaagcaggtccaccccgacaccggcatctcctctaaggccatgggaatcatgaactccttcgtcaacgacatcttcgaacgcatcgcgggtgaggcttcccgcctggcgcattacaacaagcgctcgaccatcacctccagggagatccagacggccgtgcgcctgctgctgcccggggagttggccaagcacgccgtgtccgagggcaccaaggccgtcaccaagtacaccagcgctaagtaaacttgccaaggagggactttctctggaatttcctgatatgaccaagaaagcttcttatcaaaagaagcacaattgccttcggttacctcattatctactgcagaaaagaagacgagaatgcaaccatacctagatggacttttccacaagctaaagctggcctcttgatctcattcagattccaaagagaatcatttacaagttaatttctgtctccttggtccattccttctctctaataatcatttactgttcctcaaagaattgtctacattacccatctcctcttttgcctctgagaaagagtatataagcttctgtaccccactggggggttggggtaatattctgtggtcctcagccctgtaccttaataaatttgtatgccttttctctt

SEQ ID NO: 952 - DNA, 472 bp, Homo sapiens
atggctcgtactaaacagacagctcggaaatccaccggcggtaaagcgccacgcaagcagctggctaccaaggctgctcgcaagagcgcgccggctaccggcggcgtgaaaaagcctcaccgttaccgcccgggcactgtggctctgcgcgagatccgccgctaccaaaagtcgaccgagttgctgattcggaagctgccgttccagcgcctggtgcgagaaatcgcccaagacttcaagaccgatcttcgcttccagagctctgcggtgatggcgctgcaggaggcttgtgaggcctacttggtagggctctttgaggacacaaacctttgcgccatccatgctaagcgagtgactattatgcccaaagacatccagctcgctcgccgcattcgcggagaaagagcgtaaatgtaaagtcactttttcatcagtcttaaaacccaaaggctcttttcagagccacccactt

SEQ ID NO: 953 - DNA, 460 bp, Homo sapiens
atgtccggacgcggcaagcaaggcggaaaggcccgagctaaggctaagacccgctcttcgcgggccggactccagttccctgtgggccgcgtacaccgcttgctccgcaagggcaactactccgagcgagtcggggccggcgcgccagtgtatctggcggcggtgttggagtacctgaccgccgagatcctggagctggcgggcaacgccgcccgcgacaacaagaagacccgcatcatcccccgacacctgcagctggccatccgcaacgacgaggagctaaacaagttgctgggtaaagtcacaattgctcagggcggtgttctgcccaacatccaggctgtactgctccccaagaagactgagagtcaccacaaggccaagggcaagtaaaacgagaactcttatattggctttttaaggaagcagtcttaacaaaggctcttttcagagccaccca

SEQ ID NO: 954 - DNA, 462 bp, Homo sapiens
atggcgcgtactaagcagacggctcgtaaatccacaggcggtaaagcaccgcgcaaacagctggccactaaggcagctcgcaagagcgctccggccacgggcggcgtgaagaagccccatcgctaccgccctggcaccgtggctctgcgcgagatccgtcgctaccagaagtctaccgagcttctaatccggaagctgccgtttcagcgcctggtgcgagaaatagctcaggacttcaagaccgacctgcgcttccagagttccgcggtgatggcgctgcaggaggcctgcgaggcctacttggtggggcttttcgaggacaccaacctgtgcgctattcatgccaaacgcgtgaccatcatgcctaaagacatccagcttgcccgccgcattcgtggggagagggcgtgaattgttttgagtacaaaccttaaatccaaaggctcttctcagagccaacca

SEQ ID NO: 955 - DNA, 466 bp, Homo sapiens
ctatggcacgcacgaagcaaacagctcgtaagtccactggcggcaaagccccgcgcaagcagctggccactaaggcggctcgcaaaagcgcgccagccaccggtggcgtgaagaagccccaccgctacaggcctggtactgtcgccctccgtgaaatccgccgctatcagaaatcgactgagctactgattcgcaagctaccattccagcgtctggtacgtgagatcgcgcaggacttcaagaccgacctgcgcttccagagctcggctgtgatggcgctgcaggaggcctgcgaggcttacctggtggggctctttgaggacaccaacctgtgtgctatccacgccaagcgagtgactatcatgcccaaggacatccagctcgctcgccgcattcgcggagagagggcataagttgtactgagggtgtgcgccaacttaaaccaaaggctcttttcagagccacc

SEQ ID NO: 956 - DNA, 467 bp, Homo sapiens
atggcccgcaccaagcagactgcacgcaagtccaccggtggcaaagcgccgcgcaagcagctggccactaaggcggctcggaaaagcgcgccggccaccggcggcgtgaagaaacctcatcgctaccgtcccggcaccgtggctctgcgcgagattcgccgctatcagaagtcgactgagctgctgatccgcaagttgcctttccaacgcctggtgcgagaaatcgctcaggacttcaagacagatctgcgctttcagagttccgcggtgatggccctgcaggaggcctgcgaggcctacttggtggggctctttgaggataccaacctgtgtgccatccatgctaagcgagtgactatcatgcccaaggacattcagctcgctcgccgcattcgtggggagagagcgtagaggtttccgggcagtaattctatccaacttaaaaaggctcttttaagagccgccta

SEQ ID NO: 957 - DNA, 411 bp, Homo sapiens
atggcccgtactaagcagactgcccgcaagtcgaccggcggcaaggccccgaggaagcagctggctaccaaagcggcccgcaagagcgcgccggccacgggcggggtgaagaagccgcaccgctaccggcccggcaccgtggctctgcgggagatccggcgctaccagaagtctacggagctgctgatccgcaagctgcccttccagcggctggtacgcgagatcgcgcaggactttaagacggacctgcgcttccagagctcggccgtgatggcgctgcaggaggccagcgaggcctacctggtggggctgttcgaagacacgaacctgtgcgccatccatgccaagcgcgtgaccatcatgcccaaggacatccagttggcccgccgcatccgcggggagcgggcctaa

SEQ ID NO: 958 - DNA, 1883 bp, Homo sapiens
atggaatcgggtatcgtcagtaaagaaacagacgataatccagaaactgacgataatccagaaactgactgtgagcccagccttgaccagagcctgtttcctggcgaaccagcttccacatgtgacaaggacaacgtcagaacaggacagaccaaccttgggttcctttcctggccgctgccagtagaaatcccagaatttcttcgaaggacaagaagatggaatcatggatgccgccattctaccaattttgagcagtttttgcaagagaggatcaaagtgaacagaaaagctgtgaatcttggaggagtggtgaccatcgaaaggagcaagagcaagctcaccgtaacaccggaagtgcctttttccagaagaacctgcgcactctccacctccaaaaggcccttctatcagtcacttacacctgagtataaaactaagcatgatagcggtgcaattttgaccaaccctcccgtgttcatgagtatctctcgagaggaggatgcttctgcccatgagagactcttgaagatattaattaagctcacagatttctactttgtgtttagtgttcaggaagtccccttgaaatcacttttactttactttgacttcagtaggaagatagttcataatgacaccatcaaaactgcccgcaagtcgaccggcggcaaggccccgaggaagcagctggctaccaaagcggcccgcaagagcgcgccggccacgggcggggtgaagaagccgcaccgctaccggcccggcaccgtggctctgcgggagatccggcgctatcagaagtctacggagctgctgatccgcaagctgcccttccagcggctggtacgcgagatcgcgcaggagtttaagacggacctgcgcttccagagctcggccgtgatggcgctgcaggaggccagagaggcctacctggtggggctgttcgaagacacgaacctgtgcgccatccatgccaagcgcgtgaccatcatgcccaaggacatccagttggtcagccgcatccgcggggagcgggcctaagcgaaatccgctcctgctcccaagaagggctccaaaaaggctgttacgaaagtgcagaagaaggacggcgagaagcgcaagcgcagccgcaaggagagctactccgtttacgtgtaggaggtgctgaagcaggtccaccccgacaccggcatctcgtccaagaccatgggcatcatgaactccttcgtcaacgacatcttcgagcgcatcgcgggagaggcgtcccgcctggcgcactacaacaagcgctccaccatcacgtcccgcgagatccagacggccgtgcgcctgctgctgcccggcgagctggccaagcacgccgtgtccgagggcaccaaggcggtcaccaagtacaccagctcgaagtaagagtgtgcaagggacgcaatagatcaaccacctaaccccaaaggctcttttcagagccacttcagtaatcgagaaagcagctgtaaacacttgtcagagcgtttgatagcttttggtcaggtagggagtgttaccatggtcacggatgcattcgggtttaggactaaggagtttcctgtagtcctgtaatgagttggccctcagtcatccccgtctagtcttactgagttgcttgttatctgtgctacgagattagaaaggtttgactcgttctgggatatttgggagggatggagggaaggaggcggggggtggttctacaccccttcagcctttaacctgtatctttaaagtcgttttcctttttgtttctgaaagtaatgaacgagatgagatttcccatacagatgagaaaccctcggtccaacctcttactatttcttagtgttttaatctgttttccttaccatata

SEQ ID NO: 959 - DNA, 9732 bp, Homo sapiens
gctggaggcaggaatgtgcctgcttactaatgagcgacgtgcaccggcgcgcacggcccggccaccgctgcggctgcggcggccggcggcggcccgttgtcaggtggagcctttgaattttttaaaagaccatagtaatcagatctacttgaaaaattaagtgaattgatttggttggaatgctcttttaccgatgctttaacatacagccactagattcccagaagttgtgcatgagttcctgtgaggagagttggcatcttggaaatcaaagacggttgtgatgcagttttttgatatgaggataacaggaagcgtcaggacaatcatgcccataagaactctaaactgttcagatcattttatcttagtgaaactggcaattgaactttgctctagttgatgggcaaaatttctcctagactattcatcatcccaatttcatcctagttgaaaattttcaaatgccataagaaatctttatagatttgcacttagcttttggatggacgtttctacaatggagagaactgtgttatagccctggtccaaggacattactagctaatgcccatcgactgtggtgtgcgtgtggaaggttccaaagagaaggagcaatcagcaagtttgcagacaccctggaacatggaagcaaccaagctttaagaagcacagctttggagacactccatgagtctgcactgctttcaggggaactagcacttaagaccttgtgtaacaaaatggacactggggacacagctctaggacaaaaagctacctcaaggtctggagaaactgataaagcatcaggtagatggagacaggaacaatcagctgttattaagatgagcacttttggcagtcatgaaggacagcggcaaccacaaatagagcctgagcaaatcggaaacacagcatcagcacaactgtttggttctgggaaactggcctcccctagtgaagtggtgcagcaagtcgcagagaagcaatatccaccgcatcgtccgagtccttactcatgccaacactcactctctttccctcagcactcattgccacagggggtcatgcacagcaccaagccacatcagagcctcgaaggtcctccgtggcttttccctggccctttgccatccgttgcctctgaggacttatttccttttcctatacatggccacagtggtggttatcctagaaaaaagatttcaagtctgaaccctgcttatagccaatactcccagaaaagtattgaacaggcagaagaggctcacaagaaagagcacaaacccaaaaagcctggcaagtacatttgcccttactgcagcagagcgtgtgccaaacctagtgtactgaaaaaacacatcaggtcccatactggggagcggccatatccatgtataccttgtggtttctctttcaagacaaagagcaatttgtacaagcacaggaagtcacatgcccatgcaattaaggcaggattagtacctttcacagagtcagctgtatctaaattggacctagaggctggttttattgatgtagaagcagaaatacattcagatggtgaacagagtacagacacagatgaggagagttctttatttgccgaggcttctgacaaaatgagtcctggtccacccatcccactggacattgccagcagaggcggctatcatgggtcattggaagaatcattgggaggtccaatgaaggtgccgattttgattatccctaaaagtgggattcctctccctaatgaaagctctcagtatattggccctgatatgctaccaaatccatctttaaatactaaggctgatgattcgcacacagtcaaacagaaacttgcactaagactgtcagagaaaaaaggacaagattctgagccatcgctcaaccttctgagcccgcacagtaaaggaagcactgattctggttacttttctcgctcagaaagtgctgagcagcaaataagccctcccaacacaaatgcaaagtcttatgaagaaatcatctttggaaaatactgtcggcttagtccgagaaatgcactcagtgttacaaccacaagtcaggagcgtgccgcaatgggtaggaagggcataatggaaccattacctcacgttaacaccaggttagatgtcaagatgtttgaagatcctgtttcacagctgatcccaagcaagggagatgtcgaccccagtcaaacgagcatgctgaaatccactaagttcaacagtgagtccagacaaccccagattattccatcatctatcaggaacgaaggaaaactttatccagcaaacttccaaggcagcaacccggttctcttagaagctcctgtagactcttcaccccttattagaagcaactcagtgccaacttcttcagcaactaatctaactattcctccttctttgagaggaagtcactcatttgatgaaaggatgactggttccgacgatgtattctatccagggaccgtgggcataccccctcagcgcatgctaagaagacaagcggcatttgagctgccttcggtacaggagggccacgtggaagtcgagcaccatggcaggatgttgaagggtatcagcagttcatccctgaaggaaaagaaattgtctcctggggacagggttgggtatgactatgatgtctgtcggaaaccctataagaagtgggaggactctgaaacaccaaagcaaaactacagggacatttcctgcttgagttctttaaagcatggtggagaatatttcatggatcccgtggtgccattgcagggagtaccaagcatgtttggaactacctgtgaaaacaggaaacgccggaaagagaagagcgtaggggatgaagaggacacgcccatgatctgcagcagcattgtaagcactcctgtgggcatcatggcttccgattatgaccccaaactgcagatgcaggaaggagtcaggagtggatttgccatggctggacacgaaaacctttctcatggtcacacggaacgctttgacccatgtcggccccaactgcagcctggaagtccatctcttgtgtcagaggagtcaccttcagccattgattcagacaagatgtcagacctagggggcaggaaacctcctggaaatgtgatttctgtgattcagcacaccaactcactgagccgacccaattcatttgaaaggtctgagtcagccgaacttgtggcttgcacacaggataaagccccttccccttcagagacttgtgacagtgagatttcagaagccccagtgagtcctgagtgggctccacctggggatggtgcagaaagtggggggaaaccctctccatctcagcaggtgcagcagcagtcctatcacacacagcccaggctagttcggcaacacaacatccaggttcctgagattcgagtgaccgaggagcctgataaacctgagaaggagaaggaagcccagagcaaagagccagagaagcctgtggaagaatttcagtggccccagagaagtgagaccctttcccagctccccgcggagaagttgccacccaaaaagaagcgtctgcgacttgcagatatggagcactcctcaggggagtccagctttgaatccacaggcacaggcctctcccgcagccccagccaagaaagcaacttgtcccacagctccagtttctccatgtcttttgaaagagaagaaaccagtaagctttctgcacttcctaagcaggatgagtttgggaagcattcagagtttctgactgtccctgctggttcatactcattgtctgtcccaggccatcaccaccagaaagagatgcgacgctgctcatcagagcagatgccttgtcctcacccagcggaagtcccagaagttcggagcaaatcatttgattatgggaatctgtcccatgctcctgtgtcgggagcagcagcctccacggtatcaccgtccagggagaggaagaaatgctttctggtgcggcaagcttccttcagtggctccccagaaatctcccagggcgaggttggcatggatcagagcgtgaagcaagagcagctggagcacctgcatgctggcctccggtccgggtggcaccatggcccgcctgctgtgctgcctcctcttcagcaagaggacccagggaagcaggtggcgggtccttgtcccccgctgagctcggggccactgcacctggcccagccacagatcatgcacatggacagtcaggaatctttgagaaatcccttgatccaaccaacatcctatatgacaagcaagcacttacctgaacagccacacttatttccacatcaagagacaattccattttctccaatccagaatgccttgtttcagtttcagtatcctacagtttgtatggttcatttaccagctcagcagcctccctggtggcaggcacatttcccacatccctttgctcagcaccctcagaagagctatggcaagccctcttttcagacagaaatccattcgagctatcccttagagcatgtggcagagcacactggaaagaaacctgctgagtatgcacacacgaaagagcagacctacccatgttattcaggagcatcagggctacacccaaagaaccttcttccaaagtttccatcagaccagagcagtaagtcaactgaaacgccctctgagcaggttcttcaagaagattttgcctcggcaaatgctgggtctttgcagtccctcccaggaacagtggttcctgttcggatccagacgcacgtaccatcctatggaagtgtcatgtacacaagcatttctcagatacttgggcagaatagccctgccattgtcatatgcaaagtcgatgagaatatgacccaaaggacactggtcaccaacgcagccatgcaagggataggattcaacattgcccaggtgctggggcagcatgcgggcttggagaagtaccccatttggaaagcacctcagactttgcccctcggcttagaatcctccatccccttgtgtttaccttccacctctgacagcgtggccaccctgggaggtagcaagcgaatgctttctccagccagtagcttggagctcttcatggaaaccaagcagcagaaaagggtcaaagaagaaaagatgtacggacagattgtggaggagcttagtgctgtggagctgaccaactcagacatcaaaaaggacctctcccgcccccagaaaccccagctggttcgacaaggatgtgcttctgagccaaaagatggcttgcagtcagggtcatcttccttctcctcgctgtcgccctcctcatctcaagactatccttctgttagcccgtcttccagggagccattcctgcccagcaaggagatgctttccggttcccgggcaccacttccggggcagaagtccagtgggccttctgaaagcaaagaatcttcagatgaattagatatcgatgagacggcatcggacatgagcatgagcccacagagttcttcattaccagcaggagatggtcagctggaagaggaagggaagggccacaagcggcctgttggcatgctggtccgcatggcctctgcccccagcgggaacgtggcagactcaactcttcttctcacggacatggcagatttccagcagattcttcagttccccagtctgcggacaacaactactgtgagttggtgcttcttgaattatacaaaacccaattatgtgcaacaggccaccttcaaatcctcggtttatgcttcatggtgcattagttcctgtaatccaaacccatcaggattgaacaccaagaccacgctggctcttctgaggtccaagcaaaaaatcactgcagaaatttatactctggctgctatgcataggcctggaaccggcaagcttacatcatcaagtgcttggaagcagtttactcagatgaaacctgatgcgtcctttttatttggcagcaaactagaaaggaaactagtgggaaatatcttaaaggaaagagggaaaggagatattcatggagataaagatattggatccaaacaaactgagccaatccgaattaaaatatttgaaggagggtacaaatcgaatgaagattatgtatatgtcagaggacgtggccggggaaagtacatttgtgaagaatgtgggattcgctgtaagaagccaagcatgctcaaaaaacacatccgtacccatactgatgttcggccttatgtatgcaagttatgtaactttgccttcaaaacgaaaggaaacctaacgaagcatatgaaatctaaagcacacatgaaaaaatgcctggaattgggagtctcaatgacatcggtggatgatacagaaactgaggaagcagaaaatttggaagatttgcacaaagcagcagagaagcatagcatgtccagcatttcaactgatcatcagttctccgatgctgaggaatcagatggtgaggatggagatgataatgatgatgatgatgaagatgaagatgactttgacgaccagggagatttaacaccaaaaacaagatcaagaagcaccagtcctcagcctcctagattctcctccttgcctgtgaatgttggcgccgtaccccacggggttccttcagatagttccctgggacattcttcgttgatcagctatttggttactttgccaagtattcgagttactcagcttatgacacccagtgattcatgtgaagatacccagatgacagaataccagaggctattccagagcaaaagtacggactcagaaccagacaaagacagattggacatacctagttgtatggatgaggagtgcatgctaccttcagagccaagctcctctcccagggacttctcaccctcaagccaccattcctctccaggatatgattcttcaccctgtcgagataattcaccaaagaggtatctgatacccaaaggagatttatctcccaggagacatttatcacctaggagagatctgtcacccatgagacatctttcaccaagaaaggaagctgcattgagaagagagatgtcccaaagagatgtttcaccaagaaggcatttgtctccaaggaggccagtgtctcctgggaaagatatcacagcaagaagagacctctctcctagaagagagagaagatacatgaccacaataagagcgccatctcccagaagggctttataccataacccaccattgtccatgggacagtatttgcaagcagagccaattgtattggggcctcctaatttaagaagaggattacctcaggttccttacttcagtctctatggagaccaagaaggtgcttatgaacatccaggctccagccttttccctgagggtcctaatgactatgtcttcagtcatcttccactccactctcagcaacaagtgcgagcccctatccccatggtgcccgttggtgggatccagatggttcactccatgccgccagccctttccagtttacatccttcacccacattgcccctgccaatggagggctttgaggagaagaaaggcgcgtcaggggagtccttctccaaggacccctatgtgctttctaagcagcatgagaagcgaggtcctcacgctttgcagtcatctggtccacctagcactccctcctctcctcggctgttgatgaaacagagcacttcggaagacagcctaaacgcaacagagcgggaacaggaggaaaatatacagacttgtacaaaagccattgcctctctccggattgccacggaagaggcagctctgctcgggccagatcagccagcgcgggtgcaggagccccaccagaaccccctgggaagtgcacatgttagcattagacactttagtagacctgagccaggtcagccctgtacctcagccacccaccctgacttgcatgatggtgaaaaggacaattttggtacatcacagactccattagctcactccacgttttacagcaagagttgtgtggatgacaagcagttggactttcacagcagcaaggaattatcttcaagcacagaggaaagcaaagatccttcatcagaaaagagtcagctacattgatctatgatgcatggagactttcatttccacattttcccatttttttgtttttgtttttctagaaatggaggtaatccagtttatagcatgcctgtcctaagttacagtagtttgctattatatatacttttgttatatcaaaagaattaggtaaattaacaagtcatcatgagcctgaccaaaacaaaatttgaaattaacctattgggtctggtacttttaaaattgtacagatgtttgtgccttttctttactttgcttatattcttataagcattttttagcagtaatttgtacatattttagaatttgtgtatctgctttgtaataaatgtaatttctttccttttttggacacttggatctaaatgatgtaaagcaaaacagcatcaatatatatgtgaggttgcactaaaacatatttttatatgattaaaactgaacagcttttatgtacagctctgattctgtaatactaatatttatttactttgtttcataaattgtacattttttcttaatgttgtggattgcttttctatgtgaagcatgggatttactgttgcgtaactagaacaaaaatgtacattgtaaacaagatatttaaactagagtatcttattctgcacttatgcattagttaaaaaaagataaaggatgtatcagtcagttcttaactcttgtatatttttttgtctcttgtttgctggattgactataacttaagtgctgattgtgattttaaaatgatagtaccgtaaagcattaaagtaaacaatgtgctattgtgagttttttcaaagctttataaatcagttataaataatattaaaagtatttggtcttatgtgaacatgttgatctatatactcatctaaaaatatgggaaaacattccaccccatgtaaatatgtacaagtgcatcactggtacaattttatgtaactcagttggacactaggttgccacagacctatgctaggtgtctttaaaaaattaaggtgacaaagcacatgggactgtgtagagcttggttatcggccggcccggtggcttggcaggcagtgctgtgcgctgctcatggagaagacctgggcttagcaatctccttagttcttgctacacaggatggtgactggaactaaggctacacagagggtcgcacttggactctgagggttgggtgtggaagggggaaaaggagatggagacctgctccccagctcttcctgtcagccggtttacatgggaacagggttaacatctgtgttaggggaggtcaccttaccctttttcataggggaagagtgtcacactcctggctatctcagggggaatggggaaaagaatctttcaagggcaaagaactcgtgggaggatgtctgttgtatgtaatactcacaatggcttttggttagtgttgaaggtgggaagagcatttgtaggtccagaagagtgaaagagagggaggggtgcagcaacatgtgcacaggcacgcacatgtgtgcacgcacacatacaatctgggttatctttgtgctatatagtggattataattctgtgaaaccaagtttgtatattgaattacattaaggagtgttctttaaaaagagaaataaatatacaattacatgcttgaaaaaaaaa

SEQ ID NO: 960 - DNA, 4648 bp, Homo sapiens
gaggtgtgctgggagctgtggtccgggtcggcgggcgcgcaagttggctagtctctgcggccacctccggaagggtccgccggctgtgctggtgaggcccagttccaaggctccggcatcctgtgtctcactgagcactgctgcccgatggccatccccaagcactccctgagcccagtgccgtgggaagaggacagcttccttcaagtgaaggtggaggaggaagaggaagccagcctctcccagggcggagaatccagccatgaccacattgctcactctgaggctgcacgcctgcgcttccggcacttccgctatgaggaggcatctggtccacacgaggccctggcccacctccgagcgttgtgctgtcagtggctgcagcccgaggcgcactccaaggagcagatactggagctgctggtgctggagcagttcctgggtgcgctgcccccagagatccaagcctgggtgggagcccagagtcccaagagcggagaggaagccgctgtgctggtggaggatctgactcaggtgctggacaagagaggatgggatccaggagccgagcccacagaggcaagctgcaagcagagtgacctgggagagtcagagccatcaaatgtcactgagaccctcatgggaggtgtttcccttggacccgcctttgtcaaggcatgtgaacctgagggcagctcagagaggtctggactatcaggggagatctggacaaagtctgtcacccaacagatccacttcaagaaaacttcagggccttacaaggatgtccccacagaccagcgtggccgtgaatctggtgcctcgaggaacagttctagtgcgtggccaaacctcacctcccaagagaagcctccttcagaagacaaatttgatctggtggatgcttatgggacagagcctccatacacctactcagggaagaggtcctccaagtgtcgcgagtgtaggaagatgttccagagtgcttcggcgctcgaggcacaccagaagacccattctcggaagaccccatatgcctgcagcgagtgtgggaaagccttcagccggagcactcacctcgcccagcaccaggttgtccacacaggggcgaagccccatgagtgtaaggaatgtgggaaggccttcagccgagtcacccacctgactcagcaccaaaggattcatactggagagaaaccctacaaatgtggggaatgtggtaaaaccttcagccgcagcactcacctcacccagcaccagcgggtgcacacgggggagcggccctacgagtgtgacgcgtgtgggaaagccttcagccagagtacgcacctgactcaacaccagcgcatccacaccggggagaagccctacaagtgtgacgcgtgtggccgagccttcagcgactgctcagccctgatccgacatctgagaatccactctggagagaagccatatcagtgtaaggtttgtccgaaggcctttgcacagagctcctccctcattgagcaccagaggatccacacgggagagaagccttataagtgcagcgactgtgggaaggccttcagtcgtagctcagccctgatggttcacttgcggatccacatcacggtgctgcaatgaccggaagtcgcccctgggggcgtagcacagcgtcttctcggaggctcgaggtctaagagaaacgctgagttcctgaagagccacagacagggtgggtgattgatgagttgtcaaaatgataggtgcctgagggcagactcgggctgtctaggaaccactctgcatttgaggaaccctgatgagcacaaggtgattcaggccagctggagaagcttccagaagggccctgcactgctaccctctatttcccactcagggctgtcccagagagaaggcagccgaactgaggatttagactggttctgagggccagggcaaatgaaggcgcatgtctctcagaactcagcgtcccaagacgctctgggcgggccaactgtagcttgttctcatgtggttcttcttgcctgcttttctgctgcttagcccagaacggacacctgccatgcccacctctgtgccttggcacctactatttccactccagactattttgtgcctaactgcaaggctgacttttgagactgcctcttccacgatgccttttctacactctgcctctctcatggtttcctgtcgtaatcagtggtgctgcttgacacctgcccagcatgttcctgtctctccttttccttccacatcccaccagtcaccagcgctattgttttaacctaaagcttatctgtaattcacctccttttccaccactgctaccttatgtgagccctcattgcctcttgcctggattatagccggggtctccttcctgaccacttcctgcctttattctctgcccctgtatcactctccaggggactcttgatattacttagatctgactgtgtcactccaaggtggaaagctctccaacccatcttctacagcacagcttcctgaacagggtataagtatgctgagatgcaggctgctctgggccccgagcaacctctccagttatcctcatatgcatgtatgaatactgtcatttttctgtgcgtgcagtgaaaatggcctcatctcataccatggctccaccttccatacaccagccacacggaactactgtggtccctgaaggagccatacattttcccacttatgtgcctttgtacctgtgcctggaaccctcctcttctttttctttttcttttcttttctttttttttttttgagatggagtctcgctctgtcgcccaggctggagtgcagtggcgcgatctcggctcactgcaagctctgcctcccgggttcatgccattctcctgcctcagcctcccaagtagctgggactacaggcgcctgccaccacgcccagctagtttttttttttttttttttgtatttttagtagagatggagtttcaccatgttagccaggatggtctcgatctcctgacctcgtgatccacccgcctcggcctcccaaagtgctgggattacaggcgtgagccaccgcacctggccctcctttttcatctaaggtgtttcaaatgttgcccaaagaaacctccctgctctccgggagcagacttcagcttgccctctctgcttccagagcacctcctagatacctctcttacaactcctgccaccttgttttacttatttgctccttgtagagctgccttttccaaggataccataaactcctgagagcaggggccatgtcttactctcagtatctacaacacacaagactcagtaggccctgactgatgtctcttacatgaatgtgactggtgcccccaggaggcagtcaccgtgctgtctctgccccacattgtccttatgtatgtttacatggatgtctccccagcagcttgaaccctggagagcaagaataatctgattttcctgggggccagcacccaaataagcctggcatgcagtggcctcaataaaatgtgactgtattgagtcattttctagggccccagatcccctggtgtcatggacttagtctttgccagcattctgtccatgtgttctctggtcttctctcacaatgctgcatccctgtcccatttttagggtccctgtctatcactggatgctgcagcttctgttcattactgttagtgtatcattcttcatgcctctgtttctgtgatggtctcatcatatgtgaaccatttgacctggcgtattgtgtactagtcaccgtcaccatctctccatatgtatctccctgtatttcgggcccattccctctatgtcaagagtaaatagaggcacagagactgatgagaaacgttcataacatgaaggtaagactcagggagacagagactttgtggaagtatctctgagggagtcccagacacaggcagagagggccacatatcgtgtgccagaggctgagagactgagagggatgacaggcttaggggaaaactcagagaggagagatgcacattcctagtgaaattgcacaggcttccagcatgctggagggaacagaaaaggcatgggcctgaattcaggctgcagagcctgactcctccctgtggctacttttgggacctaagataagtgactttcctgaacctccatgacctcctcatatgtaaaccagggacaggacccaccttgtgtagtgcctgacccaaagcctggccctgcacactgtctctgactcacagcaatcatcagcacctctctttgcctcctacttgctcagtctctgtcacaagaactggatctccatccccttgatgctctgagcatcttcacccatttggtcgttgagacatatctgtccatgtctgtctaaaaggggaggagatgagggagaaaaaagggaatctactcagagcctgtgtgtgctgcccagtctaccaaataatttatatacatctcagtcctcacacaaccatccctgttttatagaggaggaagtggcttagagaatgtaactgaccaaagtcacactgccaggaactggaagcactaggatttgacagcatatccaaatatgtcagcaatttcaataaacatgactgtactcaacaaaaaaaaaaaaaaaaaa

SEQ ID NO: 961 - DNA, 1542 bp, Homo sapiens
acaattactctacagctcagaacaccaactgctgaggctgccttgggaagaggatgatcctaaacaaagctctgctgctgggggccctcgctctgaccaccgtgatgagcccctgtggaggtgaagacattgtggctgaccacgttgcctcttgtggtgtaaacttgtaccagttttacggtccctctggccagtacacccatgaatttgatggagatgagcagttctacgtggacctggagaggaaggagactgcctggcggtggcctgagttcagcaaatttggaggttttgacccgcagggtgcactgagaaacatggctgtggcaaaacacaacttgaacatcatgattaaacgctacaactctaccgctgctaccaatgaggttcctgaggtcacagtgttttccaagtctcccgtgacactgggtcagcccaacaccctcatttgtcttgtggacaacatctttcctcctgtggtcaacatcacatggctgagcaatgggcagtcagtcacagaaggtgtttctgagaccagcttcctctccaagagtgatcattccttcttcaagatcagttacctcaccttcctcccttctgctgatgagatttatgactgcaaggtggagcactggggcctggaccagcctcttctgaaacactgggagcctgagattccagcccctatgtcagagctcacagagactgtggtctgtgccctggggttgtctgtgggcctcatgggcattgtggtgggcactgtcttcatcatccaaggcctgcgttcagttggtgcttccagacaccaagggccattgtgaatcccatcctggaagggaaggtgcatcgccatctacaggagcagaagaatggacttgctaaatgacctagcactattctctggcccgatttatcatatcccttttctcctccaaatatttctcctctcaccttttctctgggacttaagctgctatatcccctcagagctcacaaatgcctttacattctttccctgacctcctgattttttttttcttttctcaaatgttacctacaaagacatgcctggggtaagccacccggctacctaattcctcagtaacctccatctaaaatctccaaggaagcaataaattccttttatgagatctatgtcaaatttttccatctttcatccagggctgactgaaactatggctaataattggggtactcttatgtttcaatccaatttaacctcatttcccagatcatttttcatgtccagtaacacagaagccaccaagtacagtatagcctgataatatgttgatttcttagctgacattaatatttcttgcttccttgtgttcccacccttggcactgccacccacccctcaattcaggcaacaatgaaattaatggataccgtctgcccttggcccagaattgttatagcaaaaattttagaaccaaaaaataagtctgtactaatttcaatgtggcttttaaaagtatgacagagaaataagttaggataaaggaaatttgaatctca

SEQ ID NO: 962 - DNA, 1241 bp, Homo sapiens
tttttattctttctgccaggtacatcagatccatcaggtccgagctgtgttgactaccactgcttttcccttcgtctcagttatgtcttggaagaaggctttgcggatccccggagaccttcgggtagcaactgtcaccttgatgctggcgatgctgagctccctactggctgagggcagagactctcccgaggatttcgtgttccagtttaagggcatgtgctacttcaccaacgggacggagcgcgtgcgtcttgtgaccagatacatctataaccgagaggagtacgcgcgcttcgacagcgacgtgggggtgtaccgcgcggtgacgccgcaggggcggcctgatgccgagtactggaacagccagaaggaagtcctggaggggacccgggcggagttggacacggtgtgcagacacaactacgaggtggcgttccgcgggatcttgcagaggagagtggagcccacagtgaccatctccccatccaggacagaggccctcaaccaccacaacctgctggtctgctcggtgacagatttctatccaggccagatcaaagtccggtggtttcggaatgatcaggaggagacagccggcgttgtgtccaccccccttattaggaatggtgactggactttccagatcctggtgatgctggaaatgactccccagcgtggagatgtctacacctgccacgtggagcaccccagcctccagagccccatcaccgtggagtggcgggctcagtctgaatctgcccagagcaagatgctgagtggcgttggaggcttcgtgctggggctgatcttccttgggctgggccttatcatccgtcaaaggagtcagaaagggcttctgcactgactcctgagactattttaactaggattggttatcactcttctgtgatgcctgcttatgcctgcccagaattcccagctgcctgtgtcagcttgtccccctgagatcaaagtcctacagtggctgtcacgcagccaccaggtcatctcctttcatccccaccccaaggcgctggctgtgactctgcttcctgcactgacccagagcctctgcctgtgcatggccagctgcgtctactcaggtcccaaggggtttctgtttctattctttcctcagactgctcaagagaagcacatgaaaaacattacctgactttagagcttttttacataattaaacatgatcctgagttatctgtaaaaaaaaaaaaaaaaaa

SEQ ID NO: 963 - DNA, 5607 bp, Homo sapiens
actcttgtcagggccgcggcacatgggcggccggatgcgctgagcccggcgctgcggggccgcggagcgctggggagcagcggccgccggcgcggggaggggggtggggtgggacggcgcaccgcctccggtgctggcactaggggctggggtcggcgcggtgtcttctgcccttctgcagccgtcgacatttttttttctttctttttttcaattttgaacattttgcaaaacgaggggttcgaggcaggtgagagcatcctgcacgtcgccggggagcccgcgggcacttggcgcgctctcctgggaccgtctgcactggaaacccgaaagtttttttttaatatatatttttatgcagatgtatttataaagatataagtaatttttttcttcccttttctccaccgccttgagagcgagtacttttggcaaaggacggaggaaaagctcagcaacattttagggggcggttgtttctttcttatttctttttttaaggggaaaaaatttgagtgcatcgcgatggagaaaatgtcccgaccgctccccctgaatcccacctttatcccgcctccctacggcgtgctcaggtccctgctggagaacccgctgaagctcccccttcaccacgaagacgcatttagtaaagataaagacaaggaaaagaagctggatgatgagagtaacagcccgacggtcccccagtcggcattcctggggcctaccttatgggacaaaacccttccctatgacggagatactttccagttggaatacatggacctggaggagtttttgtcagaaaatggcattccccccagcccatctcagcatgaccacagccctcaccctcctgggctgcagccagcttcctcggctgccccctcggtcatggacctcagcagccgggcctctgcaccccttcaccctggcatcccatctccgaactgtatgcagagccccatcagaccaggtcagctgttgccagcaaaccgcaatacaccaagtcccattgatcctgacaccatccaggtcccagtgggttatgagccagacccagcagatcttgccctttccagcatccctggccaggaaatgtttgaccctcgcaaacgcaagttctctgaggaagaactgaagccacagcccatgatcaagaaagctcgcaaagtcttcatccctgatgacctgaaggatgacaagtactgggcaaggcgcagaaagaacaacatggcagccaagcgctcccgcgacgcccggaggctgaaagagaaccagatcgccatccgggcctcgttcctggagaaggagaactcggccctccgccaggaggtggctgacttgaggaaggagctgggcaaatgcaagaacatacttgccaagtatgaggccaggcacgggcccctgtaggatggcatttttgcaggctggctttggaatagatggacagtttgtttcctgtctgatagcaccacacgcaaaccaacctttctgacatcagcactttaccagaggcataaacacaactgactcccattttggtgtgcatctgtgtgtgtgtgcgtgtatatgtgcttgtgctcatgtgtgtggtcagcggtatgtgcgtgtgcgtgttcctttgctcttgccattttaaggtagccctctcatcgtcttttagttccaacaaagaaaggtgccatgtctttactagactgaggagccctctcgcgggtctcccatcccctccctccttcactcctgcctcctcagctttgcttcatgttcgagcttacctactcttccaggactctctgcttggattcactaaaaagggccctggtaaaatagtggatctcagtttttaagagtacaagctcttgtttctgtttagtccgtaagttaccatgctaatgaggtgcacacaataacttagcactactccgcagctctagtcctttataagttgctttcctcttactttcagttttggtgataatcgtcttcaaattaaagtgctgtttagatttattagatcccatatttacttactgctatctactaagtttccttttaattctaccaaccccagataagtaagagtactattaatagaacacagagtgtgtttttgcactgtctgtacctaaagcaataatcctattgtacgctagagcatgctgcctgagtattactagtggacgtaggatattttccctacctaagaatttcactgtcttttaaaaaacaaaaagtaaagtaatgcatttgagcatggccagactattccctaggacaaggaagcagagggaaatgggaggtctaaggatgaggggttaatttatcagtacatgagccaaaaactgcgtcttggattagcctttgacattgatgtgttcggttttgttgttccccttccctcacaccctgcctcgcccccacttttctagttaactttttccatatccctcttgacattcaaaacagttacttaagattcagttttcccactttttggtaatatatatatttttgtgaattatactttgttgtttttaaaaagaaaatcagttgattaagttaataagttgatgttttctaaggccctttttcctagtggtgtcatttttgaatgcctcataaattaatgattctgaagcttatgtttcttattctctgtttgcttttgaacgtatgtgctcttataaagtggacttctgaaaaatgaatgtaaaagacactggtgtatctcagaaggggatggtgttgtcacaaactgtggttaatccaatcaatttaaatgtttactatagaccaaaaggagagattattaaatcgtttaatgtttatacagagtaattataggaagttcttttttgtacagtatttttcagatataaatactgacaatgtattttggaagacatatattatatatagaaaagaggagaggaaaactattccatgttttaaaattatatagcaaagatatatattcaccaatgttgtacagagaagaagtgcttgggggtttttgaagtctttaatattttaagccctatcactgacacatcagcatgttttctgctttaaattaaaattttatgacagtatcgaggcttgtgatgacgaatcctgctctaaaatacacaaggagctttcttgtttcttattaggcctcagaaagaagtcagttaacgtcacccaaaagcacaaaatggattttagtcaaatatttattggatgatacagtgttttttaggaaaagcatctgccacaaaaatgttcacttcgaaattctgagttcctggaatggcacgttgctgccagtgccccagacagttcttttctaccctgcgggcccgcacgttttatgaggttgatatcggtgctatgtgtttggtttataatttgatagatgtttgactttaaagatgattgttcttttgtttcattaagttgtaaaatgtcaagaaattctgctgttacgacaaagaaacattttacgctagattaaaatatcctttcatcaatgggattttctagtttcctgccttcagagtatctaatcctttaatgatctggtggtctcctcgtcaatccatcagcaatgcttctctcatagtgtcatagacttgggaaacccaaccagtaggatatttctacaaggtgttcattttgtcacaagctgtagataacagcaagagatgggggtgtattggaattgcaatacattgttcaggtgaataataaaatcaaaaacttttgcaatcttaagcagagataaataaaagatagcaatatgagacacaggtggacgtagagttggcctttttacaggcaaagaggcgaattgtagaattgttagatggcaatagtcattaaaaacatagaaaaatgatgtctttaagtggagaattgtggaaggattgtaacatggaccatccaaatttatggccgtatcaaatggtagctgaaaaaactatatttgagcactggtctctcttggaattagatgtttatatcaaatgagcatctcaaatgttttctgcagaaaaaaataaaaagattctaataaaatgtattctcttgtgtgccaggagaggtttcagaaacctacctcgtcttacaaatttaaacactttggagtctgtacaggtgccttatatgtaggtcattgtcacgatacacacacacgaacactccctctggactggctgcctctccatccagggcagttaactagcaaacaaggcagatctgcttcatggagcgggaggccatggcttgactctgagtgatttgggtcaaccggagtcagacgcatgtctgcacgctgcagctattatgagagtccctttgtcatttttcaccttttcatcctaagcatctttcagagattaattatttggccattaacaatgaatccaaatcatatcatactgacatcatctagacatgatttggaaggaacagcttaggacctcctgatgaggtcacattgttgtttcttttaactagacttggcaaagaaaggcaaaaattgaccagcctatctttctgctggtgctgccttaaggaggtagtttgttgaggggagggctgtagatcattacttctttctcttcaggaagtggccactttgaaccattcaaataccacattaggcaagactgtgataggccttttgtcttcaaatacaacaggcctccactgacccatccctcaaagcagaaggaccctttgaggagagtacagatgggattccacagtggggtgggtggaatggaaacctgtactagaccacccagaggttccttctaacccactggtttggtggggaactcacagtaattccaaatgtacaatcagatgtctagggtctgttttcggaagaagcaagaattatcagtggcaccctccccactgcccccagtgtaaaacaatagacattctgtgaaatgcaaagctattctttggtttttctagtagtttatctcattttaccctattcttcctttaaggaaaactcaatctttatcacagtcaattagagcgatcccaaggcatgggaccaggcctgcttgcctatgtgtgatggcaattggagatctggatttagcactggggtctcagcaccctgcaggtgtctgagactaagtgatctgccctccaggtggcgatcaccttctgctcctaggtacccccactggcaaggccaaggtctcctccacgttttttctgcaattaataatgtcatttaaaaaatgagcaaagccttatccgaatcggatatagcaactaaagtcaatacattttgcaggaggctaagtgtaagagtgtgtgtgtgtgtgtgtgcgtgcatgtgtgtgtgtgtgtatgtgtgtgaataagtcgacataaagtctttaattttgagcaccttaccaaacataacaataatccattatccttttggcaacaccacaaagatcgcatctgttaaacaggtacaagttgacatgaggttagtttaattgtacaccatgatattggtggtatttatgctgttaagtccaaacctttatctgtctgttattcttaatgttgaataaactttgaattttttcctttcaaaaaaaa

SEQ ID NO: 964 - DNA, 3002 bp, Homo sapiens
gccagtcaccttcagtttctggagctggccgtcaacatgtcctttcctaaggcgcccttgaaacgattcaatgacccttctggttgtgcaccatctccaggtgcttatgatgttaaaactttagaagtattgaaaggaccagtatcctttcagaaatcacaaagatttaaacaacaaaaagaatctaaacaaaatcttaatgttgacaaagatactaccttgcctgcttcagctagaaaagttaagtcttcggaatcaaaggaatctcaaaagaatgataaagatttgaagatattagagaaagagattcgtgttcttctacaggaacgtggtgcccaggacagccggatccaggatctggaaactgagttggaaaagatggaagcaaggctaaatgctgcactaagggaaaaaacatctctctctgcaaataatgctacactggaaaaacaacttattgaattgaccaggactaatgaactactaaaatctaagttttctgaaaatggtaaccagaagaatttgagaattctaagcttggagttgatgaaacttagaaacaaaagagaaacaaagatgaggggtatgatggctaagcaagaaggcatggagatgaagctgcaggtcacccaaaggagtctcgaagagtctcaagggaaaatagcccaactggagggaaaacttgtttcaatagagaaagaaaagattgatgaaaaatctgaaacagaaaaactcttggaatacatcgaagaaattagttgtgcttcagatcaagtggaaaaatacaagctagatattgcccagttagaagaaaatttgaaagagaagaatgatgaaattttaagccttaagcagtctcttgaggagaatattgttatattatctaaacaagtagaagatctaaatgtgaaatgtcagctgcttgaaaaagaaaaagaagaccatgtcaacaggaatagagaacacaacgaaaatctaaatgcagagatgcaaaacttaaaacagaagtttattcttgaacaacaggaacgtgaaaagcttcaacaaaaagaattacaaattgattcacttctgcaacaagagaaagaattatcttcgagtcttcatcagaagctctgttcttttcaagaggaaatggttaaagagaagaatctgtttgaggaagaattaaagcaaacactggatgagcttgataaattacagcaaaaggaggaacaagctgaaaggctggtcaagcaattggaagaggaagcaaaatctagagctgaagaattaaaactcctagaagaaaagctgaaagggaaggaggctgaactggagaaaagtagtgctgctcatacccaggccaccctgcttttgcaggaaaagtatgacagtatggtgcaaagccttgaagatgttactgctcaatttgaaagctataaagcgttaacagccagtgagatagaagatcttaagctggagaactcatcattacaggaaaaagcggccaaggctgggaaaaatgcagaggatgttcagcatcagattttggcaactgagagctcaaatcaagaatatgtaaggatgcttctagatctgcagaccaagtcagcactaaaggaaacagaaattaaagaaatcacagtttcttttcttcaaaaaataactgatttgcagaaccaactcaagcaacaggaggaagactttagaaaacagctggaagatgaagaaggaagaaaagctgaaaaagaaaatacaacagcagaattaactgaagaaattaacaagtggcgtctcctctatgaagaactatataataaaacaaaaccttttcagctacaactagatgcttttgaagtagaaaaacaggcattgttgaatgaacatggtgcagctcaggaacagctaaataaaataagagattcatatgctaaattattgggtcatcagaatttgaaacaaaaaatcaagcatgttgtgaagttgaaagatgaaaatagccaactcaaatcggaagtatcaaaactccgctgtcagcttgctaaaaaaaaacaaagtgagacaaaacttcaagaggaattgaataaagttctaggtatcaaacactttgatccttcaaaggcttttcatcatgaaagtaaagaaaattttgccctgaagaccccattaaaagaaggcaatacaaactgttaccgagctcctatggagtgtcaagaatcatggaagtaaacatctgagaaacctgttgaagattatttcattcgtcttgttgttattgatgttgctgttattatatttgacatgggtattttataatgttgtatttaattttaactgccaatccttaaatatgtgaaaggaacattttttaccaaagtgtcttttgacattttattttttcttgcaaatacctcctccctaatgctcacctttatcacctcattctgaaccctttcgctggctttccagcttagaatgcatctcatcaacttaaaagtcagtatcatattattatcctcctgttctgaaaccttagtttcaagagtctaaaccccagattcttcagcttgatcctggaggtcttttctagtctgagcttctttagctaggctaaaacaccttggcttgttattgcctctactttgattctgataatgctcacttggtcctacctattatccttctacttgtccagttcaaataagaaataaggacaagcctaacttcatagaaacctctctatttttaatcagttgtttaataatttacaggttcttaggctccatcctgtttgtatgaaattataatctgtggattggcctttaagcctgcattcttaacaaactcttcagttaattcttagatacactaaaaatctgagaaactctacatgtaactatttcttcagagtttgtcatatactgcttgtcatctgcatgtctactcagcatttgattaacatttgtgtaatatgaaataaaattacacagtaagtcatttaaccaaaaaaaaaaaaaaaa

SEQ ID NO: 965 - DNA, 2957 bp, Homo sapiens
gccagtcaccttcagtttctggagctggccgtcaacatgtcctttcctaaggcgcccttgaaacgattcaatgacccttctggttgtgcaccatctccaggtgcttatgatgttaaaactttagaagtattgaaaggaccagtatcctttcagaaatcacaaagatttaaacaacaaaaagaatctaaacaaaatcttaatgttgacaaagatactaccttgcctgcttcagctagaaaagttaagtcttcggaatcaaagattcgtgttcttctacaggaacgtggtgcccaggacagccggatccaggatctggaaactgagttggaaaagatggaagcaaggctaaatgctgcactaagggaaaaaacatctctctctgcaaataatgctacactggaaaaacaacttattgaattgaccaggactaatgaactactaaaatctaagttttctgaaaatggtaaccagaagaatttgagaattctaagcttggagttgatgaaacttagaaacaaaagagaaacaaagatgaggggtatgatggctaagcaagaaggcatggagatgaagctgcaggtcacccaaaggagtctcgaagagtctcaagggaaaatagcccaactggagggaaaacttgtttcaatagagaaagaaaagattgatgaaaaatctgaaacagaaaaactcttggaatacatcgaagaaattagttgtgcttcagatcaagtggaaaaatacaagctagatattgcccagttagaagaaaatttgaaagagaagaatgatgaaattttaagccttaagcagtctcttgaggagaatattgttatattatctaaacaagtagaagatctaaatgtgaaatgtcagctgcttgaaaaagaaaaagaagaccatgtcaacaggaatagagaacacaacgaaaatctaaatgcagagatgcaaaacttaaaacagaagtttattcttgaacaacaggaacgtgaaaagcttcaacaaaaagaattacaaattgattcacttctgcaacaagagaaagaattatcttcgagtcttcatcagaagctctgttcttttcaagaggaaatggttaaagagaagaatctgtttgaggaagaattaaagcaaacactggatgagcttgataaattacagcaaaaggaggaacaagctgaaaggctggtcaagcaattggaagaggaagcaaaatctagagctgaagaattaaaactcctagaagaaaagctgaaagggaaggaggctgaactggagaaaagtagtgctgctcatacccaggccaccctgcttttgcaggaaaagtatgacagtatggtgcaaagccttgaagatgttactgctcaatttgaaagctataaagcgttaacagccagtgagatagaagatcttaagctggagaactcatcattacaggaaaaagcggccaaggctgggaaaaatgcagaggatgttcagcatcagattttggcaactgagagctcaaatcaagaatatgtaaggatgcttctagatctgcagaccaagtcagcactaaaggaaacagaaattaaagaaatcacagtttcttttcttcaaaaaataactgatttgcagaaccaactcaagcaacaggaggaagactttagaaaacagctggaagatgaagaaggaagaaaagctgaaaaagaaaatacaacagcagaattaactgaagaaattaacaagtggcgtctcctctatgaagaactatataataaaacaaaaccttttcagctacaactagatgcttttgaagtagaaaaacaggcattgttgaatgaacatggtgcagctcaggaacagctaaataaaataagagattcatatgctaaattattgggtcatcagaatttgaaacaaaaaatcaagcatgttgtgaagttgaaagatgaaaatagccaactcaaatcggaagtatcaaaactccgctgtcagcttgctaaaaaaaaacaaagtgagacaaaacttcaagaggaattgaataaagttctaggtatcaaacactttgatccttcaaaggcttttcatcatgaaagtaaagaaaattttgccctgaagaccccattaaaagaaggcaatacaaactgttaccgagctcctatggagtgtcaagaatcatggaagtaaacatctgagaaacctgttgaagattatttcattcgtcttgttgttattgatgttgctgttattatatttgacatgggtattttataatgttgtatttaattttaactgccaatccttaaatatgtgaaaggaacattttttaccaaagtgtcttttgacattttattttttcttgcaaatacctcctccctaatgctcacctttatcacctcattctgaaccctttcgctggctttccagcttagaatgcatctcatcaacttaaaagtcagtatcatattattatcctcctgttctgaaaccttagtttcaagagtctaaaccccagattcttcagcttgatcctggaggtcttttctagtctgagcttctttagctaggctaaaacaccttggcttgttattgcctctactttgattctgataatgctcacttggtcctacctattatccttctacttgtccagttcaaataagaaataaggacaagcctaacttcatagaaacctctctatttttaatcagttgtttaataatttacaggttcttaggctccatcctgtttgtatgaaattataatctgtggattggcctttaagcctgcattcttaacaaactcttcagttaattcttagatacactaaaaatctgagaaactctacatgtaactatttcttcagagtttgtcatatactgcttgtcatctgcatgtctactcagcatttgattaacatttgtgtaatatgaaataaaattacacagtaagtcatttaaccaaaaaaaaaaaaaaaa

SEQ ID NO: 966 - DNA, 3209 bp, Homo sapiens
gggaggaggcagtgggagggcggagggcgggggccttcggggtgggcgcccagggtagggcaggtggccgcggcgtggaggcagggagaatgcgactctccaaaaccctcgtcgacatggacatggccgactacagtgctgcactggacccagcctacaccaccctggaatttgagaatgtgcaggtgttgacgatgggcaatgacacgtccccatcagaaggcaccaacctcaacgcgcccaacagcctgggtgtcagcgccctgtgtgccatctgcggggaccgggccacgggcaaacactacggtgcctcgagctgtgacggctgcaagggcttcttccggaggagcgtgcggaagaaccacatgtactcctgcagatttagccggcagtgcgtggtggacaaagacaagaggaaccagtgccgctactgcaggctcaagaaatgcttccgggctggcatgaagaaggaagccgtccagaatgagcgggaccggatcagcactcgaaggtcaagctatgaggacagcagcctgccctccatcaatgcgctcctgcaggcggaggtcctgtcccgacagatcacctcccccgtctccgggatcaacggcgacattcgggcgaagaagattgccagcatcgcagatgtgtgtgagtccatgaaggagcagctgctggttctcgttgagtgggccaagtacatcccagctttctgcgagctccccctggacgaccaggtggccctgctcagagcccatgctggcgagcacctgctgctcggagccaccaagagatccatggtgttcaaggacgtgctgctcctaggcaatgactacattgtccctcggcactgcccggagctggcggagatgagccgggtgtccatacgcatccttgacgagctggtgctgcccttccaggagctgcagatcgatgacaatgagtatgcctacctcaaagccatcatcttctttgacccagatgccaaggggctgagcgatccagggaagatcaagcggctgcgttcccaggtgcaggtgagcttggaggactacatcaacgaccgccagtatgactcgcgtggccgctttggagagctgctgctgctgctgcccaccttgcagagcatcacctggcagatgatcgagcagatccagttcatcaagctcttcggcatggccaagattgacaacctgttgcaggagatgctgctgggagggtcccccagcgatgcaccccatgcccaccaccccctgcaccctcacctgatgcaggaacatatgggaaccaacgtcatcgttgccaacacaatgcccactcacctcagcaacggacagatgtccacccctgagaccccacagccctcaccgccaggtggctcagggtctgagccctataagctcctgccgggagccgtcgccacaatcgtcaagcccctctctgccatcccccagccgaccatcaccaagcaggaagttatctagcaagccgctggggcttgggggctccactggctccccccagccccctaagagagcacctggtgatcacgtggtcacggcaaaggaagacgtgatgccaggaccagtcccagagcaggaatgggaaggatgaagggcccgagaacatggcctaagggccacatcccactgccacccttgacgccctgctctggataacaagactttgacttggggagacctctactgccttggacaacttttctcatgttgaagccactgccttcaccttcaccttcatccatgtccaacccccgacttcatcccaaaggacagccgcctggagatgacttgaggccttacttaaacccagctcccttcttccctagcctggtgcttctcctctcctagcccctgtcatggtgtccagacagagccctgtgaggctgggtccaattgtggcacttggggcaccttgctcctccttctgctgctgcccccacctctgctgcctccctctgctgtcaccttgctcagccatcccgtcttctccaacaccacctctccagaggccaaggaggccttggaaacgattcccccagtcattctgggaacatgttgtaagcactgactgggaccaggcaccaggcagggtctagaaggctgtggtgagggaagacgcctttctcctccaacccaacctcatcctccttcttcagggacttgggtgggtacttgggtgaggatccctgaaggccttcaacccgagaaaacaaacccaggttggcgactgcaacaggaacttggagtggagaggaaaagcatcagaaagaggcagaccatccaccaggcctttgagaaagggtagaattctggctggtagagcaggtgagatgggacattccaaagaacagcctgagccaaggcctagtggtagtaagaatctagcaagaattgaggaagaatggtgtgggagagggatgatgaagagagagagggcctgctggagagcatagggtctggaacaccaggctgaggtcctgatcagcttcaaggagtatgcagggagctgggcttccagaaaatgaacacagcagttctgcagaggacgggaggctggaagctgggaggtcaggtggggtggatgatataatgcgggtgagagtaatgaggcttggggctggagaggacaagatgggtaaaccctcacatcagagtgacatccaggaggaataagctcccagggcctgtctcaagctcttccttactcccaggcactgtcttaaggcatctgacatgcatcatctcatttaatcctcccttcctccctattaacctagagattgtttttgttttttattctcctcctccctccccgccctcacccgccccactccctcctaacctagagattgttacagaagctgaaattgcgttctaagaggtgaagtgattttttttctgaaactcacacaactaggaagtggctgagtcaggacttgaacccaggtctccctggatcagaacaggagctcttaactacagtggctgaatagcttctccaaaggctccctgtgttctcaccgtgatcaagttgaggggcttccggctcccttctacagcctcagaaaccagactcgttcttctgggaaccctgcccactcccaggaccaagattggcctgaggctgcactaaaattcacttagggtcgagcatcctgtttgctgataaatattaaggagaattca

SEQ ID NO: 967 - DNA, 1339 bp, Homo sapiens
ggccatggtcagcgtgaacgcgcccctcggggctccagtggagagttcttacgacacgtccccatcagaaggcaccaacctcaacgcgcccaacagcctgggtgtcagcgccctgtgtgccatctgcggggaccgggccacgggcaaacactacggtgcctcgagctgtgacggctgcaagggcttcttccggaggagcgtgcggaagaaccacatgtactcctgcagatttagccggcagtgcgtggtggacaaagacaagaggaaccagtgccgctactgcaggctcaagaaatgcttccgggctggcatgaagaaggaagccgtccagaatgagcgggaccggatcagcactcgaaggtcaagctatgaggacagcagcctgccctccatcaatgcgctcctgcaggcggaggtcctgtcccgacagatcacctcccccgtctccgggatcaacggcgacattcgggcgaagaagattgccagcatcgcagatgtgtgtgagtccatgaaggagcagctgctggttctcgttgagtgggccaagtacatcccagctttctgcgagctccccctggacgaccaggtggccctgctcagagcccatgctggcgagcacctgctgctcggagccaccaagagatccatggtgttcaaggacgtgctgctcctaggcaatgactacattgtccctcggcactgcccggagctggcggagatgagccgggtgtccatacgcatccttgacgagctggtgctgcccttccaggagctgcagatcgatgacaatgagtatgcctacctcaaagccatcatcttctttgacccagatgccaaggggctgagcgatccagggaagatcaagcggctgcgttcccaggtgcaggtgagcttggaggactacatcaacgaccgccagtatgactcgcgtggccgctttggagagctgctgctgctgctgcccaccttgcagagcatcacctggcagatgatcgagcagatccagttcatcaagctcttcggcatggccaagattgacaacctgttgcaggagatgctgctgggagggtcccccagcgatgcaccccatgcccaccaccccctgcaccctcacctgatgcaggaacatatgggaaccaacgtcatcgttgccaacacaatgcccactcacctcagcaacggacagatgtccacccctgagaccccacagccctcaccgccaggtggctcagggtctgagccctataagctcctgccgggagccgtcgccacaatcgtcaagcccctctctgccatcccccagccgaccatcaccaagcaggaagttatctagcaagcc

SEQ ID NO: 968 - DNA, 1192 bp, Homo sapiens
ggccatggtcagcgtgaacgcgcccctcggggctccagtggagagttcttacgacacgtccccatcagaaggcaccaacctcaacgcgcccaacagcctgggtgtcagcgccctgtgtgccatctgcggggaccgggccacgggcaaacactacggtgcctcgagctgtgacggctgcaagggcttcttccggaggagcgtgcggaagaaccacatgtactcctgcagatttagccggcagtgcgtggtggacaaagacaagaggaaccagtgccgctactgcaggctcaagaaatgcttccgggctggcatgaagaaggaagccgtccagaatgagcgggaccggatcagcactcgaaggtcaagctatgaggacagcagcctgccctccatcaatgcgctcctgcaggcggaggtcctgtcccgacagatcacctcccccgtctccgggatcaacggcgacattcgggcgaagaagattgccagcatcgcagatgtgtgtgagtccatgaaggagcagctgctggttctcgttgagtgggccaagtacatcccagctttctgcgagctccccctggacgaccaggtggccctgctcagagcccatgctggcgagcacctgctgctcggagccaccaagagatccatggtgttcaaggacgtgctgctcctaggcaatgactacattgtccctcggcactgcccggagctggcggagatgagccgggtgtccatacgcatccttgacgagctggtgctgcccttccaggagctgcagatcgatgacaatgagtatgcctacctcaaagccatcatcttctttgacccagatgccaaggggctgagcgatccagggaagatcaagcggctgcgttcccaggtgcaggtgagcttggaggactacatcaacgaccgccagtatgactcgcgtggccgctttggagagctgctgctgctgctgcccaccttgcagagcatcacctggcagatgatcgagcagatccagttcatcaagctcttcggcatggccaagattgacaacctgttgcaggagatgctgctgggaggtccgtgccaagcccaggaggggcggggttggagtggggactccccaggagacaggcctcacacagtgagctcacccctcagctccttggcttccccactgtgccgctttgggcaagttgcttaa

SEQ ID NO: 969 - DNA, 3702 bp, Homo sapiens
agtgggggggaaggttctagaaaagcggcggcagcggctctagcggcagtagcagcagcgccgggtcccgtgcggaggtgctcctcgcagagttgtttctcgagcagcggcagttctcactacagcgccaggacgagtccggttcgtgttcgtccgcggagatctctctcatctcgctcggctgcgggaaatcgggctgaagcgactgagtccgcgatggagaaaactttagaaactgttcctttggagaggaaaaagagagaaaaggaacagttccgtaagctctttattggtggcttaagctttgaaaccacagaagaaagtttgaggaactactacgaacaatggggaaagcttacagactgtgtggtaatgagggatcctgcaagcaaaagatcaagaggatttggttttgtaactttttcatccatggctgaggttgatgctgccatggctgcaagacctcattcaattgatgggagagtagttgagccaaaacgtgctgtagcaagagaggaatctggaaaaccaggggctcatgtaactgtgaagaagctgtttgttggcggaattaaagaagatactgaggaacatcaccttagagattactttgaggaatatggaaaaattgataccattgagataattactgataggcagtctggaaagaaaagaggctttggctttgttacttttgatgaccatgatcctgtggataaaatcgtattgcagaaataccataccatcaatggtcataatgcagaagtaagaaaggctttgtctagacaagaaatgcaggaagttcagagttctaggagtggaagaggaggcaactttggctttggggattcacgtggtggcggtggaaatttcggaccaggaccaggaagtaactttagaggaggatctgatggatatggcagtggacgtggatttggggatggctataatgggtatggaggaggacctggaggtggcaattttggaggtagccccggttatggaggaggaagaggaggatatggtggtggaggacctggatatggcaaccagggtgggggctacggaggtggttatgacaactatggaggaggaaattatggaagtggaaattacaatgattttggaaattataaccagcaaccttctaactacggtccaatgaagagtggaaactttggtggtagcaggaacatggggggaccatatggtggaggaaactatggtccaggaggcagtggaggaagtgggggttatggtgggaggagccgatactgagcttcttcctatttgccatgggcttcactgtataaataggagaggatgagagcccagaggtaacagaacagcttcaggttatcgaaataacaatgttaaggaaactcttatctcagtcatgcataaatatgcagtgatatggcagaagacaccagagcagatgcagagagccattttgtgaatggattggattatttaataacattaccttactgtggaggaaggattgtaaaaaaaaatgcctttgagacagtttcttagctttttaattgttgtttctttctagtggtctttgtaagagtgtagaagcattccttctttgataatgttaaatttgtaagtttcaggtgacatgtgaaaccttttttaagatttttctcaaagttttgaaaagctattagccaggatcatggtgtaataagacataacgtttttcctttaaaaaaatttaagtgcgtgtgtagagttaagaagctgttgtacatttatgatttaataaaataattctaaaggaaattgtgtaattatagactttttattttaaataagttaaggagtgggtagtataattaaggtccgttgcaaagctgttgttatatttgtataagataaatgctggtcagatgtaagtgtgttgtctgcaattcatcaggattaaattatgtagataacttaagggatatctctgcaaggagaaacacctttttagatcttttagatgctgcttcttcaatgcaaggaaaggaaataaccccagcgaggtactcttcagggacacaggtctagtacaagagaactcttgacggctactaagttcagccagtcttaaaaaactgtgctgtttctacaaaactttaactacagtagtttataaggatgccaacgaaagctgagggtgtagagcaaaatagttctaagcttcagttaaacttctttaggtaagatcttatttacttttcctttcttaattttcctccctaaaagataaactaatactcttaaatggtctttcagtatagtggttcttacgtagtttaacatagctataaattgagtttaacaatttataaactcaagagaataatttttataaaccctgttttccaatctgtcatttacttaaattattttggttgtttttccctttttttccttcttttcccaccccctccccctccatgtgaagatttgggtgcttaacatatcatttttttccctgccggaattttagcattgatatgaaccatggacaagtatattctgctgccacaaagactgtaaagtgcttcatttcaacagctgaggcaagccaagtgatcattaataaagcttttcttggttccttcagtggtgttggtagtaaaatggtaggtaaaagttaggctgcaagttcaataaatcatgagatttcccatcgttacacccttgtgtattcacatttcttggatcaaacattttgagtgaactaggggtttttattaaagacatttgttgtatttatggttgtaactgtacatgcttatcaggatgagactgaaagaaggtagggcaaaaatggttgaatctattttcagatagtagttcatacttgagtgaagtgtcttgtctgcattatgaagcctggtatgtatccagtactaaataggtgggttaaatgtggtaattctagttcagtgtcttaccctgaagagaaagttgtaggttggctgttgaaattcattccttagatatgatcagtttgattgcccggctttattgcctttacaggaatgtgatactcagggcttactctatacaccaatgagtcttctttgatcctaagaccaccactgaagttgtttaggttcttttggacaaacatgataaacttcttcagatactttttttttcctttggcaggaaggtgtcttgctgcaggtaactaatgaagaagtggtcaaccacagagtcttcaagaaataagaaattctgtaccatctgaaagtagttcttgttggtgccttcatttaaaaagcactctttaaaataaaagggaaatgttttctgataaaacaaacatttagttgaggttcttgatataaaacaattacaaaatgagtgttgtttgtaaaacagtaacatcaaattggctagagagataaatgtatcatgttttaaattaggttttgtgagtagacagattacaattctattttaaatataaagtttataaaataaatactttttgtatccaaatacttggtgtaatgtttacacataaaatgtgtgaatcttgttctataaatatttggttgtctaaaagatcaccatcccctaaatttttaaaagcagtttcacaaagctatgcatattttaatattaacaggtaaatgagaagagcattgtggacattattggctgtccccaataaaatgctgttcatta

SEQ ID NO: 970 - DNA, 3666 bp, Homo sapiens
agtgggggggaaggttctagaaaagcggcggcagcggctctagcggcagtagcagcagcgccgggtcccgtgcggaggtgctcctcgcagagttgtttctcgagcagcggcagttctcactacagcgccaggacgagtccggttcgtgttcgtccgcggagatctctctcatctcgctcggctgcgggaaatcgggctgaagcgactgagtccgcgatggagagagaaaaggaacagttccgtaagctctttattggtggcttaagctttgaaaccacagaagaaagtttgaggaactactacgaacaatggggaaagcttacagactgtgtggtaatgagggatcctgcaagcaaaagatcaagaggatttggttttgtaactttttcatccatggctgaggttgatgctgccatggctgcaagacctcattcaattgatgggagagtagttgagccaaaacgtgctgtagcaagagaggaatctggaaaaccaggggctcatgtaactgtgaagaagctgtttgttggcggaattaaagaagatactgaggaacatcaccttagagattactttgaggaatatggaaaaattgataccattgagataattactgataggcagtctggaaagaaaagaggctttggctttgttacttttgatgaccatgatcctgtggataaaatcgtattgcagaaataccataccatcaatggtcataatgcagaagtaagaaaggctttgtctagacaagaaatgcaggaagttcagagttctaggagtggaagaggaggcaactttggctttggggattcacgtggtggcggtggaaatttcggaccaggaccaggaagtaactttagaggaggatctgatggatatggcagtggacgtggatttggggatggctataatgggtatggaggaggacctggaggtggcaattttggaggtagccccggttatggaggaggaagaggaggatatggtggtggaggacctggatatggcaaccagggtgggggctacggaggtggttatgacaactatggaggaggaaattatggaagtggaaattacaatgattttggaaattataaccagcaaccttctaactacggtccaatgaagagtggaaactttggtggtagcaggaacatggggggaccatatggtggaggaaactatggtccaggaggcagtggaggaagtgggggttatggtgggaggagccgatactgagcttcttcctatttgccatgggcttcactgtataaataggagaggatgagagcccagaggtaacagaacagcttcaggttatcgaaataacaatgttaaggaaactcttatctcagtcatgcataaatatgcagtgatatggcagaagacaccagagcagatgcagagagccattttgtgaatggattggattatttaataacattaccttactgtggaggaaggattgtaaaaaaaaatgcctttgagacagtttcttagctttttaattgttgtttctttctagtggtctttgtaagagtgtagaagcattccttctttgataatgttaaatttgtaagtttcaggtgacatgtgaaaccttttttaagatttttctcaaagttttgaaaagctattagccaggatcatggtgtaataagacataacgtttttcctttaaaaaaatttaagtgcgtgtgtagagttaagaagctgttgtacatttatgatttaataaaataattctaaaggaaattgtgtaattatagactttttattttaaataagttaaggagtgggtagtataattaaggtccgttgcaaagctgttgttatatttgtataagataaatgctggtcagatgtaagtgtgttgtctgcaattcatcaggattaaattatgtagataacttaagggatatctctgcaaggagaaacacctttttagatcttttagatgctgcttcttcaatgcaaggaaaggaaataaccccagcgaggtactcttcagggacacaggtctagtacaagagaactcttgacggctactaagttcagccagtcttaaaaaactgtgctgtttctacaaaactttaactacagtagtttataaggatgccaacgaaagctgagggtgtagagcaaaatagttctaagcttcagttaaacttctttaggtaagatcttatttacttttcctttcttaattttcctccctaaaagataaactaatactcttaaatggtctttcagtatagtggttcttacgtagtttaacatagctataaattgagtttaacaatttataaactcaagagaataatttttataaaccctgttttccaatctgtcatttacttaaattattttggttgtttttccctttttttccttcttttcccaccccctccccctccatgtgaagatttgggtgcttaacatatcatttttttccctgccggaattttagcattgatatgaaccatggacaagtatattctgctgccacaaagactgtaaagtgcttcatttcaacagctgaggcaagccaagtgatcattaataaagcttttcttggttccttcagtggtgttggtagtaaaatggtaggtaaaagttaggctgcaagttcaataaatcatgagatttcccatcgttacacccttgtgtattcacatttcttggatcaaacattttgagtgaactaggggtttttattaaagacatttgttgtatttatggttgtaactgtacatgcttatcaggatgagactgaaagaaggtagggcaaaaatggttgaatctattttcagatagtagttcatacttgagtgaagtgtcttgtctgcattatgaagcctggtatgtatccagtactaaataggtgggttaaatgtggtaattctagttcagtgtcttaccctgaagagaaagttgtaggttggctgttgaaattcattccttagatatgatcagtttgattgcccggctttattgcctttacaggaatgtgatactcagggcttactctatacaccaatgagtcttctttgatcctaagaccaccactgaagttgtttaggttcttttggacaaacatgataaacttcttcagatactttttttttcctttggcaggaaggtgtcttgctgcaggtaactaatgaagaagtggtcaaccacagagtcttcaagaaataagaaattctgtaccatctgaaagtagttcttgttggtgccttcatttaaaaagcactctttaaaataaaagggaaatgttttctgataaaacaaacatttagttgaggttcttgatataaaacaattacaaaatgagtgttgtttgtaaaacagtaacatcaaattggctagagagataaatgtatcatgttttaaattaggttttgtgagtagacagattacaattctattttaaatataaagtttataaaataaatactttttgtatccaaatacttggtgtaatgtttacacataaaatgtgtgaatcttgttctataaatatttggttgtctaaaagatcaccatcccctaaatttttaaaagcagtttcacaaagctatgcatattttaatattaacaggtaaatgagaagagcattgtggacattattggctgtccccaataaaatgctgttcatta

SEQ ID NO: 971 - DNA, 2201 bp, Homo sapiens
ttttttttttcgtcttagccacgcagaagtcgcgtgtctagtttgtttcgacgccggaccgcgtaagagacgatgatgttgggcacggaaggtggagagggattcgtggtgaaggtccggggcttgccctggtcttgctcggccgatgaagtgcagaggtttttttctgactgcaaaattcaaaatggggctcaaggtattcgtttcatctacaccagagaaggcagaccaagtggcgaggcttttgttgaacttgaatcagaagatgaagtcaaattggccctgaaaaaagacagagaaactatgggacacagatatgttgaagtattcaagtcaaacaacgttgaaatggattgggtgttgaagcatactggtccaaatagtcctgacacggccaatgatggctttgtacggcttagaggacttccctttggatgtagcaaggaagaaattgttcagttcttctcagggttggaaatcgtgccaaatgggataacattgccggtggacttccaggggaggagtacgggggaggccttcgtgcagtttgcttcacaggaaatagctgaaaaggctctaaagaaacacaaggaaagaatagggcacaggtatattgaaatctttaagagcagtagagctgaagttagaactcattatgatccaccacgaaagcttatggccatgcagcggccaggtccttatgacagacctggggctggtagagggtataacagcattggcagaggagctggctttgagaggatgaggcgtggtgcttatggtggaggctatggaggctatgatgattacaatggctataatgatggctatggatttgggtcagatagatttggaagagacctcaattactgtttttcaggaatgtctgatcacagatacggggatggtggctctactttccagagcacaacaggacactgtgtacacatgcggggattaccttacagagctactgagaatgacatttataattttttttcaccgctcaaccctgtgagagtacacattgaaattggtcctgatggcagagtaactggtgaagcagatgtcgagttcgcaactcatgaagatgctgtggcagctatgtcaaaagacaaagcaaatatgcaacacagatatgtagaactcttcttgaattctacagcaggagcaagcggtggtgcttacgaacacagatatgtagaactcttcttgaattctacagcaggagcaagcggtggtgcttatggtagccaaatgatgggaggcatgggcttgtcaaaccagtccagctacgggggcccagccagccagcagctgagtgggggttacggaggcggctacggtggccagagcagcatgagtggatacgaccaagttttacaggaaaactccagtgattttcaatcaaacattgcataggtaaccaaggagcagtgaacagcagctactacagtagtggaagccgtgcatctatgggcgtgaacggaatgggagggttgtctagcatgtccagtatgagtggtggatggggaatgtaattgatcgatcctgatcactgactcttggtcaacctttttttttttttttttttctttaagaaaacttcagtttaacagtttctgcaatacaagcttgtgatttatgcttactctaagtggaaatcaggattgttatgaagacttaaggcccagtatttttgaatacaatactcatctaggatgtaacagtgaagctgagtaaactataactgttaaacttaagttccagcttttctcaagttagttataggatgtacttaagcagtaagcgtatttaggtaaaagcagttgaattatgttaaatgttgccctttgccacgttaaattgaacactgttttggatgcatgttgaaagacatgcttttattttttttgtaaaacaatataggagctgtgtctactattaaaagtgaaacattttggcatgtttgttaattctagtttcatttaataacctgtaaggcacgtaagtttaagctttttttttttttaagttaatgggaaaaatttgagacgcaataccaatacttaggattttggtcttggtgtttgtatgaaattctgaggccttgatttaaatctttcattgtattgtgatttccttttaggtatattgcgctaagtgaaacttgtcaaataaatcctccttttaaaaactgc

SEQ ID NO: 972 - DNA, 2271 bp, Homo sapiens
ccgttgtggcgagcgctacacgaggcaaacgacttctcccttctttgaactggaccccgcgagcaccagagtcggcgtaactatcgcctgacaggcatttaaatcaaacggtattgagatggattgggttatgaaacataatggtccaaatgacgctagtgatgggacagtacgacttcgtggactaccatttggttgcagcaaagaggaaatagttcagttctttcaagggttggaaatcgtgccaaatgggataacattgacgatggactaccaggggagaagcacaggggaggccttcgtgcagtttgcttcaaaggagatagcagaaaatgctctggggaaacacaaggaaagaatagggcacaggtatattgagatcttcagaagtagcaggagtgaaatcaaaggattttatgatccaccaagaagattgctgggacagcgaccgggaccatatgatagaccaataggaggaagagggggttattatggagctgggcgtggaagttatggaggttttgatgactatggtggctataataattacggctatgggaatgatggctttgatgacagaatgagagatggaagaggtatgggaggacatggctatggtggagctggtgatgcaagttcaggttttcatggtggtcatttcgtacatatgagagggttgccttttcgtgcaactgaaaatgacattgctaatttcttctcaccactaaatccaatacgagttcatattgatattggagctgatggcagagccacaggagaagcagatgtagagtttgtgacacatgaagatgcagtagctgccatgtctaaagataaaaataacatgcaacatcgatatattgaactcttcttgaattctactcctggaggcggctctggcatgggaggttctggaatgggaggctacggaagagatggaatggataatcagggaggctatggatcagttggaagaatgggaatggggaacaattacagtggaggatatggtactcctgatggtttgggtggttatggccgtggtggtggaggcagtggaggttactatgggcaaggcggcatgagtggaggtggatggcgtgggatgtactgaaagcaaaaacaccaacatacaagtcttgacaacagcatctggtctactagactttcttacagatttaatttcttttgtattttaagaactttataatgactgaaggaatgtgttttcaaaatattatttggtaaagcaacagattgtgatgggaaaatgttttctgtaggtttatttgttgcatactttgacttaaaaataaatttttatattcaaaccactgatgttgatactttttatatactagttactcctaaagatgtgctgccttcataagatttgggttgatgtattttactattagttctacaagaagtagtgtggtgtaattttagaggataatggttcacctctgcgtaaactgcaagtcttaagcagacatctggaatagagcttgacaaataattagtgtaacttttttctttagttcctcctggacaacactgtaaatataaagcctaaagatgaagtggcttcaggagtataaattcagctaattatttctatattattatttttcaaatgtcatttatcaggcatagctctgaaacattgatgatctaagaggtattgatttctgaatattcataattgtgttacctgggtatgagagtgttggaagctgaattctagccctagattttggagtaaaaccccttcagcacttgaccgaaataccaaaaatgtctccaaaaaattgatagttgcaggttatcgcaagatgtcttagagtagggttaaggttctcagtgacacaagaattcagtattaagtacataggtatttactatggagtataattctcacaattgtattttcagttttctgcccaatagagtttaaataactgtataaatgatgactttaaaaaaatgtaagcaacaagtccatgtcatagtcaataaaaacaatcctgcagttgggttttgtatctgatccctgcttggagttttagtttaaagaatctatatgtagcaaggaaaaggtgctttttaattttaatccctttgatcaatatggcttttttccaaattggctaatggatcaaaatgaaacctgttgatgtgaattcagttattgaacttgttacttgtttttgccagaaatgttattaataaatgtcaatgtgggagataaaaaaaaaaaaaaaaaaaaaa

SEQ ID NO: 973 - DNA, 2316 bp, Homo sapiens
ccgttgtggcgagcgctacacgaggcaaacgacttctcccttctttgaactggaccccgcgagcaccagagtcggcgtaactatcgcctgacaggcatttaaatcaaacggtattgagatggattgggttatgaaacataatggtccaaatgacgctagtgatgggacagtacgacttcgtggactaccatttggttgcagcaaagaggaaatagttcagttctttcaagggttggaaatcgtgccaaatgggataacattgacgatggactaccaggggagaagcacaggggaggccttcgtgcagtttgcttcaaaggagatagcagaaaatgctctggggaaacacaaggaaagaatagggcacaggtatattgagatcttcagaagtagcaggagtgaaatcaaaggattttatgatccaccaagaagattgctgggacagcgaccgggaccatatgatagaccaataggaggaagagggggttattatggagctgggcgtggaagtatgtatgacagaatgcgacgaggaggtgatggatatgatggtggttatggaggttttgatgactatggtggctataataattacggctatgggaatgatggctttgatgacagaatgagagatggaagaggtatgggaggacatggctatggtggagctggtgatgcaagttcaggttttcatggtggtcatttcgtacatatgagagggttgccttttcgtgcaactgaaaatgacattgctaatttcttctcaccactaaatccaatacgagttcatattgatattggagctgatggcagagccacaggagaagcagatgtagagtttgtgacacatgaagatgcagtagctgccatgtctaaagataaaaataacatgcaacatcgatatattgaactcttcttgaattctactcctggaggcggctctggcatgggaggttctggaatgggaggctacggaagagatggaatggataatcagggaggctatggatcagttggaagaatgggaatggggaacaattacagtggaggatatggtactcctgatggtttgggtggttatggccgtggtggtggaggcagtggaggttactatgggcaaggcggcatgagtggaggtggatggcgtgggatgtactgaaagcaaaaacaccaacatacaagtcttgacaacagcatctggtctactagactttcttacagatttaatttcttttgtattttaagaactttataatgactgaaggaatgtgttttcaaaatattatttggtaaagcaacagattgtgatgggaaaatgttttctgtaggtttatttgttgcatactttgacttaaaaataaatttttatattcaaaccactgatgttgatactttttatatactagttactcctaaagatgtgctgccttcataagatttgggttgatgtattttactattagttctacaagaagtagtgtggtgtaattttagaggataatggttcacctctgcgtaaactgcaagtcttaagcagacatctggaatagagcttgacaaataattagtgtaacttttttctttagttcctcctggacaacactgtaaatataaagcctaaagatgaagtggcttcaggagtataaattcagctaattatttctatattattatttttcaaatgtcatttatcaggcatagctctgaaacattgatgatctaagaggtattgatttctgaatattcataattgtgttacctgggtatgagagtgttggaagctgaattctagccctagattttggagtaaaaccccttcagcacttgaccgaaataccaaaaatgtctccaaaaaattgatagttgcaggttatcgcaagatgtcttagagtagggttaaggttctcagtgacacaagaattcagtattaagtacataggtatttactatggagtataattctcacaattgtattttcagttttctgcccaatagagtttaaataactgtataaatgatgactttaaaaaaatgtaagcaacaagtccatgtcatagtcaataaaaacaatcctgcagttgggttttgtatctgatccctgcttggagttttagtttaaagaatctatatgtagcaaggaaaaggtgctttttaattttaatccctttgatcaatatggcttttttccaaattggctaatggatcaaaatgaaacctgttgatgtgaattcagttattgaacttgttacttgtttttgccagaaatgttattaataaatgtcaatgtgggagataaaaaaaaaaaaaaaaaaaaaa

SEQ ID NO: 974 - DNA, 2830 bp, Homo sapiens
agggcgctccaggcgacagcattgcagacgccattatcctctgtttctctgctgcaccgacctcgacgtcttgcctgtgtcccacttgttcgcggcctataggctactgcagcactggggtgtcagttgttggtccgacccagaacgcttcagttctgctctgcaaggatatataataactgattggtgtgcccgtttaataaaagaatatggaaactgaacagccagaagaaaccttccctaacactgaaaccaatggtgaatttggtaaacgccctgcagaagatatggaagaggaacaagcatttaaaagatctagaaacactgatgagatggttgaattacgcattctgcttcagagcaagaatgctggggcagtgattggaaaaggaggcaagaatattaaggctctccgtacagactacaatgccagtgtttcagtcccagacagcagtggccccgagcgcatattgagtatcagtgctgatattgaaacaattggagaaattctgaagaaaatcatccctaccttggaagagggcctgcagttgccatcacccactgcaaccagccagctcccgctcgaatctgatgctgtggaatgcttaaattaccaacactataaaggaagtgactttgactgcgagttgaggctgttgattcatcagagtctagcaggaggaattattggggtcaaaggtgctaaaattaaagaacttcgagagaacactcaaaccaccatcaagcttttccaggaatgctgtcctcattccactgacagagttgttcttattggaggaaaacccgatagggttgtagagtgcataaagatcatccttgatcttatatctgagtctcccatcaaaggacgtgcacagccttatgatcccaatttttacgatgaaacctatgattatggtggttttacaatgatgtttgatgaccgtcgcggacgcccagtgggatttcccatgcggggaagaggtggttttgacagaatgcctcctggtcggggtgggcgtcccatgcctccatctagaagagattatgatgatatgagccctcgtcgaggaccacctccccctcctcccggacgaggcggccggggtggtagcagagctcggaatcttcctcttcctccaccaccaccacctagagggggagacctcatggcctatgacagaagagggagacctggagaccgttacgacggcatggttggtttcagtgctgatgaaacttgggactctgcaatagatacatggagcccatcagaatggcagatggcttatgaaccacagggtggctccggatatgattattcctatgcagggggtcgtggctcatatggtgatcttggtggacctattattactacacaagtaactattcccaaagatttggctggatctattattggcaaaggtggtcagcggattaaacaaatccgtcatgagtcgggagcttcgatcaaaattgatgagcctttagaaggatccgaagatcggatcattaccattacaggaacacaggaccagatacagaatgcacagtatttgctgcagaacagtgtgaagcagtatgcagatgttgaaggattctaatgcaagatattttttcttttttatagtgtgaagcagtattctggaaagtttttctaagactagtgaagaactgaaggagtcctgcatctttttttttttatctgcttctgtttaaaaagccaacattcctctgcttcataggtgttctgcatttgaggtgtagtgaaatctttgctgttcaccagatgtaatgttttagttcttacaaacagggttgggggggggaagggcgtgcaaaaactaacattgaaattttgaaacagcagcagagtgagtggattttatttttcgttattgtggtggtttaaaaaattccccccatgtaattattgtgaacaccttgctttgtggtcactgtaacatttggggggtgggccagggaggaaaagtaacaatagtccacatgtccctggcatctgttcagagcagtgtgcagaatgtaatgctcttttgtaagaaacgttttatgatttttaaaataaatttagtgaacctatttttggtggtcattttttttttaagacagtcattttaaaatggtggctgaatttcccaacccacccccaaactaaacactaagtttaattttcagctcctctgttggacatataagtgcatctcttgttggacataggcaaaataacttggcaaacttagttctggtgatttcttgatggtttggaagtctattgctgggaagaaattccatcatacatattcatgcttataataagctggggattttttgtttgtttttgcaaatgcttgcccctacttttcaacaattttctatgttagttgtgaagaactaaggtggggagcagtactacaagttgagtaatggtatgagtatataccagaattctgattggcagcaagtttattaatcagaataacacttggttatggaagtgactaatgctgaaaaaattgattatttttattagataatttctcacctatagacttaaactgtcaatttgctctagtgtcttattagttaaactttgtaaaatatatatatacttgtttttccattgtatgcaaattgaaagaaaaagatgtaccatttctctgttgtatgttggattatgtaggaatgtttgtgtacaattcaaaaaaaaaaaagatgaaaaaagttcctgtggatgttttgtgtagtatcttggcatttgtattgatagttaaaattcacttccaaataaataaaacacccatgatgctag

SEQ ID NO: 975 - DNA, 2770 bp, Homo sapiens
agggcgctccaggcgacagcattgcagacgccattatcctctgtttctctgctgcaccgacctcgacgtcttgcctgtgtcccacttgttcgcggcctataggctactgcagcactggggtgtcagttgttggtccgacccagaacgcttcagttctgctctgcaaggatatataataactgattggtgtgcccgtttaataaaagaatatggaaactgaacagccagaagaaaccttccctaacactgaaaccaatggtgaatttggtaaacgccctgcagaagatatggaagaggaacaagcatttaaaagatctagaaacactgatgagatggttgaattacgcattctgcttcagagcaagaatgctggggcagtgattggaaaaggaggcaagaatattaaggctctccgtacagactacaatgccagtgtttcagtcccagacagcagtggccccgagcgcatattgagtatcagtgctgatattgaaacaattggagaaattctgaagaaaatcatccctaccttggaagagggcctgcagttgccatcacccactgcaaccagccagctcccgctcgaatctgatgctgtggaatgcttaaattaccaacactataaaggaagtgactttgactgcgagttgaggctgttgattcatcagagtctagcaggaggaattattggggtcaaaggtgctaaaattaaagaacttcgagagaacactcaaaccaccatcaagcttttccaggaatgctgtcctcattccactgacagagttgttcttattggaggaaaacccgatagggttgtagagtgcataaagatcatccttgatcttatatctgagtctcccatcaaaggacgtgcacagccttatgatcccaatttttacgatgaaacctatgattatggtggttttacaatgatgtttgatgaccgtcgcggacgcccagtgggatttcccatgcggggaagaggtggttttgacagaatgcctcctggtcggggtgggcgtcccatgcctccatctagaagagattatgatgatatgagccctcgtcgaggaccacctccccctcctcccggacgaggcggccggggtggtagcagagctcggaatcttcctcttcctccaccaccaccacctagagggggagacctcatggcctatgacagaagagggagacctggagaccgttacgacggcatggttggtttcagtgctgatgaaacttgggactctgcaatagatacatggagcccatcagaatggcagatggcttatgaaccacagggtggctccggatatgattattcctatgcagggggtcgtggctcatatggtgatcttggtggacctattattactacacaagtaactattcccaaagatttggctggatctattattggcaaaggtggtcagcggattaaacaaatccgtcatgagtcgggagcttcgatcaaaattgatgagcctttagaaggatccgaagatcggatcattaccattacaggaacacaggaccagatacagaatgcacagtatttgctgcagaacagtgtgaagcagtattctggaaagtttttctaagactagtgaagaactgaaggagtcctgcatctttttttttttatctgcttctgtttaaaaagccaacattcctctgcttcataggtgttctgcatttgaggtgtagtgaaatctttgctgttcaccagatgtaatgttttagttcttacaaacagggttgggggggggaagggcgtgcaaaaactaacattgaaattttgaaacagcagcagagtgagtggattttatttttcgttattgtggtggtttaaaaaattccccccatgtaattattgtgaacaccttgctttgtggtcactgtaacatttggggggtgggccagggaggaaaagtaacaatagtccacatgtccctggcatctgttcagagcagtgtgcagaatgtaatgctcttttgtaagaaacgttttatgatttttaaaataaatttagtgaacctatttttggtggtcattttttttttaagacagtcattttaaaatggtggctgaatttcccaacccacccccaaactaaacactaagtttaattttcagctcctctgttggacatataagtgcatctcttgttggacataggcaaaataacttggcaaacttagttctggtgatttcttgatggtttggaagtctattgctgggaagaaattccatcatacatattcatgcttataataagctggggattttttgtttgtttttgcaaatgcttgcccctacttttcaacaattttctatgttagttgtgaagaactaaggtggggagcagtactacaagttgagtaatggtatgagtatataccagaattctgattggcagcaagtttattaatcagaataacacttggttatggaagtgactaatgctgaaaaaattgattatttttattagataatttctcacctatagacttaaactgtcaatttgctctagtgtcttattagttaaactttgtaaaatatatatatacttgtttttccattgtatgcaaattgaaagaaaaagatgtaccatttctctgttgtatgttggattatgtaggaatgtttgtgtacaattcaaaaaaaaaaaagatgaaaaaagttcctgtggatgttttgtgtagtatcttggcatttgtattgatagttaaaattcacttccaaataaataaaacacccatgatgctag

SEQ ID NO: 976 - DNA, 2436 bp, Homo sapiens
tggttgcgtcgggtcacgtgggcgcgcaggcgcagcgcggtgcagcccgttcgctcacacaaagcccagacgcggagaaaatggcggcaggggtcgaagcggcggcggaggtggcggcgacggagatcaaaatggaggaagagagcggcgcgcccggcgtgccgagcggcaacggggctccgggccctaagggtgaaggagaacgacctgctcagaatgagaagaggaaggagaaaaacataaaaagaggaggcaatcgctttgagccatatgccaatccaactaaaagatacagagccttcattacaaacataccttttgatgtgaaatggcagtcacttaaagacctggttaaagaaaaagttggtgaggtaacatacgtggagctcttaatggacgctgaaggaaagtcaaggggatgtgctgttgttgaattcaagatggaagagagcatgaaaaaagctgcggaagtcctaaacaagcatagtctgagcggaagaccactgaaagtcaaagaagatcctgatggtgaacatgccaggagagcaatgcaaaaggctggaagacttggaagcacagtatttgtagcaaatctggattataaagttggctggaagaaactgaaggaagtatttagtatggctggtgtggtggtccgagcagacattcttgaagataaagatggaaaaagtcgtggaataggcactgttacttttgaacagtccattgaagctgtgcaagctatatctatgttcaatggccagctgctatttgatagaccaatgcacgtcaagatggatgagagggccttaccaaaaggagatttcttccctcctgagcgtccacaacaacttccccatggccttggtggtattggcatggggttaggaccaggagggcaacccattgatgccaatcacctgaataaaggcatcggaatgggaaacataggtcccgcaggaatgggaatggaaggcataggatttggaataaataaaatgggaggaatggaggggccctttggtggtggtatggaaaacatgggtcgatttggatctgggatgaacatgggcaggataaatgaaatcctaagtaatgcactgaagagaggagagatcattgcaaagcagggaggaggtggaggtggaggaagcgtccctgggatcgagaggatgggtcctggcattgaccgcctcgggggtgccggcatggagcgcatgggcgcgggcctgggccacggcatggatcgcgtgggctccgagatcgagcgcatgggcctggtcatggaccgcatgggctccgtggagcgcatgggctccggcattgagcgcatgggcccgctgggcctcgaccacatggcctccagcattgagcgcatgggccagaccatggagcgcattggctctggcgtggagcgcatgggtgccggcatgggcttcggccttgagcgcatggccgctcccatcgaccgtgtgggccagaccattgagcgcatgggctctggcgtggagcgcatgggccctgccatcgagcgcatgggcctgagcatggagcgcatggtgcccgcaggtatgggagctggcctggagcgcatgggccccgtgatggatcgcatggccaccggcctggagcgcatgggcgccaacaatctggagcggatgggcctggagcgcatgggcgccaacagcctcgagcgcatgggcctggagcgcatgggtgccaacagcctcgagcgcatgggccctgccatgggcccggccctgggcgctggcattgagcgcatgggcctggccatgggtggcggtggcggtgccagctttgaccgtgccatcgagatggagcgtggcaacttcggaggaagcttcgcaggttcctttggtggagctggaggccatgctcctggggtggccaggaaggcctgccagatatttgtgagaaatctgccattcgatttcacatggaagatgctaaaggacaaattcaacgagtgcggccacgtgctgtacgccgacatcaagatggagaatgggaagtccaaggggtgtggcgtggttaagttcgagtcgccagaggtggccgagagagcctgccggatgatgaatggcatgaagctgagtggccgagagattgacgttcgaattgatagaaacgcttaagcagttgccttttttaaacatcgatacgagacctctgaatttgtattttttcttgttaaccattttaatttgttggctggatgtataaagatgtttaaaaaattcagttgctttttggggtaatttgaattacttttttaatgactggggttccatttgactgtttgcattgagattgcaatgtgcgcaattttttttgtagttgtggcatcttgttgacatcgaatatgactttgataataaataccggttcctgaaaaaaaaaaaaaaaaaaaaaaaa

SEQ ID NO: 977 - DNA, 2553 bp, Homo sapiens
tggttgcgtcgggtcacgtgggcgcgcaggcgcagcgcggtgcagcccgttcgctcacacaaagcccagacgcggagaaaatggcggcaggggtcgaagcggcggcggaggtggcggcgacggagatcaaaatggaggaagagagcggcgcgcccggcgtgccgagcggcaacggggctccgggccctaagggtgaaggagaacgacctgctcagaatgagaagaggaaggagaaaaacataaaaagaggaggcaatcgctttgagccatatgccaatccaactaaaagatacagagccttcattacaaacataccttttgatgtgaaatggcagtcacttaaagacctggttaaagaaaaagttggtgaggtaacatacgtggagctcttaatggacgctgaaggaaagtcaaggggatgtgctgttgttgaattcaagatggaagagagcatgaaaaaagctgcggaagtcctaaacaagcatagtctgagcggaagaccactgaaagtcaaagaagatcctgatggtgaacatgccaggagagcaatgcaaaaggtgatggctacgactggtgggatgggtatgggaccaggtggcccaggaatgattactatcccacccagtatcctaaataatcccaacatcccaaatgagattatccatgcattacaggctggaagacttggaagcacagtatttgtagcaaatctggattataaagttggctggaagaaactgaaggaagtatttagtatggctggtgtggtggtccgagcagacattcttgaagataaagatggaaaaagtcgtggaataggcactgttacttttgaacagtccattgaagctgtgcaagctatatctatgttcaatggccagctgctatttgatagaccaatgcacgtcaagatggatgagagggccttaccaaaaggagatttcttccctcctgagcgtccacaacaacttccccatggccttggtggtattggcatggggttaggaccaggagggcaacccattgatgccaatcacctgaataaaggcatcggaatgggaaacataggtcccgcaggaatgggaatggaaggcataggatttggaataaataaaatgggaggaatggaggggccctttggtggtggtatggaaaacatgggtcgatttggatctgggatgaacatgggcaggataaatgaaatcctaagtaatgcactgaagagaggagagatcattgcaaagcagggaggaggtggaggtggaggaagcgtccctgggatcgagaggatgggtcctggcattgaccgcctcgggggtgccggcatggagcgcatgggcgcgggcctgggccacggcatggatcgcgtgggctccgagatcgagcgcatgggcctggtcatggaccgcatgggctccgtggagcgcatgggctccggcattgagcgcatgggcccgctgggcctcgaccacatggcctccagcattgagcgcatgggccagaccatggagcgcattggctctggcgtggagcgcatgggtgccggcatgggcttcggccttgagcgcatggccgctcccatcgaccgtgtgggccagaccattgagcgcatgggctctggcgtggagcgcatgggccctgccatcgagcgcatgggcctgagcatggagcgcatggtgcccgcaggtatgggagctggcctggagcgcatgggccccgtgatggatcgcatggccaccggcctggagcgcatgggcgccaacaatctggagcggatgggcctggagcgcatgggcgccaacagcctcgagcgcatgggcctggagcgcatgggtgccaacagcctcgagcgcatgggccctgccatgggcccggccctgggcgctggcattgagcgcatgggcctggccatgggtggcggtggcggtgccagctttgaccgtgccatcgagatggagcgtggcaacttcggaggaagcttcgcaggttcctttggtggagctggaggccatgctcctggggtggccaggaaggcctgccagatatttgtgagaaatctgccattcgatttcacatggaagatgctaaaggacaaattcaacgagtgcggccacgtgctgtacgccgacatcaagatggagaatgggaagtccaaggggtgtggcgtggttaagttcgagtcgccagaggtggccgagagagcctgccggatgatgaatggcatgaagctgagtggccgagagattgacgttcgaattgatagaaacgcttaagcagttgccttttttaaacatcgatacgagacctctgaatttgtattttttcttgttaaccattttaatttgttggctggatgtataaagatgtttaaaaaattcagttgctttttggggtaatttgaattacttttttaatgactggggttccatttgactgtttgcattgagattgcaatgtgcgcaattttttttgtagttgtggcatcttgttgacatcgaatatgactttgataataaataccggttcctgaaaaaaaaaaaaaaaaaaaaaaaa

SEQ ID NO: 978 - DNA, 6846 bp, Homo sapiens
ctcgcgccaggcgagtctccgcgtctccctcgcgaactcggtgaaaggaattggcgccgttcgacaccaggcggatccgctctgcagcacgaacccatctccagccgcagccgcagccgccgcccgggccgaggagcagccgcagcagccgccaccagtggccgagtgagcggagccgagtttgaggcagcgcctagcggtgaatcggggccctcaccatgagttcctcgcctgttaatgtaaaaaagctgaaggtgtcggagctgaaagaggagctcaagaagcgacgcctttctgacaagggtctcaaggccgagctcatggagcgactccaggctgcgctggacgacgaggaggccgggggccgccccgccatggagcccgggaacggcagcctagacctgggcggggattccgctgggcgctcgggagcaggcctcgagcaggaggccgcggccggcggcgatgaagaggaggaggaagaggaagaggaggaggaaggaatctccgctctggacggcgaccagatggagctaggagaggagaacggggccgcgggggcggccgactcgggcccgatggaggaggaggaggccgcctcggaagacgagaacggcgacgatcagggtttccaggaaggggaagatgagctcggggacgaagaggaaggcgcgggcgacgagaacgggcacggggagcagcagcctcaaccgccggcgacgcagcagcaacagccccaacagcagcgcggggccgccaaggaggccgcggggaagagcagcggccccacctcgctgttcgcggtgacggtggcgccgcccggggcgaggcagggccagcagcaggcgggaggtaagaagaaggcggaaggcggcggaggcggcggtcgccccggggctccggcggcgggggacggcaaaacagaacagaaaggcggagataaaaagaggggtgttaaaagaccacgagaagatcatggccgtggatattttgagtacattgaagagaacaagtatagcagagccaaatctcctcagccacctgttgaagaagaagatgaacacttcgatgacacagtggtttgtcttgatacttataattgtgatctacattttaaaatatcaagagatcgtctcagtgcttcttcccttacaatggagagttttgcttttctttgggctggaggaagagcatcctatggtgtgtcaaaaggcaaagtgtgttttgagatgaaggttacagagaagatcccagtaaggcatttatatacaaaagatattgacatacatgaagttcgtattggctggtcactaactacaagtggaatgttacttggtgaagaagaattttcttatgggtattctctaaaaggaataaaaacatgcaactgtgagactgaagattatggagaaaagtttgatgaaaatgatgtgattacatgttttgctaactttgaaagtgatgaagtagaactctcgtatgctaagaatggacaagatcttggcgttgccttcaaaatcagtaaggaagttcttgctggacggccactgttcccgcatgttctctgccacaactgtgcagttgaatttaattttggtcagaaggaaaagccatattttccaatacctgaagagtatactttcatccagaacgtccccttagaggatcgagttagaggaccaaaggggcctgaagagaagaaagattgtgaagttgtgatgatgattggcttgccaggagctggaaaaactacctgggttactaaacatgcagcagaaaatccagggaaatataacattcttggcacaaatactattatggataagatgatggtggcaggttttaagaagcaaatggcagatactggaaaactgaacacactgttgcagagagccccccagtgtcttgggaaatttattgagattgctgcccgaaagaagcgaaattttattctggatcagacaaatgtgtctgctgctgcccagaggagaaaaatgtgcctgtttgcaggcttccagcgaaaagctgttgtagtttgcccaaaagatgaagactataagcaaagaacacagaagaaagcagaagtagaggggaaagacctaccagaacatgcggtcctcaaaatgaaaggaaactttaccctcccagaggtagctgagtgctttgatgaaataacctatgttgaacttcagaaggaagaagcccaaaaactcttggagcaatataaggaagaaagcaaaaaggctcttccaccagaaaagaaacagaacactggctcaaagaaaagcaataaaaataagagtggcaagaaccagtttaacagaggtggtggccatagaggacgtggaggattcaatatgcgtggtggaaatttcagaggaggagcccctgggaatcgtggcggatataataggaggggcaacatgccacagagaggtggtggcggtggaggaagtggtggaatcggctatccataccctcgtgcccctgtttttcctggccgtggtagttactcaaacagagggaactacaacagaggtggaatgcccaacagagggaactacaaccagaacttcagaggacgaggaaacaatcgtggctacaaaaatcaatctcagggctacaaccagtggcagcagggtcaattctggggtcagaagccatggagtcagcattatcaccaaggatattattgaatacccaaataaaacgaactgatacatatttctccaaaaccttcacaagaagtcgactgttttctttagtaggctaactttttaaacattccacaagaggaagtgcctgcgggttccttttttagaagctttgtgggttgattttttttcttttcttttttgtacatttttaattgcagtttaaaagtgaatcgtaagagaacctcagcattgtgcacgataagagaatgtgtcagtatttcagggttctacattttatctgtaaaatgtgacttttttttttttttatcacaacagaagtaaaatgttgctttgtacctggtgtcttttattaagaatttactccccccatttctcacagagaataacagtcgggagtcattgtcacaatataatagaaatgttagcaaccagattcatgtaaggactaagtggtcctcatgaattgcattaagactctgtactgctcatattacactccatcctctctgtagtttgctgggtagtggagggggtaagctaaatcatagtttctgacaataactgggaaggttttttcttaaaataacaatggaattggtataattgggattgaaaactaaaacttggaactaagatagagaagatggagtgtatgtagaagggctgttaaaaatgtaaaacttggttgcattatttgtggaggctcaaacttgtgaaggttaataccataatttttccatttgttctgcattttgattctgaaaagaaagctggctttgcccatttcttattaaaaaaacttgttgtaaatccagttgtctaatgggatctatatgaagttagccatgtctgtatgcccttctcccacaaaatactgtataactagtgtgcttgtagtagttaactccaccatctttgtaagctaatgaaattgtgagtcacccatttatatcttaatttttaatcatgtcagttcttgaatgggtatctccttagcctgctgatttctttttctttctaaagaaagtgggtggagaaattaatttagacgtttgtttgcaataaaaagaattcattttactcttgttttgggattctcgccatcaaggttcaaaatccctttatataactcccaagaggagaaatttattaagtgtgtgctttctggacagcttattctttactctgcatagaacatttaggttttaaaaacttaaatgtatactgacaattgatacataattatgaagtaaagttgaattcttcccttcccctcccccccagacaacttttaacatatttaatgaggggaaaaggtactggctgggagaagttaacactgagtttatcatctttacagaatgctaatgctgtcctcaactgattattttatatacatatatatgatacatgaaactctgggatcagatgcttttagaagccatcatgcaagccagtcattgatgtcactgctacacaacactgctaacttgactgtagctatgtaataacattagatcccctaattgtaattatattgggtttgcacagaacactttaatcttcccctcaccaatgtgaagtgaggaatcaggagtcaaactgtagaactaaaatttgacttcagtctagcgtttccttggtgtttttaggttgctttggtaagtttaggtttgctatatttctgattgcttagaattttgttttagccctttaaaatcagatcataaatatgaattcatacttctaaggaattttcttgctataagctggagtttaggtgatgtataggttcagttgagacatttttggaacaggcaaatccttagttaacataagatatttaacagttgaagatagtgtcatggatttttatcttttttagcaagtaatgctaagaaccactggcctgagctactactcttcagtatacattattaggattgcatagacttactagaggaacagtttcaggttttgatgctaatcagtgttgtgtcctaaagttgtcctttgtgcctttaaaaagttttggatatatcttctagtttaaaattgcttattaaggaattcattttataattgcagtgggaaagtaatggtcaagtaacactaggtagactatcatgcctgtttagcccagagaatttggggggagagagaatagataaaaatggcacccagaaaaatgttaaaatctttagtcaagactagaattaatacaattgtctacacttgtatggcagaaataaccttataaagtgtttaaggaattcagagaagggaatgtaccaaataagcaacagggagaaaattaggtaagaagtaagatacgaacgagaaacctgatttattgctcatccttcccttgcctccctaatggcaagcaaaactctgaacatctgaaaaggatgtagttctggacaaatcctgactacccagaggaaactcactgtgagattgctgttgatttgaagggtgctttcactaaggttatattttaaagtagaataacacatgctgagtgtaaactggctttggattggtcagctgcagtagtacaaaaacagcatagaatttgagaaaactaaaactgctatgagatagctatgagaaaactaaaactgctatgagatagaaatgatgtaaaattatgtggaaagttttccctcatatactcacatacagcctttgaagggctctggctctgaccggttgatggccttgagcgagatgaaatcatgaaattgagtcaaatcaatttgacattgaaatgacaagaggaaactcttaaatacataaaaacaagctctcatttgcctaggatagatactgtcttaaaaataaagactgaacctagatgttctgagcactagcaacaaggtattttaacaagtttaaaggaattctctgaaaaagttataaaattattctaggaaacataaccataatagtgttttaagggactttcacctggggattttatattcatgaacagagtgtattctgtatttaaaatgtctcatttgtgggaattggatgacatgttttttgataaatttattcacaatataaattgactttttattctaggaccatgtgaataatgggttccattgcacaaatacaaatattttaatagcttcttaggcagtggtgtagacatcttggatataaataattgtagatcttgtatatttgatttttaaaaaactagaataaacagagaggcataaacatatcttagagtccaagtggtagtgtttagcattggatataataaatggatgttttacaaagtgtttccataattctcttcctatacataaatgtcttgttttcaaaagtggatggaacttggctgggtgtggtggctcacgcctgtaatcctagcactttgggaggccaaggcgggaggatcacttgagctcaggagtttgagaccatcctgggcaacatagtgagacctggtctcttgaaaaaaaaaaagtggatggaacttgtagcagagaattttatctacttctcaacctgcttcagaatacccatttgagatgttcccctggaaagatgaacacaatactgcatctgaagccatttcttcccacctaacattcttaaaatgattagagtctaaactttgtcattcattcctaattctggagctctgaggttgaggtgttcagagtttggtgaataattgggtttaagttttaacattttagtaataataaaagcaaacacatacatgttaaggcctgacaataggttgcaatacccatgcattgggactcatacccagcataaatggtgagggactgaacattagtgctttgagcaagaattggttaactacctgagatctctaaaacagtaatttgaattactaatacataaaccacaagtctcttcgaattgttaattgcctaaatttaccctaaaacttagttaacgctgcagtgcctttattaaagcttttttttgggggggggtgtgggcacagctactccataactttaaattttaaagcatgaaggtgatctagctagtgttagtgcttgagttggtagttacataggctgctcttgaatcgtcctgttttctttgcctagtattagcaccacaggtacatatttgtaaaataagcattaaaagtactttgtccagc

SEQ ID NO: 979 - DNA, 6789 bp, Homo sapiens
ctcgcgccaggcgagtctccgcgtctccctcgcgaactcggtgaaaggaattggcgccgttcgacaccaggcggatccgctctgcagcacgaacccatctccagccgcagccgcagccgccgcccgggccgaggagcagccgcagcagccgccaccagtggccgagtgagcggagccgagtttgaggcagcgcctagcggtgaatcggggccctcaccatgagttcctcgcctgttaatgtaaaaaagctgaaggtgtcggagctgaaagaggagctcaagaagcgacgcctttctgacaagggtctcaaggccgagctcatggagcgactccaggctgcgctggacgacgaggaggccgggggccgccccgccatggagcccgggaacggcagcctagacctgggcggggattccgctgggcgctcgggagcaggcctcgagcaggaggccgcggccggcggcgatgaagaggaggaggaagaggaagaggaggaggaaggaatctccgctctggacggcgaccagatggagctaggagaggagaacggggccgcgggggcggccgactcgggcccgatggaggaggaggaggccgcctcggaagacgagaacggcgacgatcagggtttccaggaaggggaagatgagctcggggacgaagaggaaggcgcgggcgacgagaacgggcacggggagcagcagcctcaaccgccggcgacgcagcagcaacagccccaacagcagcgcggggccgccaaggaggccgcggggaagagcagcggccccacctcgctgttcgcggtgacggtggcgccgcccggggcgaggcagggccagcagcaggcgggaggggacggcaaaacagaacagaaaggcggagataaaaagaggggtgttaaaagaccacgagaagatcatggccgtggatattttgagtacattgaagagaacaagtatagcagagccaaatctcctcagccacctgttgaagaagaagatgaacacttcgatgacacagtggtttgtcttgatacttataattgtgatctacattttaaaatatcaagagatcgtctcagtgcttcttcccttacaatggagagttttgcttttctttgggctggaggaagagcatcctatggtgtgtcaaaaggcaaagtgtgttttgagatgaaggttacagagaagatcccagtaaggcatttatatacaaaagatattgacatacatgaagttcgtattggctggtcactaactacaagtggaatgttacttggtgaagaagaattttcttatgggtattctctaaaaggaataaaaacatgcaactgtgagactgaagattatggagaaaagtttgatgaaaatgatgtgattacatgttttgctaactttgaaagtgatgaagtagaactctcgtatgctaagaatggacaagatcttggcgttgccttcaaaatcagtaaggaagttcttgctggacggccactgttcccgcatgttctctgccacaactgtgcagttgaatttaattttggtcagaaggaaaagccatattttccaatacctgaagagtatactttcatccagaacgtccccttagaggatcgagttagaggaccaaaggggcctgaagagaagaaagattgtgaagttgtgatgatgattggcttgccaggagctggaaaaactacctgggttactaaacatgcagcagaaaatccagggaaatataacattcttggcacaaatactattatggataagatgatggtggcaggttttaagaagcaaatggcagatactggaaaactgaacacactgttgcagagagccccccagtgtcttgggaaatttattgagattgctgcccgaaagaagcgaaattttattctggatcagacaaatgtgtctgctgctgcccagaggagaaaaatgtgcctgtttgcaggcttccagcgaaaagctgttgtagtttgcccaaaagatgaagactataagcaaagaacacagaagaaagcagaagtagaggggaaagacctaccagaacatgcggtcctcaaaatgaaaggaaactttaccctcccagaggtagctgagtgctttgatgaaataacctatgttgaacttcagaaggaagaagcccaaaaactcttggagcaatataaggaagaaagcaaaaaggctcttccaccagaaaagaaacagaacactggctcaaagaaaagcaataaaaataagagtggcaagaaccagtttaacagaggtggtggccatagaggacgtggaggattcaatatgcgtggtggaaatttcagaggaggagcccctgggaatcgtggcggatataataggaggggcaacatgccacagagaggtggtggcggtggaggaagtggtggaatcggctatccataccctcgtgcccctgtttttcctggccgtggtagttactcaaacagagggaactacaacagaggtggaatgcccaacagagggaactacaaccagaacttcagaggacgaggaaacaatcgtggctacaaaaatcaatctcagggctacaaccagtggcagcagggtcaattctggggtcagaagccatggagtcagcattatcaccaaggatattattgaatacccaaataaaacgaactgatacatatttctccaaaaccttcacaagaagtcgactgttttctttagtaggctaactttttaaacattccacaagaggaagtgcctgcgggttccttttttagaagctttgtgggttgattttttttcttttcttttttgtacatttttaattgcagtttaaaagtgaatcgtaagagaacctcagcattgtgcacgataagagaatgtgtcagtatttcagggttctacattttatctgtaaaatgtgacttttttttttttttatcacaacagaagtaaaatgttgctttgtacctggtgtcttttattaagaatttactccccccatttctcacagagaataacagtcgggagtcattgtcacaatataatagaaatgttagcaaccagattcatgtaaggactaagtggtcctcatgaattgcattaagactctgtactgctcatattacactccatcctctctgtagtttgctgggtagtggagggggtaagctaaatcatagtttctgacaataactgggaaggttttttcttaaaataacaatggaattggtataattgggattgaaaactaaaacttggaactaagatagagaagatggagtgtatgtagaagggctgttaaaaatgtaaaacttggttgcattatttgtggaggctcaaacttgtgaaggttaataccataatttttccatttgttctgcattttgattctgaaaagaaagctggctttgcccatttcttattaaaaaaacttgttgtaaatccagttgtctaatgggatctatatgaagttagccatgtctgtatgcccttctcccacaaaatactgtataactagtgtgcttgtagtagttaactccaccatctttgtaagctaatgaaattgtgagtcacccatttatatcttaatttttaatcatgtcagttcttgaatgggtatctccttagcctgctgatttctttttctttctaaagaaagtgggtggagaaattaatttagacgtttgtttgcaataaaaagaattcattttactcttgttttgggattctcgccatcaaggttcaaaatccctttatataactcccaagaggagaaatttattaagtgtgtgctttctggacagcttattctttactctgcatagaacatttaggttttaaaaacttaaatgtatactgacaattgatacataattatgaagtaaagttgaattcttcccttcccctcccccccagacaacttttaacatatttaatgaggggaaaaggtactggctgggagaagttaacactgagtttatcatctttacagaatgctaatgctgtcctcaactgattattttatatacatatatatgatacatgaaactctgggatcagatgcttttagaagccatcatgcaagccagtcattgatgtcactgctacacaacactgctaacttgactgtagctatgtaataacattagatcccctaattgtaattatattgggtttgcacagaacactttaatcttcccctcaccaatgtgaagtgaggaatcaggagtcaaactgtagaactaaaatttgacttcagtctagcgtttccttggtgtttttaggttgctttggtaagtttaggtttgctatatttctgattgcttagaattttgttttagccctttaaaatcagatcataaatatgaattcatacttctaaggaattttcttgctataagctggagtttaggtgatgtataggttcagttgagacatttttggaacaggcaaatccttagttaacataagatatttaacagttgaagatagtgtcatggatttttatcttttttagcaagtaatgctaagaaccactggcctgagctactactcttcagtatacattattaggattgcatagacttactagaggaacagtttcaggttttgatgctaatcagtgttgtgtcctaaagttgtcctttgtgcctttaaaaagttttggatatatcttctagtttaaaattgcttattaaggaattcattttataattgcagtgggaaagtaatggtcaagtaacactaggtagactatcatgcctgtttagcccagagaatttggggggagagagaatagataaaaatggcacccagaaaaatgttaaaatctttagtcaagactagaattaatacaattgtctacacttgtatggcagaaataaccttataaagtgtttaaggaattcagagaagggaatgtaccaaataagcaacagggagaaaattaggtaagaagtaagatacgaacgagaaacctgatttattgctcatccttcccttgcctccctaatggcaagcaaaactctgaacatctgaaaaggatgtagttctggacaaatcctgactacccagaggaaactcactgtgagattgctgttgatttgaagggtgctttcactaaggttatattttaaagtagaataacacatgctgagtgtaaactggctttggattggtcagctgcagtagtacaaaaacagcatagaatttgagaaaactaaaactgctatgagatagctatgagaaaactaaaactgctatgagatagaaatgatgtaaaattatgtggaaagttttccctcatatactcacatacagcctttgaagggctctggctctgaccggttgatggccttgagcgagatgaaatcatgaaattgagtcaaatcaatttgacattgaaatgacaagaggaaactcttaaatacataaaaacaagctctcatttgcctaggatagatactgtcttaaaaataaagactgaacctagatgttctgagcactagcaacaaggtattttaacaagtttaaaggaattctctgaaaaagttataaaattattctaggaaacataaccataatagtgttttaagggactttcacctggggattttatattcatgaacagagtgtattctgtatttaaaatgtctcatttgtgggaattggatgacatgttttttgataaatttattcacaatataaattgactttttattctaggaccatgtgaataatgggttccattgcacaaatacaaatattttaatagcttcttaggcagtggtgtagacatcttggatataaataattgtagatcttgtatatttgatttttaaaaaactagaataaacagagaggcataaacatatcttagagtccaagtggtagtgtttagcattggatataataaatggatgttttacaaagtgtttccataattctcttcctatacataaatgtcttgttttcaaaagtggatggaacttggctgggtgtggtggctcacgcctgtaatcctagcactttgggaggccaaggcgggaggatcacttgagctcaggagtttgagaccatcctgggcaacatagtgagacctggtctcttgaaaaaaaaaaagtggatggaacttgtagcagagaattttatctacttctcaacctgcttcagaatacccatttgagatgttcccctggaaagatgaacacaatactgcatctgaagccatttcttcccacctaacattcttaaaatgattagagtctaaactttgtcattcattcctaattctggagctctgaggttgaggtgttcagagtttggtgaataattgggtttaagttttaacattttagtaataataaaagcaaacacatacatgttaaggcctgacaataggttgcaatacccatgcattgggactcatacccagcataaatggtgagggactgaacattagtgctttgagcaagaattggttaactacctgagatctctaaaacagtaatttgaattactaatacataaaccacaagtctcttcgaattgttaattgcctaaatttaccctaaaacttagttaacgctgcagtgcctttattaaagcttttttttgggggggggtgtgggcacagctactccataactttaaattttaaagcatgaaggtgatctagctagtgttagtgcttgagttggtagttacataggctgctcttgaatcgtcctgttttctttgcctagtattagcaccacaggtacatatttgtaaaataagcattaaaagtactttgtccagc

SEQ ID NO: 980 - DNA, 1972 bp, Homo sapiens
cgcgcctggcggcggtggcggcagtggcagcagtggcagccgcgcagccccgcggaatggagcggcgccggggctgagccgggcgcgcacgggccgccgcatgtgccgcgcggggagcggctgccgagcgggcggagagcgagcgcgagaggccccgtcggagcggccgccggagcagcgccggagatgggagaacagcccatcttcaccacccgagcgcatgtcttccagattgaccccaacaccaagaagaactggatgcctgcgagcaagcaggcggtcaccgtttcctacttctatgatgtcacaaggaacagctatcggatcatcagtgtggacggagccaaggtgatcataaacagcacaatcacaccgaatatgaccttcaccaaaacgtcacagaagtttgggcagtgggccgacagcagagccaacacagtgtttggtttggggttttcctctgagcagcagctgacaaagtttgcagagaaattccaggaggtgaaagaagctgccaagatagccaaagacaagacgcaggagaaaatcgagacctcaagtaatcattcccaagcatccagtgtcaacgggacggacgatgaaaaggcctctcacgccggtccagccaacacacacctgaagtctgagaatgacaagctgaagattgccttgacgcagagcgcagccaacgtgaagaagtgggagatcgagctgcagacccttcgggagagcaatgcacggctgaccacagcactgcaggagtcggcagccagtgtggagcagtggaagaggcagttctccatctgccgtgatgagaatgaccggctccgcaacaagattgatgagctggaagaacaatgcagtgagatcaacagagagaaggagaagaacacgcagctgaagaggaggatcgaggagctggaggcagagctccgagaaaaggagacagagctgaaagatctccgaaaacaaagtgaaatcatacctcagctcatgtcagagtgcgaatatgtctctgagaagctagaggcggcagagagagacaatcaaaacctggaagacaaagtgcgttccttaaagacagacattgaggagagcaaataccgacagcgccacctgaaggtggagttgaagagcttcctggaggtgctggacgggaagattgacgacctgcatgacttccgccgagggctctccaagctgggcaccgataactagggctggccgaggcccaggccccgcccgtgagtcccaagcgtgtgtgcgagaccagatagctctaggacgttcttctgtgtgcattgcttctgtaaatgcaggcgcagtttgtcgtgtttccaaaccagttgtgccgtccactcactccttttcagaatagaaatctcctctcgcttctctggccttgtgaggttgtggacaactggaagattctgactcaggaatccagaactaggtctaccttcaacatttatgcagtcagggcagggatgtttatatctttcataagggctgttgcaaccatatgaactgaaaaaacacgcattttgtaatccaaatattgatattctttacaccaagccatcaggctccttttatcaaatagcattcagagtatttgaatgtccaccagacaccagccccggggggcacagagagaacaacattcctctctgtcaacatcgagaggctttaaaacaactgtttagtggaaactttctgagagatggaaaacaagcttctggtgggtgcattttctggcccggagttgcctgcatccacgctactgccccctgccccccgcccccccagtttgtacggttgcaacagtgttccttttcttggttttaatttctgagcagatgattgtgctgtgggaacagcacacagtgagggtgcctagcacaatgtctggcacaaagtaggtgcttaataaatatttgttcaattaaaaaaaaaaaaaaaaaaaaaaaaa

SEQ ID NO: 981 - DNA, 2648 bp, Homo sapiens
taatcgtattcagcatgttttgcacaagaaatgtcagccagaaagggctatctgctcccttcgccaaattatcccacaacaatgtcatgctcggagagccccgccgcgaactcttttttggtcgactcgctcatcagctcgggcagaggcgaggcaggcggcggtggtggtggcgcggggggcggcggcggtggcggttactacgcccacggcggggtctacctgccgcccgccgccgacctgccctacgggctgcagagctgcgggctcttccccacgctgggcggcaagcgcaatgaggcagcgtcgccgggcagcggtggcggtggcgggggtctaggtcccggggcgcacggctacgggccctcgcccatagacctgtggctagacgcgccccggtcttgccggatggagccgcctgacgggccgccgccgccgccccagcagcagccgccgcccccgccgcaaccaccccagccagcgccgcaggccacctcgtgctctttcgcgcagaacatcaaagaagagagctcctactgcctctacgactcggcggacaaatgccccaaagtctcggccaccgccgccgaactggctcccttcccgcggggcccgccgcccgacggctgcgccctgggcacctccagcggggtgccagtgcctggctacttccgcctttctcaggcctacggcaccgccaagggctatggcagcggcggcggcggcgcgcagcaactcggggctggcccgttccccgcgcagcccccggggcgcggtttcgatctcccgcccgcgctagcctccggctcggccgatgcggcccggaaggagcgagccctcgattcgccgccgccccccacgctggcttgcggcagcggcgggggctcgcagggcgacgaggaggcgcacgcgtcgtcctcggccgcggaggagctctccccggccccttccgagagcagcaaagcctcgccggagaaggattccctgggcaattccaaaggtgaaaacgcagccaactggctcacggcaaagagtggtcggaagaagcgctgcccctacacgaagcaccagacactggagctggagaaggagtttctgttcaatatgtaccttactcgagagcggcgcctagagattagccgcagcgtccacctcacggacagacaagtgaaaatctggtttcagaaccgcaggatgaaactgaagaaaatgaatcgagaaaaccggatccgggagctcacagccaactttaatttttcctgatgaatctccaggcgacgcggttttttcacttcccgagcgctggtcccctccctctgtcttcaggctctgcccaggaactcgcacctgtgctggagccctgttcctccctcccacactcgccatctcctgggccgttacatctgtgcagggctggtttgttctgactttttgtttctttgtgtttgcttggtgctggtttatttgttgttttctgggggaaaaagccatatcatgctaaaattctatagagatagatattgtcctaagtgtcaagtcctgactgggctgggtttgctgtcttggggtcccactgctcgaaatggcccctgtcttcggccgagctggtttcctgcccagcctggggcaaacctagccggaaggccgaggtcccattgttggcgctgaggtgtctggcctgaggtcaatggtgcaaaggagccgccaccgggcatgtctgcctggagtgctgtgctgtgtttaatcaggggatacaggcccctgggtttcttttttctttcttcctttcttccttggccaagagaagggcttacaggcatggacatgcaggttggcaaacgggcttgactttggctgatttaaaaagtgagaaagaaagtaaaaaaggttaatttttccttcctctgtaagatatcccagctttaaaaagaaaaaaaaagaattaccaagagaaggggacttctcttccagtttctgtaaggtcttacattgcctgactaaaatgtttcatttacctctaaatttccatatccttctggctgtagataaataatgtagttttgtttatgcatttggaattagtggatttttttgtcattaaaattgttaccactggtaacatgtgacaagcacaccacaattctccctatcttgtgaagttgtttttttaaatcgccttgaacaaaaagttttttttttgtttgtttttgctttctgaaattcacagaagcctaggaggactggggtaagcggaataaactagagaagggagacattgtttggatttcctttatactgtgaagttacatgcataaaagggtcaaacctgtagatgcagaaaaagaaaaaaactataaatacaaatctgtataaatgtctattattatgaagaattgccaatcttgttttaagcaaatgcattctatcgttattataaatgttagttctagctctatttacttctaatcttaaatcagaataaattaatattgtattgctgctgtgcgtggaaaaagacgatgtttatgttcttatagaataaaagctgtggaatgaagctttttaattttaaaaaaaaaaaaaaaaaaaaaaaaaaaaaaaaaaaaaaaaaaaaaaaaaaaaaaaaaaaaaaaaaaaaaaaaaaaaaa

SEQ ID NO: 982 - DNA, 1728 bp, Homo sapiens
aaaacgacaacgcgagaaaaattagtatttttgcacttcacaaattaatgaccatgagctcgtttttgataaactccaactacatcgagcccaagttccctcccttcgaggagtacgcgcagcacagcggctcgggcggcgcagacggcggcccgggcgggggccccggctaccagcagcccccagcgcccccgacccagcacctgccgctgcagcagccccagctccctcacgcgggcggcggccgagagcccactgcctcctactacgcgccgcggaccgcccgcgagcccgcctaccctgctgccgcgctgtaccccgcgcatggggccgcggacaccgcctacccctatggctaccgcggcggcgccagccccgggcggccgccccagcccgagcagcccccggcgcaagccaagggcccagcgcacggcctgcatgcgagccacgtcctgcagccccagctgccgccgcccctgcagcctcgcgccgtgcccccagcggccccgcggcgctgcgaggcggcccccgccaccccaggcgtcccggcagggggcagcgcccccgcgtgcccgctgctcttggccgacaagagcccgctgggcctgaagggcaaggagcccgtggtgtacccctggatgaagaagatccatgtcagcgccgttaaccccagttataacggaggggagcctaagcgctctcgaaccgcctacacccggcagcaggtcttggagctggagaaggagttccacttcaatcgatacctgacccggcggcgccgcatcgagatcgcccacacgctctgtttgtctgagcgccaggtcaagatctggtttcagaaccggaggatgaagtggaagaaagaccacaaactgcccaacaccaagatgcgatcctccaattcggcctcggcctctgccggcccaccagggaaagcacaaactcagagcccacacctccatccccacccccacccgagcacctccacacccgttccctcctccatataatcttctagagatcttaaccagtttctatcccttacctgcttttctcttctcttctcctgctccgttcctcatccacccctccccatctggaccataatagacaccaaaacaaacccaaattggtgaaaagaataatcaaaaagaagacattatccggttaagagtctgtgctggttgccacccaagagagaacagttgtccaggatgctggctggtggaacaacctgctggcccgaaacaaggctgccaggtgtggatacctgagaaggactacttggtatcaaatacttttgagatggctacagtcagctagctggacagcccatgctgagtggggacatacacttgcatctttgttgaaagcagaagaagacagaccctttccccaccttccttacctcctcttcccccattaaggcagctcatccaagcttgtatttaactgaataaatgagtagacattgtggacctcacaagattatttaattcttaagatgtgtagaccttgatggtaggtgtgacatgttagtttttcttacttgcatttatttaagacactgttacagagatactgttgtccccttctggggcacggtctttggggagaggggagtgcatttagacttatgtggaactgtacaaattgtgatgtggctacatagaaagccatgtgctaagaataaactccatttaaaaaacattaaaaatctaagattca

SEQ ID NO: 983 - DNA, 1991 bp, Homo sapiens
gccgagcggagaggccgcccattggccggccagcgccacgtggccgcccccgccggtatattaggccactatttacctccggctcactcgccatgggttggagagggcagctcgggtagagagggctggcggagcggcgcagacggcggcagtcctgctcagcctctgcccggctccgtactccggccccggcctgcgccctcagaaaggtggggcccgaaccatgagctcctacctggagtacgtgtcatgcagcagcagcggcggggtcggcggcgacgtgctcagcttggcacccaagttctgccgctccgacgcccggcccgtggctctgcagcccgccttccctctgggcaacggcgacggcgccttcgtcagctgtctgcccctggccgccgcccgaccctcgccttcgcccccggccgcccccgcgcggccgtccgtaccgcctccggccgcgccccagtacgcgcagtgcaccctggagggggcctacgaacctggtgccgcacctgccgcggcagctgggggcgcggactacggcttcctggggtccgggccggcgtacgacttcccgggcgtgctggggcgggcggccgacgacggcgggtctcacgtccactacgccacctcggccgtcttctcgggcggcggctctttcctcctcagcggccaggtggattacgcggccttcggcgaacccggcccttttccggcttgtctcaaagcgtcagccgacggccaccctggtgctttccagaccgcatccccggccccaggcacctaccccaagtccgtctctcccgcctccggcctccctgccgccttcagcacgttcgagtggatgaaagtgaagaggaatgcctctaagaaaggtaaactcgccgagtatggggccgctagcccctccagcgcgatccgcacgaatttcagcaccaagcaactgacagaactggaaaaagagtttcatttcaataagtacttaactcgagcccggcgcatcgagatagccaactgcttgcacctgaatgacacgcaagtcaaaatctggttccagaaccgcaggatgaaacagaagaaaagggaacgagaagggcttctggccacggccattcctgtggctcccctccaacttcccctctctggaacaacccccactaagtttatcaagaaccccggcagcccttctcagtcccaagagccttcgtgaggccggtacttggggccgaaaaactgtggcctgcagaagtcccaggcgacccccatccctatctagacttaggagctcagtttgggatggaggtgggagaacaaaaatgaatagggatttcacttgggaaatgaagtactttagttggcttccgagttccagactatatgtccagatattaattgactgtcttgtaagccacttgtttggttatgatttgtgtcttatcagggaaaaggtgcccagctgccagcccagctccgctgctatctttgcctcacttagtcatgtgcaattcgcgttgcagagtggcagaccattagttgctgagttctgtcagcactctgatgtgctcagaagagcacctgcccaaagtttttctggttttaatttaaaggacaaggctacatatattcagctttttgagatgaccaaagctagttagggtctccttgatgtagctaagctgcttcagtgatcttcacatttgcactccagtttttttttctttaaaaaagcggtttctacctctctatgtgcctgagtgatgatacaatcgctgtttagttactagatgaacaaatccacagaatgggtaaagagtagaatctgaactatatcttgacaaatattattcaaacttgaatgtaaatatatacagtatgtatattttttaaaaagatttgcttgcaatgaccttataagtgacatttaatgtcatagcatgtaaagggttttttttgtaataaaaattatagaatctgcaaaaaaaaaaaaaaaa

SEQ ID NO: 984 - DNA, 2592 bp, Homo sapiens
ggctgcaccatgcacgtgaacggcaaagtggcgctggtgaccggcgcggctcagggcataggcagagcctttgcagaggcgctgctgcttaagggcgccaaggtagcgctggtggattggaatcttgaagcaggtgtacagtgtaaagctgccctggatgagcagtttgaacctcagaagactctgttcatccagtgcgatgtggctgaccagcaacaactgagagacacttttagaaaagttgtagaccactttggaagactggacattttggtcaataatgctggagtgaataatgagaaaaactgggaaaaaactctgcaaattaatttggtttctgttatcagtggaacctatcttggtttggattacatgagtaagcaaaatggaggtgaaggcggcatcattatcaatatgtcatctttagcaggactcatgcccgttgcacagcagccggtttattgtgcttcaaagcatggcatagttggattcacacgctcagcagcgttggctgctaatcttatgaacagtggtgtgagactgaatgccatttgtccaggctttgttaacacagccatccttgaatcaattgaaaaagaagaaaacatgggacaatatatagaatataaggatcatatcaaggatatgattaaatactatggaattttggacccaccattgattgccaatggattgataacactcattgaagatgatgctttaaatggtgctattatgaagatcacaacttctaagggaattcattttcaagactatgatacaactccatttcaagcaaaaacccaatgaacagcttatgtgttagccatagctgaaaataagcacaaatagcttatattcagatcctatcttcatttgaatatagcttttaaatgaaatgttacagtttgaagttttccttcatgcacttggtgataaacgttttctaaatttttagttaagtatatggataaaaagttatgaactattaaaaatgtgatgtggaccaaaggctaggttgtaatcttgatagtctaaaaaatgatcaaaacaaatgattttcaaggaatattcaatattctgcctttcagaaagtgtatttatatctgtgcttcataaatattaatgttcttcagaacatcattttaaaggagatacttgaattgttatttaaatcaaaccagatgtaaaacactcacatacaagttcatactttaaaagaggaaagctacttaacaatgacaaatatttcacaataataatttttacttatataccatctttcaactgaacatttcagttcttccaagagcttcttagagtagtatattttgggggcagtcaaggaataaactacagtgtaaacatatcccagatgaaaactgctgtatggaaaaatgacagaaagtaactgattgacactgttgattcacagttcagcctcctatctgggaaagacatttctttcctctgctcactttaagaacttttaccgactccaaaaatctcaggaattaaacttttaacagttacagcaataaagaatagttagtactccaaaaatattatatttaagatgctcaacaagaaaaaaatgcaaatgtaatatttttttcaaattacttctttattgacttgtccaaatttcaaaagtgcctacccttcaataaaacttttttattctgatctccataaattacttagtcttctatgtatagctatcaaggaaataaaaccaattttgccacagccacaactgtaaatgtttttgtacccatgctgaaactcataacaacacagacataaaaatagctgtgaggttttgctttttttgttgtcagctatcttaagaatcattaaatacacctgctttgggtaaaactctttgcaagcagtaattaacactagtaacagtgaaagcacaagatttccaaatcagtcgttttctcaaaaaaatatcgtataagtgactcatcctgtctgctaactccagacctcccagcttgaagccaaatctttccatgtgagattgatatggatttcctagaagtactggaatgttgtcatatcttgccctattttaattctgctatagaaaacaattgccttcacttttaaggagtaatttgaatattaataactctggtctagattttcatataatgtattaaagacaaagtagtgaacatcaatgaacatctgatagagataaactgtaatcaggcataagcttgtttgtatgttctggcagtgactaatcagtaaatgatgtcggtttgcccagtatcacttatcttctgtatttttcctctgtcgtgtaaatagtataaccttttcatttatggacaattttttggactagtagccttcaatatacattctgctttgaattaattttttcaaatcaataaattatgtagacatttaaaatcaaatatcaagtagaattgaaaaatgtgagttacataagttaaaaacttactttaaatcttaccttctataggtagctctaaataaattcatatggttatatggcaaaaaaaaaaaaaaaaaaaaaaaaaaaaaaaaaaaaaaaaaaaaaaaaaaaaaaaa

SEQ ID NO: 985 - DNA, 1433 bp, Homo sapiens
agatgccccacagcactgctcttccagaggcaagaccaaccaagatgagtgccctgggagctgtcattgccctcctgctctggggacagctttttgcagtggactcaggcaatgatgtcacggatatcgcagatgacggctgcccgaagccccccgagattgcacatggctatgtggagcactcggttcgctaccagtgtaagaactactacaaactgcgcacagaaggagatggagtatacaccttaaatgataagaagcagtggataaataaggctgttggagataaacttcctgaatgtgaagcagatgacggctgcccgaagccccccgagattgcacatggctatgtggagcactcggttcgctaccagtgtaagaactactacaaactgcgcacagaaggagatggagtgtacaccttaaacaatgagaagcagtggataaataaggctgttggagataaacttcctgaatgtgaagcagtatgtgggaagcccaagaatccggcaaacccagtgcagcggatcctgggtggacacctggatgccaaaggcagctttccctggcaggctaagatggtttcccaccataatctcaccacaggtgccacgctgatcaatgaacaatggctgctgaccacggctaaaaatctcttcctgaaccattcagaaaatgcaacagcgaaagacattgcccctactttaacactctatgtggggaaaaagcagcttgtagagattgagaaggttgttctacaccctaactactcccaggtagatattgggctcatcaaactcaaacagaaggtgtctgttaatgagagagtgatgcccatctgcctaccttcaaaggattatgcagaagtagggcgtgtgggttatgtttctggctgggggcgaaatgccaattttaaatttactgaccatctgaagtatgtcatgctgcctgtggctgaccaagaccaatgcataaggcattatgaaggcagcacagtccccgaaaagaagacaccgaagagccctgtaggggtgcagcccatactgaatgaacacaccttctgtgctggcatgtctaagtaccaagaagacacctgctatggcgatgcgggcagtgcctttgccgttcacgacctggaggaggacacctggtatgcgactgggatcttaagctttgataagagctgtgctgtggctgagtatggtgtgtatgtgaaggtgacttccatccaggactgggttcagaagaccatagctgagaactaatgcaaggctggccggaagcccttgcctgaaagcaagatttcagcctggaagagggcaaagtggacgggagtggacaggagtggatgcgataagatgtggtttgaagctgatgggtgccagccctgcattgctgagtcaatcaataaagagctttcttttgacccattt

SEQ ID NO: 986 - DNA, 4451 bp, Homo sapiens
ccgcgggcggggccggctggcgttcacgtgacccggcgtcattggctcgctcgcggaagtagtcctacattcgcggtcagcgcggggtctccgggcgccctgcagggcgggcaggctgtgccatcccgccggacgtcgggatggtgcagctgtacaacctgcacccgttcgggtcgcagcaggtggtgccctgcaagctggagccggaccggttctgtggcggggggcgtgacgcgcttttcgtggcggcgggctgcaaggtggaggcgttcgcggtggccggccaggagctgtgccagccgcggtgcgccttctccacgctgggccgggtgttgcgcctggcctacagcgaggctggagattatttggtagcaattgaagagaaaaacaaagctacatttctacgtgcttatgtgaactggagaaataaaaggactgaaaactctcgtgtgtgtatccgaatgattgggcataatgtggagggaccattcagcaaagccttcagagaccagatgtacattattgaaatgccgctttcggaggcccccttgtgcatttcctgttgccctgtgaaaggagaccttctcgttggctgcacaaataaattagtcttatttagtttgaagtaccagatcattaatgaggaattctcactattggactttgaacgttctttaattatacacatagataatatcactcctgttgaggtttctttttgtgttggatatgttgctgtcatgtcagacttagaagtcttaatcgtaaaactggagtcaggccctaaaaatggagagagagttcaccaccatccacataagaccaacaatcgaataagacggacagaagaaggcatcagtaatgaaatttcacagcttgagtcagatgattttgtcatctgccagaagcccctggaacttcttggtgaaaaaagtgaacagtctggattatctgttacactggagtctacgggattagctgatgaaaaaagaaaatattcccactttcagcacctgctctatagacgttttgctcctgatatttcgtcctatgtcttgtctgatgacatcaagctacattccctccagctgctacccatttaccagaccggttctcttacatctgatggaaaaaatttgtctcaggaaaaagaattgctgagtctcttttgctttttctccttacctcatgtgggctatctctacatggttgtcaaatctgttgaattgatgtcagtctaccagtatcctgaaaagtctcagcaggcagtactcacgccacaatttttgcacgtcattacaagtaacaacctgcagtgtttcactgtgcggtgcagtgcggcggcagctcgtgaggaggacccgtacatggacaccaccctgaaggcttgcccacctgtcagtatggatgtctgtgctttaagaatacagcttttcataggcttgaaagccatctgtcactttaaaaaccacatcatacttttgactaaagcagaacctgaagccattccagagagaagacagtcacccaagaggcttctttcgagaaaagataccagtgttaaaatcaaaatacctcctgtagctgaggctgggtggaatttgtatattgtgaatacgatctcaccagtgcagctgtacaaagagatggtagactatagcaatacctataagactgtcaaaacccagagctgcattcaccttctcagtgaggctcatctgttagtgcgagctgccctgatggatgccagtcagctggaacctggagagaaggcagagcttttggaagcatttaaggaaagctgtgggcaccttggggactgttacagcaggcttgactcccagcattctcatctcaccttgccatactataagatgtctggtttgtctatggctgaagttctggcccgcacggactggacagtagaggatggattacagaaatacgagagaggattaatcttttacattaatcattcactttatgaaaacctggatgaagaattaaatgaagaattagcagcaaaagtggttcagatgttttatgtggctgagccaaagcaagtgccccatattctctgtagtccttctatgaagaatattaatcctttaactgccatgagctatctaaggaagctggatacttctgggttttcatcgatcttagtgacattgaccaaggcagcagtggctctgaaaatgggagatcttgacatgcacagaaatgaaatgaaaagccattcagagatgaagttggtatgtggcttcattctggaacctcggctgttgattcaacagagaaagggacagattgttccaaccgagcttgcacttcacttgaaggaaactcagcctggattgcttgtggcttcagttctgggcttgcagaagaacaacaaaattggaattgaagaagcagattccttttttaaggtgctttgtgctaaggatgaagatacaattcctcagctcttggtagacttttgggaagctcagctagtggcatgtctcccagatgtggtacttcaggaactctttttcaaactcacatcacagtacatctggagattgtctaagaggcagcctcctgacaccacaccattgcgaacatcggaggatctgataaatgcctgtagtcattatggcttaatttatccatgggttcacgtcgtaatatcatctgattctttagctgataaaaattatacagaagatctttcaaaattacagtctcttatatgtggtccttcatttgacatagcttccattattccgttcttggagccactttcagaagacactattgccggcctcagtgtccatgttctgtgtcgtacacgcttgaaagagtatgaacagtgcatagacatactgttagagagatgcccggaggcagtcattccatatgctaatcatgaactgaaagaagagaaccggactctgtggtggaaaaaactgttgcctgaactttgtcagagaataaaatgtggtggagagaagtatcaactctacctgtcatcattaaaagaaacattgtcaattgttgctgtggaactagaactgaaggatttcatgaatgttctcccagaagatggtactgcaacatttttcttgccatatcttctctattgcagtcgaaagaaaccattgacttaaaggtatcatttgaaaaataccataatggcatttgagactgaatttctaaaaattgaatgccaaagtacaagtagaggagttttttattttatatatcacacacacacacacacacacacacacacacacacacatatatgatacaaatgctttcaggctgcttaccttaccgtgtagtggtaactattcacttcttaatttatgacctcaatcaatttaattgtctagaatgtaaaaagtctttaagacataagaattcctcaaagaagccatacattttttaaggtggggattgacttttattccaaggaacaacatcagttcactgttgttggagacatgacaatcattttcatcccaagaacactttaaggaaacattttacaagtatgcttgaaagaatgtcactaactggtccagaattttatcttcttgatttttccagatttctctatgtttttgagaaagatgttaatgttttgccatggtaaaagatttcaaacctcattttttttgttccttttcttgttacttttaagaaaactcatgctctgtttctctgaatcaaatgaagtagaagtttacaaagctaactttcttcttgtctagctattaacatgatttgtcaaatgcatgtttttttcagccaaagccttgtttccatttttgttgatgtgtactcttgctcttttagctagagtgtatgtgaaaataaagaaatacatcattgtattcacaaccatgtgtcttcatttataactttttgtttaaaaaatttttagttcaagtttagttcattgatattatcctctgaatgcagttaaggctgggcagaaattctactcatgtgacatctgccacaggtctattttgaagcttttcttctaatggcaatgtttgtccttaccaggatttaatctatagaattgtctctcaactctgcttttctccagttccagataacgtccttaagaccatctgttcaggggttcacaaaactcaaatttgtgtcattctattttatttattttattttttatttccttccctcataccttgcccattccctctgaatattaggtgtgatgtcaacagcatgttagaaggatcaatgggaaggcaatgattgaaaacatttcaatgaaccttaatagtgttcctttgaggagcacccaggagaatatctggtcatagatctttttttaaatgcagttttataaaaccctaacagcggtgatatcattagactgtatgaatcagttttattacctagtgtacaagtgtcagtcatgtatc

SEQ ID NO: 987 - DNA, 3726 bp, Homo sapiens
cagcgctgctccccgggcgctcctccccgggcgctcctccccaggcctcccgggcgcttggatcccggccatctccgcacccttcaagtgggtgtgggtgatttcctggcggggggagcagccaggtgagcccaagatgctgctgcgctcgaagcctgcgctgccgccgccgctgatgctgctgctcctggggccgctgggtcccctctcccctggcgccctgccccgacctgcgcaagcacaggacgtcgtggacctggacttcttcacccaggagccgctgcacctggtgagcccctcgttcctgtccgtcaccattgacgccaacctggccacggacccgcggttcctcatcctcctgggttctccaaagcttcgtaccttggccagaggcttgtctcctgcgtacctgaggtttggtggcaccaagacagacttcctaattttcgatcccaagaaggaatcaacctttgaagagagaagttactggcaatctcaagtcaaccaggatatttgcaaatatggatccatccctcctgatgtggaggagaagttacggttggaatggccctaccaggagcaattgctactccgagaacactaccagaaaaagttcaagaacagcacctactcaagaagctctgtagatgtgctatacacttttgcaaactgctcaggactggacttgatctttggcctaaatgcgttattaagaacagcagatttgcagtggaacagttctaatgctcagttgctcctggactactgctcttccaaggggtataacatttcttgggaactaggcaatgaacctaacagtttccttaagaaggctgatattttcatcaatgggtcgcagttaggagaagattttattcaattgcataaacttctaagaaagtccaccttcaaaaatgcaaaactctatggtcctgatgttggtcagcctcgaagaaagacggctaagatgctgaagagcttcctgaaggctggtggagaagtgattgattcagttacatggcatcactactatttgaatggacggactgctaccagggaagattttctaaaccctgatgtattggacatttttatttcatctgtgcaaaaagttttccaggtggttgagagcaccaggcctggcaagaaggtctggttaggagaaacaagctctgcatatggaggcggagcgcccttgctatccgacacctttgcagctggctttatgtggctggataaattgggcctgtcagcccgaatgggaatagaagtggtgatgaggcaagtattctttggagcaggaaactaccatttagtggatgaaaacttcgatcctttacctgattattggctatctcttctgttcaagaaattggtgggcaccaaggtgttaatggcaagcgtgcaaggttcaaagagaaggaagcttcgagtataccttcattgcacaaacactgacaatccaaggtataaagaaggagatttaactctgtatgccataaacctccataatgtcaccaagtacttgcggttaccctatcctttttctaacaagcaagtggataaataccttctaagacctttgggacctcatggattactttccaaatctgtccaactcaatggtctaactctaaagatggtggatgatcaaaccttgccacctttaatggaaaaacctctccggccaggaagttcactgggcttgccagctttctcatatagtttttttgtgataagaaatgccaaagttgctgcttgcatctgaaaataaaatatactagtcctgacactgaatttttcaagtatactaagagtaaagcaactcaagttataggaaaggaagcagataccttgcaaagcaactagtgggtgcttgagagacactgggacactgtcagtgctagatttagcacagtattttgatctcgctaggtagaacactgctaataataatagctaataataccttgttccaaatactgcttagcattttgcatgttttacttttatctaaagttttgttttgttttattatttatttatttatttattttgtgacggagagagattccatctcaaaaaaacaagttattaaaaatgtatatgaatgctcctaatatggtcaggaagcaaggaagcgaaggatatattatgagttttaagaaggtgcttagctgtatatttatctttcaaaatgtattagaagattttagaattctttccttcatgtgccatctctacaggcacccatcagaaaaagcatactgccgttaccgtgaaactggttgtaaaagagaaactatctatttgcaccttaaaagacagctagattttgctgattttcttctttcggttttctttgtcagcaataatatgtgagaggacagattgttagatatgatagtataaaaaatggttaatgacaattcagaggcgaggagattctgtaaacttaaaattactataaatgaaattgatttgtcaagaggataaattttagaaaacacccaataccttataactgtctgttaatgcttgctttttctctacctttcttccttgtttcagttgggaagcttttggctgcaagtaacagaaactcctaattcaaatggcttaagcaataaggaaatgtatattcccacataactagacgttcaaacaggccaggctccagcacttcagtacgtcaccaggggatctgggttcttcccagctctctgctctgccatctttagcgctggcttcattctcagactctggtagcatgatggctgtagctgtttcatgggccccttcaaacctcatagcaaccagaggaagaaaatgagccattttttgagtctccttcatagacttgaataactctttttcagagcttctcacagcaaacctctcctcatgtctcctcatgtcttattgttcagaaatgggtaatgtggccatttcaccagtcactgccaacaacaacgaggttcctataattgtctctgagtaaccctttggaatggagagggtgttggtcagtctacaaactgaacactgcagttctgcgctttttaccagtgaaaaaatgtaattattttcccctcttaaggattaatattcttcaaatgtatgcctgttatggatatagtatctttaaaattttttattttaatagctttaggggtacacactttttgcttacaggggtgaattgtgtagtggtgaagactcggcttttaatgtacttgtcacctgagtgatgtacattgtacccaataggtaatttttcatccattaccctccttccgccctcttcccttctgagtctccaacatcccttataccactgtgtatgttcttgtgtacctacagctaagcttccacttataagtgagaacatgcagtatttggttttccattcctgagttacttcccttaggataacagcccccagttccgtccaagttgctgcaaaatacattattcttctttatggctgagtaatagtccatggtacatatataccacattttctttatccacttatcagttgatggacacttaggttaattccattcaatttcattcaatttaagtatatttgtaaggagctaaagctgaaaattaaattttagatctttcaatactcttaaattttatatgtaagtggtttttatattttcacatttgaaataaagtaatttttataaccttgaaaaaaaaaaaaaaaaaaaa

SEQ ID NO: 988 - DNA, 3359 bp, Homo sapiens
ggaagcagcttgcaaatggcgtctccctcgctggagcggccagaaaaaggcgctggaaaaagtgaatttcgtaaccagaagccgaagccggagaaccaagatgaatcagaactccttacggttcctgatggttggaaggaaccagctttttccaaagaggacaatcccagaggacttttggaggagagcagtttcgcaactttgttcccaaaatacagggaagcttacttgaaagagtgttggccattggtgcagaaagccttaaatgaacatcatgttaatgcaaccctggacctgatcgaaggcagcatgactgtttgtactacaaagaagacttttgatccatatatcatcattagggccagagatctgataaaactgttagcaaggagtgtttcatttgaacaggcagtacgaattcttcaggatgatgttgcatgtgacatcattaaaataggttctttagtaaggaataaagagagatttgtaaaacgaagacaacggcttattggtcccaaaggatctacattgaaggcattggaactcttaactaattgttacattatggttcagggaaacacagtttcagccattggaccttttagtggcttaaaagaggttagaaaagtagtccttgatactatgaagaatattcatccaatttataacattaaaagcttaatgattaagagagagttggcaaaagattctgaattacgatcacaaagttgggagagatttttgccacagttcaagcacaaaaatgtgaataaacgcaaggaaccaaagaaaaaaactgttaagaaagaatatacgccattcccaccaccacaaccaggaagtcagatcgataaagaattggctagtggtgaatactttttgaaggcaaatcagaagaagcggcagaaaatggaagcaataaaggctaaacaagcagaagccatcagtaagagacaagaggaaagaaacaaagcatttattccacctaaggaaaaaccaattgtgaaacctaaggaagcttctactgaagctaaaattgatgtggccagcatcaaggaaaaggttaagaaagcaaagaataagaaactgggagctcttacagctgaagaaattgcacttaagatggaggcagatgaaaagaaaaagaagaaaaaaaagtaacatacccaaaactccttgactagaactatctccttttgtaaaggattttgagatatcaggcattagttgccttatttgtgagaaattttctgagggctttttttttttttggtggtggtggttgttcatagaagagtgttctttataaattatattattattgtattttttgaaaaatttatactagaaagtggtatatatgtctttgtatacattacgaccattgtgattatccattaaatccagtgtctgatgctattggttagtaatgatgtcccagcatttgatgttccctctctaatgataacaagtaaatatttaggtttatcccttttgaaagtttggttttacttttaacagtccatgaacagaaaattaaggcctctaaaatcagatcccctagttactcctctgttctgaatctggggaagtagtaaaccaaaaagacagggaaaaccagatatttagagtcgaagcagcatgcaaaaaataataatgtttttaactaatgaaggctactggagttactaagaatcacctaaaaatgtgctactgtaccttgctcattttgcagatttagaagctgaaacatgggttaggttacttactaaaagtccacctgtggcaacctgcaaataatgcttatttatactaaagatgagtttatctgatagagttaggaaatttcttcttttgagtaagagtattgctataacatatatttttttctgaaatgttttaaaatagaagtacacctaattgttattggttaaaaagaaagccatatgtgaatgaggttggtttttgggttttttctttcctgaattgtattagtccaaaagaactaaattagggtacttgtgctgtaccaaaatggtaattataacagacagtattagaattactgaattaacaatgagaaagagagaagtgtatctgttacgtggatatatgggccagcctggatatacaacagagtagtaacctgtgaaacaaacatagaatatcctcttagacattgttcctcataatgcactgacagaattcacatagctcttaatgaaacaatttaagattgatgtacgtacgtttgacttggtctcgctgtcggttaactgtaaagttagggggaagaaagaaaaaaaattaaaagggtagacacagttgagagttttattttaaaaagctaagtcttataattatgaccattaacttgctttggctttattgcagtgactttccaagtttaattattcaaaactttttgaactgactgaattaacttggtatttttaagttgactttttacataaactttataaaccttttataaaaaggaaactataccattactataaatggaaaatcattttacacatcatacctagcaggtaataaaatttaaaaaataaaaattaaatattagaatgtgagaaatttattaaaatatagttctaaaaataagtttcttcctgagaagaatgatactgtttatgatgaatccatagtgaaaagacagtgacctctctttcatccagtctagtatatcactaaatcatcattacgatgtttggctatcaagtcattaattactgtcctcctttcactgagctttattcaaattttgacaatcagagcactgggaagaaataaattccacaactgcctttagccttctggatactttcttttataaaatagaaaccttttccacaccagttctgcagcagtcgctattagatgctcgtggtagaacccatcaatcatctggtcctctgggtactggtgagcatccctggtcttcatacctgtgagtgggctttgtggtgaattactgtaaatatgctaccctcacttttcttggcagttatgtccatgaaatcaagagtgtgatgttctagttatttttttttatatatatttttaaatgttcaatattcaactattgaaacaaatgtacatctgtgaactagctaaaatcatcttatgtaccactaatatgcccagcacattttgtaaaacagtcctgatttggcctccaagggtatttattgaactaccagcagtatctaggagaccacgaaggaataccacgaaggaatttatgctccagtgcttgccataatttgtctgagaaggaatctgttaaataaaagcttttatcctctaaaaaaaaaaaaagaaaaaaaaaaaaaaaa

SEQ ID NO: 989 - DNA, 1847 bp, Homo sapiens
ctcctgccctccactgactccagagagggagatccccagtacttgactccatcacgcagatgggagcaggcaccagctatggagagggatacagctgcgtctccacatgacccatcctgcatgacaccaaagccaccgccagacagtgcctcggattctatgcaaaacctgggaagcggagacctaccccagccccgggaggaagctagctcttcaggggaccgtctgaggactggagtttgatccatgaacctggcttcgaggccttgcttttctctcttcttcattcatattcattcccaacaccttagaaggtgttgcttaatttatttctagaaaagcagcccagagtcagtcattgaagccttccccaccccctggccaaaaaaaaaaaaaaaaaaaaactggacacattttggatctgttgggagcttggagtccagtggttggcatagttgtcacattgggagcagagaagaagcaaccaggggccctgatcaggggactgagccgtagagtcccaggatggcacccaatggcacagcctcttccttttgcctggactctaccgcatgcaagatcaccatcaccgtggtccttgcggtcctcatcctcatcaccgttgctggcaatgtggtcgtctgtctggccgtgggcttgaaccgccggctccgcaacctgaccaattgtttcatcgtgtccttggctatcactgacctgctcctcggcctcctggtgctgcccttctctgccatctaccagctgtcctgcaagtggagctttggcaaggtcttctgcaatatctacaccagcctggatgtgatgctctgcacagcctccattcttaacctcttcatgatcagcctcgaccggtactgcgctgtcatggacccactgcggtaccctgtgctggtcaccccagttcgggtcgccatctctctggtcttaatttgggtcatctccattaccctgtcctttctgtctatccacctggggtggaacagcaggaacgagaccagcaagggcaatcataccacctctaagtgcaaagtccaggtcaatgaagtgtacgggctggtggatgggctggtcaccttctacctcccgctactgatcatgtgcatcacctactaccgcatcttcaaggtcgcccgggatcaggccaagaggatcaatcacattagctcctggaaggcagccaccatcagggagcacaaagccacagtgacactggccgccgtcatgggggccttcatcatctgctggtttccctacttcaccgcgtttgtgtaccgtgggctgagaggggatgatgccatcaatgaggtgttagaagccatcgttctgtggctgggctatgccaactcagccctgaaccccatcctgtatgctgcgctgaacagagacttccgcaccgggtaccaacagctcttctgctgcaggctggccaaccgcaactcccacaaaacttctctgaggtccaacgcctctcagctgtccaggacccaaagccgagaacccaggcaacaggaagagaaacccctgaagctccaggtgtggagtgggacagaagtcacggccccccagggagccacagacaggtaatagccctagccattggtgcacaggatgggggcaatgggaggggatgctactgatgggaatgattaagggagctgctgtttaggtggtgctggtttatgttctaggaactcttcatgagcactttgtaaacaccctcttgcttaatcctcccaacggcccccaaaggtagaacttagctcccttttaaaaggagcacattaaaattctcagaggacttggcaagggccgcacagctggggcat

SEQ ID NO: 990 - DNA, 1958 bp, Homo sapiens
atttaaaattatagagcttttcatcactacggagatgctcttgcctatgataggaacgatggctacatctgaagctgagcaaatttatcttttctcttcgtctgcatcagggtgacctctggaaggtctgaaaattgaacaagatggacgggtccaggaaagaggaggaggaagacagcacactcaccaacatttctcttgcagatgacatagaccattcctcaagaattttgtatccaaggcccaaaagtttgttacccaagatgatgaatgctgacatggatgcagttgatgctgaaaatcaagtggaactggaggaaaaaacaagacttattaatcaagtgttggaactccaacacacacttgaagatctctctgcaagagtagatgcagttaaggaagaaaatctgaagctaaaatcagaaaaccaagttcttggacaatatatagaaaatctcatgtcagcttctagtgtttttcaaacaactgacacaaaaagcaaaagaaagtaagggattgacacccttctgttttatggaattgctgctgaacattttttctttaaaacttggatagattccaaaagttacagtacctttgtggcttcattggatatttatgaagataatgtcagatgtagacaaaaataacacaataacaggagacttccataagtttgtgtattatgttagtctatgaaaacgtgcaaatgtattgtagagactttatgattagaattgcatatatttatgaaacttaaagatgaatgttttattgaatttgtaggtttagcactgtcttttattataggattagtaagatatacaagaaaataaccaccgtgttgtgaaaaagtgaccaaaatcatgtactaaatgcacagctttatgtaccctgtccaccatcttgtgcctcttctccatttgcctcttccttcctatttcccttccgctaaggaaaaaaattggtgtcacatttgtaaaagtaattttaatagttaatcatctctgagagtaacctgtattttaattgttgaaacttaaccaaaataagatactgtctcagctagggcttgtcatttgtgtatttagtgttaagataggaatgctagtgtctctttaattaattggaaatagatggaggctaaaaatgaaggtttttctttgaaactgaattaacttgggaatatttgttgttaaaaacttctttttgcccaaaataactcattttgtattatctgaaaatatataatttctggtcatgtgtatgttaaaatagaaaattttgaggaaaaatggaaatagggtggaaaagtactcggtaaacagtagtaaccaaatattttcactccagatttgtgttttctctggcacagagtagatcttttgggaaatatatatgaaagtggattaagtttgactacccttatgttagccacatctggatgagaacagttacaaagagtttggtctctaagttgatttgtacccagtgggtcaacttctgcaaaattccgtaatggtgtattagtattagaatagtgaataaaatgggaaagttatacatgtatacttattatcttgctcagtattttatctcacttgttctagaattttctgtaaaccctgctactgggtttgaagagttttagtcatcctttaacaatttttaaaaatttagcttctagattccatttggtaaggaaatcaatattggaagtattgctaaaatcttataatatgaaaagagatccactaatgtagcttaaggttattagatttgggcttttaatcatggaataatcttatgtattggtgtaagagttgatgaatgactttagctgtgtgaatatataatagtcaaactgcaaacattttgcatcccttttgtgacctaatttacagacatttaaattgtgttgcagttctgctttgccgtttaataaaaagctatttcag

SEQ ID NO: 991 - DNA, 2980 bp, Homo sapiens
gctactgcccctgctgctgtcgtaggcgaggacggctgttagtgctgctgctgttggttcgtcgcggcggcgaaggaggaggaggaagagggcgaggcgacaagagaagaaggaggcaggcgcggcggcagcggcggcgccccgagccggcggaggcgaggggggggaagatggcggacgtgcttagcgtcctgcgacagtacaacatccagaagaaggagattgtggtgaagggagacgaagtgatcttcggggagttctcctggcccaagaatgtgaagaccaactatgttgtttgggggactggaaaggaaggccaacccagagagtactacacattggattccattttatttctacttaataacgtgcacctttctcatcctgtttatgtccgacgtgcagctactgaaaatattcctgtggttagaagacctgatcgaaaagatctacttggatatctcaatggtgaagcgtcaacatcggcaagtatagacagaagcgctcccttagaaataggtcttcagcgatctactcaagtcaaacgagctgcagatgaagttttagcagaagcaaagaaaccacgaattgaggatgaagagtgtgtgcgccttgataaagagagattggctgcccgtttggagggtcacaaagaagggattgtacagactgaacagattaggtctttgtctgaagctatgtcagtggaaaaaattgctgcaatcaaagccaaaattatggctaagaaaagatctactatcaagactgatctagatgatgacataactgcccttaaacagaggagttttgtggatgctgaggtagatgtgacccgagatattgtcagcagagagagagtatggaggacacgaacaactatcttacaaagcacaggaaagaatttttccaagaacatttttgcaattcttcaatctgtaaaagccagagaagaagggcgtgcacctgaacagcgacctgccccaaatgcagcacctgtggatcccactttgcgcaccaaacagcctatcccagctgcctataacagatacgatcaggaaagattcaaaggaaaagaagaaacggaaggcttcaaaattgacactatgggaacctaccatggtatgacactgaaatctgtaacggagggtgcatctgcccggaagactcagactcctgcagcccagccagtaccaagaccagtttctcaagcaagacctcccccaaatcagaagaaaggatctcgaacacccattatcataattcctgcagctaccacctctttaataaccatgcttaatgcaaaagaccttctacaggacctgaaatttgtcccatcagatgaaaagaagaaacaaggttgtcaacgagaaaatgaaactctaatacaaagaagaaaagaccagatgcaaccagggggcactgcaattagtgttacagtaccttatagagtagtagaccagccccttaaacttatgcctcaagactgggaccgcgttgtagccgtttttgtgcagggtcctgcatggcagttcaaaggttggccatggcttttgcctgatggatcaccagttgatatatttgctaaaattaaagccttccatctgaagtatgatgaagttcgtctggatccaaatgttcagaaatgggatgtaacagtattagaactcagctatcacaaacgtcatttggatagaccagtgttcttacggttttgggaaacattggacaggtacatggtaaagcataaatcgcacttgagattctgaattatttggctcctccatttctggaaattgagactcaagctttatgaatttatcaagaacttaaaaatgaagaaggtcacagattgatcttttataagaccttatttgatgctttgtgcttcaaggagatgatacctgtcatccatataagcaaactttttggcttacaactatttttttaatattagccttctagtctgtaatggaaattgtatattttgatagaagttttttctccattggttaaattagcattacttaaaatttgtttctttagaaaataaatgcaggttataaatgtgtgtatatttagagattataaggctctctgagccatcttctgatttttcattgctctataattctttttactgaaaatactatgttatgaatggtattaaattttagtctctggaacatccaaaaccaagcaaagggatgtgactattttgaatgaatcagaatgtcaacttgtatgtacactatatctacacttactcattatttaaaaagaataatgaaaaatctagatcaattcttcaatttgattgaactgttcagccttttcaagatttctttatttacaaatgattacatttaaatgaatgtacattcttctcactgactttggtgattttgaaacctagaatgatgtgtttctatctgtaatatctttccatttgaaaaaaatctcaaaacacagattaaaaccacaataggctgtagtattttttattttgggagccagagtatgatttgggggaagaatatgtatcagccctattgcagtataactttaagctccttttctctttagtccacttttgattgtaatttttatggtataggattttgaatcttctattttaggcttgtcagtcttggagttcttatcttccattatccctaaatattgataaactcccaggcaccaaagaaaacatttgcttaattgtctgaaaagaaacaagagaaaaacactggtatttttatgtctgtattcaatatggtataaaatataaaaactatattttaacttagtgaaatattttactatttctctacttcagacaaaatgttgcatccaaggtacatcaagtgaccatttgccttgaaccttgatttcactttgttttttttttttccttaaaggcaactaggaagctttactttcctaaagtgtttttgccattggaatttttgctgatcacagt

SEQ ID NO: 992 - DNA, 2744 bp, Homo sapiens
gctgcagcagtcctgaaggttgatggagggccatgctattcaaacagcaggcgtggctgagacagaagctcctggtgctgggaagccttgccgttgggagtctcctgtatctagtcgccagagttgggagcttggataggctacaacccatttgccccattgaaggtcgactgggtggagcccgcactcaggctgaattcccacttcgcgccctgcagtttaagcgtggcctgctgcacgagttccggaagggcaacgcttccaaggagcaggttcgcctccatgacctggtccagcagctccccaaggccattatcattggggtgaggaaaggaggcacaagggccctgcttgaaatgctgaacctacatccggcagtagtcaaagcctctcaagaaatccacttttttgataatgatgagaattatggtaagggcattgagtggtataggaaaaagatgcctttttcctaccctcagcaaatcacaattgaaaagagcccagcatattttatcacagaggaggttccagaaaggatttacaaaatgaactcatccatcaagttgttgatcattgtcagggagccaaccacaagagctatttctgattatactcaggtgctagaggggaaggagaggaagaacaaaacttattacaagtttgagaagctggccatagaccctaatacatgcgaagtgaacacaaaatacaaagcagtaagaaccagcatctacaccaaacatctggaaaggtggttgaaatactttccaattgagcaatttcatgtcgtcgatggagatcgcctcatcacggaacctctgccagaacttcagctcgtggagaagttcctaaatctgcctccaaggataagtcaatacaatttatacttcaatgctaccagagggttttactgcttgcggtttaatattatctttaataagtgcctggcgggcagcaaggggcgcattcatccagaggtggacccctctgtcattactaaattgcgcaaattctttcatccttttaatcaaaaattttaccagatcactgggaggacattgaactggccctaaaataatatgtcatacaacactatgtgttgtgcctggagacacacaatgtctcctgtagattaaaatatgcacttttcctaggcagagctatccaagtcatttttccatgtatatttgtacatacgcagtgtgtgaccaaatataagatcagttctttttctactgaaaatttacgaaaaaaaaaaaattgctgtctgcatagtcgcatcttttaagctatttacaaaagagaagaggtggtggtattgggggaaagtgacttcagctattctcaaagagttagtcttcctttgattcagaatttgtcacccgccattttcatagatttaagccaaaagataaatgtgtgaaaatgtaccaatggctgcgaagcttcaggaagtagaggatccagtgatgcattttttttttcctaagggaaagctggctctttaattcagatgctgaattggtgccatgaaaacagaaaatgctattttcttattatttaaaagaacgtcttatctcataaaattgacattgttccaaagttcttgtggtgattttgcactattgttttctcgtatggaccatggtgtcacttgtagcatgtcaatcacacattggaaagtcaagtccttttacttccatgttgtatgtcaacagagagaaatgtcatgtacataatgtatattgttgtaaatactggtttcacactaagtaattctattttgtaaactgaatatggctatttaatttattgtgaaaattaaatttattgtggtatttaaaaatggaatggattaaaattactctatgtgcaattttttttttttttactcattttgttttacgtgccccctgctggcttccaaaatggaagctgtttacgtgcatatgagagcacttggaaagatgtgcttccctgctggatttctgtaccccagtgaaaatgtatttatgaagtgaggttgagtatattaaaaaagaaaaacctcaaccatctggaaatcaagtataatagccacctcaaagaaccctagtgctgctctgctacaactttgtaacaattaatttactcgcagttgctgctgctcaggaagagagacaaggaatattttaacagaatcaaggcatagaagaatcaccattttatttgaacctctaatcagagtcagaccagtagagaaattaaataagattagaaaactctgtactgaaagctgctgatgcttcaaaaatgaaaacaagatctcacaactctccctgttagttgaaaatatatcaatttgctctgaaaggattcagctgcctagtgttgccattactaacataaacatatggctcatatttccatccagagaaattaatgctaaattggtgcctcgctaacatcagatacactgtattatgcttaaatatattcagtaaaatgtggaaaggggtattaacaacgacaacaaaaagatggattttttttttctcacaatcacagttgctaatccagtgggagatgtttgagagagttttgttcaacatcacagtgagagtgcctagggaaatcagaaaattacaatggattcccctttgattgtaataagtgttgattttctccatgagttgtttatcctgtctagtgatttgatggtgaacttttctaaataaatagccctttcccctccggtgtcggta

SEQ ID NO: 993 - DNA, 1939 bp, Homo sapiens
ccctctcgcgccccaggccggtgtacccccgcactccgcgccccggcctagaagctctctctccccgctccccggcccggcccccgccccgccccgccccagcccgctgggccgccatggagcgctggccttggccgtcgggcggcgcctggctgctcgtggctgcccgcgcgctgctgcagctgctgcgctcagacctgcgtctgggccgcccgctgctggcggcgctggcgctgctggccgcgctcgactggctgtgccagcgcctgctgcccccgccggccgcactcgccgtgctggccgccgccggctggatcgcgttgtcccgcctggcgcgcccgcagcgcctgccggtggccactcgcgcggtgctcatcaccggctgtgactctggttttggcaaggagacggccaagaaactggactccatgggcttcacggtgctggccaccgtattggagttgaacagccccggtgccatcgagctgcgtacctgctgctcccctcgcctaaggctgctgcagatggacctgaccaaaccaggagacattagccgcgtgctagagttcaccaaggcccacaccaccagcaccggcctgtggggcctcgtcaacaacgcaggccacaatgaagtagttgctgatgcggagctgtctccagtggccactttccgtagctgcatggaggtgaatttctttggcgcgctcgagctgaccaagggcctcctgcccctgctgcgcagctcaaggggccgcatcgtgactgtggggagcccagcgggggacatgccatatccgtgcttgggggcctatggaacctccaaagcggccgtggcgctactcatggacacattcagctgtgaactccttccctggggggtcaaggtcagcatcatccagcctggctgcttcaagacagagtcagtgagaaacgtgggtcagtgggaaaagcgcaagcaattgctgctggccaacctgcctcaagagctgctgcaggcctacggcaaggactacatcgagcacttgcatgggcagttcctgcactcgctacgcctggccatgtccgacctcaccccagttgtagatgccatcacagatgcgctgctggcagctcggccccgccgccgctattaccccggccagggcctggggctcatgtacttcatccactactacctgcctgaaggcctgcggcgccgcttcctgcaggccttcttcatcagtcactgtctgcctcgagcactgcagcctggccagcctggcactaccccaccacaggacgcagcccaggacccaaacctgagccccggcccttccccagcagtggctcggtgagccatgtgcacctatggcccagccactgcagcacaggaggctccgtgagcccttggttcctccccgaaaacccccagcattacgatcccccaagtgtcctggaccctggcctaaagaatcccacccccacttcatgcccactgccgatgcccaatccaggcccggtgaggccaaggtttcccagtgagcctctgcgcctctccactgtttcatgagcccaaacaccctcctggcacaacgctctaccctgcagcttggagaactccgctggatggggagtctcatgcaagacttcactgcagcctttcacaggactctgcagatagtgcctctgcaaactaaggagtgactaggtgggttggggaccccctcaggattgtttctcggcaccagtgcctcagtgctgcaattgagggctaaatcccaagtgtctcttgactggctcaagaattagggccccaactacacacccccaagccacagggaagcatgtactgtacttcccaattgccacattttaaataaagacaaatttttatttcttctaaaaaaaaaaaaaaaaaaaaaaaaaaaaaaaaaaaaaaaaaaaaaaaaaaaaaaaaaaa

SEQ ID NO: 994 - DNA, 1215 bp, Homo sapiens
atggtcacagtgacttttgactgccggctccacacacccatgtattttctgctccgaaatctagctctcatagacctctgctattccacagtcacctctccaaagatgctggtggacttcctccatgagaccaagacgatctcctaccagggctgcatggcccagatcttcttcttccaccttttgggaggtgggactgtcttttttctctcagtcatggcctatgaccgctacatagccatctcccagcccctccggtatgtcaccatcatgaacactcaattgtgtgtgggcctggtagtagccgcctgggtggggggctttgtccactccattgtccaactggctctgatacttccactgcccttctgtggccccaatatcctagataacttctactgtgatgttccccaagtactgagacttgcctgcactgatacctccctcctggagttcctcatgatctccaacagtgggctgctagttatcatctggttcctcctccttctgatctcttatactgtcatcctggtgatgctgaggtcccactcgggaaaggcaaggaggaaggcagcttccacctgcaccacccacatcatcgtggtgtccatgatcttcattccctgtatctatatctatacctggcccttcaccccattcctcatggacaaggctgtgtccatcagctacacagtcatgacccccatgctcaaccccatgatctacaccctgagaaaccaggacatgaaagcagccatgaggagattaggcaagtgcctatttgagtcgccgctgcgggttgctagcggagtcgcgcgtcgggagctacgtagggcagggaaggcatggcttctgttttcgtccaatgagaaggggccagcggtggcggtcgggccaggtccggggcctggggacgccgaggcggccgcggaggagcgccgcgtcaaggtctccagcctgccctacagtgtggatgcgctcgtgtcggacaagaagccgcccaaggaggcatccccagtgccggccaaaagcgcctcttccggggccaccctgcggctactgctgctgccggggcacggcgctcgggaagcgcacagccccgggccgctgatcaagcccttcgagaccgcctcggtcaagtgggaaaactccctaagacggagcggcgtggatgcaggaaccctgctgataattcgccgccgccaagacacgtga

SEQ ID NO: 995 - DNA, 1810 bp, Homo sapiens
gggaggctgtagcggccgaccggacgcagggggctggcgggaacgtgaagctccgcggtgcctgatggggccgttgggcggccggtagctgttgctgttgggggaccccctcattcctgccgctgccgtccctgctgcctcatggcggccatcggagttcacctgggctgcacctcagcctgtgtggccgtctataaggatggccgggctggtgtggttgcaaatgatgccggtgaccgagttactccagctgttgttgcttactcagaaaatgaagagattgttggattggcagcaaaacaaagtagaataagaaatatttcaaatacagtaatgaaagtaaagcagatcctgggcagaagctccagtgatccacaagctcagaaatacatcgcggaaagtaaatgtttagtcattgaaaaaaatgggaaattacgatatgaaatagatactggagaagaaacaaaatttgttaacccagaagatgttgccagactgatatttagtaaaatgaaagaaacggcacattctgtattgggctcagatgcaaatgatgtagttattactgtcccgtttgattttggagaaaagcaaaaaaatgctcttggagaagcagctagagctgctggatttaatgttttgcgattaattcacgaaccgtctgcagctcttcttgcttatggaattggacaagactcccctactggaaaaagcaatattttggtgtttaagcttggaggaacatccttatctctcagcgtcatggaagttaacagtggaatatatcgggttctttcaacaaacactgatgataacatcggtggtgcacatttcacagaaaccttagcacagtatctagcttctgagttccaaagatccttcaaacatgatgtgagaggaaatgcgcgagccatgatgaaattaacgaacagtgctgaagtagcgaaacattctttgtcaaccttgggaagtgccaactgttttcttgactcattatatgaaggtcaagattttgattgcaatgtgtccagagcaagatttgaacttctttgttctccactttttaataagtgtatagaagcaatcagaggactcttagatcaaaatggatttacagcagatgatatcaacaaggttgtcctttgtggagggtcttctcgaatcccaaagctacagcaactgattaaagatcttttcccagctgttgagcttctcaattctatccctcctgatgaagtgatccctattggtgcagctatagaagcaggaattcttattgggaaagaaaacctgttggtggaagactctcttatgatagagtgttcagccagagatattttagttaagggtgtggacgaatcaggagccagtagattcacagtgctgtttccatcagggactcctttgccagctcgaagacaacacacattgcaagcccctggaagcatatcttcagtgtgccttgaactctatgagtctgatgggaagaactctgccaaagaggaaaccaagtttgcacaggttgtactccaggatttagataaaaaagaaaatggattacgtgatatattagctgttcttactatgaaaagggatggatctttacatgtgacatgcacagatcaagaaactggaaaatgtgaagcaatctctattgagatagcatcttagtgttttagagaaatcaagaatttttaaaaacaagaatatcaacatttggttttgtgtataagtggtgtttgtattaaaatactttttcaatgaactgtataaactatgttttattaaactacaatatatcagtaaaaaa

SEQ ID NO: 996 - DNA, 3925 bp, Homo sapiens
acagcacagacagattgacctattggggtgtttcgcgagtgtgagagggaagcgccgcggcctgtatttctagacctgcccttcgcctggttcgtggcgccttgtgaccccgggcccctgccgcctgcaagtcggaaattgcgctgtgctcctgtgctacggcctgtggctggactgcctgctgctgcccaactggctggcaagatgaagctctccctggtggccgcgatgctgctgctgctcagcgcggcgcgggccgaggaggaggacaagaaggaggacgtgggcacggtggtcggcatcgacctggggaccacctactcctgcgtcggcgtgttcaagaacggccgcgtggagatcatcgccaacgatcagggcaaccgcatcacgccgtcctatgtcgccttcactcctgaaggggaacgtctgattggcgatgccgccaagaaccagctcacctccaaccccgagaacacggtctttgacgccaagcggctcatcggccgcacgtggaatgacccgtctgtgcagcaggacatcaagttcttgccgttcaaggtggttgaaaagaaaactaaaccatacattcaagttgatattggaggtgggcaaacaaagacatttgctcctgaagaaatttctgccatggttctcactaaaatgaaagaaaccgctgaggcttatttgggaaagaaggttacccatgcagttgttactgtaccagcctattttaatgatgcccaacgccaagcaaccaaagacgctggaactattgctggcctaaatgttatgaggatcatcaacgagcctacggcagctgctattgcttatggcctggataagagggagggggagaagaacatcctggtgtttgacctgggtggcggaaccttcgatgtgtctcttctcaccattgacaatggtgtcttcgaagttgtggccactaatggagatactcatctgggtggagaagactttgaccagcgtgtcatggaacacttcatcaaactgtacaaaaagaagacgggcaaagatgtcaggaaagacaatagagctgtgcagaaactccggcgcgaggtagaaaaggccaaacgggccctgtcttctcagcatcaagcaagaattgaaattgagtccttctatgaaggagaagacttttctgagaccctgactcgggccaaatttgaagagctcaacatggatctgttccggtctactatgaagcccgtccagaaagtgttggaagattctgatttgaagaagtctgatattgatgaaattgttcttgttggtggctcgactcgaattccaaagattcagcaactggttaaagagttcttcaatggcaaggaaccatcccgtggcataaacccagatgaagctgtagcgtatggtgctgctgtccaggctggtgtgctctctggtgatcaagatacaggtgacctggtactgcttgatgtatgtccccttacacttggtattgaaactgtgggaggtgtcatgaccaaactgattccaaggaacacagtggtgcctaccaagaagtctcagatcttttctacagcttctgataatcaaccaactgttacaatcaaggtctatgaaggtgaaagacccctgacaaaagacaatcatcttctgggtacatttgatctgactggaattcctcctgctcctcgtggggtcccacagattgaagtcacctttgagatagatgtgaatggtattcttcgagtgacagctgaagacaagggtacagggaacaaaaataagatcacaatcaccaatgaccagaatcgcctgacacctgaagaaatcgaaaggatggttaatgatgctgagaagtttgctgaggaagacaaaaagctcaaggagcgcattgatactagaaatgagttggaaagctatgcctattctctaaagaatcagattggagataaagaaaagctgggaggtaaactttcctctgaagataaggagaccatggaaaaagctgtagaagaaaagattgaatggctggaaagccaccaagatgctgacattgaagacttcaaagctaagaagaaggaactggaagaaattgttcaaccaattatcagcaaactctatggaagtgcaggccctcccccaactggtgaagaggatacagcagaaaaagatgagttgtagacactgatctgctagtgctgtaatattgtaaatactggactcaggaacttttgttaggaaaaaattgaaagaacttaagtctcgaatgtaattggaatcttcacctcagagtggagttgaaactgctatagcctaagcggctgtttactgcttttcattagcagttgctcacatgtctttgggtgggggggagaagaagaattggccatcttaaaaagcaggtaaaaaacctgggttagggtgtgtgttcaccttcaaaatgttctatttaacaactgggtcatgtgcatctggtgtaggaagttttttctaccataagtgacaccaataaatgtttgttatttacactggtctaatgtttgtgagaagcttctaattagatcaattacttattttaggaaatttaagactagatactcgtgtgtggggtgaggggagggagtatttggtatgttgggataaggaaacacttctatttaatgcttccagggattttttttttttttttttaaccctcctgggcccaagtgatccttccacctcagtctcccagctaattgagaccacaggcttgttaccaccatgctcggcttttgcattaatctaagaaaaggggagagaagttaatccacatctttactcaggcaaggggcatttcacagtgcccaagagtggggttttcttgaacatacttggtttcctatttccccttatctttctaaaactgcctttctggtggctttttttaaaattattactaatgatgcttttatagctgcttggattctctgagaaatgatggggagtgagtgatcactggtattaactttatacacttggatttcatttgtaactttaggatgtaaaggtatattgtgaaccctagctgtgtcagaatctccatccctgaaatttctcattagtggtactggggtgggatcttggatggtgacattgaaactacactaaatcccctcactatgaatgggttgttaaaggcaatggtttgtgtcaaaactggtttaggattacttagattgtgttcctgaagaaaagagtccaggtaaatggtatgatcaataaaggacaggctggtgctaacataaaatccaatattgtaatcctagcactttgggaggccaaggcgggtggatcacaaggtcaagagatagagaccatctttgccaacatggtgaaactccatctctactgaaaatacaaaaattagctgggcgtggtagtgcaagctgaaggctgaggcaggagaatcactcgaacccgggaggcagaggttgcagtgagccgagatcacaccactgtactccagcccggcactccagcctggcgacaagagtgagactccacctcaaaaaaaaaaaaaagaatccaatactgcccaaggataggtattttatagatgggcaactggctgaaaggttaattctctagggctagtagaactggatcccaacaccaaactcttaattagacctaggcctcagctgcactgcccgaaaagcatttgggcagaccctgagcagaatactggtctcaggccaagcccaatacagccattaaagatgacctacagtgctgtgtaccctggggcaatagggttaaatggtagttagcaactagggctagtcttcccttacctcaaaggctctcactaccgtggaccacctagtctgtaactctttctgaggagctgttactgaatattaaaaagatagacttcaaaaaaaaaaaaaaaaaa

SEQ ID NO: 997 - DNA, 934 bp, Homo sapiens
ctcacagtcccgcctcttccgctgcgtgccggaccatggcgcaggggcagcgcaagtttcaggcgcacaaacccgcaaagagtaagacggcagcggcagcctctgaaaagaatcggggcccaagaaaaggcggtcgtgttatcgctcccaagaaggcgcgcgtcgtgcagcagcaaaagctcaagaagaacctagaagtcggaatccggaagaagatcgaacatgacgtggtgatgaaagccagcagcagcctgcccaagaagctggcactgctgaaggccccagccaagaagaaaggggcagctgccgccacctcctccaagacaccttcctgaggacgctggccccagtgcaggccaacatcccaccccctacctccatatgggaccttgcaagtcatcccacaggctgcactgtcaggaagaggaccctgtcccccagcactgggcttcacctagaacttcagtgggggccaagggtgctgagaacccagcaatgaccaggaagatacagtcactaacttcatctgtccccgtgccccttcccaggtcctgcctccacaggtttaacccagaacaataaacctggctttgtcatccctcttgcagtcctgtgttcgggtgagcaggccaggtgagcccacaagtctccatgagtgacgtggcctggcgtgctccaccccaccccaccgcctttagcaaccatgtgcccaggggacagctgggcttctacacctctggccctgagcctgagagccgggaaagagtcttttctccatttaaccccgggtgactcactccctggccagtcctcacccctggggacacaaccagagtcaagctggacatcagtaggtcagatgccacctcacaggaccaaggtgccgattaaaccggaatacattcagaaaaaaaaaaaaaaaaaaaaaaaaaaa

SEQ ID NO: 998 - DNA, 961 bp, Homo sapiens
gaggacaagcagcctgcccagaagtggaagaaactgaaagtggagtcctgagagctgaatctgccgcaggcccgcgggccgcccgggaattaggaaagttagaggggatccacgcccacaagtgctatggactctgatcgcccaaccagagcaaacccagaaggacaactctccaagcctttcaatcactcccactaacccgtattgtggacacactattgtgaggcctactaaggatgtactgctgatgaccttttgaagagtggctagtggttggcccatgtaggctgagctcagctggtccatccttcttggacccacagactccctggggcatgttcttctcatgatgatgactgcaacacagagggcaagacatcctacacaagcacatttcaagattttgctcgcatcatctctgctaaaattcctttatccaaagcaaggaacacaactggttcaaataagcacaggcctccaaatatccagatctaaaaatggagtgttcacctcagctccttatttatcactgcaagagattctggggctggcagctagtgacatgagctggaatcctcttcctgaaattgctgtcttcttggatgggctctccacatcttccaccacgaagtaaaaacaattcttgtgggtgccagtggacctgctctgcagacccaggctcctctcccatggagcatcccaagtctgtccttatgggaagaagcaggagccctgtctggctgtaccccaagctgctttctctggaccaatgctgtcagcgatagagggaacccttccaccatcatgtgaagaagcctggtctagcctgctggaggatgagagatcacatggaatgaggccacaatcgttccagccaaagccccagtaatagaattaagatcatccaagaccatggcatcccgcctgagaagttcagatgagaagggccacctgaacaacc

SEQ ID NO: 999 - DNA, 2792 bp, Homo sapiens
aggtccgacggcttcggcgccccagctgtggtgatgggtagctaggaggcctgggcctctctgcctgctgtagccgtctgccgcgcccttgttcctgcagctgtccagttatcttttgactgccacatatggaccccaaaagatctcaaaaggaaagtgtcctcattacaggaggaagtggctattttggttttcgcctgggctgtgccctgaaccaaaatggagtccatgtgattctgtttgacatcagcagccctgctcaaaccattccagaaggaatcaagtttatacaaggagacatccgccacctgtctgacgtagagaaagccttccaggatgcagacgtcacttgtgtgttccatattgcctcttatggtatgtcagggcgggagcaactcaatcgaaacctgatcaaagaagtcaacgtcaggggcacagacaacatcctccaggtttgccaaaggagaagggtgcccaggttagtttacaccagcactttcaatgtcatctttggaggtcaagttatcagaaatggggatgaatctctgccctacctgcctcttcacctccaccctgatcactactctcggacaaagtcaattgcagagcagaaggtgctggaggcgaatgctacacccctggacagaggcgacggtgtcttaagaacctgcgctctgaggccagctggcatctatgggcctggagaacaaagacaccttcccaggatagtcagctacatcgagaagggtctgttcaagtttgtctacggggaccccaggagcctggttgagtttgtccacgtggataacttggtgcaggctcacattctggcctcagaagccctgagagctgacaagggccatattgcctctgggcagccctacttcatctcagatggcagacccgtgaacaactttgagttcttccggcctctggttgagggcctgggctacacattcccgtctacccgcctgccattgaccttggtctactgctttgcttttctaacagagatggttcacttcattttgggtcgactctacaacttccagcccttcctcactcgcactgaagtttacaaaactggtgtcacacattattttagcttagagaaagccaagaaagagctaggttataaggctcagccatttgacctccaggaagcagtggaatggtttaaagcccatggtcatggcagaagttctggaagtcgtgactcggagtgttttgtttgggatgggctattggtcttcctcctgattatagcagttctcatgtggctgccttcttctgtgattctgtcactgtgaaggaggggccagaaataaggtgatcacagttggctgagatggttctcaagaaacatgggttttaaaatgtgtacagtgatatctggtgccaaacattggctcttcaaattgctacttaagaataggttcttggattgaatctttatgtcttatttccttgcactaatccagatgggaatgaaaaagcagaagcagagattagtttgaaatttgatttgttatgtgcttctgttttaggtgggtacaatagaagtcagtttggagccatagaagtaggcttagttgagttggagatgcccatcttgaatttctgagagggcaagatatacttatttccattttatgcagtctgcatctacctaaaacctctgactgatgtgggaatggcgaaacactatcaggcttgaatgcgtgtgaaaaacaccaaattggcccagatccctaacagagcaatcctcgaggggatggtggctattgctggagaggcattagctattcacagggtacgttttaggtgttaacttttgccctttatgatatcagggcattatgcctatgtgaacacatggtaatgtttgatgtttaggcctttattctacctcataggattcttttgaggattaaattcaagcatacaaagcgctcctcaacacacatagccattctttttatcagaattgtcatggtacattccttatgagggctttcttcctcagtgttctctttagagggctattgctactggactttctgcaatgtctttgggtgtgccctcagagcctgcaacaagtgtatttggatatactctatttgtaaagtttaggcctctaagaaggccacaatgaagcaactaaaaatctgatgattaagggagtcaatcaagctgatgccatttttagtttaaaaatgaagcagagctctaaactcatagatgggttttcttactgggaagaagattggctctctgaagacagcttccaatgaggaatgtattgaacaatggcagcactgtctggccacccacaaactgttacagatgatccagttacactgttgcataggaacccaagtggaaagaagacagagtccatgtctgtccatggctccagctacagaaaggatagtatgggaacattacaagggggatacattactgtggaaagttctgctagagttagtcttgagagtatctgtaaaatacaaatagatgagcaatccctgtggaatgctgcctggatattttcagaaaagctctgaacttgatgtcataataccaacaccgtgaatatcgtgtgtggccttaaccaaggaacagaagccctttagaacttagcttcctcacttgggagctgggactgactgcatttgccctttgtataaacccacccaccccatagggttcactgggagcataaagcaagatgtggtgaaagtacttctaatataaattgcaacatcagtatgaaaaaaaaaaaaaaaaaa

SEQ ID NO: 1000 - DNA, 1432 bp, Homo sapiens
cctgatcagcggggccgggggcggcgccgtacaacttccggctgtaaagatggcggcttcctagtgagtcggcggctgatttagaaggaggttcaggctacggtgagccgaagccacacaggagccatggaagtggcagagcccagcagccccactgaagaggaggaggaggaagaggagcactcggcagagcctcggccccgcactcgctccaatcctgaaggggctgaggaccgggcagtaggggcacaggccagcgtgggcagccgcagcgagggtgagggtgaggccgccagtgctgatgatgggagcctcaacacttcaggagccggccctaagtcctggcaggtgcccccgccagcccctgaggtccaaattcggacaccaagggtcaactgtccagagaaagtgattatctgcctggacctgtcagaggaaatgtcactgccaaagctggagtcgttcaacggctccaaaaccaacgccctcaatgtctcccagaagatgattgagatgttcgtgcggacaaaacacaagatcgacaaaagccacgagtttgcactggtggtggtgaacgatgacacggcctggctgtctggcctgacctccgacccccgcgagctctgtagctgcctctatgatctggagacggcctcctgttccaccttcaatctggaaggacttttcagcctcatccagcagaaaactgagcttccggtcacagagaacgtgcagacgattcccccgccatatgtggtccgcaccatccttgtctacagccgtccaccttgccagccccagttctccttgacggagcccatgaagaaaatgttccagtgcccatatttcttctttgacgttgtttacatccacaatggcactgaggagaaggaggaggagatgagttggaagatatgtttgccttcatgggcagcctggataccaagggtaccagctacaagtatgaggtggcactggctgggccagccctggagttgcacaactgcatggcgaaactgttggcccaccccctgcagcggccttgccagagccatgcttcctacagcctgctggaggaggaggatgaagccattgaggttgaggccactgtctgaaccatccctgtacatctgcaccttcttgtgcaaggaagtccttggcctaaagccttggttctcaaactgggttccttgggacctccggggtgggggggttccaggaggcacgtagggtaccttgcagggtcctaggagggaaacccaggattccaggagggatcccaggaactgtgggcacccattttctgtgtctcccagcccatttccactcctagtttgtcatggataatttttgttcttccctgtgtgatttttgccatcaaaataaaaatttgagactcgttaaaaaaaaaaaaaaaaaaaaaaaaaaaaaa

SEQ ID NO: 1001 - DNA, 1592 bp, Homo sapiens
ggattttgcttccgggtcgtaggcgctagctctgggcgcagaggtttctgggagccaagagtggtaatggcgtctgtatgatcttcggagcctgctgcatcggacctcggccagtcataaaagatgacaacagcagccaggccaacctttgaacctgccagaggtggaaggggaaaaggagaaggtgatttgagccaactttcaaagcagtattcaagcagagacctaccctctcatacaaagataaaatacagacagactactcaggatgcccctgaagaggttcgtaaccgtgacttcaggagagagttggaagaaagagagagagctgctgcaagagagaaaaatagggatcgtccaacccgagaacatacaacctcctcttcagtgtcaaaaaagccacggttagaccagattcctgccgccaaccttgatgcagatgaccctctaacagatgaggaagatgaagattttgaagaagaaagtgatgatgatgatactgcagctcttcttgcagaactggaaaaaattaaaaaagaaagagctgaagagcaggccaggaaggaacaagaacaaaaagctgaagaagagaggattcgtatggaaaacattctgagcggaaaccctctccttaatctcactggcccatcccagcctcaggccaacttcaaagttaaaagaaggtgggatgatgacgttgtcttcaagaactgtgcaaaaggtgtagatgaccagaagaaagacaaaagatttgtaaatgacacactgcgatctgaatttcacaaaaagttcatggagaaatatattaaatagtacagttttatgtgcttaattaaagactgtaaaacgtaaaggatcattctgactttttttatgagttttttttttcttttcccctgtctaaattgtgtgtgggcttccccagttttaaactcctatctttttctttagtgataccttacttgataatggacttgggaataggtttaacccagtttgcattctccaaatgtttccagtgatatgttttcctgggaaaagcaaatctgcctgtaataaatatttttaatctaaataaccaaatctgggtgcccaactttttgttggaatttatgctgctagtaatacattccataatatcttttgaaaagaaaaattaccattgtgtattgtgcttgtgcattaacttgtccttttccccctgtttctctcacatttaagatgagttaattcatattttctctgcattttttaaaagagtgtaatggaagatgagagggattctattttggaccacatgttggtgtggaggagtgtcattgacagtaagcaccccaggcgtgtgtctgggagagcattgggtatcgctcacttctgcaggtacttgtttttttttctcatggccgaagaggagagctctgtaagcattcttttaaagtatacggtactcacttgtgttctggatactcaactgccatgtttcctttgaaagagattgaatatgcacctgacatgcatttagtgcaaagcctgagaaagcttcaaacaatatataaaataaaacctttggaaataaaaaaaaaaaaaaaaaa

SEQ ID NO: 1002 - DNA, 1186 bp, Homo sapiens
gcaaaggcttaagggtgtaacctcagaatggggccctgaatcagctgtgggcgagctcctagagtatcttaattcctgcttcatctctttccattttgcagttgggcaaactgcggctcagaaagataaagaacttctccggagcgaaaaagctgctaagaatgtatccaaaactccgcacgaagtctggaacgtttttttcttagagttccagaattgtgactgaagtgtacccagagacacaaagaaatacagaagtccagaatgatcaaatgagatcactacccaatgaaatgataggccgaggagccagaaattgtcctactacctgctttccaggtccagattccacgagagccttctgggctcccaccagagaccctcagtgaagactctgttgaagactttaagaccatgctagaaagcctcccggcagaggttcaggaagttctgctatgaggatgcagctggccccagggatgtcctcaggcatctctaggaccttgctggacggtggtggctgagacctgatatccacacaaaggagcagactgtggaaatgctggtgcaggagcaattccaggctgtcctgcccgaggagctcagagctcaagcacagagatgtcatcctggaatcagtatcactggctaagtcttgctgcttgcttcttgctcagcctgcatatgagaagtcaaccaagcattctcttggatgcaagatccaactgcacccatgggaaatctgaacttccactttctttgagcttgtctttggttgtaataagaatccatcaaaacccatgtctggatctctctttggctgaggcagctttatttcctacggagtttctctgtcctcttgttaggacaatcagcctgctgctttgggcttttccaagagcctatttttcatctgctggatgcctctttttttttttttttttttttgcactttgtgacgtgctttaatatatatattttttatgtatccaaagaggtaatcaactttaactttcagaattcatgaatcttggtttggtggcatgaatgaaaggttatgtaaccccaccagtaactcatttggggtgcccttgaaatattaaagtttggtcctcaataaaaaaaaaaaaaaaaaaaaaaaaaaaaaaaaaaaaaccaaaaaaaaaaaaaaaaaaaaaaaaaaaaa

SEQ ID NO: 1003 - DNA, 1074 bp, Homo sapiens
ctcggggagtggttgtctccctttcctggagtcatttgtgggagttagggtcttatcctgatctttcctcgtcccccgctcccccgtcctccgaggtggcagctgcgtagaagtctggaacgttttttcttagagttccagaattgtgactgaagtgtacccagagacacaaagaaatacagaagtccagaatgatcaaatgagatcactacccaatgaaatgataggccgaggagccagaaattgtcctactacctgctttccaggtccagattccacgagagccttctgggctcccaccagagaccctcagtgaagactctgttgaagactttaagaccatgctagaaagcctcccggcagaggttcaggaagttctgctatgaggatgcagctggccccagggatgtcctcaggcatctctaggaccttgctggacggtggtggctgagacctgatatccacacaaaggagcagactgtggaaatgctggtgcaggagcaattccaggctgtcctgcccgaaggagctcagagctcaagcacagagatgtcatcctggaatcagaatcactggctaagtcttgctgcttgcttcttgctcagcctgcatatgagaagtcaaccaagcattctcttggatgcaagatccaactgcacccatgggaaatctgaacttccactttctttgagcttgtctttggttgtaataagaatccatcaaaacccatgtctggatctctctttggctgaggcagctttatttcctacagagtttctctgtcctcttgttaggacaatcagcctgctgctttgggcttttccaagagcctatttttcatctgctggatgcctctttttttttttttttttgcactttgtgacatgctttaatatatatattttttatgtatccaaagaggtaatcaactttaactttcagaattcatgaatcttggtttggtggcatgaatgaaaggttatgtaaccccaccagtaactcatttggggtgcccttgaaatattaaagtttggtcctcaatcaaaaaaaaaaaaaaaaaaaaaaaaaaaaaaa

SEQ ID NO: 1004 - DNA, 1071 bp, Homo sapiens
tctccctttcctggagtcatttgtgggagttagggtcttatcctgatctttcctcgtcccccgctcccccgtcctccgaggtggcagctgcgtagaagtctggaacgttttttcttagagttccagaattgtgactgaagtgtacccagagacacaaagaaatacagaagtccagaatgatcaaatgagatcactacccaatgaaatgataggccgaggagccagaaattgtcctactacctgctttccaggtccagattccacgagagccttctgggctcccaccagagaccctcagtgaagactctgttgaagactttaagaccatgctagaaagcctcccggcagaggttcaggaagttctgctatgaggatgcagctggccccagggatgtcctcaggcatctctaggaccttgctggacggtggtggctgagacctgatatccacacaaaggagcagactgtggaaatgctggtgcaggagcaattccaggctgtcctgcccgaggagctcagagctcaagcacagagatgtcatcctggaatcagaatcactggctaagtcttgctgcttgcttcttgctcagcctgcatatgagaagtcaaccaagcattctcttggatgcaagatccaactgcacccatgggaaatctgaacttccactttctttgagcttgtctttggttgtaataagaatccatcaaaacccatgtctggatctctctttggctgaggcagctttatttcctacagagtttctctgtcctcttgttaggacaatcagcctgctgctttgggcttttccaagagcctatttttcatctgctggatgcctctttttttttttttttttgcactttgtgacatgctttaatatatatattttttatgtatccaaagaggtaatcaactttaactttcagaattcatgaatcttggtttggtggcatgaatgaaaggttatgtaaccccaccagtaactcatttggggtgcccttgaaatattaaagtttggtcctcaataaaaaaaaaaaaaaaaaaaaaaaaaaaaaaaaaaaaaaaaaaaaa

SEQ ID NO: 1005 - DNA, 652 bp, Homo sapiens
ggacggaaggagcggcggcgacggaggaggaggatggaggcggtggtgttcgtcttctctctcctcgattgttgcgcgctcatcttcctctcggtctacttcataattacattgtctgatttagaatgtgattacattaatgctagatcatgttgctcaaaattaaacaagtgggtaattccagaattgattggccataccattgtcactgtattactgctcatgtcattgcactggttcatcttccttctcaacttacctgttgccacttggaatatatatcgatacattatggtgccgagtggtaacatgggagtgtttgatccaacagaaatacacaatcgagggcagctgaagtcacacatgaaagaagccatgatcaagcttggtttccacttgctctgcttcttcatgtatctttatagtatgatcttagctttgataaatgactgaagctggagaagccgtggttgaagtcagcctacactacagtgcacagttgaggagccagagacttcttaaatcatccttagaaccgtgaccatagcagtatatattttcctcttggaacaaaaaactatttttgctgtatttttaccatataaagtatttaaaaaacaggaaaaaaaaaaaaaaaaaaaaaaaaaaaaaa

SEQ ID NO: 1006 - DNA, 1043 bp, Homo sapiens
gggttttcagggtcgtaggacgccgttgggcaccacgctcggagaaggacaggacaatggcggccttagggtccccggcgcacacttttcgaggacttctgcgggagttgcgctacctgagcgcggccaccggccgaccctatcgcgacaccgcggcctatcggtaccttgtgaaggctttccgtgcacatcgggtcaccagtgaaaagttgtgcagagcccaacatgagcttcatttccaagctgccacctatctctgcctcctgcgtagcatccggaaacatgtggccctacatcaggaatttcatggcaagggtgagcgctcggtggaggagtctgctggcttggtgggtctcaagttgccccatcagcctggagggaagggctgggagccatgaacatggagaatatccttggatgctgcattcataggagaattgaataatttctatcaatatgtatttatcattaaattttttttaagtttaaggtttttctctgtaattttgtttactagttcttaggggaattaactggacatttcatctttactctcagtgaatttactgaactttttgcactagactgatgttgtttttctacttaaaaaaatttttttatattttattttaaaagtagtacaagccttagccaggcacggtggctcacgcctgtaatcccagcactttgggaggccaaggcaggcggatcacctgaggtcgggagttcgcgaccagcctgaccaacatggaaaaaccccgtctctactaaaaatacaaaattagccaggcgtggtggcacatgcctgtagtcccagctactcaggaggctgggacaggagaatcgcttgaacccgggaggtggaggttgcggtgagctgagatcgcgccatggcactcactccagcctgggcaacaagagcaaaactctgtctcaaaaaaaaaaaaaaaaattagtataagccttttgtttaaggaattcaaatgttataaacataaaataaaagaaaccctccaaaaaaaaaaaaaaaaaaaaaaaaaaaa

SEQ ID NO: 1007 - DNA, 3366 bp, Homo sapiens
gcatgcgtaggcgcgcggccgcggcggcggctggggagggttcttccggaaggttcgggaggcttctggaaaaagcgccgcgcgctgggcgggcccgtcgctatataaggcaggcgcgggggtggcgcgtcagttgcttcagcgtcccggtgtggctgtgccgttggtcctgtgcggtcacttagccaagatgcctgaggaaacccagacccaagaccaaccgatggaggaggaggaggttgagacgttcgcctttcaggcagaaattgcccagttgatgtcattgatcatcaatactttctactcgaacaaagagatctttctgagagagctcatttcaaattcatcagatgcattggacaaaatccggtatgaaagcttgacagatcccagtaaattagactctgggaaagagctgcatattaaccttataccgaacaaacaagatcgaactctcactattgtggatactggaattggaatgaccaaggctgacttgatcaataaccttggtactatcgccaagtctgggaccaaagcgttcatggaagctttgcaggctggtgcagatatctctatgattggccagttcggtgttggtttttattctgcttatttggttgctgagaaagtaactgtgatcaccaaacataacgatgatgagcagtacgcttgggagtcctcagcagggggatcattcacagtgaggacagacacaggtgaacctatgggtcgtggaacaaaagttatcctacacctgaaagaagaccaaactgagtacttggaggaacgaagaataaaggagattgtgaagaaacattctcagtttattggatatcccattactctttttgtggagaaggaacgtgataaagaagtaagcgatgatgaggctgaagaaaaggaagacaaagaagaagaaaaagaaaaagaagagaaagagtcggaagacaaacctgaaattgaagatgttggttctgatgaggaagaagaaaagaaggatggtgacaagaagaagaagaagaagattaaggaaaagtacatcgatcaagaagagctcaacaaaacaaagcccatctggaccagaaatcccgacgatattactaatgaggagtacggagaattctataagagcttgaccaatgactgggaagatcacttggcagtgaagcatttttcagttgaaggacagttggaattcagagcccttctatttgtcccacgacgtgctccttttgatctgtttgaaaacagaaagaaaaagaacaacatcaaattgtatgtacgcagagttttcatcatggataactgtgaggagctaatccctgaatatctgaacttcattagaggggtggtagactcggaggatctccctctaaacatatcccgtgagatgttgcaacaaagcaaaattttgaaagttatcaggaagaatttggtcaaaaaatgcttagaactctttactgaactggcggaagataaagagaactacaagaaattctatgagcagttctctaaaaacataaagcttggaatacacgaagactctcaaaatcggaagaagctttcagagctgttaaggtactacacatctgcctctggtgatgagatggtttctctcaaggactactgcaccagaatgaaggagaaccagaaacatatctattatatcacaggtgagaccaaggaccaggtagctaactcagcctttgtggaacgtcttcggaaacatggcttagaagtgatctatatgattgagcccattgatgagtactgtgtccaacagctgaaggaatttgaggggaagactttagtgtcagtcaccaaagaaggcctggaacttccagaggatgaagaagagaaaaagaagcaggaagagaaaaaaacaaagtttgagaacctctgcaaaatcatgaaagacatattggagaaaaaagttgaaaaggtggttgtgtcaaaccgattggtgacatctccatgctgtattgtcacaagcacatatggctggacagcaaacatggagagaatcatgaaagctcaagccctaagagacaactcaacaatgggttacatggcagcaaagaaacacctggagataaaccctgaccattccattattgagaccttaaggcaaaaggcagaggctgataagaacgacaagtctgtgaaggatctggtcatcttgctttatgaaactgcgctcctgtcttctggcttcagtctggaagatccccagacacatgctaacaggatctacaggatgatcaaacttggtctgggtattgatgaagatgaccctactgctgatgataccagtgctgctgtaactgaagaaatgccaccccttgaaggagatgacgacacatcacgcatggaagaagtagactaatctctggctgagggatgacttacctgttcagtactctacaattcctctgataatatattttcaaggatgtttttctttatttttgttaatattaaaaagtctgtatggcatgacaactactttaaggggaagataagatttctgtctactaagtgatgctgtgataccttaggcactaaagcagagctagtaatgctttttgagtttcatgttggtttattttcacagattggggtaacgtgcactgtaagacgtatgtaacatgatgttaactttgtggtctaaagtgtttagctgtcaagccggatgcctaagtagaccaaatcttgttattgaagtgttctgagctgtatcttgatgtttagaaaagtattcgttacatcttgtaggatctactttttgaacttttcattccctgtagttgacaattctgcatgtactagtcctctagaaataggttaaactgaagcaacttgatggaaggatctctccacagggcttgttttccaaagaaaagtattgtttggaggagcaaagttaaaagcctacctaagcatatcgtaaagctgttcaaaaataactcagacccagtcttgtggatggaaatgtagtgctcgagtcacattctgcttaaagttgtaacaaatacagatgagttaaaagatattgtgtgacagtgtcttatttagggggaaaggggagtatctggatgacagttagtgccaaaatgtaaaacatgaggcgctagcaggagatggttaaacactagctgctccaagggttgacatggtcttcccagcatgtactcagcaggtgtggggtggagcacacgtaggcacagaaaacaggaatgcagacaacatgcatcccctgcgtccatgagttacatgtgttctcttagtgtccacgttgttttgatgttattcatggaataccttctgtgttaaatacagtcacttaattccttggccttaaaa

SEQ ID NO: 1008 - DNA, 1810 bp, Homo sapiens
gggatcccgaccagtcctgaccgcacgggggccgcggccacggggcgcaggggccatggtgcgcggcaggatctcccggctctcggtccgggacgtgcgcttccccacgtcgcttgggggccacggcgcggacgccatgcacacggaccctgactactcggctgcctatgtcgtcatagaaactgatgcagaagatggaatcaaggggtgtggaattaccttcactctgggaaaaggcactgaagttgttgtctgtgctgtgaatgccctcgcccaccatgtgctcaacaaggacctcaaggacattgttggtgacttcagaggcttctataggcagctcacaagtgatgggcagctcagatggattggtccagaaaagggcgtggtgcacctggcgacagcggccgtcctaaacgcggtgtgggacttgtgggccaagcaggagggaaagcctgtctggaagttacttgtggacatggatcccaggatgctggtatcctgcatagatttcaggtacatcactgatgtcctgactgaggaggatgccctagaaatactgcagaaaggtcaaattggtaaaaaagaaagagagaagcaaatgctggcacaaggataccctgcttacacgacatcgtgcgcctggctggggtactcagatgacacgttgaagcagctctgtgcccaggcgctgaaggatggctggaccaggtttaaagtaaaggtgggtgctgatctccaggatgacatgcgaagatgccaaatcatccgagacatgattggaccggaaaagactttgatgatggatgccaaccagcgctgggatgtgcctgaggcggtggagtggatgtccaagctggccaagttcaagccattgtggattgaggagccaacctcccctgatgacattctggggcacgccaccatttccaaggcactggtcccattaggaattggcattgccacaggagaacagtgccacaatagagtgatatttaagcaactcctacaggcgaaggccctgcagttcctccagattgacagttgcagactgggcagtgtcaatgagaacctctcagtattgctgatggccaaaaagtttgaaattcctgtttgcccccatgctggtggagttggcctctgtgaactggtgcagcacctgattatatttgactacatatcagtttctgcaagccttgaaaatagggtgtgtgagtatgttgaccacctgcatgagcatttcaagtatcccgtgatgatccagcgggcttcctacatgcctcccaaggatcccggctactcaacagaaatgaaggaggaatctgtaaagaaacaccagtatccagatggtgaagtttggaagaaactccttcctgctcaagaaaattaagtgctcagccccaacaacttttttctttctgaagtgaaagggcttaaaatttcttggaaatagttttacaaaaatggatttaaaaaatcctaccgatcaagatgagttcagctagaagtcataccaccctcaggaatcagctaagtaattattacttgattcttttagcaaatcaatgcacgttatcctacttaatccttaaataagtttagatttaactaacccaaagtccaggaggatgttcttacaaaaatagctatatcaagggctggcacctagacattaaactgtaatttgaaaataagcaacatgttgcataacttgttggaataattccttgttctgtttaacacttgtcataaattagcagaataaaaatagtcgtgcaacaaaaaaaaaaaaaaaaaaaaaaaaaaaaaaaaa

SEQ ID NO: 1009 - DNA, 1629 bp, Homo sapiens
acgagggcggcaggcgcggcgcgcttagttgccggagctgaacggcgcggagctggtctgaggcgagccgagccgagcgagcgcggcggtggggccgagaggacgcgcaggtggcggcgttgccatgtcgcacggtcacagccacggcgggggtggctgccgctgcgccgccgaacgggaggagccgcccgagcagcgcggcctggcctacggcctgtacctgcgcatcgacctggagcggctgcaatgccttaacgagagccgcgagggcagcggccgcggcgtcttcaagccgtgggaggagcggaccgaccgctccaagtttgttgaaagtgatgcagatgaagagcttctgtttaatattccatttacgggcaatgtcaagctcaaaggcatcattataatgggagaggatgatgactcacacccctctgagatgagactgtacaagaatattccacagatgtcctttgatgatacagaaagggagccagatcagacctttagtctgaaccgggatcttacaggagaattagagtatgctacaaaaatttctcgtttttcaaatgtctatcatctctcaattcatatttcaaaaaacttcggagcagatacgacaaaggtcttttatattggcctgagaggagagtggactgagcttcgccgacacgaggtgaccatctgcaattacgaagcatctgccaacccagcagaccatagggtccatcaggttaccccacagacacactttatttcctaagggctggccaaggctcccatagaggcgctgtgtcagtgaagatgtacgactacctgttgggaaggacaaagggatgaggctccagagagagttggctgccacagcctctgccaagctttgtctttggggcttgctgcagaaacctggcctacggaagatacgacaccactgggagggttgtgtaggtgccaggggaccatcgtggttctctagggcgctgtggaaattgggtcttgggctgggtggcatctggcagtcatggataacacttgcttttccagttaatgtggccatgtgattccaagtgtcatgttgctttgtggcaagattgttgtgtgacttgtttttttgtttttgtttttgtttttttaaaggaaactatttgtgggctataggaaactttctgatgcctccggattgtgttagtagtagccatcaggagggtctccaactaaaacacttgttcctgcttgctcctttcccctctcattgttcagcattcttgtcaagttgcccagcttggagttgtctgtcacgcacatgtgtcctgtggttatagctagaaggacaggagtctcctgctgatgcgtgatagcttaagcttggggagaaggtcttttccactgcctagctaagcagtctggggagagcatggggatcatttctatgtgtgtgggtaatctggtcagtaagattgagacttagttaagattccccttggaaattccttaatgtttattagcttctaactagtgttgtaagtccgatgccagaatttggagatttgagttcttcttttcatggcttttattcactgtgactaataagcttcctaataaatccttgccagacttaaaaaaaaaaaaaaa

SEQ ID NO: 1010 - DNA, 2793 bp, Homo sapiens
gttgccagaagccaggatcatagagacgctcggcctccgccgcacgcgctggcggactaagagtggctggcgaagcgagcggccggcgcgggcccctggcgggcgggcggtacagccccaagcctgagacccggacctgagcatcgcaggcccaggacgaggtggccaggcggcccccatggcgtccctggtctaggcggagaaccgcctgggcgatgagtgagaacctcgacaacgagggcccgaagcccatggagagctgtggccaggagagcagcagtgccctgagctgccctaccgtctcggtgccccctgcagccccggcagccctggaggaggtggagaaagagggcgctggggcggctacagggccggggcctcagcccgggctctacagctacatcagggatgacttgtttacctctgagatctttaaactggagctgcagaacgtgcctcgccacgccagcttcagcgacgtccggcgcttcctgggccgctttggtctgcagccccacaaaaccaaactctttgggcaaccaccctgcgcctttgtgacattccgcagcgctgcagagagggacaaggccctgcgcgttttgcatggtgccctctggaaaggccgcccactcagtgtgcgcctggcccggcccaaggccgaccccatggccaggaggaggcgacaggagggtgagagtgagccaccagtaacacgagtggccgacgtggtgacccctctatggacagtgccctatgctgagcagcttgagcggaagcagctggagtgcgagcaggtgctgcagaaacttgccaaggaaatcgggagcaccaaccgtgccttgctgccctggctgctcgagcagaggcacaagcacaacaaggcctgctgcccgctggagggggtcaggccatcaccccagcagactgagtatcgtaataagtgtgagtttctggttggcgtcggggtggatggggaggataacaccgtgggctgtcggctcggcaagtacaagggcgggacgtgtgctgtggcagccccgtttgacaccgtgcacatccccgaagccaccaagcaggtggtgaaggccttccaggagttcatccggtccactccatactcggcatacgacccagagacgtacacaggccactggaagcagctgactgtgcgcaccagccgccgccaccaggccatggccattgcctacttccacccccagaagctgagccctgaggagctggcagagctgaagacctccctagcgcagcacttcacagcagggccaggcagggccagtggagtgacctgcctctacttcgtggaggagggacagcgaaagactcctagccaggagggcctgcccctggagcatgtggctggggaccggtgcatccacgaggacctgctagggctgaccttccggatctctccacacgccttcttccaggtgaacacacccgcagccgaggtgctctacacagtcatccaggactgggcccaattggatgcggggagcatggtgctggacgtgtgctgtggcaccggcaccattggcctggccctggcccggaaggtaaagagggtcattggggtcgagctatgcccagaggctgtggaggacgcccgggtgaacgcccaggacaatgagttgagtaatgtggagttccactgcgggagggccgaggacctggtgcccaccctggtgagcagactggcctcccagcacctcgtggccatcctggacccaccccgtgctggcttgcattccaaggtgatcctggccatccggagagctaagaacctcaggcggctgctgtacgtctcatgcaacccccgggcagccatgggcaactttgtggacctctgcagagccccatctaaccgggtgaagggcattcccttccggccggtcaaggctgtggcagtggacctgttcccgcagaccccgcactgtgagatgctcatcctgtttgagagggtggagcaccccaatggcacaggggtcttggggccccacagccctccagctcaacccacaccaggacccccagataacaccctacaagaaactgggaccttcccctcatcctaggcccaggacccattatggggacaggagctgaagggctcccagggccccaggggcggggaaggcatggcttgctggccaggatattcagaggtaggcagccaaagggcacagaaccctgtgccccaccaggattggcctgctgctaggggccaggggccctgaccaggaagacaggtgggttcctgtagcctgttgcccatccccagggcctttgtggactagccaaggctgtgagggccagaataaacaactgctcaacaaagggtgtttctgtgatgagagccaggggtctgaacacagggcctgggtgccagggaaagggccaaactaggcctaggcagctctgcaagcctctctgcatggctgggggagtcagggcagagcttactttaaaaaagaatgttcgatttgatacttaaacttgaggagaggcagagagaggtctgggaactgcaccagctgggggcatggggtggagaacactgggcagagttggcccctctgtggccagcctggccctcagcccagcagagagggcatcaaccaaggaaggggccatgctggggtgctgctcagctgttacaaaggcagggtccagcctgcagggaggccccaggaggggatctggccagtcaagggtccacagggtgccagcctctcaccctcagaataaagacatcagccattcaaaaaaaaaaaa

SEQ ID NO: 1011 - DNA, 2855 bp, Homo sapiens
ctaaatccagaatcgtttcaattactgtgaggggaattctgaagttctcattaaacacacgaatgtctcaagctttgaaaagagccagatgccaaaggcaagaatcccagggcattgcccacctgggtgtgatcccctgataattgtctaacaaattcagcatgtgtcccctgggcatgaccatctgctgggaaaagttccaggaccctgagacatcttgggattcctgtggtttaggaaagacctttaactaccagctggtagttgtctcagcattcttcaaatagtccggtcttgtttaatattattattattattgttatttaattttattttattgcaactgtacttagagaatagtctggtcttgagaccttttcactgtggtctgttctggtgtacggctcccaccagtgtgaagcagaaggatgactttgctctgttgtcaggacaaccttgaaggaaggagccaaatgtgtggaggtctgtgggaagagagagccacctagcatgtccccactgaaccagtcagcagaaggccttccccaggaggcctccaacagatccctgaatgccacagaaacctcagaggcttgggatcccaggaccctccaggcgctcaagatctcccttgccgtggtcctttccgtcatcacactggccacagtcctctccaatgcctttgtactcaccaccatcttactcaccaggaagctccacacccctgccaactacctgattggctccctggccaccaccgacctcttggtttccatcttggtaatgcccatcagcatcgcctataccatcacccacacctggaactttggccaaatcttgtgtgacatctggctgtcctctgacatcacgtgctgcacagcctccatcctgcatctctgtgtcattgctctggacaggtactgggcaatcacagatgccctggaatacagtaaacgcaggacggctggccacgcggccaccatgatcgccattgtctgggccatctccatctgcatctccatccccccgctcttctggcggcaggccaaggcccaggaggagatgtcggactgtctggtgaacacctctcagatttcctacaccatctactccacctgtggggccttctacattccctcggtgttgctcatcatcctatatggccggatctaccgggctgcccggaaccgcatcctgaatccaccctcactctatgggaagcgcttcaccacggcccacctcatcacaggctctgccgggtcctcgctctgctcgctcaactccagcctccatgaggggcactcgcactcggctggctcccctctctttttcaaccacgtgaaaatcaagcttgctgacagtgccctggaacgcaagaggatttctgctgctcgagaaaggaaagccactaaaatcctgggcatcattctgggggcctttatcatctgctggctgcccttcttcgtggtgtctctggtcctccccatctgccgggactcctgctggatccacccggcgctctttgacttcttcacctggctaggctatttaaactccctcatcaatccaataatctacactgtgtttaatgaagagtttcggcaagcttttcagaaaattgtccctttccggaaggcctcctagtcttattcggtgatgactcttgttatcttttgtgtcctgtaacctcatcgggattgtcttttttttttaattattttctgagacttggattaattcatggtatcttgagtcttggttcaatcaacagaattgttctttttcctgttgttttcttaacttctgaaagagctgtgggtggtggggggcggggggcaggactgaagatttcactacttagcataatattttctttctttttttttttttttgagacggagtcttgccctctcgccaggctggagtgtagtggcacaatctcagctcactgcaacctccgcatcccgggttcaagagattctgcctcagcctccagagtagctgggactacaaacgtgtgtcaccaggcccagctaatttttgtatttttaataaagacggggtttcatcatgttggccagggtggtctcgatctcttgacctcgtgatccgcccgcctcagcatcccaaagtgctgggattacaggcatgagccactgtgcctggccaacataatgttttcacagttcctctttgttggaagaagtgtgtgacctacaagattcctggttgatacagttcaggtgagaaactgtttgattatagaaaagaccccagactcagagggaaggctctctggtctacctgagatctatatggagcttaaaggagggtgaataagattaatgacctgaattgaaagagaatttggagccaggatgggtctccattctgtgtggcaccttgattggaaaataatatccatgcgtttcttccactgagtctttcttagattaaatctctcccagttgtccgtgaagagaaagacagtatttgcagtgccgatgatatagagtgacttggagagagattcagaagttaggggtagcgggggtaggatggttgggaccagattgactaccctgtacccttccttcttccccaatatgcctgcgccatcttcacattctgaagttgaaacccatgatcacccctttgaggtagattgaccggctttagacgcccaccccccacccaccgcaagctttgagtgggacaccattctgaattttttttctgaatttttttttaacatctctttctcattagagatctgaaaactcattagagatgttgagtcttatcaaataaaaagcatgagacatcatggccaaaaaaaaaaaaaaaaaaaaaaa

SEQ ID NO: 1012 - DNA, 7987 bp, Homo sapiens
aatcttccccaccaaagtcaagggtggaattgggcaaaattcattttaagaaacatctgcttcatgtaacatccaggccactgctggctactaccacagcagtagcatctccacctactcatgcagcaccattaccagcagtgatagcagaatcaacaactgtagactcaccgccctcatctccgcctccaccgcctccacctgcccaagccacaacactctcatcaccagcaccagtaacagagccagtggccttgccacatacaccaataacagttctaatggcagcaccagtacccttaccagtagatgtagcagttagatctctgaaagaaccaccaattataattgtaccagaatctttagaagcagatactaagcaggacactatatctaatagtttagaagaacacgtaactcaaatattgaatgagcaagcagatatttcctcaaaaaaagaagattcccatattgggaaggatgaagaaattccagatagttctaagattagtctgagctgtaaaaaaacaggttctaagaagaaatcctcacaatctgaaggcatctttcttggttcagaatctgatgaagattctgtacggacttcttcaagtcaaagatcacatgatttaaaattttcagcaagcattgaaaaggaaagagattttaaaaagagctcagcacctttaaaaagtgaggatctagggaaaccttcacgatctaaaacagacagagatgataaatattttagctattcaaaacttgaaagagatactcggtatgtatcttcccgatgtagatcagaaagagagcgacggcggagcagatctcactctaggtctgagagaggctctagaactaatttatcctattccaggtcagaacgatctcattattatgactctgatcgtcgctaccataggagctccccttatcgagagaggacgcgctattctcggccatacacagataacagagcacgagagagttctgactcagaagaagagtataagaagacatactcaaggcgtacctcatctcattcctcttcttacagagacctaaggacatcatcctattctaaatctgatcgggactgtaaaactgagacctcttacttagagatggaaagaagaggcaagtattcttcaaaactagaaagagaatctaaaaggacttcagaaaatgaagcaattaaaagatgttgttctccccctaatgaactgggattccgacgagggtcatcatattctaagcatgacagtagtgcttcccgttataaatctaccctttcaaaacctatacccaagtctgataaatttaaaaattctttctgttgtacagaattaaatgaagaaatcaaacagtctcattcttttagtttacagacaccttgttcaaaaggtagtgaattaagaatgattaataaaaatcctgaaagagaaaaggctgggtctccagctccatcaaatcgattaaatgattcacctactttaaaaaagctagatgaattgcctatttttaagtccgaatttataacacatgatagccatgatagtattaaggaattagactctttatctaaagtgaagaatgatcaattaagaagtttttgtcccatagaattaaatataaatggatctcctggggcagaatctgatttggcaacattttgcacttctaaaactgatgctgttttaatgacttctgatgatagtgtgactggatcggaattatcccctttggtcaaagcatgcatgctttcatcaaatggatttcagaatattagtaggtgcaaagaaaaagacttggatgatacctgcatgctgcataagaagtcagaaagcccatttagagaaacagaacctctggtgtcaccacaccaagataaactcatgtctatgccagttatgactgtggattattccaaaacagtagttaaagaaccagttgatacgagggtttcttgctgcaaaaccaaagattcagacatatactgtactttgaacgatagcaacccttctttgtgtaactctgaagctgaaaatattgagccttcagttatgaagatttcttcaaatagctttatgaatgtgcatttggaatcaaaaccagttatatgtgatagtagaaatttgacagatcactcaaaatttgcatgtgaagaatataagcagagcatcggtagcactagttcagcttctgttaatcattttgatgatttatatcaacctattgggagttcaggtattgcttcatctcttcagagtcttccaccaggaataaaggtggacagtctaactctcttgaaatgcggagagaacacatctccagttctggatgcagtgctaaagagtaaaaaaagttcagagtttttaaagcatgcagggaaagaaacaatagtagaagtaggtagtgaccttcctgattcaggaaagggatttgcttccagggagaacaggcgtaataatgggttatctgggaaatgtttgcaagaggctcaagaagaagggaattccatattgcctgaaagaagaggaagaccagaaatctctttagatgaaagaggagaaggaggacatgtgcatacttctgatgactcagaagttgtattttcttcttgtgatttgaatttaaccatggaagacagtgatggtgtaacttatgcattaaagtgtgacagtagtggtcatgccccagaaattgtgtctacagttcatgaagattattctggctcttctgaaagttcaaatgatgaaagtgattcagaagatacagattcggatgatagcagtattccaagaaaccgtctccagtctgttgtggttgtgccaaagaattctactttgcccatggaagaaacaagtccttgttcttctcggagcagtcaaagttatagacactattctgaccattgggaagatgagagattggagtcaaggagacatttgtatgaggaaaaatttgaaagtatagcaagtaaagcctgtcctcaaactgataagtttttccttcataaaggaacagagaagaatccggaaatttcttttacacagtccagtagaaaacaaatagataatcgcctgcctgaactttctcatcctcagagtgatggggttgatagtacaagtcatacagatgtgaaatctgaccctctgggtcacccaaattcagaggaaaccgtgaaagccaaaataccttctaggcagcaagaagagctgccaatttattcttctgattttgaagatgtcccaaataagtcttggcaacagaccactttccaaaacaggccagatagtagactgggaaaaacagaattgagtttttcttcctcttgtgagataccacatgtggatggcttgcactcatcagaagagctcagaaacttaggttgggacttctctcaagaaaagccttctaccacgtatcagcaacctgacagtagctatggagcttgtggtggacacaagtatcagcaaaatgcagaacagtatggtgggacacgtgattactggcaaggcaatggttactgggatccaagatcaggtagacctcctggaactggggttgtgtatgatcgaactcaaggacaagtaccagattccctaacagatgatcgtgaagaagaggagaattgggatcaacaggatggatcccatttttcagaccagtccgataaatttcttctatcccttcagaaagacaaggggtcagtgcaagcacctgaaataagcagcaattccattaaggacactttagctgtgaatgaaaagaaagatttttcaaaaaacttagaaaaaaatgatatcaaagatagagggcctcttaaaaaaaggaggcaggaaatagagagtgattctgaaagtgatggtgagcttcaggacagaaagaaagttagagtggaggtagagcagggagagacatcagtgcccccaggttcagcactggttgggccctcctgtgtcatggatgacttcagggacccacagcgatggaaggaatgtgccaagcaagggaaaatgccatgttactttgatcttattgaagaaaatgtttatttaacagaaagaaagaagaataaatctcatcgagatattaagcgaatgcagtgtgagtgtacacctctttctaaagatgaaagagctcaaggtgaaatagcatgtggggaagattgtcttaatcgtcttctcatgattgaatgttcttctcggtgtccaaatggggattattgttccaatagacggtttcagagaaaacagcatgcagatgtggaagtcatactcacagaaaagaaaggctggggcttgagagctgccaaagaccttccttcgaacacctttgtcctagaatattgtggagaggtactcgatcataaagagtttaaagctcgagtgaaggagtatgcacgaaacaaaaacatccattactatttcatggccctgaagaatgatgagataatagatgccactcaaaaaggaaattgctctcgtttcatgaatcacagctgtgaaccaaattgtgaaacccaaaaatggactgtgaacggacaactgagggttgggttttttaccaccaaactggttccttcaggctcagagttaacgtttgactatcagttccagagatatggaaaagaagcccagaaatgtttctgcggatcagccaattgccggggttacctgggaggagaaaacagagtcagcatcagagcagcaggagggaaaatgaagaaggaacgatctcgtaagaaggattcagtggatggagagctagaagctctgatggaaaatggtgagggtctctctgataaaaaccaggtgctcagcttatcccggctaatggttagaattgaaactttggagcagaaacttacctgtctggaactcatacagaacacacactcacagtcctgcctgaagtcctttctggaacgtcatgggctgtctttgttgtggatctggatggcagagctaggtgacggccgggaaagtaaccagaagcttcaggaagagattataaagactttggaacacttgcccattcctactaaaaatatgttggaggaaagcaaagtacttccaattattcaacgctggtctcagactaagactgctgtccctccgttgagtgaaggagatgggtattctagtgagaatacatcgcgtgctcatacaccactcaacacacctgatccttccaccaagctgagcacagaagctgacacagacactcccaagaaactaatgtttcgcagactgaaaattataagtgaaaatagcatggacagtgcaatctctgatgcaaccagtgagctagaaggcaaggatggcaaagaggatcttgatcaattagaaaatgtccctgtagaggaagaggaagaattgcagtcacaacagctactcccacaacagctgcctgaatgcaaagttgatagtgaaaccaacatagaagctagtaagctacctacatctgaaccagaagctgacgctgaaatagagcccaaagagagcaacggcacaaaactagaagaacctattaatgaagaaacaccatcccaagatgaagaggagggtgtgtctgatgtggagagtgaaaggagccaagaacagccagataaaacagtggatataagtgatttggccaccaaactcctggacagttggaaagacctaaaggaggtatatcgaattccaaagaaaagtcaaactgaaaaggaaaacacaacaactgaacgaggaagggatgctgttggcttcagagatcaaacacctgccccgaagactcctaataggtcaagagagagagacccagacaagcaaactcaaaataaagagaaaaggaaacgaagaagctccctctcaccaccctcttctgcctatgagcggggaacaaaaaggccagatgacagatatgatacaccaacttctaaaaagaaagtacgaattaaagaccgcaataaactttctacagaggaacgccggaagttgtttgagcaagaggtggctcaacgggaggctcagaaacaacagcaacagatgcagaacctgggaatgacatcaccactgccctatgactctcttggttataatgccccgcatcatccctttgctggttacccaccaggttatcccatgcaggcctatgtggatcccagcaaccctaatgctggaaaggtgctcctgcccacacccagcatggacccagtgtgttctcctgctccttatgatcatgctcagcccttggtgggacattctacagaacccctttctgcccctccaccagtaccagtggtgccacatgtggcagctcctgtggaagtttccagttcccagtatgtggcccagagtgatggtgtagtacaccaagactccagcgttgctgtcttgccagtgccggcccccggcccagttcagggacagaattatagtgtttgggattcaaaccaacagtctgtcagtgtacagcagcagtactctcctgcacagtctcaagcaaccatatattatcaaggacagacatgtccaacagtctatggtgtgacatcaccttattcacagacaactccaccaattgtacagagttatgcccagccaagtcttcagtatatccaggggcaacagattttcacagctcatccacaaggagtggtggtacagccagccgcagcagtgactacaatagttgcaccagggcagcctcagcccttgcagccatctgaaatggttgtgacaaataatctcttggatctgccgcccccctctcctcccaaaccaaaaaccattgtcttacctcccaactggaagacagctcgagatccagaagggaagatttattactaccatgtgatcacaaggcagactcagtgggatcctcctacttgggaaagcccaggagatgatgccagccttgagcatgaagctgagatggacctgggaactccaacatatgatgaaaaccccatgaaggcctcgaaaaagcccaagacagcagaagcagacacctccagtgaactagcaaagaaaagcaaagaagtattcagaaaagagatgtcccagttcatcgtccagtgcctgaacccttaccggaaacctgactgcaaagtgggaagaattaccacaactgaagactttaaacatctggctcgcaagctgactcacggtgttatgaataaggagctgaagtactgtaagaatcctgaggacctggagtgcaatgagaatgtgaaacacaaaaccaaggagtacattaagaagtacatgcagaagtttggggctgtttacaaacccaaagaggacactgaattagagtgactgttgggccagggtgggaggatgggtggtcaggtaagacagactctagggagaggaaatcctgtgggcctttctgtcccacccctgtcagcactgtgctactgatgatacatcaccctggggaattcaaccctgcagatgtcaactgaaggccacaaaaatgaactccatctacaagtgattacctagttgtgagctgttggcatgtggttagaagccatcagaggtgcaagggcttagaaaagaccctggccagacctgactccactcttaaacctgggtcttctccttggcggtgctgtcagcgcacagacccatgcgcatccccacccacaaccctttaccctgatgatctgtattatattttaatgtatatgtgaatatattgaaaataatttgttttttcctggtttttgtttggttttcgttttgcttttagcctctacatgctaggatcacaggaagactttgtaaggacagtttaagttctcctgcaaggtttaatttgttatcatgtaaatattctaaagcaggctgccttgtggttttggccagccttgtgctatgttgataagattgatttactgcttaaaatcactttactttatccaatttttactgaactttttatgtaaaaaaataaaatcaattaaagaacttggcatgtgtgttcccta

SEQ ID NO: 1013 - DNA, 4782 bp, Homo sapiens
cgctcccgctgcaacagtcccgggcatcgcagctgccagtcaaggctaggaggcggtcggggactccgcctcctcccgacccgtaggtctgggagcgcaagtcctgttgcagtcttgcaaagtgtaaagctgtcagccgcagagcacggaggaaagacggagagaatggaagagctcctgtccggtgtgccagcagcccggactggcggtgagcgcgagggaggctactgagaagcccggcgacggaggaacgcaggtctgctgccagggattgaggagactgaagaatgctgaagacaggctgatgggctcagctggtaggctccactatctcgccatgactgctgaaaatcccactcctggagacctggctccggcccccctcatcacttgcaaactctgcctgtgtgagcagtctctggacaagatgaccacactccaggaatgccagtgcatcttttgcacagcttgcctgaaacagtacatgcagctggcaatccgagaaggatgtgggtctcccatcacttgccctgacatggtgtgcctaaaccacgggaccctgcaggaagctgagattgcctgtttggtacctgtggaccagtttcaactttatcagaggttaaaatttgaaagagaagttcatctggacccctaccgaacatggtgtcctgttgcagactgtcagacagtgtgccctgttgcctcgagtgacccaggacagcctgtgctggtggaatgcccttcttgccacctgaaattctgctcgtgttgcaaggatgcttggcatgcagaggtctcctgtagagacagtcagcctattgtcctgccaacagagcaccgagccctctttgggacagatgcagaagcccccattaagcagtgcccagtttgccgggtttatatcgaacgcaatgaaggctgcgctcagatgatgtgcaaaaactgcaagcatacattttgctggtactgcctccagaacttggataatgacattttcctcagacattatgacaaagggccatgcaggaataaacttggccactcaagagcatcagtgatgtggaaccgaacacaggtggtggggattctcgtaggcttgggcatcattgccttggttacttcacccttgttactcctggcctccccatgtataatctgttgtgtctgcaagtcctgtcggggcaagaagaaaaagcacgacccatccacaacctaaagatctctgtgttcatacgccccagatatgtgagttacatgagatggcacagtgataaagccccatttagtgaccttgcctccttctccttgccaactttgaaagtgcctccgtgtccagactttgaacttgcctgccagccttcagcatcaggaaaggccaagtcctgggtgtgagtgttcctgtgtaacaagaactgggctcaacggtccagctgtttctatggagctttggggttccttgagatgaatgaacatatcattttatcatccaaaggatctcactggactgttcaacttccagccaaattcaaggagcttgcgggaacatttgatataacaaatgtgttgtcattgttggcaacatacaagataaccaagaagctggagtctgttctgtgttgatttgactgccatgagaaacacaggggaaacctgatgaggagaaggataagactgcgtaaggagaaatcctcataggagctataaagcaggctgctgatctcagcagttgatatggtggttgtgcctctgctggctactgggtgtgctgtccccatgttcccgctgtgatttggcagaaacacaataggcttctccttgtgtgatctcagcttcaagcaggtgaaactgctgtgcagagggagttgccccttcccagtaaaagagttgcagcctgttaaacaatgtggtctaatttagtgtctctcccttggcaaatgtaagttttctaagttggccaacttgtctcttacagccagtggctgtggtctacagaattgtttcatataaaatacgggtagagtggtagagtttcaaaactttcgtcatagatatctgggacctttctcaggatctgtgttcacacagccaatagatttggaatcaggcctaagagtacacatggagggtaaatattaaagtgcgtattatgtacatctagaatccatgtgacttgcagcctacctgtaatttctatccattgagcatgcatggatatacccaatagtacacacaaaataaatgtttacttaagagccattctatccttttgtgactgaaatggtttattgtaaatctgcctaaagattttttgcatattatatatgtgaattttggttgtaagttcataacttacccaagggtatagactcataactcttttaaaacagtgcttagtacaatatcctgccatctctgtaaaaacgctaattgataaccgagtcatttacatgttttcgaacacagaatagctcttttctcagcatcattattgctctttcagcatctgttaggacagtctgaatactttctgtttcaaggcactgataaaaccgcaacaaaaacatgtaagaaataaaatagaaatgctttatatattttagtttaaatttatgtatcacctcattgtgacttattttttccattataccattagtcagatttgaataacgaggttttgaaaggataaaaccttttctccaatgacaggattatataattgctattggcaatgtagcctggtgcttcatgagacctatgctaaatgttactggagagttcttgaagccagggataccatatcaggaactattcaggatctatgatattttctgaggtaactgggtaatagaatatcaaattgctgctatctcggacctattgttaaaggatgatgctttgcctatgtaataggatatatcctaagtggggatgtgtatatttcaggaactttaattcacaagtatatattgatatctgatgtgtgtatagtacatctgttggttatgtacattttaatttacatgttgtgtagaacatagatgagaactctgggaaaacttgggaatggcaaccaaccaaaatcatttttaatcatttattagaaatttctcaatattgtgtctttttcttttgaaactctaaacacttcagaaaaaaacactatcagtgtagttcatgttagtataattatagatttacatatatttgaatagttaatttgctttgttttacacgtagcccactgcctcattataggtaaaaggcatttataactgctcaggggattacgagaactcaactgaaactgaatttttgtaacaagaatgttaatagtggcaaagtcctctgtcagtaaactctttaagcttggtgccgcaaagagtctttaaatgggggctgatttcaagtaacctaaaagactgtgttatcagaggaagaggtcccaaatttggagtaaagatgggagaaaataaatatgtgctatttccttggcgagttgggggaatttgccaccttacagagtttgtatcactgaattagctgcttttgtttttttttttttttttttgccagggctatggagtgggggttgtttgtcaaactgattttcaataattggatttaattttttttaacattgaaaagtgcctgaaaaatggtaaattcttaaatgtgtgtgagattgtcagaatcaacaaaactaggttggttaaacatatctctggtacatcaaggggcatgatacaaaccagtctaaagactgtttataaaggagagagctggcgacttatttttattttttttttttggacagagtctccctttgtcacccaggccggagtgcagtggcatgatcatggttcacttcaacccctacctcctgggctcaagtgttcctctcaccttatcctcctgagcagctgggactacaggcacacaccaccacacctggctaagttttgtattttttgtagagatggggtttctctgtgttgcccagtcttgtctcaaactcctgggctcaagcgatccacccaccttgggctcccaaagtgttgggattacaggtgtgtgtcactgtgcctgacagctgacagttttaactgacaactttgataacagaggctgctatttttgttttagataattggccagtgacagagtttacccttgcctcctttcttggtctgccagctttgtcctttctgagtgattctctttctgtattgagaggaagtgtgggtctacatagggatgtttggatgctatggcaagaatctttttgtgtttggagtgtagtccatttgcaatagaaataaaaaaatccgtcaccaaattgtaacctggatgttatagcccagcatctagaaatcctatgaaatgtattagcacaatatcttgccattgtcccatctaggaaattttttcttgttgtgaggtagggaagtgaggaggaaagccatgccgaagcaaatgttagaatcttaggcatcctatttgttcatgccatgggtatttgctttggacttggagtctgtactttgaaagaggcctttgaaaaacaaataattctgtgtgaattttcttgtagcgtgcttcatgaaaatatctacttatccaggtttgcaaatgtacatgttcatttgaatgtaaatcaccatttcttggaaccccacgttttttcttaaaaattattctgaattaaatgtatatttctttagccttccctacacagtactaataaaagacttttctttctgttcatgaaaaaaaaaaaaaaaa

SEQ ID NO: 1014 - DNA, 1432 bp, Homo sapiens; identical to SEQ ID NO: 1000

SEQ ID NO: 1015 - DNA, 1592 bp, Homo sapiens; identical to SEQ ID NO: 1001

SEQ ID NO: 1016 - DNA, 1186 bp, Homo sapiens; identical to SEQ ID NO: 1002

SEQ ID NO: 1017 - DNA, 1074 bp, Homo sapiens; identical to SEQ ID NO: 1003

SEQ ID NO: 1018 - DNA, 1071 bp, Homo sapiens; identical to SEQ ID NO: 1004

SEQ ID NO: 1019 - DNA, 652 bp, Homo sapiens; identical to SEQ ID NO: 1005

SEQ ID NO: 1020 - DNA, 1043 bp, Homo sapiens; identical to SEQ ID NO: 1006

SEQ ID NO: 1021 - DNA, 3366 bp, Homo sapiens; identical to SEQ ID NO: 1007

SEQ ID NO: 1022 - DNA, 1810 bp, Homo sapiens; identical to SEQ ID NO: 1008

SEQ ID NO: 1023 - DNA, 1629 bp, Homo sapiens; identical to SEQ ID NO: 1009

SEQ ID NO: 1024 - DNA, 2793 bp, Homo sapiens; identical to SEQ ID NO: 1010

SEQ ID NO: 1025 - DNA, 2855 bp, Homo sapiens; identical to SEQ ID NO: 1011

SEQ ID NO: 1026 - DNA, 7987 bp, Homo sapiens; identical to SEQ ID NO: 1012

SEQ ID NO: 1027 - DNA, 4782 bp, Homo sapiens; identical to SEQ ID NO: 1013

SEQ ID NO: 1028 - DNA, 1500 bp, Homo sapiens
ggtcgcggtccccccctcaacatggcggcagcggtgctctaggcgccggaagggggcgtgaatcggtgcgaccgcgcgcgtgcgcagtaccgggtccgcgcctgtccccgaaacttcgcaccccgtcgaactctcgcgagagcggtatctgcgtgtcgggacgtgcggaggctctcactttccgtcatggcgctgaaggtagcgaccgtcgccggcagcgccgcgaaggcggtgctcgggccagcccttctctgccgtccctgggaggttctaggcgcccacgaggtcccctcgaggaacatcttttcagaacaaacaattcctccgtccgctaagtatggcgggcggcacacggtgaccatgatcccaggggatggcatcgggccagagctcatgctgcatgtcaagtccgtcttcaggcacgcatgtgtaccagtggactttgaagaggtgcacgtgagttccaatgctgatgaagaggacattcgcaatgccatcatggccatccgccggaaccgcgtggccctgaagggcaacatcgaaaccaaccataacctgccaccgtcgcacaaatctcgaaacaacatccttcgcaccagcctggacctctatgccaacgtcatccactgtaagagccttccaggcgtggtgacccggcacaaggacatagacatcctcattgtccgggagaacacagagggcgagtacagcagcctggagcatgagagtgtggcgggagtggtggagagcctgaagatcatcaccaaggccaagtccctgcgcattgccgagtatgccttcaagctggcgcaggagagcgggcgcaagaaagtgacggccgtgcacaaggccaacatcatgaaactgggcgatgggcttttcctccagtgctgcagggaggtggcagcccgctaccctcagatcaccttcgagaacatgattgtggataacaccaccatgcagctggtgtcccggccccagcagtttgatgtcatggtgatgcccaatctctatggcaacatcgtcaacaatgtctgcgcgggactggtcgggggcccaggccttgtggctggggccaactatggccatgtgtacgcggtgtttgaaacagctacgaggaacaccggcaagagtatcgccaataagaacatcgccaaccccacggccaccctgctggccagctgcatgatgctggaccacctcaagctgcactcctatgccacctccatccgtaaggctgtcctggcatccatggacaatgagaatatgcacactccggacatcgggggccagggcacaacatctgaagccatccaggacgtcatccgccacatccgcgtcatcaacggccgggccgtggaggcctaggctggccctaggaccttcttggtttgctccttggattccccttcccactccagcaccccagccagcctggtacgcagatcccagaataaagcaccttctccctagaaaaaaaaaaaaaaaaaaaaaaaaaaa

SEQ ID NO: 1029 - DNA, 1723 bp, Homo sapiens
ggtcgcggtccccccctcaacatggcggcagcggtgctctaggcgccggaagggggcgtgaatcggtgcgaccgcgcgcgtgcgcagtaccgggtccgcgcctgtccccgaaacttcgcaccccgtcgaactctcgcgagagcggtatctgcgtgtcgggacgtgcggaggctctcactttccgtcatggcgctgaaggtagcgaccgtcgccggcagcgccgcgaaggcggtgctcgggccagcccttctctgccgtccctgggaggttctaggcgcccacgaggtcccctcgaggaacatcttttcagaacaaacaattcctccgtccgctaagtatggcgggcggcacacggtgaccatgatcccaggggatggcatcgggccagagctcatgctgcatgtcaagtccgtcttcaggcacgcatgtgtaccagtggactttgaagaggtgcacgtgagttccaatgctgatgaagaggacattcgcaatgccatcatggccatccgccggaaccgcgtggccctgaagggcaacatcgaaaccaaccataacctgccaccgtcgcacaaatctcgaaacaacatccttcgcaccagcctggacctctatgccaacgtcatccactgtaagagccttccaggcgtggtgacccggcacaaggacatagacatcctcattgtccgggagaacacagagggcgagtacagcagcctggagcatgagagtgtggcgggagtggtggagagcctgaagatcatcaccaaggccaagtccctgcgcattgccgagtatgccttcaagctggcgcaggagagcgggcgcaagaaagtgacggccgtgcacaaggccaacatcatgaaactgggcgatgggcttttcctccagtgctgcagggaggtggcagcccgctaccctcagatcaccttcgagaacatgattgtggataacaccaccatgcagctggtgtcccggccccagcagtttgatgtcatggtgatgcccaatctctatggcaacatcgtcaacaatgtctgcgcgggactggtcgggggcccaggccttgtggctggggccaactatggccatgtgtacgcggtgtttgaaacagctacgaggaacaccggcaagagtatcgccaataagaacatcgccaaccccacggccaccctgctggccagctgcatgatgctggaccacctcaagctgcactcctatgccacctccatccgtaaggctgtcctggcatccatggacaatgagaatgtgaggttcccctcgcaccctaccctgctgccccgcccagtctccccctgcagcctcctgtagcccgcctcatgcactgaccacagcccccaggggaggatggtactggatctggccccatcttctggcccttagctggtgccacttccctcctgtggcaatcccagtcctgcacgtcacaggagacagcggggggtggcagggcctggtgtgtgccgagcctgcctgtgtcctacagatgcacactccggacatcgggggccagggcacaacatctgaagccatccaggacgtcatccgccacatccgcgtcatcaacggccgggccgtggaggcctaggctggccctaggaccttcttggtttgctccttggattccccttcccactccagcaccccagccagcctggtacgcagatcccagaataaagcaccttctccctagaaaaaaaaaaaa

SEQ ID NO: 1030 - DNA, 1254 bp, Homo sapiens
ctcacttggccttacactccgctcggctcaccatgtgtcactctcgcagctgccacccgaccatgaccatcctgcaggccccgaccccggccccctccaccatcccgggaccccggcggggctccggtcctgagatcttcaccttcgaccctctcccggagcccgcagcggcccctgccgggcgccccagcgcctctcgcgggcaccgaaagcgcagccgcagggttctctaccctcgagtggtccggcgccagctgccagtcgaggaaccgaacccagccaaaaggcttctctttctgctgctcaccatcgtcttctgccagatcctgatggctgaagagggtgtgccggcgcccctgcctccagaggacgcccctaacgccgcatccctggcgcccacccctgtgtccgccgtcctcgagccctttaatctgacttcggagccctcggactacgctctggacctcagcactttcctccagcaacacccggccgccttctaactgtgactccccgcactccccaaaaagaatccgaaaaaccacaaagaaacaccaggcgtacctggtgcgcgagagcgtatccccaactgggacttccgaggcaacttgaactcagaacactacagcggagacgccacccggtgcttgaggcgggaccgaggcgcacagagaccgaggcgcatagagaccgaggcacagcccagctggggctaggcccggtgggaaggagagcgtcgttaatttatttcttattgctcctaattaatatttatatgtatttatgtacgtcctcctaggtgatggagatgtgtacgtaatatttattttaacttatgcaagggtgtgagatgttccccctgctgtaaatgcaggtctcttggtatttattgagctttgtgggactggtggaagcaggacacctggaactgcggcaaagtaggagaagaaatggggaggactcgggtgggggaggacgtcccggctgggatgaagtctggtggtgggtcgtaagtttaggaggtgactgcatcctccagcatctcaactccgtctgtctactgtgtgagacttcggcggaccattaggaatgagatccgtgagatccttccatcttcttgaagtcgcctttagggtggctgcgaggtagagggttgggggttggtgggctgtcacggagcgactgtcgagatcgcctagtatgttctgtgaacacaaataaaattgatttactgtctgcaaaaaaaaaaaaaaa

SEQ ID NO: 1031 - DNA, 1051 bp, Homo sapiens
ggaccgccgcctggttaaaggcgcttatttcccaggcagccgctgcagtcgccacacctttgcccctgctgcgatgaccctgtcgccacttctgctgttcctgccaccgctgctgctgctgctggacgtccccacggcggcggtgcaggcgtcccctctgcaagcgttagacttctttgggaatgggccaccagttaactacaagacaggcaatctatacctgcgggggcccctgaagaagtccaatgcaccgcttgtcaatgtgaccctctactatgaagcactgtgcggtggctgccgagccttcctgatccgggagctcttcccaacatggctgttggtcatggagatcctcaatgtcacgctggtgccctacggaaacgcacaggaacaaaatgtcagtggcaggtgggagttcaagtgccagcatggagaagaggagtgcaaattcaacaaggtggaggcctgcgtgttggatgaacttgacatggagctagccttcctgaccattgtctgcatggaagagtttgaggacatggagagaagtctgccactatgcctgcagctctacgccccagggctgtcgccagacactatcatggagtgtgcaatgggggaccgcggcatgcagctcatgcacgccaacgcccagcggacagatgctctccagccaccacacgagtatgtgccctgggtcaccgtcaatgggaaacccttggaagatcagacccagctccttacccttgtctgccagttgtaccagggcaagaagccggatgtctgcccttcctcaaccagctccctcaggagtgtttgcttcaagtgatggccggtgagctgcggagagctcatggaaggcgagtgggaacccggctgcctgcctttttttctgatccagaccctcggcacctgctacttaccaactggaaaattttatgcatcccatgaagcccagatacacaaaattccaccccatgatcaagaatcctgctccactaagaatggtgctaaagtaaaactagtttaataagcaaaaaaaaaaaaaaaaaaa

SEQ ID NO: 1032 - DNA, 970 bp, Homo sapiens
aactgctctacagccctgtagagagagcataaaggaaaacaaaaacagaaatagaaaataagagagggggcattcagaaaatagaaactagtgtgttccctatttaaggttacgtacaaaataaggtcttcagataacctaaaatccagagttcagagtcactctctcagccagcccagtagcatctgaaacatccccaatggacttgccctttagtttactgatggctatgatggtgctcagctgcaagtccatctgcctctgggctgtgatctgcctcaggcccacagcgtgggtaacaggagggccttcatactcctgacacaaatgaggagaatctctcctttttcttacttgaaggacagacatgactttgattttccatcatcaggtgtttcatggcaaccacttccagaaggttcaagctatcttccttttccatgagatgatgcagcagaccttcaacctcttcagcacaaaggactcatctgatacttgggatgcgacccttttagacaaattctacactgaactttaccagcagctgaatgacctggaagcctgtgtgatgtagaaggttggagtggaagagactcccctgaggaatgtggactccatcctggctgtgagaaaatactttcaaagaatcactctttatctgacaaagaagaagtatagcccttgttcctgggaggctgtcagagcagaaatcatgagatccttctctttatgaacgaacttgcaggaaagattaaggaggaaggaatgaaaactggttcaacatggaaatgagaaacatttccatgattaatacatcatctcacacgttcatgaattctgccatttctcatttttgctatatccatgacatgagttgaatcaaaattttaaaatgttttcaggaatgttaagcagcatcatgttcagctgtacaggcactagttccttacggatgatcatgctgatggat

SEQ ID NO: 1033 - DNA, 6099 bp, Homo sapiens
aggcggcgcgtgcgtagaggggcggtgagagctaagaggggcagcgcgtgtgcagaggggcggtgtgacttaggacggggcgatggcggctgagaggagctgcgcgtgcgcgaacatgtaactggtgggatctgcggcggctcccagatgatggtcgtcctcctgggcgcgacgaccctagtgctcgtcgccgtggcgccatgggtgttgtccgcagccgcaggtggaaaaaatctaaaatctcctcaaaaagtagaggtcgacatcatagatgacaactttatcctgaggtggaacaggagcgatgagtctgtcgggaatgtgactttttcattcgattatcaaaaaactgggatggataattggataaaattgtctgggtgtcagaatattactagtaccaaatgcaacttttcttcactcaagctgaatgtttatgaagaaattaaattgcgtataagagcagaaaaagaaaacacttcttcatggtatgaggttgactcatttacaccatttcgcaaagctcagattggtcctccagaagtacatttagaagctgaagataaggcaatagtgatacacatctctcctggaacaaaagatagtgttatgtgggctttggatggtttaagctttacatatagcttagttatctggaaaaactcttcaggtgtagaagaaaggattgaaaatatttattccagacataaaatttataaactctcaccagagactacttattgtctaaaagttaaagcagcactacttacgtcatggaaaattggtgtctatagtccagtacattgtataaagaccacagttgaaaatgaactacctccaccagaaaatatagaagtcagtgtccaaaatcagaactatgttcttaaatgggattatacatatgcaaacatgacctttcaagttcagtggctccacgcctttttaaaaaggaatcctggaaaccatttgtataaatggaaacaaatacctgactgtgaaaatgtcaaaactacccagtgtgtctttcctcaaaacgttttccaaaaaggaatttaccttctccgcgtacaagcatctgatggaaataacacatctttttggtctgaagagataaagtttgatactgaaatacaagctttcctacttcctccagtctttaacattagatcccttagtgattcattccatatctatatcggtgctccaaaacagtctggaaacacgcctgtgatccaggattatccactgatttatgaaattattttttgggaaaacacttcaaatgctgagagaaaaattatcgagaaaaaaactgatgttacagttcctaatttgaaaccactgactgtatattgtgtgaaagccagagcacacaccatggatgaaaagctgaataaaagcagtgtttttagtgacgctgtatgtgagaaaacaaaaccaggaaatacctctaaaatttggcttatagttggaatttgtattgcattatttgctctcccgtttgtcatttatgctgcgaaagtcttcttgagatgcatcaattatgtcttctttccatcacttaaaccttcttccagtatagatgagtatttctctgaacagccattgaagaatcttctgctttcaacttctgaggaacaaatcgaaaaatgtttcataattgaaaatataagcacaattgctacagtagaagaaactaatcaaactgatgaagatcataaaaaatacagttcccaaactagccaagattcaggaaattattctaatgaagatgaaagcgaaagtaaaacaagtgaagaactacagcaggactttgtatgaccagaaatgaactgtgtcaagtataaggtttttcagcaggagttacactgggagcctgaggtcctcaccttcctctcagtaactacagagaggacgtttccctgtttagggaaagaaaaaacatcttcagatcataggtcctaaaaatacgggcaagctcttaactatttaaaaatgaaattacaggcccgggcacggtggctcacacctgtaatcccagcactttgggaggctgaggcaggcagatcatgaggtcaagagatcgagaccagcctggccaacgtggtgaaaccccatctctactaaaaatacaaaaattagccgggtgtggtggcgcgcgcctgttgtcttagctactcaggaggctgaggcaggagaatcgcttgaaaacaggaggtggaggttgcagtgagccgagatcacgccactgcactccagcctggtgacagcgtgagactctttaaaaaaagaaattaaaagagttgagacaaacgtttcctacattcttttccatgtgtaaaatcatgaaaaagcctgtcaccggacttgcattggatgagatgagtcagaccaaaacagtggccacccgtcttcctcctgtgagcctaagtgcagccgtgctagctgcgcaccgtggctaaggatgacgtctgtgttcctgtccatcactgatgctgctggctactgcatgtgccacacctgtctgttcgccattcctaacattctgtttcattcttcctcgggagatatttcaaacatttggtcttttcttttaacactgagggtaggcccttaggaaatttatttaggaaagtctgaacacgttatcacttggttttctggaaagtagcttaccctagaaaacagctgcaaatgccagaaagatgatccctaaaaatgttgagggacttctgttcattcatcccgagaacattggcttccacatcacagtatctacccttacatggtttaggattaaagccaggcaatcttttactatgcattaagacctctgattcaaaacttattagaacagtagcttctgctggaatttgcaatcactgaagtcatagaaaataggtaactatctaattagagaaataattgttgtattttaagatctgagagtgtgtacaagttttagtatacatgccatgccagaagatagtgtatgcaagaagtcttgggaccagaaaatggcaatgataggagactgacatagaagaagaatgcttccctaggaaaaaggtcgctggctttggtgcaagaggaagaagaatgttccactggaagcctgagcacctaatcagctctcagtgatcaacccactcttgttatgggtggtctctgtcactttgaatgccaggctggcttctcgtctagcagtattcagataccccttctgctcagcctgcttggcgttaaaatacaaatcattgaactgagggggaaaaatgtaactaggaagaaaaacccaatttaagaaattacataatgctttccaaaggcacctacaacttagttttaaattacttgctactggggattacccatggatatccttaataggcaggaagtctgggaattctggtggcctctagggcagtgttctcacagcaccgttccgacagggaccagtgaaagaaaagagacaaagttagaacgtgctggggagcggccatttctaaggccagtctggtttaagtagtcatttctgctgaaaaaacagatgatcctggtggaagaaaaggttgaaggcagctgccctcgggagggctgtgatgctcggcacatcctgcctggcacatacacgtgtctgcaggccacaccgtgcatgtccccagacctgccgcctggcttctggagtgcttcaagcagagcatggtgggtcattgaggagacccaggaatctcatctgagaacccactctctgccggagaaccccatggtgacacattttcatctttctgaccagaggctgtttttttttttttttgagacagtctcattctgttgcccaggctggagtgcagtggcttgatctcggctcactgcaacctcgcctcccgggttcaagcaattctctgccgcagcctccagagtagctgggataacaggtgcccaccaccacaccccactaatttttgtatttgtatttttagtagagatggggtttcaccatgttggtcaggctggtcttggactcctgacctcatgctccacccgcttcggcctcccaaagttctgggattacaggtgtgagccaccgtgcacggccggcctgacctttggaaaagccttgtcactttggacgtttgcgtctttgaagaggcgatgggagcatatcatgactgcctgccaccattgcttttcagactaccacaactcaatcatgctgtccaggacttctggccctgtgttcaccactgggaaaacgtacttcagactggatagcctaaaaaggagcaatgcccttgtaggatgtggagaagggaaaatacggacattaacattaaaagacaccagtgaaattgttaggtctctaggaagttggagcacaaggcttcacgctttaagaccatctgtggttttcagtgaacaagcgctgagcaccagcagcagaaaacaacaacaaaaaaacacctcgtttttaccttgtcttctagacatgaaaaggcagttgcattccactctgcattatgttctacatgttgctttatcagtatatgcttagctgtaagtgacaagtattttttctgaacagaagtttacttagaaataccatgcacttgggggtaccaattaaccgcctgaaaattagcatattgatagttcttagagagaccagatataatctaagaatttatatgaaagatttgtatcattagagccagaaataattttatattaatatataatacagattaacattatatataatatgtacctgtgtcacttctgacatgagcctgtaaacatatattcatatatgtacctgcacatgtacccacctgatgtaggtcttattcctttagtatggacttaaagtacttattcatataccttgtaactaaaaattagaacagctccctagaattgtgaacttttaagagtctgactagaaatttgcaacttataaaaaagttacttttaaaaatataagttagggctaggcacagtggctcatgcctataatctcagcacttttgggaggccaagacaggaggatcacttcaggccaggagttcaagatcaaccaacctgggtaacatggccagaccccatctctatttatatatatatatataaaacttagagtttttatcttcccctaaaagaggccgtgatatttgcagcagcctcaaattgctcttaaggggtttaggtgtgcagaagctttcctttccctacccagtaaccatgtgactactaacgtggtatattgatttattttgtttgctgtctgtctcccctgccccactgctggaacagaggctccaagaaaacagggaccttattattcattactgcatccccagtaatgaaagtacttagaaaataattattgaatgaatgaaatctaaactgtgaacctgagggtgtttgtggcagtgtttgttttactgaattgtagaaggacataaccgtgttttcagtgtttctatggaacaaacttgtacattttatttcacttgtgttttgtcttaaaccctactgctggaaacaattttatgtaataagcaatgggcccaaaagtctaggagtttttttgtacttagtgaatttgtatgcaacagagatgctgcagctgatgcctttaaaaggtattcatcatggaagagctgaggcctgtgcttggtgttccagagcccagggttgagcatcctgaaggagccactgcagccgtcactgtccccagagcctgtggagatagagcctgtttgctgctttttcttcccgctcttaagacatggctggagctcagtcttcattgaatgaagtttgctgtggtattgcatagccttgctttcttgaactaaactgtttgcccttcacaagtagttcttctttcaggattagttcgttccaaggaggctcttcagtctcacagataagtagatctctcctgctgtctggacacatttcactcggaaattgaatacaatttgtattcaggctgggaacctgaacacacacttgtgtttttaagcttcccttttttacagtggacaaggacacaaataataaataaatcatccctaatgcccaagaaaaaaa

SEQ ID NO: 1034 - DNA, 1027 bp, Homo sapiens
tttgtctcttcctgagaaacgagcaaacctgaaagctactctctcagcttcagagggaaaaaatggttgtagatttctggacttgggagcagacatttcaagaactaatccaagaggcaaaaccccgggccacatggacgctgaagttggatggcaaccttcagctagactgcctggctcaagggtggaagcaataccaacagagagcatttggctggttccggtgttcctcctgccagcgaagttgggcttccgcccaagtgcagattctgtgccacacgtactgggagcactggacatcccagggtcaggtgcgtatgaggctctttggccaaaggtgccagaagtgctcctggtcccaatatgagatgcctgagttctcctcggatagcaccatgaggattctgagcaacctggtgcagcatatactgaagaaatactatggaaatggcacgaggaagtctccagaaatgccagtaatcctggaagtgtccctggaaggatcccatgacacagccaattgtgaggcatgcactttgggcatctgtggacagggcttaaaaagctgcatgacaaagccgtccaaatccctactcccccacctaaagactgggaattcctcacctggaattggtgctgtgtacctcgcaaaccaagccaagaaccagtcagctgaggcaaaagaggctaaggggagtgggtatgagaaattagggcccagtcgagacccagatccactgaacatctgtgtctttattttgctgcttgtatttattgtagtcaaatgctttacatcagaatgatgaaaataggcttgccactttctcttattttaattccatggtagtcaatgaactggctgccactttaatataactgaaaattcattttgagaccaagcaggatcaagtttgtagaataaacactggtttcctagccatcctctgaaaacagtatgaaacatgaccaagtacataatggatttagtaataaatattgtcgaattgctaaaaaaaaaaaaaaaaaa

SEQ ID NO: 1035 - DNA, 2540 bp, Homo sapiens
cccacctcggccccgggctccgaagcggctcgggggcgccctttcggtcaacatcgtagtccaccccctccccatccccagcccccggggattcaggctcgccagcgcccagccagggagccggccgggaagcgcgatgggggccccagccgcctcgctcctgctcctgctcctgctgttcgcctgctgctgggcgcccggcggggccaacctctcccaggacggctactggcaggagcaggatttggagctgggaactctggctccactcgacgaggccatcagctccacagtctggagcagccctgacatgctggccagtcaagacagccagccctggacatctgatgaaacagtggtggctggtggcaccgtggtgctcaagtgccaagtgaaagatcacgaggactcatccctgcaatggtctaaccctgctcagcagactctctactttggggagaagagagcccttcgagataatcgaattcagctggttacctctacgccccacgagctcagcatcagcatcagcaatgtggccctggcagacgagggcgagtacacctgctcaatcttcactatgcctgtgcgaactgccaagtccctcgtcactgtgctaggaattccacagaagcccatcatcactggttataaatcttcattacgggaaaaagacacagccaccctaaactgtcagtcttctgggagcaagcctgcagcccggctcacctggagaaagggtgaccaagaactccacggagaaccaacccgcatacaggaagatcccaatggtaaaaccttcactgtcagcagctcggtgacattccaggttacccgggaggatgatggggcgagcatcgtgtgctctgtgaaccatgaatctctaaagggagctgacagatccacctctcaacgcattgaagttttatacacaccaactgcgatgattaggccagaccctccccatcctcgtgagggccagaagctgttgctacactgtgagggtcgcggcaatccagtcccccagcagtacctatgggagaaggagggcagtgtgccacccctgaagatgacccaggagagtgccctgatcttccctttcctcaacaagagtgacagtggcacctacggctgcacagccaccagcaacatgggcagctacaaggcctactacaccctcaatgttaatgaccccagtccggtgccctcctcctccagcacctaccacgccatcatcggtgggatcgtggctttcattgtcttcctgctgctcatcatgctcatcttcctcggccactacttgatccggcacaaaggaacctacctgacacatgaggcaaaaggctccgacgatgctccagacgcggacacggccatcatcaatgcagaaggcgggcagtcaggaggggacgacaagaaggaatatttcatctagaggcgcctgcccacttcctgcgccccccaggggccctgtggggactgctggggccgtcaccaacccggacttgtacagagcaaccgcagggccgcccctcccgcttgctccccagcccacccacccccctgtacagaatgtctgctttgggtgcggttttgtactcggtttggaatggggagggaggagggcggggggaggggagggttgccctcagccctttccgtggcttctctgcatttgggttattattatttttgtaacaatcccaaagcaaatctgtctccaggctggagaggcaggagccctggggtgagaaaagcaaaaaacaaacaaaaaacaaaaccctggagtgttaggaggagagtgaagtagaggggtgaggaagggtaaggggcagggctggtttcagctgggggctctcaccagccctcctttcagcctctacaacagagcagcttcccagacttctccaggaacccagaaacgggatggttgtcggcaaaggttgggagtggcttttcctctggtagccacacacctgagcactacggacagggaggcaggtgccaccttgacacctctcttccatagcaatgggaaagtgatgagtgcgggagtcctgaggagatgtggcctgcagacaacatgcagccatgcagggacccaggactgtaacctggggaggacgcgggtccctgcaaggaagagtagatttggagaggaaggatggaggtggactctcaccccattccccccggaaatgaacaaagccgggccctttccataggaactgcccttggagatagcagagtgtggctgcccctccttgctccagcagcagtgggagaggcactgctctggggcctgaactgcctctgcttccccccctgaggggcccctcactcttacccaagactctggaattgttgcacggcaaccactcctcccatggcattgctcagcaactacttctcccttcccggccaccctgtgcccccttcctggtcccaacgccagcccttcatccttcctccctcagcagccaggcagacataacaacaaactactaaaaggagcttcactgcaaaaaaaaaaaaaaaaa

SEQ ID NO: 1036 - DNA, 1955 bp, Homo sapiens
acgcaaagcagtgtgggttgattctgaggtgcactgtgggaaagagcttgtcgctgcggtgttgctgttggagactcgattgttggtgacagcgaaagaacgataacaaaatgccggagcgagatagtgagccgttctccaaccctttggcccccgatggccacgatgtggatgatcctcactccttccaccaatcaaaactcaccaatgaagacttcaggaaacttctcatgacccccagggctgcacctacctctgcaccaccttctaagtcacgtcaccatgagatgccaagggagtacaatgaggatgaagacccagctgcacgaaggaggaaaaagaaaagttattatgccaagctacgccaacaagaaattgagagagagagagagctagcagagaagtaccgggatcgtgccaaggaacggagagatggagtgaacaaagattatgaagaaaccgagcttatcagcaccacagctaactatagggctgttggccccactgctgaggcggacaaatcagctgcagagaagagaagacagttgatccaggagtccaaattcttgggtggtgacatggaacacacccatttggtgaaaggcttggattttgctctgcttcaaaaggtacgagctgagattgccagcaaagagaaagaggaagaggaactgatggaaaagccccagaaagaaaccaagaaagatgaggatcctgaaaataaaattgaatttaaaacacgtctgggccgcaatgtttaccgaatgctttttaagagcaaagcatatgagcggaatgagttgttcctgccgggccgcatggcctatgtggtagacctggatgatgagtatgctgacacagatatccccaccactcttatccgcagcaaggctgattgccccaccatggaggcccagaccacactgaccacaaatgacattgtcattagcaagctgacccagatcctttcatacctgaggcagggaacccgtaacaagaagcttaagaagaaggataaagggaagctggaagagaagaaacctcctgaggctgacatgaatatttttgaagacattggggattacgtaccctccacaaccaagacacctcgggacaaggagcgggagagatatcgggaacgggagcgtgatcgggaaagagacagagaccgtgaccgagagcgagagcgagaacgagatcgggaacgagagcgagagcgggaccgagagagagaagaggaaaagaagagacacagctactttgagaagccaaaagtagatgatgagcccatggacgttgacaaaggacctgggtctaccaaggagttgatcaagtccatcaatgaaaagtttgctgggtctgctggctgggaaggcacagaatcgctgaagaagccagaagacaaaaagcagctgggagatttctttggcatgtccaacagttatgcagagtgctacccagccacgatggatgacatggctgtggatagtgatgaggaggtggattatagcaaaatggaccagggtaacaagaaggggcccttaggccgttgggactttgatacccaggaagaatacagcgagtatatgaacaacaaagaagctttgcccaaggctgcattccagtatggtatcaaaatgtctgaagggcggaaaaccaggcgcttcaaggaaaccaatgacaaagcagagcttgatcgccagtggaagaagattagtgcaatcattgagaagaggaagaagatggaagctgatggggttgaagtcaaaagaccaaaatactaatcactagttacaaccagagatgctccacaaggatatgctccccactgttttctttctacaatttccaaaggttgcaagatgtttttttgtggatgaatataaaattttattgtgtaattacttggttccattaaaattggttaacttgctaaaaaaaaaaaaaaaaaaaaa

SEQ ID NO: 1037 - DNA, 3916 bp, Homo sapiens
gagcaggaagtgtttgaggaagtcgcgccgcgctgcccgcgttaagattcccgcattttaatgttttcaggggggtgtcatagccccgggtttggccgccccagccccgccttccccgccccggggagcccgccccctgccccgcgtccctgccgacagagttagcacgacatcagtatgagctggtcaccttccctgacaacgcagacatgtggggcctgggaaatgaaagagcgccttgggacagggggatttggaaatgtcatccgatggcacaatcaggaaacaggtgagcagattgccatcaagcagtgccggcaggagctcagcccccggaaccgagagcggtggtgcctggagatccagatcatgagaaggctgacccaccccaatgtggtggctgcccgagatgtccctgaggggatgcagaacttggcgcccaatgacctgcccctgctggccatggagtactgccaaggaggagatctccggaagtacctgaaccagtttgagaactgctgtggtctgcgggaaggtgccatcctcaccttgctgagtgacattgcctctgcgcttagataccttcatgaaaacagaatcatccatcgggatctaaagccagaaaacatcgtcctgcagcaaggagaacagaggttaatacacaaaattattgacctaggatatgccaaggagctggatcagggcagtctttgcacatcattcgtggggaccctgcagtacctggccccagagctactggagcagcagaagtacacagtgaccgtcgactactggagcttcggcaccctggcctttgagtgcatcacgggcttccggcccttcctccccaactggcagcccgtgcagtggcattcaaaagtgcggcagaagagtgaggtggacattgttgttagcgaagacttgaatggaacggtgaagttttcaagctctttaccctaccccaataatcttaacagtgtcctggctgagcgactggagaagtggctgcaactgatgctgatgtggcacccccgacagaggggcacggatcccacgtatgggcccaatggctgcttcaaggccctggatgacatcttaaacttaaagctggttcatatcttgaacatggtcacgggcaccatccacacctaccctgtgacagaggatgagagtctgcagagcttgaaggccagaatccaacaggacacgggcatcccagaggaggaccaggagctgctgcaggaagcgggcctggcgttgatccccgataagcctgccactcagtgtatttcagacggcaagttaaatgagggccacacattggacatggatcttgtttttctctttgacaacagtaaaatcacctatgagactcagatctccccacggccccaacctgaaagtgtcagctgtatccttcaagagcccaagaggaatctcgccttcttccagctgaggaaggtgtggggccaggtctggcacagcatccagaccctgaaggaagattgcaaccggctgcagcagggacagcgagccgccatgatgaatctcctccgaaacaacagctgcctctccaaaatgaagaattccatggcttccatgtctcagcagctcaaggccaagttggatttcttcaaaaccagcatccagattgacctggagaagtacagcgagcaaaccgagtttgggatcacatcagataaactgctgctggcctggagggaaatggagcaggctgtggagctctgtgggcgggagaacgaagtgaaactcctggtagaacggatgatggctctgcagaccgacattgtggacttacagaggagccccatgggccggaagcaggggggaacgctggacgacctagaggagcaagcaagggagctgtacaggagactaagggaaaaacctcgagaccagcgaactgagggtgacagtcaggaaatggtacggctgctgcttcaggcaattcagagcttcgagaagaaagtgcgagtgatctatacgcagctcagtaaaactgtggtttgcaagcagaaggcgctggaactgttgcccaaggtggaagaggtggtgagcttaatgaatgaggatgagaagactgttgtccggctgcaggagaagcggcagaaggagctctggaatctcctgaagattgcttgtagcaaggtccgtggtcctgtcagtggaagcccggatagcatgaatgcctctcgacttagccagcctgggcagctgatgtctcagccctccacggcctccaacagcttacctgagccagccaagaagagtgaagaactggtggctgaagcacataacctctgcaccctgctagaaaatgccatacaggacactgtgagggaacaagaccagagtttcacggccctagactggagctggttacagacggaagaagaagagcacagctgcctggagcaggcctcatgatgtggggggactcgaccccctgacatggggcagcccatagcaggccttgtgcagtggggggactcgaccccctgacatggggctgcctggagcaggccgcgtgacgtggggctgcctggccgcggctctcacatggtggttcctgctgcactgatggcccaggggtctctggtatccagatggagctctcgcttcctcagcagctgtgactttcacccaggacccaggacgcagccctccgtgggcactgccggcgccttgtctgcacactggaggtcctccattacagaggcccagcgcacatcgctggccccacaaacgttcaggggtacagccatggcagctccttcctctgccgtgagaaaagtgcttggagtacggtttgccacacacgtgactggacagtgtccaattcaaatctttcagggcagagtccgagcagcgcttggtgacagcctgtcctctcctgctctccaaaggccctgctccctgtcctctctcactttacagcttgtgtttcttctggattcagcttctcctaaacagacagtttaattatagttgcggcctggccccatcctcacttcctctttttatttcactgctgctaaaattgtgtttttacctactactttggtggttgtcctcttttcggcaaagttggagcgagtgccaagctctccatctgtggtcctttctgccaagagcgactcatagtaaccaggatgggagagcagctgccttattctgaatcccaaaaattacttgggggtgattgtcacagaggagggacagaaagggtatctgctgaccaccagcctgcctacccatgcccatgtctccattcctgctcaagcgtgtgtgctgggccggggagtccctgtctctcacagcatctagcagtattattaaatggattcattttaaaaatagctcctatattttgtaacatgtctcaaacactcatactgggttccacaatccactgttagaatacctatggttagggcttctgaactaaaataatggaaaattttaacaatttgtatagtgcctggatcattactagtgccataaccctgcttcttcaacatttcacagaacttctcttttatataaaggcaagagcacaaaatgagttcagatgatcacaaacaggtgagttttgttggagaagaaagttggagtaggagactttcacaagtggtttccatggagatagaatgaagcattctgtggtcaagtaagtttagggagctattcatgtttcacttgctttgtggagattcacactatgcactgggaaagtatctgaaaagtcttataataaagaaacaggcttaactttgtgtaagaacactgtttatcaatgtcatttggctatagaaacattttctcctgctgattgtgtgtgtgaaacatgtattaacattccaatgaactagcatttaataaagcacaattttgg

SEQ ID NO: 1038 - DNA, 1246 bp, Homo sapiens
gtgagggggcgcggtcaccgcccagggttcccacgaacgccaaggcggccacgtcctgctccccctggtgaagaagctgccctgggcttgtcgtcctagggtctccagacatgtctgaggtgaagagccggaagaagtcggggcccaagggagcccctgctgcggagcccgggaagcggagcgagggcgggaagacccccgtggcccggagcagcggaggcgggggctgggcagacccccgaacgtgcctgagcctgctgtcgctggggacgtgcctgggcctggcctgtggcagaaatctgaagctatcatggaacaattgaagtcttttcaaataattgctcatctaaagcgtctacaggaagaaattaatgaggtaaaaacttggtccaataggataactgaaaaacaggatatactgaacaacagtctgacgacgctttctcaagacattacaaaagtagaccaaagtacaacttccatggcaaaagatgttggtctcaagattacaagtgtaaaaacagatatacgacggatttcaggtttagtaactgatgtaatatcattgacagattctgtgcaagaactagaaaataaaatagagaaagtagaaaaaaatacagtaaaaaatataggtgatcttctttcaagcagtattgatcgaacagcaacgctccgaaagacagcatctgaaaattcacaaagaattaactctgttaagaagacgctaaccgaactaaagagtgacttcgacaaacatacagatagatttctaagcttagaaggtgacagagccaaagttctgaagacagtgacttttgcaaatgatctaaaaccaaaggtgtataatctaaagaaggacttttcccgtttagaaccattagtaaatgatttaacactacgcattgggagattggttaccgacttactacaaagagagaaagaaattgctttcttaagtgaaaaaatatctaatttaacaatagtccaagctgagattaaggatattaaagatgaaatagcacacatttcagatatgaattagtttgacattattgagattagactaaggtaatttttttaatgggacctctcatgagaagactggtaaatcaaaaataatgatattttggagcaaaagtcattttatatttaatcctattttgtacagtaaaaataaaactttaaaacaggttgattttccaaaataaatatgctaaaacctaaaaaaaaaaaaaaaaaaaaa

SEQ ID NO: 1039 - DNA, 2935 bp, Homo sapiens
gtgagggggcgcggtcaccgcccagggttcccacgaacgccaaggcggccacgtcctgctccccctggtgaagaagctgccctgggcttgtcgtcctagggtctccagacatgtctgaggtgaagagccggaagaagtcggggcccaagggagcccctgctgcggagcccgggaagcggagcgagggcgggaagacccccgtggcccggagcagcggaggcgggggctgggcagacccccgaacgtgcctgagcctgctgtcgctggggacgtgcctgggcctggcctggtttgtatttcagcagtcagaaaaatttgcaaaggtggaaaaccaataccagttactgaaactagaaaccaatgaattccaacaacttcaaagtaaaatcagtttaatttcagaaaagcttgagtctactgaaagcatcctgcaggaagctacatcatccatgtctttgatgacccagtttgagcaggaagtatccaacctccaagatatcatgcatgacattcaaaataatgaagaggtgctcactcaaaggatgcaaagccttaatgagaaatttcagaatattacggatttctggaagagaagcctagaagaaatgaacattaatacagacattttcaaatcagaagcaaaacatatacattctcaagtaactgtccaaattaactcagctgagcaggaaataaaattgctcactgaacggctaaaagatttggaagatagcacactaagaaatattagaacagtaaaaagacaagaagaagaagatctcctgcgagtagaggagcagctaggctctgatacaaaggcaattgaaaagttagaagaggaacagcatgccctctttgccagagatgaagatctgactaataaactttccgactacgaacccaaagttgaagaatgcaagacacatttgccaacaattgaaagtgctattcactctgttctcagagtctctcaggatctgatagaaacagaaaagaaaatggaagacttgactatgcagatgtttaatatggaagatgatatgctgaaagcagtgtctgaaataatggagatgcagaaaacccttgaaggaattcagtatgataatagcatattaaagatgcaaaatgaactggatattctaaaagaaaaagttcatgattttatagcatactcaagtacaggagaaaagggaactttaaaagaatataatatagaaaataaaggaattggtggtgatttttaaattcatgacatttattctgatgaaccatatcattatacataaattgattagtccattgattttgagttactttgatacgcctcatcttatcctacattattggaaaataaatgagatgtccacacaaatggattatccacataatcaaagcttatctttttaagcactaaaacttacttcattgtaactatttgaaatagaaatagttctttaaaaatatttctctacttttaaaacaggatacttaatatttttaatgttttttaaagcattaatggacatcatcattaatttcacctattatattgtacccacatatattgatgtctccaggggctaataaagagtatttaccacttcactaaatgaccccaatttgccattttcaaacctatgtctcataccttttctgtcacctgaacttactgtcaggttggttggtaatgtgcctgcctcagccagttcactttcttaggtaattcactgcaggttaagaatccacacaaccaagttcatgggaattttgtgtaaaataaaagataacatgcctgagggagagcctggtgcctttgctatgaattaatatgcactttctgaaaactctaaagcctgggaaacattttagtttttgttaaggttctaaactgtgttacagatacttgtaagacttttaaaatcagagtaagtatgttcttacataaggcctttcttaggaattatgtgtatataaatctttgaaatatctttatatacctgagttttaggttccaactgtgttagacatgagtttgctagatccatggtctctagatggtttacttaaataggccaggcgcagtggctcacacctgtaatcctagcactttgggaggccgaggtgggcagatcacgaagtcaggagatcaagaccatctggctaacagggtgaaaccctgtctctactaaaaaatacaaaaaattagccaggcgtggtggtgggtgcctgtagtcccagctactcaggaggctgaggcaggagaatggtgtgaacccgggaggcagagcttgcagtgagccgagatcgcgccactgcactccagcctgagtggcaaagtgagactctgtctcaataaataaataaataaataaaaataagcctgtggcctgttttgagggaaaagtaacataactctgataattaattatgataataactatgatagttaaaaatacgtcattttaaagatttcccaaaccacaccactaaatttgttttatgaattgattttattttatttgaaattatataatgtagtcaactgcaatatggaagtttgttcttgtttctttgtcaataaccttaccagttttataatgcagtttttgatggaattaaacacaaagaacttgaaagcagtcagttacaaaaaggtagttgtggtcaagtagttttaatatgtaaatttgcaagtttttggagaacccccaaactccttctccactggagttaggagggcctgtggtagacagcgtgaatcatgaaaataagcctggagagttctgttattaaggggcatagcattaatttttgcagtcttaaaattacacttcttgacttctgaatgtctcttatttgcgtgcactgacaaaattctatttgtttacttttatattaatggtaataaaatagattataaagaaaaaaaaaaaaa

SEQ ID NO: 1040 - DNA, 1282 bp, Homo sapiens
aagccacccagcctatgcatccgctcctcaatcctctcctgttggcactgggcctcatggcgcttttgttgaccacggtcattgctctcacttgccttggcggctttgcctccccaggccctgtgcctccctctacagccctcagggagctcattgaggagctggtcaacatcacccagaaccagaaggctccgctctgcaatggcagcatggtatggagcatcaacctgacagctggcatgtactgtgcagccctggaatccctgatcaacgtgtcaggctgcagtgccatcgagaagacccagaggatgctgagcggattctgcccgcacaaggtctcagctgggcagttttccagcttgcatgtccgagacaccaaaatcgaggtggcccagtttgtaaaggacctgctcttacatttaaagaaactttttcgcgagggacagttcaactgaaacttcgaaagcatcattatttgcagagacaggacctgactattgaagttgcagattcatttttctttctgatgtcaaaaatgtcttgggtaggcgggaaggagggttagggaggggtaaaattccttagcttagacctcagcctgtgctgcccgtcttcagcctagccgacctcagccttccccttgcccagggctcagcctggtgggcctcctctgtccagggccctgagctcggtggacccagggatgacatgtccctacacccctcccctgccctagagcacactgtagcattacagtgggtgccccccttgccagacatgtggtgggacagggacccacttcacacacaggcaactgaggcagacagcagctcaggcacacttcttcttggtcttatttattattgtgtgttatttaaatgagtgtgtttgtcaccgttggggattggggaagactgtggctgctagcacttggagccaagggttcagagactcagggccccagcactaaagcagtggacaccaggagtccctggtaataagtactgtgtacagaattctgctacctcactggggtcctggggcctcggagcctcatccgaggcagggtcaggagaggggcagaacagccgctcctgtctgccagccagcagccagctctcagccaacgagtaatttattgtttttccttgtatttaaatattaaatatgttagcaaagagttaatatatagaagggtaccttgaacactgggggaggggacattgaacaagttgtttcattgactatcaaactgaagccagaaataaagttggtgacagat

SEQ ID NO: 1041 - DNA, 1374 bp, Homo sapiens
ctctggttacggacaacatacagaagccactgccaatgagctccgccgagtagcaccggggcagggctagcgcttaaaggagccgcgacccctttgcagaccagagggtgacccggatgatggcggccggcgcggccctagccctggccttgtggctactaatgccaccagtggaggtgggaggggcggggcccccgccaatccaggacggtgagttcacgttcctgttgccggcggggaggaagcagtgtttctaccagtccgcgccggccaacgcaagcctcgagaccgaataccaggtgatcggaggtgctggactggacgtggacttcacgctggagagccctcagggcgtgctgttggtcagcgagtcccgcaaggctgatggggtacacacggtggagccaacggaggccggggactacaagctgtgctttgacaactccttcagcaccatctccgagaagctggtgttctttgaactgatctttgacagcctccaggatgacgaggaggtcgaaggatgggcagaggctgtggagcccgaggagatgctggatgttaaaatggaggacatcaaggagtccattgagaccatgcggacccggctggagcgcagcatccagatgctcacgctactgcgggccttcgaggcacgtgaccgcaacctgcaagagggcaacttggagcgggtcaacttctggtcagctgtcaacgtggcggtgctgctgctggtggctgtgctgcaggtctgcacgctcaagcgcttcttccaggacaagcgcccggtgcccacgtagcccctgccatggaaggaagaacgggacaaaggaggggcagcagggtgtgtgcatatgagacttgggggtccctccccaattttagtttcctgccaaaacgggagtgtgcagtcagggcctgcggtctggccccatgagtctccttccgtcctcagcgggcagggaacacctctggcttgtagaagggacggctcagtggctgcaccgacggtcctggaaatctcacatggtgggcactgcagcgttggaacgtgagcctcggatttcctggcccctctactgtaaatgtgccttagcctaagcctcccatcctgtgttagcgttgcctggtgcggggcagggcctaacaaggaaacctgggccctccaagccaggttgaggtctggtaacagaatgccaggaagggggcctggaagaccacctgccccggcccctctcctgcaggggccccacacaggcatgagggatggcccggccaaagtctaggcagaagcctcctataacaaagggtggtgtggcctgggcattggagtcaataaattatggtcagaaaatcaaaaaaaaaaaaaaaaaa

SEQ ID NO: 1042 - DNA, 3682 bp, Homo sapiens
gaccatcagaccggcctgaataccagaatctctttgcaatgcactcgcctcgctcattaccagaaggaggttttacctgcctagtgacctggttggtctgggcatgaaccccgagaggtggaaactctcagactctcaggactgacagccgagtggctggggactataaatccgcgagaactgccctcgcgctgccatccagctgggtagccgggggagcgcgcgtgggggctccgcgagtcgctcgcccttggtttctggggaagcctgggggacgcggctgtggcggaggcgccctgggactcaggtcgcctggagcgtggcacgcagagccccaggcgcggagctgaggccgcgcggccgcgcttggccccagcgggcgtgggactgagcagtctgctgccccccgacatgtgacccagccccgccgcccatgcgggctcccggccgcccggccctgcggccgctgccgctgccgccgctgctgctgttgctcctggcggcgccttggggacgggcagttccctgtgtctctggtggtttgcctaaacctgcaaacatcaccttcttatccatcaacatgaagaatgtcctacaatggactccaccagagggtcttcaaggagttaaagttacttacactgtgcagtatttcatatatgggcaaaagaaatggctgaataaatcagaatgcagaaatatcaatagaacctactgtgatctttctgctgaaacttctgactacgaacaccagtattatgccaaagttaaggccatttggggaacaaagtgttccaaatgggctgaaagtggacggttctatccttttttagaaacacaaattggcccaccagaggtggcactgactacagatgagaagtccatttctgttgtcctgacagctccagagaagtggaagagaaatccagaagaccttcctgtttccatgcaacaaatatactccaatctgaagtataacgtgtctgtgttgaatactaaatcaaacagaacgtggtcccagtgtgtgaccaaccacacgctggtgctcacctggctggagccgaacactctttactgcgtacacgtggagtccttcgtcccagggccccctcgccgtgctcagccttctgagaagcagtgtgccaggactttgaaagatcaatcatcagagttcaaggctaaaatcatcttctggtatgttttgcccgtatctattaccgtgtttcttttttctgtgatgggctattccatctaccgatatatccacgttggcaaagagaaacacccagcaaatttgattttgatttatggaaatgaatttgacaaaagattctttgtgcctgctgaaaaaatcgtgattaactttatcaccctcaatatctcggatgattctaaaatttctcatcaggatatgagtttactgggaaaaagcagtgatgtatccagccttaatgatcctcagcccagcgggaacctgaggccccctcaggaggaagaggaggtgaaacatttagggtatgcttcgcatttgatggaaattttttgtgactctgaagaaaacacggaaggtacttctctcacccagcaagagtccctcagcagaacaatacccccggataaaacagtcattgaatatgaatatgatgtcagaaccactgacatttgtgcggggcctgaagagcaggagctcagtttgcaggaggaggtgtccacacaaggaacattattggagtcgcaggcagcgttggcagtcttgggcccgcaaacgttacagtactcatacacccctcagctccaagacttagaccccctggcgcaggagcacacagactcggaggaggggccggaggaagagccatcgacgaccctggtcgactgggatccccaaactggcaggctgtgtattccttcgctgtccagcttcgaccaggattcagagggctgcgagccttctgagggggatgggctcggagaggagggtcttctatctagactctatgaggagccggctccagacaggccaccaggagaaaatgaaacctatctcatgcaattcatggaggaatgggggttatatgtgcagatggaaaactgatgccaacacttccttttgccttttgtttcctgtgcaaacaagtgagtcacccctttgatcccagccataaagtacctgggatgaaagaagttttttccagtttgtcagtgtctgtgagaattacttatttcttttctctattctcatagcacgtgtgtgattggttcatgcatgtaggtctcttaacaatgatggtgggcctctggagtccaggggctggccggttgttctatgcagagaaagcagtcaataaatgtttgccagactgggtgcagaatttattcaggtgggtgtactctggcctcttggttcattattttcaaacaagcacacttgtacaattattttctgggtacttcccatatgcacatagcactgtaaaaaatatttcccaaagatcactcattttataaataccactttttcagaattgggtttattgcgagcaggaggagatacttaaaacatgcacatataccaggttggtggtaagttggtcgcatgtgaaaacctcaactatttaatcatcatgattcatattttgagtgaatacatcaggcacagaccttcatgatatcacacactcttggctactttaagaggccatctttaatactttatgagtagttctggagtgtaaacataaacgagtattcttttgtagtcagaaaagtgtcctctcaataatttagtaggggcttattgtctctcaaaactaacctaaaagaaaatgacacattttataatagaatattacatttatttctggaagtgtgttttcaaaaagatatttacatagtctgtaaactagaaagtgttaggtaaagctctaggttactgtgttactattataatattaaacattcgaataggcagtcgttcaaagactctttggaatatctatgaatgaatatcctctattcttataatattaaaacccataagtaaatataggacatacaagagaaatgagttaaatgactatgtaagggagagtttattaaaatttgatgaaatttactgtaggaactaaactatgccataaaacaatagctttctagttcatttccagtaactgttcccatctcctttaccacttgttaagaaaattaaattcttcagtcacgctgctttaaaatgggacaaaatctattaagttgaaccatatataattgtggatatttggctgtttttaatctgacaagcagtaacttcatatggtttgccttaatatatatttgttttagtcatgaactcataatccattgatgctctttcatgagaagagatatcacccatatttccttattgatattattggtacaggcagacaaccctggtaggagagatggattctggggtcatgacctttcgtgattatccgcaaatgcaaacagtttcagatctaatggtttaatttagggagtaattatattaatcagagtgttctgttattctcaatctttatagaaacgattctgctggttttgaagaacagatgtattacactaactgtaaaagtagttcaagagtgagaaagaataaattgttattaagagcaaaagaaaaataaagtgattgatgata

SEQ ID NO: 1043 - DNA, 2171 bp, Homo sapiens
agcagctctgtaatgcgcttgtggtttcagatgtgggcggcctgtgtgaacctgtcgtgcaaagctcacgtcaccaactgctgcagttatctcctgaatcaggctgagggtctttgctgtgcacccagagatagttgggtgacaaatcacctccaggttggggatgcctcagacttgtgatgggactgggcagatgcatctgggaaggctggaccttggagagtgaggccctgaggcgagacatgggcacctggctcctggcctgcatctgcatctgcacctgtgtctgcttgggagtctctgtcacaggggaaggacaagggccaaggtctagaaccttcacctgcctcaccaacaacattctcaggatcgattgccactggtctgccccagagctgggacagggctccagcccctggctcctcttcaccagcaaccaggctcctggcggcacacataagtgcatcttgcggggcagtgagtgcaccgtcgtgctgccacctgaggcagtgctcgtgccatctgacaatttcaccatcactttccaccactgcatgtctgggagggagcaggtcagcctggtggacccggagtacctgccccggagacacgttaagctggacccgccctctgacttgcagagcaacatcagttctggccactgcatcctgacctggagcatcagtcctgccttggagccaatgaccacacttctcagctatgagctggccttcaagaagcaggaagaggcctgggagcaggcccagcacagggatcacattgtcggggtgacctggcttatacttgaagcctttgagctggaccctggctttatccatgaggccaggctgcgtgtccagatggccacactggaggatgatgtggtagaggaggagcgttatacaggccagtggagtgagtggagccagcctgtgtgcttccaggctccccagagacaaggccctctgatcccaccctgggggtggccaggcaacacccttgttgctgtgtccatctttctcctgctgactggcccgacctacctcctgttcaagctgtcgcccagggtgaagagaatcttctaccagaacgtgccctctccagcgatgttcttccagcccctctacagtgtacacaatgggaacttccagacttggatgggggcccacggggccggtgtgctgttgagccaggactgtgctggcaccccacagggagccttggagccctgcgtccaggaggccactgcactgctcacttgtggcccagcgcgtccttggaaatctgtggccctggaggaggaacaggagggccctgggaccaggctcccggggaacctgagctcagaggatgtgctgccagcagggtgtacggagtggagggtacagacgcttgcctatctgccacaggaggactgggcccccacgtccctgactaggccggctcccccagactcagagggcagcaggagcagcagcagcagcagcagcagcaacaacaacaactactgtgccttgggctgctatgggggatggcacctctcagccctcccaggaaacacacagagctctgggcccatcccagccctggcctgtggcctttcttgtgaccatcagggcctggagacccagcaaggagttgcctgggtgctggctggtcactgccagaggcctgggctgcatgaggacctccagggcatgttgctcccttctgtcctcagcaaggctcggtcctggacattctaggtccctgactcgccagatgcatcatgtccattttgggaaaatggactgaagtttctggagcccttgtctgagactgaacctcctgagaaggggcccctagcagcggtcagaggtcctgtctggatggaggctggaggctcccccctcaacccctctgctcagtgcctgtggggagcagcctctaccctcagcatcctggccacaagttcttccttccattgtcccttttctttatccctgacctctctgagaagtggggtgtggtctctcagctgttctgccctcatacccttaaagggccagcctgggcccagtggacacaggtaaggcaccatgaccacctggtgtgacctctctgtgccttactgaggcacctttctagagattaaaaggggcttgatggctgttaaaaaaaaaaaaaaaaaa

SEQ ID NO: 1044 - DNA, 2175 bp, Homo sapiens
agcagctctgtaatgcgcttgtggtttcagatgtgggcggcctgtgtgaacctgtcgtgcaaagctcacgtcaccaactgctgcagttatctcctgaatcaggctgagggtctttgctgtgcacccagagatagttgggtgacaaatcacctccaggttggggatgcctcagacttgtgatgggactgggcagatgcatctgggaagtaactgctgcaagaacggacagacactgctgcagagaacttgccacggtgtttcatgctgtggctggtggttccaggctgcacgctccattctaggaaaggggccctcagcccagtcccttgcaggctggaccttggagagtgaggccctgaggcgagacatgggcacctggctcctggcctgcatctgcatctgcacctgtgtctgcttgggagtctctgtcacaggggaaggacaagggccaaggtctagaaccttcacctgcctcaccaacaacattctcaggatcgattgccactggtctgccccagagctgggacagggctccagcccctggctcctcttcaccaggctcctggcggcacacataagtgcatcttgcggggcagtgagtgcaccgtcgtgctgccacctgaggcagtgctcgtgccatctgacaatttcaccatcactttccaccactgcatgtctgggagggagcaggtcagcctggtggacccggagtacctgccccggagacacgagcaacatcagttctggccactgcatcctgacctggagcatcagtcctgccttggagccaatgaccacacttctcagctatgagctggccttcaagaagcaggaagaggcctgggagcaggcccagcacagggatcacattgtcggggtgacctggcttatacttgaagcctttgagctggaccctggctttatccatgaggccaggctgcgtgtccagatggccacactggaggatgatgtggtagaggaggagcgttatacaggccagtggagtgagtggagccagcctgtgtgcttccaggctccccagagacaaggccctctgatcccaccctgggggtggccaggcaacacccttgttgctgtgtccatctttctcctgctgactggcccgacctacctcctgttcaagctgtcgcccagacttggatgggggcccacggggccggtgtgctgttgagccaggactgtgctggcaccccacagggagccttggagccctgcgtccaggaggccactgcactgctcacttgtggcccagcgcgtccttggaaatctgtggccctggaggaggaacaggagggccctgggaccaggctcccggggaacctgagctcagaggatgtgctgccagcagggtgtacggagtggagggtacagacgcttgcctatctgccacaggaggactgggcccccacgtccctgactaggccggctcccccagactcagagggcagcaggagcagcagcagcagcagcagcagcaacaacaacaactactgtgccttgggctgctatgggggatggcacctctcagccctcccaggaaacacacagagctctgggcccatcccagccctggcctgtggcctttcttgtgaccatcagggcctggagacccagcaaggagttgcctgggtgctggctggtcactgccagaggcctgggctgcatgaggacctccagggcatgttgctcccttctgtcctcagcaaggctcggtcctggacattctaggtccctgactcgccagatgcatcatgtccattttgggaaaatggactgaagtttctggagcccttgtctgagactgaacctcctgagaaggggcccctagcagcggtcagaggtcctgtctggatggaggctggaggctcccccctcaacccctctgctcagtgcctgtggggagcagcctctaccctcagcatcctggccacaagttcttccttccattgtcccttttctttatccctgacctctctgagaagtggggtgtggtctctcagctgttctgccctcatacccttaaagggccagcctgggcccagtggacacaggtaaggcaccatgaccacctggtgtgacctctctgtgccttactgaggcacctttctagagattaaaaggggcttgatggctgttaaaaaaaaaaaaaaaaaa

SEQ ID NO: 1045 - DNA, 6058 bp, Homo sapiens
cgcctgcccgcccgcccgctcgcccccggtccggactcctcctcctcctcttctcgccattgcagttggacccagcagcccggcgcgcaccgcgtggcttttgggggcagaccccggcgggctgtggcaggagggcggcggcggcggctgcggtcgaagaaggggacgccgacaagagttgaagtattgataacaccaaggaactctatcacaatttgaaaagataagcaaaagtttgatttccagacactacagaagaagtaaaaatgcgtccaatgcgaatttttgtgaatgatgaccgccatgtgatggcaaagcattcttccgtttatccaacacaagaggagctggaggcagtccagaacatggtgtcccacacggagcgggcgctcaaagctgtgtccgactggatagacgagcaggaaaagggtagcagcgagcaggcagagtccgataacatggatgtgcccccagaggacgacagtaaagaaggggctggggaacagaagacggagcacatgaccagaaccctgcggggagtgatgcgggtgggcctggtggcaaagggcctcctactcaagggggacttggatctggagctggtgctgctgtgtaaggagaagcccacaaccgccctcctggacaaggtggccgacaacctggccatccagcttgctgctgtaacagaagacaagtacgaaatactgcaatctgtcgacgatgctgcgattgtgataaaaaacacaaaagagcctccattgtccctgaccatccacctgacatcccctgttgtcagagaagaaatggagaaagtattagctggagaaacgctatcagtcaacgaccccccggacgttctggacaggcagaaatgccttgctgccttggcgtccctccgacacgccaagtggttccaggccagagccaacgggctgaagtcttgtgtcattgtgatccgggtcttgagggacctgtgcactcgcgtgcccacctggggtcccctccgaggctggcctctcgagctcctgtgtgagaaatccattggcacggccaacagaccgatgggtgctggcgaggccctgcggagagtgctggagtgcctggcgtcgggcatcgtgatgccagatggttctggcatttatgacccttgtgaaaaagaagccactgatgctattgggcatctagacagacagcaacgggaagatatcacacagagtgcgcagcacgcactgcggctcgctgccttcggccagctccataaagtcctaggcatggaccctctgccttccaagatgcccaagaaaccaaagaatgaaaacccagtggactacaccgttcagatcccaccaagcaccacctatgccattacgcccatgaaacgcccaatggaggaggacggggaggagaagtcgcccagcaaaaagaagaagaagattcagaagaaagaggagaaggcagagcccccccaggctatgaatgccctgatgcggttgaaccagctgaagccagggctgcagtacaagctggtgtcccagactgggcccgtccatgcccccatctttaccatgtctgtggaggttgatggcaattcattcgaggcctctgggccctccaaaaagacggccaagctgcacgtggccgttaaggtgttacaggacatgggcttgccgacgggtgctgaaggcagggactcgagcaagggggaggactcggctgaggagaccgaggcgaagccagcagtggtggcccctgccccagtggtagaagctgtctccacccctagtgcggcctttccctcagatgccactgccgagcaggggccgatcctgacaaagcacggcaagaacccagtcatggagctgaacgagaagaggcgtgggctcaagtacgagctcatctccgagaccgggggcagccacgacaagcgcttcgtcatggaggtcgaagtggatggacagaagttccaaggtgctggttccaacaaaaaggtggcgaaggcctacgctgctcttgctgccctagaaaagcttttccctgacacccctctcgcccttgatgccaacaaaaagaagagagccccagtacccgtcagagggggaccgaaatttgctgctaagccacataaccctggcttcggcatgggaggccccatgcacaacgaagtgcccccaccccccaaccttcgagggcggggaagaggcgggagcatccggggacgagggcgcgggcgaggatttggtggcgccaaccatggaggctacatgaatgccggtgctgggtatggaagctatgggtacggaggcaactcggcgacagcaggctacagtcagttctacagcaacggagggcattctgggaatgccagtggcggtggcggcgggggcggtggtggctcctccggctatggctcctactaccaaggtgacaactacaactcaccggtgcccccaaaacacgctgggaagaagcagccgcacgggggccagcagaagccctcctacggctcgggctaccagtcccaccagggccagcagcagtcctacaaccagagcccctacagcaactatggccctccacagggcaagcagaaaggctataaccatggacaaggcagctactcctactcgaactcctacaactctcccgggggcgggggcggatccgactacaactacgagagcaaattcaactacagtggtagtggaggccgaagcggcgggaacagctacggctcaggcggggcatcctacaacccagggtcacacgggggctacggcggaggttctgggggcggctcctcataccaaggcaaacaaggaggctactcacagtcgaactacaactccccggggtccggccagaactacagtggccctcccagctcctaccagtcctcacaaggcggctatggcagaaacgcagaccacagcatgaactaccagtacagataagcccccgcggggcggagatttctaccttctgcacttactccccatcagaagatcgagttttatgcatcacagttaacatgtcagctggccctccaggcccccgcccccatcccgtccacgttgctgtgtcgtgaggtgcagcgggtcaccctgtggcccgtcctgtgacccatatttagccgtgtttgggactccgtgtcttcaatggtttgttagttgccattacaactttgtctgggtagagtttttgagtttttgcagttcagtatccctctgtctattcacacttcgtgttagtggtaactcagtttgtctttaaatagttacagaagggatacgtcatttgttaatgcttttgtgaagtgagttaaacgagctttctgtattttaatgctttagtgtttcagttttataagtgaagattttattttaaaaaccagtgggaaagagtggggggtttctttttatgtctgggtcattcaggcagtacatctgaattaagctgaatgtagacaaataaagaaaaacaaaactgcgcccgtcttaggcctgggtgtctgacccaccagcagtgcaatgggcaggtttccccactctattcctgctcttgggaaagcagcgtgggccatcaggatggtccctggtccttagagagggtccagttcaggcttctagacattttactcatgctcagcgaaggctggttcctggtcccctgggctgtgtagacccggtgtcccaccaggctccaggctcccaccatctacagaggggcttacagcgcccattctggtcttggggaacccatcacaaaataggctttttctgctccccgattctggtgtagttctaagtacacagtgatgtcctctgtaggggcgtgcctgtggtggaacataacgcagttacaaaagaaagggcaggtgaggcctgggtaaccccagccatggaccgtcagtggctggagggagcttcgtgtctgtgctggagctgcagcctgctcgccatctggaggctcagtggagtggggagttggggttctcataccagcagatttccctagagcgtgattctcccatctgaggcaatcttgcctcccaggggaaattttgcaatgtttggaggatgttgtcacagctagtagcgggtgctctgggatctggtggatagatgccaaggatgctgtcaagcatactgtactgcccagaacagtggcccatagcagggacctgccctatcaaaatatcaggtgtatggaggtggagtcccaacgctagagcagcccttctcagctccaccctgcccggggagggaggaggagctctggtttcagagcagtgccgggattgcctttccccaggatctgtgtcggccatccaggaagaactgtactggccaagcctgggaccacacgtctgcagagatcctgctctgctggcctgagccccaggccttggcctcctgtgcttgggtaaccatggccactgggaaaagcaaggaccgtgtttgactttcttggagaggtgaaagaggtgaaagaacaagttgtgtgctagaaaacttttgaggaattcttatttgtgttagagcagaggaggtcccagataccaagtggcgcctcccaggaaaggctgggagaagaggtggcctggagtaccccgagatcccagcagcgcacacagtggagggatgaggatggatgggtcctaacccctgattttgatgggatgtgttcatgtcctatctcctctcctggacacattaaggggttgggacaagaagagactcctgtgagatcagcagacctcgtgtttaaggagagaatgcctgcctgcaacactcatggagagggacacttcctggccccacctgctaaatacctccaaactctgggcaggcgcctgcattctcaacacaggacttcccttaacagtttccggatcagtgaccaccaccacgttcaggtttctgaatgcagacccaccacgagggatggattccacccgcccgccctgctgcagatacatgcggcacagcaggcacgtgcctggagagaacagctcctgagcacagcacccttggagccctcaccccgctcacgatcctcaccagtgctgatgatgccgtcatgctgctggcctgagacagtatcccagctacaacaggacgacaccgggttcaggaatatgtggctatcaccttgagcactgacagtggccttccaggctagttgccttccaaacgcaggtagccgacctgcaggagggcctacaaacgggcccagcaagagctgggcaacagctggcttgtgaaatgagacaccttgaccaatatgctttgggtggacggtctcctacatgttcagtggaggccaccaggagcatccatgagcggggaaggggtccacacccttacatggcaagttgatacgatggggtgcttggtggatgggccatggaggtccgtgagctggaactgggcacacgccatcccagagggctcaggatgccccaggaaggaaagaagggcaacagactacacgattggacgtgtgtggttgactgggatgaagttggagggaggggcagggccttgcaggggattggtactgatcccagggaggaagtgttggggcttcatgaactaggatgaaaggaggcccctgagccatgacaaggggcacatccaggatttccgccaccctgaatttagtagagctagtaggccctggtcgtcactctgggcagggatgccgtcagccttgagggtcgccacccacctgtgtgttgccctctgtcctggcagggaaacatacaccccttgtctcaccaccaaccttgcttgtgtagtcagcagggctggccctgccccaaggactcactgcatgtacccggacccctaggcctggcctttgcagcatagttgggagcttctggattccatctgcacctgtgagccccatgctggctgtgcactgcgcgggcctgagactgctggatacaatgttgggcaacaactcagccagcctgatggcagcctcagaggcttactctaacccatcccagaataaatggagacttcatgtgttcattgtttcattcactcaa

SEQ ID NO: 1046 - DNA, 3234 bp, Homo sapiens
cgcctgcccgcccgcccgctcgcccccggtccggactcctcctcctcctcttctcgccattgcagttggacccagcagcccggcgcgcaccgcgtggcttttgggggcagaccccggcgggctgtggcaggagggcggcggcggcggctgcggtcgaagaaggggacgccgacaagagttgaagtattgataacaccaaggaactctatcacaatttgaaaagataagcaaaagtttgatttccagacactacagaagaagtaaaaatgcgtccaatgcgaatttttgtgaatgatgaccgccatgtgatggcaaagcattcttccgtttatccaacacaagaggagctggaggcagtccagaacatggtgtcccacacggagcgggcgctcaaagctgtgtccgactggatagacgagcaggaaaagggtagcagcgagcaggcagagtccgataacatggatgtgcccccagaggacgacagtaaagaaggggctggggaacagaagacggagcacatgaccagaaccctgcggggagtgatgcgggtgggcctggtggcaaagggcctcctactcaagggggacttggatctggagctggtgctgctgtgtaaggagaagcccacaaccgccctcctggacaaggtggccgacaacctggccatccagcttgctgctgtaacagaagacaagtacgaaatactgcaatctgtcgacgatgctgcgattgtgataaaaaacacaaaagagcctccattgtccctgaccatccacctgacatcccctgttgtcagagaagaaatggagaaagtattagctggagaaacgctatcagtcaacgaccccccggacgttctggacaggcagaaatgccttgctgccttggcgtccctccgacacgccaagtggttccaggccagagccaacgggctgaagtcttgtgtcattgtgatccgggtcttgagggacctgtgcactcgcgtgcccacctggggtcccctccgaggctggcctctcgagctcctgtgtgagaaatccattggcacggccaacagaccgatgggtgctggcgaggccctgcggagagtgctggagtgcctggcgtcgggcatcgtgatgccagatggttctggcatttatgacccttgtgaaaaagaagccactgatgctattgggcatctagacagacagcaacgggaagatatcacacagagtgcgcagcacgcactgcggctcgctgccttcggccagctccataaagtcctaggcatggaccctctgccttccaagatgcccaagaaaccaaagaatgaaaacccagtggactacaccgttcagatcccaccaagcaccacctatgccattacgcccatgaaacgcccaatggaggaggacggggaggagaagtcgcccagcaaaaagaagaagaagattcagaagaaagaggagaaggcagagcccccccaggctatgaatgccctgatgcggttgaaccagctgaagccagggctgcagtacaagctggtgtcccagactgggcccgtccatgcccccatctttaccatgtctgtggaggttgatggcaattcattcgaggcctctgggccctccaaaaagacggccaagctgcacgtggccgttaaggtgttacaggacatgggcttgccgacgggtgctgaaggcagggactcgagcaagggggaggactcggctgaggagaccgaggcgaagccagcagtggtggcccctgccccagtggtagaagctgtctccacccctagtgcggcctttccctcagatgccactgccgagcaggggccgatcctgacaaagcacggcaagaacccagtcatggagctgaacgagaagaggcgtgggctcaagtacgagctcatctccgagaccgggggcagccacgacaagcgcttcgtcatggaggtcgaagtggatggacagaagttccaaggtgctggttccaacaaaaaggtggcgaaggcctacgctgctcttgctgccctagaaaagcttttccctgacacccctctcgcccttgatgccaacaaaaagaagagagccccagtacccgtcagagggggaccgaaatttgctgctaagccacataaccctggcttcggcatgggaggccccatgcacaacgaagtgcccccaccccccaaccttcgagggcggggaagaggcgggagcatccggggacgagggcgcgggcgaggatttggtggcgccaaccatggaggctacatgaatgccggtgctgggtatggaagctatgggtacggaggcaactcggcgacagcaggctacacaggttttgtatgaatttttaaccttttaacaaactcccaaatctggttgatgcctttgacagtgatgaaaacgatttcaccacatctgaatccagagaaaccggctttttttcttattgcgagcatgttaaaacgttgggaacatgtggggaattgtatattgcgctgaattaacttctcccgcctcttgtaatgctctggtgggttcttgtttgggaatgcgatattttgtggctggtttagctagagagtgaactctcaaaggtatcaaaactgtgcttccattattagtgcaagaaacagacaggctttaaggggtagatgacgtgaaattttgcaagtcttaattacagctgcagatgcatgggattctggatttttttgttgctttttagtttaatgggactttaaaagtaattgaggagaaagaaccgtgatgttccctgtttctccagtaaaggactggcttttgcttgggcagaggtggtgctgctgggtgtgcagctgccacagactccaaaggcgtagaagtttgtgccaacacacggagtcattctggctctctgctgaggcccctgttttctggcaggtgccctccttggaaactggttttggctctgatcagcggttctttttgcagcaaagcctgcatctgtgttgacttgcaagattttgcgtttattcaggcaaaaactggtcaaaatggttactacatgatttgttcccagaggtttgaaacattcagtgaaactttttaaaactttgattgcatgatgtattttttttttagaaagttattgtttgagaataatgtctttttataccaggaaaatagttatcctgaatgacgttgaaaactccccctcccctttatttttttttaatcaatacatgtgaaagtaacaagc

SEQ ID NO: 1047 - DNA, 1817 bp, Homo sapiens
agcgccacgggcggggcggggccggcggcgggctgcgggcgcggccggacgggagttccccggagaaggatcctgcagcccgagtcccgaggataaagcttggggttcatcctccttccctggatcactccacagtcctcaggcttccccaatccaggggactcggcgccgggacgctgctatggacgacattttcactcagtgccgggagggcaacgcagtcgccgttcgcctgtggctggacaacacggagaacgacctcaaccagggggacgatcatggcttctcccccttgcactgggcctgccgagagggccgctctgctgtggttgagatgttgatcatgcggggggcacggatcaatgtaatgaaccgtggggatgacacccccctgcatctggcagccagtcatggacaccgtgatattgtacagaagctattgcagtacaaggcagacatcaatgcagtgaatgaacacgggaatgtgcccctgcactatgcctgtttttggggccaagatcaagtggcagaggacctggtggcaaatggggcccttgtcagcatctgtaacaagtatggagagatgcctgtggacaaagccaaggcacccctgagagagcttctccgagagcgggcagagaagatgggccagaatctcaaccgtattccatacaaggacacattctggaaggggaccacccgcactcggccccgaaatggaaccctgaacaaacactctggcattgacttcaaacagcttaacttcctgacgaagctcaacgagaatcactctggagagctatggaagggccgctggcagggcaatgacattgtcgtgaaggtgctgaaggttcgagactggagtacaaggaagagcagggacttcaatgaagagtgtccccggctcaggattttctcgcatccaaatgtgctcccagtgctaggtgcctgccagtctccacctgctcctcatcctactctcatcacacactggatgccgtatggatccctctacaatgtactacatgaaggcaccaatttcgtcgtggaccagagccaggctgtgaagtttgctttggacatggcaaggggcatggccttcctacacacactagagcccctcatcccacgacatgcactcaatagccgtagtgtaatgattgatgaggacatgactgcccgaattagcatggctgatgtcaagttctctttccaatgtcctggtcgcatgtatgcacctgcctgggtagcccccgaagctctgcagaagaagcctgaagacacaaacagacgctcagcagacatgtggagttttgcagtgcttctgtgggaactggtgacacgggaggtaccctttgctgacctctccaatatggagattggaatgaaggtggcattggaaggccttcggcctaccatcccaccaggtatttcccctcatgtgtgtaagctcatgaagatctgcatgaatgaagaccctgcaaagcgacccaaatttgacatgattgtgcctatccttgagaagatgcaggacaagtaggactggaaggtccttgcctgaactccagaggtgtcgggacatggttgggggaatgcacctccccaaagcagcaggcctctggttgcctcccccgcctccagtcatggtactaccccagccatggggtccatccccttcccccatccctaccactgtggccccaagaggggcgggctcagagctttgtcacttgccacatggtgtctcccaacatgggagggatcagccccgcctgtcacaataaagtttattatgaaaaaaaaaaaaaaaaaaaaaa

SEQ ID NO: 1048 - DNA, 1771 bp, Homo sapiens
agcgccacgggcggggcggggccggcggcgggctgcgggcgcggccggacgggagttccccggagaaggatcctgcagcccgagtcccgtcctcaggcttccccaatccaggggactcggcgccgggacgctgctatggacgacattttcactcagtgccgggagggcaacgcagtcgccgttcgcctgtggctggacaacacggagaacgacctcaaccagggggacgatcatggcttctcccccttgcactgggcctgccgagagggccgctctgctgtggttgagatgttgatcatgcggggggcacggatcaatgtaatgaaccgtggggatgacacccccctgcatctggcagccagtcatggacaccgtgatattgtacagaagctattgcagtacaaggcagacatcaatgcagtgaatgaacacgggaatgtgcccctgcactatgcctgtttttggggccaagatcaagtggcagaggacctggtggcaaatggggcccttgtcagcatctgtaacaagtatggagagatgcctgtggacaaagccaaggcacccctgagagagcttctccgagagcgggcagagaagatgggccagaatctcaaccgtattccatacaaggacacattctggaaggggaccacccgcactcggccccgaaatggaaccctgaacaaacactctggcattgacttcaaacagcttaacttcctgacgaagctcaacgagaatcactctggagagctatggaagggccgctggcagggcaatgacattgtcgtgaaggtgctgaaggttcgagactggagtacaaggaagagcagggacttcaatgaagagtgtccccggctcaggattttctcgcatccaaatgtgctcccagtgctaggtgcctgccagtctccacctgctcctcatcctactctcatcacacactggatgccgtatggatccctctacaatgtactacatgaaggcaccaatttcgtcgtggaccagagccaggctgtgaagtttgctttggacatggcaaggggcatggccttcctacacacactagagcccctcatcccacgacatgcactcaatagccgtagtgtaatgattgatgaggacatgactgcccgaattagcatggctgatgtcaagttctctttccaatgtcctggtcgcatgtatgcacctgcctgggtagcccccgaagctctgcagaagaagcctgaagacacaaacagacgctcagcagacatgtggagttttgcagtgcttctgtgggaactggtgacacgggaggtaccctttgctgacctctccaatatggagattggaatgaaggtggcattggaaggccttcggcctaccatcccaccaggtatttcccctcatgtgtgtaagctcatgaagatctgcatgaatgaagaccctgcaaagcgacccaaatttgacatgattgtgcctatccttgagaagatgcaggacaagtaggactggaaggtccttgcctgaactccagaggtgtcgggacatggttgggggaatgcacctccccaaagcagcaggcctctggttgcctcccccgcctccagtcatggtactaccccagccatggggtccatccccttcccccatccctaccactgtggccccaagaggggcgggctcagagctttgtcacttgccacatggtgtctcccaacatgggagggatcagccccgcctgtcacaataaagtttattatgaaaaaaaaaaaaaaaaaaaaaa

SEQ ID NO: 1049 - DNA, 2381 bp, Homo sapiens
agaaacgtgacacaccagccctctcggaggggtttcggaccgaagggaagaagctgcgccgtgtcgtccgtctccctgcgcgccgcgggcacttctcctgggctctccccgaactctcccgcgacctctgcgcgccctcaggccgccttccccgccctgggctcgggacaacttctggggtggggtgcaaagaaagtttgcggctcctgccgccggcctctccgcctcttggcctaggaggctcgccgcccgcgcccgctcgttcggccttgcccgggaccgcgtcctgccccgagaccgccaccatgaacaagctttacatcggcaacctcaacgagagcgtgacccccgcggacttggagaaagtgtttgcggagcacaagatctcctacagcggccagttcttggtcaaatccggctacgccttcgtggactgcccggacgagcactgggcgatgaaggccatcgaaactttctccgggaaagtagaattacaaggaaaacgcttagagattgaacattcggtgcccaaaaaacaaaggagccggaaaattcaaatccgaaatattccaccccagctccgatgggaagtactggacagcctgctggctcagtatggtacagtagagaactgtgagcaagtgaacaccgagagtgagacggcagtggtgaatgtcacctattccaaccgggagcagaccaggcaagccatcatgaagctgaatggccaccagttggagaaccatgccctgaaggtctcctacatccccgatgagcagatagcacagggacctgagaatgggcgccgagggggctttggctctcggggtcagccccgccagggctcacctgtggcagcgggggccccagccaagcagcagcaagtggacatcccccttcggctcctggtgcccacccagtatgtgggtgccattattggcaaggagggggccaccatccgcaacatcacaaaacagacccagtccaagatagacgtgcataggaaggagaacgcaggtgcagctgaaaaagccatcagtgtgcactccacccctgagggctgctcctccgcttgtaagatgatcttggagattatgcataaagaggctaaggacaccaaaacggctgacgaggttcccctgaagaccctggcccataataactttgtagggcgtctcattggcaaggaaggacggaacctgaagaaggtagagcaagataccgagacaaaaatcaccatctcctcgttgcaagaccttaccctttacaaccctgagaggaccatcactgtgaagggggccatcgagaattgttgcagggccgagcaggaaataatgaagaaagttcgggaggcctatgagaatgatgtggctgccatgagcctgcagtctcacctgacccctggcctgaacctggctgctgtaggtcttttcccagcttcatccagcgcagtcccgccgcctcccagcagcgttactggggctgctccctatagctcctttatgcaggctcccgagcaggagatggtgcaggtgtttatccccgcccaggcagtgggcgccatcatcggcaagaaggggcagcacatcaaacagctctcccggtttgccagcgcctccatcaagattgcaccacccgaaacacctgactccaaagttcgtatggttatcatcactggaccgccagaggcccaattcaaggctcagggaagaatctatggcaaactcaaggaggagaacttctttggtcccaaggaggaagtgaagctggagacccacatacgtgtgccagcatcagcagctggccgggtcattggcaaaggtggaaaaacggtgaacgagttgcagaatttgacggcagctgaggtggtagtaccaagagaccagacccctgatgagaacgaccaggtcatcgtgaaaatcatcggacatttctatgccagtcagatggctcaacggaagatccgagacatcctggcccaggttaagcagcagcatcagaagggacagagtaaccaggcccaggcacgaaggaagtgaccagcccctccctgtcccttcgagtccaggacaacaacgggcagaaatcgagagtgtgctctccccggcaggcctgagaatgagtgggaatccgggacacctgggccgggctgtagatcaggtttgcccacttgattgagaaagatgttccagtgaggaaccctgatctctcagcccccaaacacctacccaattggcccaacactgtctgcccctcggggtgtcagaaattctagcgcaaggcacttttaaacgtggattgtttaaagaagctctccaggccccaccaagagggtggatcacacctcagtgggaagaaaaataaaatttccttcaggtttt

SEQ ID NO: 1050 - DNA, 3613 bp, Homo sapiens
ggcggaggcagcggctgtagcggggctgtagccgggcgttgagcacagcgcgggccaggccgaacggaagggacctgccacagcccctcaactccacggactcttcgccctagactagcggagctgcatctccgcgcttcgttggacgcctccgtaaccacgaagggctctctctctcccgtgaccctccagccccatgacctgttcatagcagccgagagctcacccaggcgggggtgttgtgggtacaggccatcgaccctgtgacccctcaagagccagggactcggtttcccccgcaggcctccctcccctgtgactccctccacacagattctggggacagagctgttacctgccactaggatccccgcctgagagctcctcactgacggctccctcctcggagtccccttcattgggtctcctaagagcaccaattttggtctctggcaagcctcccacccccaaacgaggtggggaggcctcggcagccatgcccgccctgggccccccctcaccccaccactccctgggcacccaagccggggtctagcagggggccagcagccaaggggctggggcaggagacagatcagggcccacctccctgccagggagggagcaaagatggagcggcgggaggagcagccgggggctgcaggggctggagcagcaccagccttggacttcactgtggagaacgtggagaaggcgctgcaccagctctactatgatcccaacattgagaataagaacctggctcagaagtggctgatgcaggcccaggtctccccacaggcctggcacttcagctggcagctactgcagcccgacaaggtaccagagatccagtactttggggccagtgctcttcacatcaagatctctcgctactggagtgacatccccactgaccagtatgaaagcctaaaggcacagctcttcacccagatcacccgctttgccagtggctccaagattgtactgactcggctgtgcgtggcactggcctcactggctctcagcatgatgcctgatgcttggccatgtgctgtggcagatatggtacgactcttccaggctgaggactcaccagtggatgggcagggccgctgcctagccctgttagagctgctgacagtgctgcctgaggagttccagaccagtcgcctaccccagtaccgcaaaggcctggtgcggaccagcctggcggtggaatgtggggctgtcttcccgctgctggagcagctgctacagcagcccagctcacccagctgtgtgcgtcagaaggtgctcaagtgtttctccagctgggtgcagctggaggtgccgctgcaggactgtgaggcgctcattcaggctgcctttgctgctctgcaggactcggagctcttcgacagcagtgtggaggccattgtgaatgccatctcacagcctgatgcccagaggtacgtgaacacactcctgaaactcatcccgctggtgctgggtctgcaggaacaactgcggcaggcagtgcagaatggggacatggagacctcccatggcatctgtcgcatcgctgtggccctgggcgagaaccactcccgggccttgctggaccaagtagagcactggcagagtttcctggcactcgtcaacatgattatgttctgcacaggcatccctggccactatcctgtcaatgagaccaccagctccctaaccctcaccttctggtacacactgcaggatgatattctatcctttgaggcagagaagcaggctgtataccagcaggtgtaccggccagtctacttccagctggtggatgtgcttctgcacaaggcccagttcccttctgatgaggaatatggattctggtcctcagacgagaaggagcagttccgaatttacagggtggacatctcagacacgctcatgtatgtctatgagatgttgggggccgagctgctcagcaacctctatgacaagctgggtcgtttgctcaccagctcagaggagccctactcctggcagcacacagaggccctcctctacggcttccaatccatcgcagagaccattgacgtcaactattctgatgtggtgcctgggctcattggcctcatcccacggatcagcatcagcaacgtgcagctggcagacactgtcatgttcaccattggagctctgtctgaatggctggctgaccaccccgtcatgatcaacagtgttctgcccttggtactgcatgccctaggcaatcctgagctgtctgtctcttctgtgtccaccctcaagaagatctgccgagagtgcaagtatgacctgcctccctatgctgccaacattgtggctgtgtcccaggatgtgctgatgaaacagatccacaagacaagccagtgcatgtggctgatgcaggcgctgggcttcctgctgtcagctcttcaagtggaggagatccttaagaacctgcactcgcttatctcaccctatatccagcaactggagaagctggcagaggagatacccaatccctccaacaagctggccattgttcacatcttggggcttctctccaacctcttcaccacactggacatcagtcatcatgaggatgatcatgaaggccctgagcttcggaagctgccagtgccacagggacccaaccccgtggtggtggtgctgcagcaggtcttccagcttatccagaaggtgctgagcaaatggttgaatgatgcccaggttgtggaggcggtgtgcgctatctttgagaagtctgttaagacgctgctggatgactttgcccccatggtgccacagctgtgtgagatgctgggtcggatgtacagcaccatcccccaggcctctgctcttgacctcactcgacagctggtccacatctttgctcatgagcctgcccactttcccccaattgaggccctcttcctgctcgtcacctccgtcacactcactctcttccagcaagggcccagggatcatcctgatattgttgattcatttatgcaactcctggcacaggctctgaagcggaagccagatttgttcctgtgtgaacgattggatgtcaaatctgtgttccagtgtgctgtgctggccctcaagttccctgaggcacctactgtcaaggcctcctgtggcttctttacagagctgctgcctcggtgtggggaagtagagtctgtgggaaaggtggtacaggaagacggtcgtatgctgctcatagcagtgctggaggccattgggggccaggcctcccgcagcctcatggactgctttgccgatatcctgttcgccctgaacaagcactgcttcagcctcctgagcatgtggatcaaggaggccctgcagccacctggtttcccctctgcccgcctcagccctgaacagaaggataccttcagccagcagatccttcgcgagcgagtgaacaagaggcgggtgaaggagatggtgaaggagttcacactgctgtgccggggtctccatggcacagattacacagctgactactgaggggtgcccccatcccatccaccccttctcttcatccttccctattcccaaagagtaaacctggaccctcaaaaaaaaaaaaaaaaaaaaa

SEQ ID NO: 1051 - DNA, 4134 bp, Homo sapiens
cttgccgaggattggctgagccttcagttttgaaaatcatagttttcgcccgcgctgcgccgcctggttgctcctcccgtgcggtgagtcccgaaggcccggagccaagtgggtctgggcaagcggggccttacctagggataccaccggacttggatcggagcagccttcaggggacgtggcgcagtcgaacagagccaccatggggacgacggccccagggcccattcacctgctggagctatgtgaccagaagctcatggagtttctctgcaacatggataataaggacttggtgtggcttgaggaaatccaagaggaggccgagcgcatgttcaccagagaattcagcaaagagccagagctgatgcccaaaacaccttctcagaagaaccgacggaagaagagacggatttcttatgttcaggatgaaaacagagatcccatcaggagaaggttatcccgcagaaagtctcggagcagccagctgagctcccgacgcctccgcagcaaggacagtgtagagaagctggctacagtggtcggggagaacggctccgtcctgcggcgtgtgacccgtgctgcggctgcagctgccgcggctaccatggcattggctgcaccttcttcacccacccctgagtctcccacgatgctgactaagaagcccgaggataaccacacccagtgccagctggtgcctgtggtggagatcggcatcagtgagcgccagaatgctgagcagcatgtcacccagctcatgtccaccgagcctctgccccgcactctgtccccgactccagcttcagccacagctccaacctcccagggcatcccgacatcagatgaggaatcaacacctaagaagtcgaaggccaggatactggagtccatcacagtgagctccctgatggctacaccccaggaccccaagggtcaaggggtcgggacggggcggtctgcgtctaagctcaggattgcgcaggtctcccctggcccacgggactcgccagcctttccagattctccatggcgggagcgggtgctggctcccatcctgccggataacttctccacgcccacgggctctcgcacggactctcaatcggtgcggcacagcccgatcgccccgtcttccccgagtccccaagtcttagcccagaagtactctctggtggccaaacaggaaagtgttgtccgcagggcgagcagaaggcttgccaagaagactgccgaagagccagctgcctctggccgcatcatctgtcacagttacctggagaggctcctgaatgttgaggtgccccagaaagttggttctgagcagaaggaaccccccgaggaggctgagcctgtggcggcagctgagccagaggtccctgagaacaatggaaataactcgtggccccacaatgacacggagattgccaacagcacacccaacccgaagcctgcagccagcagcccggaaacaccctctgcagggcagcaagaggccaagacggaccaagcagatggacccagagagccaccgcagagtgccaggaggaagcgcagctacaagcaggccgtgagtgagctggacgaggagcagcacctggaggatgaggagctgcagccccccaggagcaagaccccttcctcaccctgcccagccagcaaggtggtacggcccctccggacctttctgcacacagtgcagaggaaccagatgctcatgaccccgacctcagccccacgcagcgtcatgaagtcctttattaagcgcaacactcccctgcgcatggaccccaaggagaaggagcggcagcgcctggagaatctgcggcggaaggaggaggccgagcagctgcgcaggcagaaggtggaggaggacaagcggcggcggctggaggaggtgaagctgaagcgtgaggaacgcctccgcaaggtgctgcaggcccgcgagcgggtggagcagatgaaggaggagaagaagaagcagattgagcagaagtttgctcagatcgacgagaagactgagaaggccaaggaggagcggctggcagaggagaaggccaagaaaaaggcggcggccaagaagatggaggaggtggaagcacgcaggaagcaggaagaggaggcacgtaggctcaggtggctgcagcaggaggaggaagagcggcggcaccaagagctgctgcagaagaagaaggaagaggagcaggagcggctgcggaaggcggccgaggctaagcggctggcagagcagcgggagcaggagcggcgggagcaggagcggcgcgagcaggagcggcgcgagcaggagcggcgggagcaggagcggcgcgagcaggagcgacagctggcagagcaggagcgtcggcgggagcaggagcggctccaggccgagagggagctgcaggagcgggagaaggccctgcggctgcagaaggagcagctgcagagggaactggaggagaagaagaagaaggaagagcagcagcgtctggctgagcggcagctgcaggaggagcaagagaagaaagccaaggaggcagcaggggccagcaaggccctgaatgtgactgtggacgtgcagtctccagcttgtacctcatatcagatgactccgcaagggcacagggcccctcccaagatcaacccagataactacgggatggatctgaatagcgacgactccaccgatgatgaggcccatccccggaagcccatccccacctgggcccgaggcaccccgctcagccaggctatcattcaccagtactaccacccaccgaaccttctggagctctttggaaccattctcccactggacttggaggatatcttcaagaagagcaagccccgctatcacaagcgcaccagctctgctgtctggaactcaccgcccctgcagggcgccagggtccccagcagcctggcctacagcctgaagaagcactgaggctggcctgcggccttcttggcagcctcgcctcctgtccatgtctatctgtctgtctgtcggtctctgtcttggtctgttgccctccttcttggcatgccattgtggagggcttggccaggtgtatataaacgtcctctgtgctgggtgtttctgctgcaggtggcaggtggccccaggcctgtttggaggatgggctgggtgggtgggtggggaagaaatgggcccagccccacatggcctgcagacagtgctctgtaaatagttgttttaatttagctgaatgttagcattttagtctttggcattttagcgtttgggaggtagattaataaagtatattccttcaagcctgctgttgataccatgaagactgggcgcctcagtcccagccctgtagctgtgtgtcttgggccaccagtggcctgcaggacgaaggtactgttccatcacctgcggtgtgcctcaggatcaccaggtgcaggcccccaccctcggagatgctgctgcagtgagtggttccactgcctggataacccttgaggaacacgtcagttactgtcacgatggggcaggtggagctccttcctattttttggggtgctccctgtttgtaaaggggagtttgttcattgggaaagacctgggtcttgacacggccctgccacttagtcccctaccctctccattccccaggctccacccgtgctgctcaggtgcaaatggacttgagagcatctatgtgctggtgaagcatgaggtctgagtagaaaaggggtatcccttgagaccaccttgggaccagtgcttgcaagcagcgagatatttccccagcaaaaccaggcagctgctaattaaatgcttagaaccaatgaaagctggctgtggtcctgcctgtgagctgcctactgctgccttctgaatgcatatatctgctactgtagccccgggttgtcaaactatggcctgtgggccaaatccagccacagtcggttctttaaagttttatcgaaacacaagcaatggaaatgcccatttccattgttgtctccagttgctctgctccgagggcagtgttaagttgtgcagcagaggcccctccatgcaaagctgaatatgtttactatttgaactttttcagaagttctgcttaaggacaaaataaagcctaaatccaagaacacttt

SEQ ID NO: 1052 - DNA, 1990 bp, Homo sapiens
caaggagccatgccagctggacacacacttcttccagggcctctggcagccaggacagagttgagaccacagctgttgagaccctgagccctgagtctgtattgctcaagaagggccttccccagcaatgacctcctcattgcttctggcctttctcctcctggctccaaccacagtggccactcccagagctggcggtcagtgtccagcatgtggggggcccaccttggaactggagagccagcgggagctgcttcttgatctggccaagagaagcatcttggacaagctgcacctcacccagcgcccaacactgaaccgccctgtgtccagagctgctttgaggactgcactgcagcacctccacggggtcccacagggggcacttctagaggacaacagggaacaggaatgtgaaatcatcagctttgctgagacaggcctctccaccatcaaccagactcgtcttgattttcacttctcctctgatagaactgctggtgacagggaggtccagcaggccagtctcatgttctttgtgcagctcccttccaataccacttggaccttgaaagtgagagtccttgtgctgggtccacataataccaacctcaccttggctactcagtacctgctggaggtggatgccagtggctggcatcaactccccctagggcctgaagctcaagctgcctgcagccaggggcacctgaccctggagctggtacttgaaggccaggtagcccagagctcagtcatcctgggtggagctgcccataggccttttgtggcagcccgggtgagagttgggggcaaacaccagattcaccgacgaggcatcgactgccaaggagggtccaggatgtgctgtcgacaagagttttttgtggacttccgtgagattggctggcacgactggatcatccagcctgagggctacgccatgaacttctgcatagggcagtgcccactacacatagcaggcatgcctggtattgctgcctcctttcacactgcagtgctcaatcttctcaaggccaacacagctgcaggcaccactggagggggctcatgctgtgtacccacggcccggcgccccctgtctctgctctattatgacagggacagcaacattgtcaagactgacatacctgacatggtagtagaggcctgtgggtgcagttagtctatgtgtggtatgggcagcccaaggttgcatgggaaaacacgcccctacagaagtgcacttccttgagaggagggaatgacctcattctctgtccagaatgtggactccctcttcctgagcatcttatggaaattaccccacctttgacttgaagaaaccttcatctaaagcaagtcactgtgccatcttcctgaccactaccctctttcctagggcatagtccatcccgctagtccatcccgctagccccactccagggactcagacccatctccaaccatgagcaatgccatctggttcccaggcaaagacacccttagctcacctttaatagaccccataacccactatgccttcctgtcctttctactcaatggtccccactccaagatgagttgacacaaccccttcccccaatttttgtggatctccagagaggcccttctttggattcaccaaagtttagatcactgctgcccaaaatagaggcttacctacccccctctttgttgtgagcccctgtccttcttagttgtccaggtgaactactaaagctctctttgcataccttcatccattttttgtccttctctgcctttctctatgcccttaaggggtgacttgcctgagctctatcacctgagctcccctgccctctggcttcctgctgaggtcagggcatttcttatccctgttccctctctgtctaggtgtcatggttctgtgtaactgtggctattctgtgtccctacactacctggctacccccttccatggccccagctctgcctacattctgat

SEQ ID NO: 1053 - DNA, 4148 bp, Homo sapiens
gtctgtccccatctctcaatctcatgctgagtctctctgtctccaactgcctgtcactgtctttgtgtctctgtgactctcatttctttttttctgtctcctgctgtctctgtgtgggattccttgtctctctgcccctgccctccctctcctatctgaaccctggtctctgtgtcccttagggcttatcacaccgttctccccagagtcaccgggaggagagccgggactggacacaagccagggctgggacaatggcagtgcctagtctgtggccctggggagcatgcctgcctgtgatcttcctctccttgggatttggcctggatacagtagaggtgtgccccagcctggatattcgctcagaggtggcagagcttcgtcagctggagaactgcagcgtggtggagggccacctgcagatcctgctcatgttcacagccaccggggaggacttccgcggcctcagcttccctcgcctcacccaggtcaccgactacctgctgctcttccgtgtctacggactggagagcctgcgcgacctcttccccaacctagcagtcatccgcgggacgcgcctcttcctgggctatgcactggtcatctttgagatgccacatctgcgtgacgtggcactgcctgcacttggggccgtgctgcgtggggctgtgcgtgtggagaagaaccaggagctctgccacctctccaccattgactggggactgctgcagccagcacctggcgccaaccacatcgtgggcaacaagctgggcgaggagtgtgctgacgtgtgccctggtgtgctgggtgctgctggtgagccctgtgccaagaccaccttcagcgggcacactgactacagatgctggacctccagccactgccagagagtgtgcccctgcccccatgggatggcttgcacagcgaggggcgagtgctgccacaccgaatgcctggggggctgcagccagccagaagaccctcgtgcctgtgtagcttgccgccacctctacttccagggtgcctgcctgtgggcctgcccgccaggcacctaccagtatgagtcctggcgctgtgtcacagctgagcgctgtgccagcctgcactctgtgcccggccgtgcctccaccttcggcatacaccagggcagttgcctggcccagtgcccttctggcttcacccgtaatagcagcagcatattctgccacaagtgcgaggggctgtgccctaaagagtgcaaggtaggcaccaagaccatcgactccatccaggcggcacaggatcttgtgggctgcacgcatgtggagggaagcctcatcctcaaccttcgccagggctacaacctggagccacagctgcagcacagcctggggctggtagaaaccattactggcttcctcaaaatcaagcactcctttgccctcgtgtccctgggctttttcaagaacctcaaactaatccggggagacgccatggtggatgggaactacactctctacgtgctggacaaccagaacctacaacagctagggtcctgggtggccgcggggctcaccattcccgtgggcaagatctacttcgccttcaacccgcgcctctgcttggaacacatctaccgactggaggaggtgacaggcacgcgaggtcggcagaacaaggctgagatcaacccccgcaccaacggagaccgcgccgcctgccagactcgcaccctgcgcttcgtgtccaacgtgacggaggcagaccgcatcctgctacgctgggagcgctatgagccactggaggcccgcgacctgctcagcttcatcgtgtactacaaggagtccccattccagaacgccacagagcacgtgggtccagatgcttgtggaacccagagctggaacctgctggatgtggagctgcccctaagccgcacccaggagccaggggtgaccctagcctccctcaagccttggacacagtacgcagtgtttgtgcgggccatcacgctaaccactgaggaggacagccctcatcaaggagcccagagtcccatcgtctacctccgaacgctgcctgcagctcccacggtgccccaagacgtcatctccacgtccaactcctcctcccacctcctggtgcgctggaagccaccgacccagcgcaatgggaacctcacctactacctggtgctgtggcagcggctggcagaggacggcgacctctacctcaatgactactgccaccgcggcttgcggctgcccaccagcaacaacgatccgcgcttcgacggcgaagacggggatcctgaggccgagatggagtccgactgctgcccttgccagcacccacctcctggtcaggttctgcccccgctggaggcgcaagaggcctcgttccagaagaagtttgaaaactttctacacaacgcgatcaccatccccatatccccttggaaggtgacgtccatcaacaagagcccccaaagggactcagggcggcaccgccgggcagctgggcccctccggctggggggcaacagctcggatttcgagatccaggaggacaaggtgccccgtgagcgagcggtgctgagcggcctgcgccacttcacggaataccggatcgacatccatgcctgcaaccacgcggcgcacaccgtgggctgcagcgccgccaccttcgtctttgcgcgcaccatgccccacagagaggctgatggtattccaggaaaggtggcctgggaggcctccagcaagaacagtgtccttctgcgctggctcgagccaccagaccccaacggactcatcctcaagtacgaaatcaagtaccgccgcttgggagaggaggccacagtgctgtgtgtgtcccgtcttcgatatgcgaagtttgggggagtccacctggccctgctgccccctggaaactactctgccagggttagggcaacctcactggctggcaatggctcttggacagacagtgttgccttctacatccttggcccagaggaggaggatgctggggggctgcatgtcctcctcactgccacccctgtggggctcacgctgctcatcgttcttgctgcccttggtttcttctacggcaagaagagaaacagaaccctgtatgcttctgtgaatccagagtacttcagcgcctctgatatgtatgtccctgatgaatgggaggtgcctcgggagcagatctcgataatccgggaactgggccagggctcttttgggatggtatatgaggggctggcacgaggacttgaggctggagaggagtccacacccgtggccctgaagacggtgaatgagctggccagcccacgggaatgcattgagttcctcaaggaagcttctgtcatgaaagccttcaagtgtcaccatgtggtgcgtctcctgggtgtggtatctcagggccagccaactctggtcatcatggagttaatgacccgtggggacctcaagagccatcttcgatctttgcggcctgaggcagagaacaaccctgggctcccacagccagcattgggggaaatgatccaaatggctggtgagattgcagacggcatggcctaccttgctgccaacaagtttgtgcaccgagatctagcagcccgcaactgcatggtgtcccaggacttcaccgtcaagatcggggacttcgggatgactcgggacgtgtatgagacagactattaccgcaagggtgggaaggggctgctgcccgtgcgctggatggcccccgagtccctcaaagatgggatcttcaccacccactcggatgtctggtcctttggcgtggtactctgggagattgtgaccctggcagaacaaccctaccagggcctgtccaatgagcaggtgctgaagttcgtcatggatggcggggtcctggaggagctggagggctgtccccttcagctgcaggagctgatgagccgctgctggcagccgaacccacgcctgcgcccatctttcacacacattctggacagcatacaggaggagctgcggccctccttccgcctcctctccttctactacagcccggaatgccggggggcccggggctccctgcctaccaccgatgcagagcctgactcctcacccactccaagagactgcagccctcaaaatgggggtccagggcactga

SEQ ID NO: 1054 - DNA, 1869 bp, Homo sapiens
gcacacactcatcgaaaaaaatttggattattagaagagagaggtctgcggcttccacaccgtacagcgtggtttttcttctcggtataaaagcaaagttgtttttgatacgtgacagtttcccacaagccaggctgatccttttctgtcagtccacttcaccaagcctgcccttggacaaggacccgatgcccaaccccaggcctggcaagccctcggccccttccttggcccttggcccatccccaggagcctcgcccagctggagggctgcacccaaagcctcagacctgctgggggcccggggcccagggggaaccttccagggccgagatcttcgaggcggggcccatgcctcctcttcttccttgaaccccatgccaccatcgcagctgcagctgcccacactgcccctagtcatggtggcaccctccggggcacggctgggccccttgccccacttacaggcactcctccaggacaggccacatttcatgcaccagctctcaacggtggatgcccacgcccggacccctgtgctgcaggtgcaccccctggagagcccagccatgatcagcctcacaccacccaccaccgccactggggtcttctccctcaaggcccggcctggcctcccacctgggatcaacgtggccagcctggaatgggtgtccagggagccggcactgctctgcaccttcccaaatcccagtgcacccaggaaggacagcaccctttcggctgtgccccagagctcctacccactgctggcaaatggtgtctgcaagtggcccggatgtgagaaggtcttcgaagagccagaggacttcctcaagcactgccaggcggaccatcttctggatgagaagggcagggcacaatgtctcctccagagagagatggtacagtctctggagcagcagctggtgctggagaaggagaagctgagtgccatgcaggcccacctggctgggaaaatggcactgaccaaggcttcatctgtggcatcatccgacaagggctcctgctgcatcgtagctgctggcagccaaggccctgtcgtcccagcctggtctggcccccgggaggcccctgacagcctgtttgctgtccggaggcacctgtggggtagccatggaaacagcacattcccagagttcctccacaacatggactacttcaagttccacaacatgcgaccccctttcacctacgccacgctcatccgctgggccatcctggaggctccagagaagcagcggacactcaatgagatctaccactggttcacacgcatgtttgccttcttcagaaaccatcctgccacctggaagaacgccatccgccacaacctgagtctgcacaagtgctttgtgcgggtggagagcgagaagggggctgtgtggaccgtggatgagctggagttccgcaagaaacggagccagaggcccagcaggtgttccaaccctacacctggcccctgacctcaagatcaaggaaaggaggatggacgaacaggggccaaactggtgggaggcagaggtggtgggggcagggatgataggccctggatgtgcccacagggaccaagaagtgaggtttccactgtcttgcctgccagggcccctgttcccccgctggcagccaccccctcccccatcatatcctttgccccaaggctgctcagaggggccccggtcctggccccagcccccacctccgccccagacacaccccccagtcgagccctgcagccaaacagagccttcacaaccagccacacagagcctgcctcagctgctcgcacagattacttcagggctggaaaagtcacacagacacacaaaatgtcacaatcctgtccctcac

SEQ ID NO: 1055 - DNA, 5178 bp, Homo sapiens
ggcgcggagtcagagtggcgcagcaagtggccgcaggtggcgacggtggcggggggtggggtgtgaggtaatccaggggtcgcggaagaggaggctgagagggtcaaaagaaaactaaagctgcagtccggcctactgttccgggggccgcggagcccccacccggggagatggacctcaaccggatcatccaggcgctgaagggcaccatcgacccgaagttgcggattgcagccgagaacgagctcaaccagtcctacaagattatcaattttgcccccagtttacttcggattatagtctctgaccatgtggaattcccagtacgacaggcagctgccatttacctgaagaacatggtgacacaatactggccagatcgagaacctccaccaggagaagcaatatttccattcaacattcacgaaaacgatcgccagcaaatacgtgataacattgtggaaggaataattcggtctccagatttagtgagagtccaattaacaatgtgtctccgtgccatcataaaacatgattttcctggtcactggccaggagtggtcgacaagatagactattacttgcaatcacagagcagtgcaagctggcttggcagtttattatgcctgtatcaactggtgaagacatatgaatataagaaagcagaagagagagaacctcttataatagcaatgcagatattcctgcctcgtattcagcaacaaattgttcagctccttcctgattcctcctattattctgtattactgcagaaacaaattctgaaaatcttttatgcacttgttcagtatgcattgcctcttcagctagtgaataaccaaaccatgacaacatggatggagatcttccgaactattatcgacaggaccgttcctcctgagactctgcacattgatgaggatgatagaccagaactggtatggtggaagtgtaagaagtgggcactgcatattgtagctcggctctttgaacgatatggaagcccaggaaatgtcacaaaagaatactttgaattttctgaattctttttgaaaacctatgcagtgggcattcagcaggtgctactaaaaattttagatcaatatagacagaaagaatatgtagctccccgtgttcttcagcaagcattcaactatctcaaccaaggggtggttcattctataacctggaagcagatgaagccacacatacagaatatctctgaagatgtgattttttctgtgatgtgttataaagatgaggatgaagagctgtggcaagaagatccatatgagtatataaggatgaaatttgatatttttgaagattatgcttctcccaccacagcagcccagactctcttatatactgctgcaaagaaaagaaaagaggtgttgccaaaaatgatggcattctgttatcaaatcctgacagacccgaactttgaccctaggaagaaagatggagccctgcatgtgattggttccctagctgagattttactgaagaagagtttattcaaggaccaaatggagctgtttctacaaaatcatgtatttccattattattgtctaacctgggatatcttcgagctagatcttgctgggtacttcatgcatttagttctttgaagttccataatgagctcaatctaagaaatgccgttgaattagcgaagaagagcctgattgaagataaagagatgcctgtcaaagttgaagctgcccttgctcttcagtctttaatttctaaccagatacaagctaaggaatatatgaagccacatgtgaggcctattatgcaggaactgttgcacattgttagagagacagaaaatgatgatgttactaatgtcatccagaagatgatatgtgaatacagtcaagaggtagcctcaattgctgttgatatgacccaacacttggctgagatatttggcaaagttcttcaaagtgatgaatatgaagaagttgaagacaaaacagtaatggctatgggaattttacataccattgatactatcttaacagttgtagaagatcataaagagattacccagcagttagagaatatctgtctacggatcattgatcttgttctgcagaaacatgtaattgaattctatgaagaaattctttccctggcatacagtttaacctgccacagtatttcccctcaaatgtggcagcttctaggtatactatatgaagtgtttcagcaggattgctttgaatactttacagacatgatgcctctcctgcataattatgtgacaatagatacagataccttactatcaaatgcaaaacatttagaaattctttttacaatgtgtaggaaggtactatgtggagatgcaggagaagatgcagagtgtcatgcagctaaacttctggaagtcatcattcttcagtgcaaaggaaggggaattgatcagtgcattccactcttcgttcaacttgttttggagagattaactcgaggggtcaaaactagtgagcttcgtactatgtgtcttcaggttgcaattgctgccttgtactacaaccctgatttgctgctacatactttagaacgaattcagttgcctcacaaccctggacctatcactgtacagtttataaatcaatggatgaatgatacagattgttttcttgggcatcatgaccggaagatgtgtataataggactgagtatccttttggaattgcaaaatcgacctcctgcagtagatgctgtggtgggacagattgttccctcaattcttttccttttccttggcctaaagcaggtctgtgctactagacaactggtaaaccgggaagatcgttcaaaagcagagaaagctgatatggaagaaaatgaggagatttcaagtgatgaagaggagacaaatgtaactgctcaagcaatgcagtcaaataatggaagaggtgaagatgaggaggaggaagatgatgactgggatgaagaagtattggaagaaaccgcgcttgaggggttcagtactccacttgaccttgacaatagtgtggatgaatatcagttttttacacaagctctgataactgtgcagagtcgagatgcagcctggtaccagctgctgatggcaccactcagcgaggatcagaggacagcactgcaggaggtgtacacactggcagagcaccgacggacggtggcagaggcaaagaagaagattgaacaacagggaggcttcacctttgaaaacaaaggagtcctctccgcatttaattttgggactgtgcccagcaacaactgaaggaaagaacatcagctgaccaaatgtcatcgctgcattttatttcacaagaggagtgtgagggtcaaggggatgaaatgaggggctgcttttagggccctcctgctgtgccagttaccatctggcattaggcagcacttttatctactctttcccctttgacctttgtcaccctgaaatatatattttaaacagctactgtaagtatgaaatgaaagaaaaacaatcattggacggaaaaggacaacccatatgttccaaaggctgaatgcccaaggttgttttagaggattggatagacttgcacgtctcaggtttttgccatgcagaatcaatggatttatgcggataacagtgccttctgttgtacatgaattatcagaaaaaaatttttggagtgcattgcaattttttttaaagcataaaacatatttctagatacaacataaaccttggttatatgtcaactattctgcattttactctgtgaatttattgttaggcagttactgcaagtcactctggtttcaaaatcttcacggctccctctgctcaccctgctgctggggggcttttttcaggggttgtattataaaatatgcactggctgtggtttttcataagatgttttgtggctttttaaagaagtgtcttactccctcttctctcatttttttctgccttgaaaaggggtggtatttcttttggggtcaacaaatacacatatcagtttcactcctaaccttgtaagttcaggactcattttcttggcagcaagtggcaggggctctttagtcactggagttaacagtaagtctgagtatattctgaataatgtaattatgcaattaattgataatcatacctaaagcacattgaacttctaagagacaggtgctacgtaagcacactgtctttctggatggggacttgtattttaaataacttatcattccagctatgttggactagggtccaaagcattttataatatttttttttaatctaggaaaaagacccaaacaaatctaacttcttgctttctcacctatttgaattttctcctacctaatttgtttgtgtctttattatagctcagtttgacttctcaaacttttcaagggttggggcagctgcacttttaggttgcctataggaaatattgcatatggagattacagtgtttttctgacctagttcaagaccagaacatgggtcatagggtttttattcagcaaaatgaaaacgtatcttcagaacttaacatattactggatgtgatacagattttgctttctgtggaattgaaaattcacaaaaattcacagcttaaatttcccatcagtgactggaggaatttttttcaggtgcttcctatattactatccctcatgcatattaactctttagaattttaggttaagtgatgtctatagaagtagcctggaaaaccatgagttttggagttcagtgaccccctgctttcctctgctcctcccttcccaaggcattgaagctgaatgtgccaactggcagttagaagcgaaagatggcattgggagaaattttagagagctttcaaactctttattctcatgttccacatggtctaattttaacataaataatatgccttcacactggattgtaaaaggcatgtgatttttgagattttattttgtgatgtattgtcttctgcagtattaaagggaaagagatattaatgtgcattaccctatcttgtttttgaagccagggtagttgtatgattttgttaccagcagtgctaacctgaatgtgacctggttaccttggaaatgcaggaacttatatgaatgtactataaaataaaatgcggactgattcccaggaaaaaaaaaaaaaaaaaaaaaaa

SEQ ID NO: 1056 - DNA, 4414 bp, Homo sapiens
gcggccgccatgtggtgcctgcactgcaactcggagaggacccagtcccttctggagctagagcttgacagcggcgtcgagggcgaggcccccagcagtgagactggcacatccctggacagcccctcagcctacccccagggccccttggtgcccggttccagcctgagcccggatcactacgagcacacgtcagtgggagcctatgggctgtactcggggccgccggggcaacagcagcgcacgcggaggcccaagctgcagcactcgacctccatcctgcgcaagcaggctgaggaggaggccatcaagcgctcacgctcactctccgagagctatgagctctcctcggacctgcaggacaagcaggtggagatgctagaacgaaagtatggggggcgcctggtaacccgccatgcggcccgcaccatccagacggcgtttcgccagtaccagatgaacaagaacttcgagcgcttgcgcagctccatgtcagagaaccgcatgtcacgccggattgtgctgtccaacatgaggatgcagttctcctttgaggggcctgagaaagtgcacagctcctacttcgaggggaagcaggtctcagtgactaacgacggctcccagctgggagccctggtgtcccctgagtgtggtgacctcagcgagcccaccaccctcaagtctccggccccctccagtgactttgcggacgccatcaccgagctggaggacgccttctctaggcaagtgaaatcactggccgagtccatcgacgatgccctcaactgccgcagcctgcacactgaggaggcaccggccctggatgcggcgcgggcccgggacaccgaaccccagacagccctgcacggcatggaccaccgcaaactggacgagatgacggcctcgtacagtgatgtcaccctgtacatcgatgaggaggagctgtcgccccctctgcccctctcgcaggcaggggaccggccgtccagcaccgagtcggacctgcggctacgggctgggggcgcagccccagactactgggccctggcccacaaagaggacaaggctgacacggacacgagctgccggagcacgccgtcgctggagcggcaggagcagcggctgcgggtggagcatctgccgctgctcaccatcgagccacccagcgacagctctgtggaccttagtgaccgctcggagcgggggtcactcaagaggcagagtgcttacgagcgcagccttggcgggcagcagggcagtcccaagcatggtccccacagcggcgcccccaagagcctcccccgggaggagcctgagttgcggccccggccccccaggcccctggacagccacttggccatcaatggctcagccaaccggcagagcaagtctgagtcggactactcagacggtgacaatgacagcatcaacagcacgtccaactccaacgataccatcaactgcagctccgagtcatcgtcccgtgacagcctgcgggagcagacgctcagcaagcagacctaccacaaggaggcccgcaacagctgggactcgcctgcctttagcaacgatgtcatccgcaagaggcactaccgcatcggcctgaacctcttcaacaagaagcctgagaagggagtccagtacctcatcgagcgtggctttgtgcccgacacgcccgtcggggtggcccacttcctgctgcagcgcaagggcctcagccggcagatgatcggcgagttcctgggcaaccggcagaagcagttcaaccgtgacgtgctcgactgcgtcgtggacgagatggacttctctaccatggagctggatgaggccctcaggaaattccaggcgcacatccgtgtccaaggggaggctcagaaagtggagcggctcatagaggcgttcagccagcgctactgcatctgcaaccctggggtggtgcggcaattccggaacccagacaccattttcatcctggccttcgccatcatcctgctgaacaccgacatgtacagccccaatgtcaagcccgagcggaaaatgaagctagaggacttcatcaagaacctccgaggtgtggacgatggtgaggacattccccgtgagatgctgatggggatctatgaacggatccgtaagcgagagctaaagaccaatgaggaccatgtgtcccaggtgcagaaggtggagaagctcattgtggggaaaaagccgatcggatccctgcatcccgggctcggctgtgtgctctctctgccccaccgtcggttggtctgctactgccggctctttgaggttccagacccaaacaagccccagaaactcggactacaccagcgagaaatcttcctgttcaacgacctcctggtggtcaccaagatcttccagaagaagaagaactcggtgacgtacagcttccgacagtccttctccttgtacggcatgcaggtcctgctcttcgagaaccagtactaccccaatggcatccggctcacctcgtctgtccccggagcagatatcaaagtgttaataaacttcaacgcccccaaccctcaagaccggaagaaattcaccgatgacctgcgggagtccattgcggaagtccaagagatggagaagcacaggatagagtcggagctcgagaagcagaaaggcgtcgtgcggcccagcatgtcccagtgctctagcctcaaaaaggagtcgggcaacggaacactgagccgggcctgcctggacgacagctatgccagcggtgagggcctcaagcgcagcgccctcagcagctccctgcgggacctctcggaagccgggaagcgagggcgtcgcagcagtgcgggatcgctagagagcaatgtggaatttcagcctttcgagccactgcagccgtcagtgctgtgctcctaagccatgggacccgaggactgccccccggcgcctgcccaggcggaggccctttcagaaagggcgaagctcacgcctgactctgcgggccgcggggccgcgttcccagtggacagcgtggtgagccgtggccggacggcaggaggagaggggagccccctctggctgtgtgtcaccttggctggctggctggccagggttttgccgatttccctcctcacatccctcccaccctcggtcatatcattgagatcaccgtaccagcaaatctgcaaaccaagcactttgttaatctccagagagagcaaatacagcaatctagagtttagcctttttaaaaatgtgactttaacccgcccacctgtgtcctcccattggcgtggcatttctttggtgtctgctcagaaagaaacagcatgggaccgtgtgattgggtccaggctgggctgtcagggaagcgccctggtgtctccgactcatcaattctcgggttttttaaaagccaggctccccaaagcactctgtctcgcaattttgaggaggttgttccgacctggaagcgttaaactgctgcatgtcatctggcgtcagctgtgaggctgcgctctgcgtgttgtgcgtttgcaaaatgtattggcgtgactgtaaacacatcgttgaagtaaagcgattacatattgagtatgtcagcttttctcaccctcttctgtgctgggaggagagtctaactgtaacctttaggttgttccagaaaagattcaggccgtttggcacagaattgctctttctgaagggtagcagtaatgaataggaacagacagaaaaccccaggaggggctttcaggaaactctccctctccatcgccatcctgcaagctccacagcctcgggctgccagcctgtggcactgtcctcggtgtgtcctggagctgtgctgggcagcagggcctcgcgtaaggaactgctggaacccactgagcccttcccggggtttcccgccgcactcagtgtgttccttcaggctagtgaggtttcattctgttttatttgcaagcttatcaaaagtttgtggaagatacattgttgggttccagaggctggagtcatgctgcccacatcttgtttgggaaagcaaaagctcccagtgagctggtgtccccgtgtgtctttcatgggactgtcccctttagagatcccacctgtcagagccacagcttcggggtcctgtcatcacatcccctgggaggggaggcaggaggaggccgagggccccaggatgtctgcctggtcccttctcactgtgaggacgcccttggcacacctttctcaagtcacacaaattattgcagttacatacagaattgctgacaggagcaggagacgctgagggaaacagctggcaatgtgacaaaagtcttttctgggacaacaatcaaatcatgtatttgtatttttttaagtttaccaatgaattgtacaacaatgtaaaaataaagttcatcctaatatgctgtgc

SEQ ID NO: 1057 - DNA, 3589 bp, Homo sapiens
cgcggacccggccggcccaggcccgcgcccgccgcggccctgagaggccccggcaggtcccggcccggcggcggcagccatggccggggggccgggcccgggggagcccgcagcccccggcgcccagcacttcttgtacgaggtgccgccctgggtcatgtgccgcttctacaaagtgatggacgccctggagcccgccgactggtgccagttcgccgccctgatcgtgcgcgaccagaccgagctgcggctgtgcgagcgctccgggcagcgcacggccagcgtcctgtggccctggatcaaccgcaacgcccgtgtggccgacctcgtgcacatcctcacgcacctgcagctgctccgtgcgcgggacatcatcacagcctggcaccctcccgccccgcttccgtccccaggcaccactgccccgaggcccagcagcatccctgcacccgccgaggccgaggcctggagcccccggaagttgccatcctcagcctccaccttcctctccccagcttttccaggctcccagacccattcagggcctgagctcggcctggtcccaagccctgcttccctgtggcctccaccgccatctccagccccttcttctaccaagccaggcccagagagctcagtgtccctcctgcagggagcccgcccctttccgttttgctggcccctctgtgagatttcccggggcacccacaacttctcggaggagctcaagatcggggagggtggctttgggtgcgtgtaccgggcggtgatgaggaacacggtgtatgctgtgaagaggctgaaggagaacgctgacctggagtggactgcagtgaagcagagcttcctgaccgaggtggagcagctgtccaggtttcgtcacccaaacattgtggactttgctggctactgtgctcagaacggcttctactgcctggtgtacggcttcctgcccaacggctccctggaggaccgtctccactgccagacccaggcctgcccacctctctcctggcctcagcgactggacatccttctgggtacagcccgggcaattcagtttctacatcaggacagccccagcctcatccatggagacatcaagagttccaacgtccttctggatgagaggctgacacccaagctgggagactttggcctggcccggttcagccgctttgccgggtccagccccagccagagcagcatggtggcccggacacagacagtgcggggcaccctggcctacctgcccgaggagtacatcaagacgggaaggctggctgtggacacggacaccttcagctttggggtggtagtgctagagaccttggctggtcagagggctgtgaagacgcacggtgccaggaccaagtatctgaaagacctggtggaagaggaggctgaggaggctggagtggctttgagaagcacccagagcacactgcaagcaggtctggctgcagatgcctgggctgctcccatcgccatgcagatctacaagaagcacctggaccccaggcccgggccctgcccacctgagctgggcctgggcctgggccagctggcctgctgctgcctgcaccgccgggccaaaaggaggcctcctatgacccaggtgtacgagaggctagagaagctgcaggcagtggtggcgggggtgcccgggcattcggaggccgccagctgcatccccccttccccgcaggagaactcctacgtgtccagcactggcagagcccacagtggggctgctccatggcagcccctggcagcgccatcaggagccagtgcccaggcagcagagcagctgcagagaggccccaaccagcccgtggagagtgacgagagcctaggcggcctctctgctgccctgcgctcctggcacttgactccaagctgccctctggacccagcacccctcagggaggccggctgtcctcagggggacacggcaggagaatcgagctgggggagtggcccaggatcccggcccacagccgtggaaggactggcccttggcagctctgcatcatcgtcgtcagagccaccgcagattatcatcaaccctgcccgacagaagatggtccagaagctggccctgtacgaggatggggccctggacagcctgcagctgctgtcgtccagctccctcccaggcttgggcctggaacaggacaggcaggggcccgaagaaagtgatgaatttcagagctgatgtgttcacctgggcagatcccccaaatccggaagtcaaagttctcatggtcagaagttctcatggtgcacgagtcctcagcactctgccggcagtgggggtgggggcccatgcccgcgggggagagaaggaggtggccctgctgttctaggctctgtgggcataggcaggcagagtggaaccctgcctccatgccagcatctgggggcaaggaaggctggcatcatccagtgaggaggctggcgcatgttgggaggctgctggctgcacagacccgtgaggggaggagaggggctgctgtgcaggggtgtggagtagggagctggctcccctgagagccatgcagggcgtctgcagcccaggcctctggcagcagctctttgcccatctctttggacagtggccaccctgcacaatggggccgacgaggcctagggccctcctacctgcttacaatttggaaaagtgtggccgggtgcggtggctcacgcctgtaatcccagcactttgggaggccaaggcaggaggatcgctggagcccagtaggtcaagaccagccagggcaacatgatgagaccctgtctctgccaaaaaattttttaaactattagcctggcgtggtagcgcacgcctgtggtcccagctgctggggaggctgaagtaggaggatcatttatgcttgggaggtcgaggctgcagtgagtcatgattgtatgactgcactccagcctgggtgacagagcaagaccctgtttcaaaaagaaaaaccctgggaaaagtgaagtatggctgtaagtctcatggttcagtcctagcaagaagcgagaattctgagatcctccagaaagtcgagcagcacccacctccaacctcgggccagtgtcttcaggctttactggggacctgcgagctggcctaatgtggtggcctgcaagccaggccatccctgggcgccacagacgagctccgagccaggtcaggcttcggaggccacaagctcagcctcaggcccaggcactgattgtggcagaggggccactacccaaggtctagctaggcccaagacctagttacccagacagtgagaagcccctggaaggcagaaaagttgggagcatggcagacagggaagggaaacattttcagggaaaagacatgtatcacatgtcttcagaagcaagtcaggtttcatgtaaccgagtgtcctcttgcgtgtccaaaagtagcccagggctgtagcacaggcttcacagtgattttgtgttcagccgtgagtcacactacatgcccccgtgaagctgggcattggtgacgtccaggttgtccttgagtaataaaaacgtatgttgcaataaaaaaaaaaaaaaaaaa

SEQ ID NO: 1058 - DNA, 3499 bp, Homo sapiens
cgcggacccggccggcccaggcccgcgcccgccgcggccctgagaggccccggcaggtcccggcccggcggcggcagccatggccggggggccgggcccgggggagcccgcagcccccggcgcccagcacttcttgtacgaggtgccgccctgggtcatgtgccgcttctacaaagtgatggacgccctggagcccgccgactggtgccagttcgccgccctgatcgtgcgcgaccagaccgagctgcggctgtgcgagcgctccgggcagcgcacggccagcgtcctgtggccctggatcaaccgcaacgcccgtgtggccgacctcgtgcacatcctcacgcacctgcagctgctccgtgcgcgggacatcatcacagcctggcaccctcccgccccgcttccgtccccaggcaccactgccccgaggcccagcagcatccctgcacccgccgaggccgaggcctggagcccccggaagttgccatcctcagcctccaccttcctctccccagcttttccaggctcccagacccattcagggcctgagctcggcctggtcccaagccctgcttccctgtggcctccaccgccatctccagccccttcttctaccaagccaggcccagagagctcagtgtccctcctgcagggagcccgcccctttccgttttgctggcccctctgtgagatttcccggggcacccacaacttctcggaggagctcaagatcggggagggtggctttgggtgcgtgtaccgggcggtgatgaggaacacggtgtatgctgtgaagaggctgaaggagaacgctgacctggagtggactgcagtgaagcagagcttcctgaccgaggtggagcagctgtccaggtttcgtcacccaaacattgtggactttgctggctactgtgctcagaacggcttctactgcctggtgtacggcttcctgcccaacggctccctggaggaccgtctccactgccagacccaggcctgcccacctctctcctggcctcagcgactggacatccttctgggtacagcccgggcaattcagtttctacatcaggacagccccagcctcatccatggagacatcaagagttccaacgtccttctggatgagaggctgacacccaagctgggagactttggcctggcccggttcagccgctttgccgggtccagccccagccagagcagcatggtggcccggacacagacagtgcggggcaccctggcctacctgcccgaggagtacatcaagacgggaaggctggctgtggacacggacaccttcagctttggggtggtagtgctagagaccttggctggtcagagggctgtgaagacgcacggtgccaggaccaagtatctgaaagacctggtggaagaggaggctgaggaggctggagtggctttgagaagcacccagagcacactgcaagcaggtctggctgcagatgcctgggctgctcccatcgccatgcagatctacaagaagcacctggaccccaggcccgggccctgcccacctgagctgggcctgggcctgggccagctggcctgctgctgcctgcaccgccgggccaaaaggaggcctcctatgacccaggagaactcctacgtgtccagcactggcagagcccacagtggggctgctccatggcagcccctggcagcgccatcaggagccagtgcccaggcagcagagcagctgcagagaggccccaaccagcccgtggagagtgacgagagcctaggcggcctctctgctgccctgcgctcctggcacttgactccaagctgccctctggacccagcacccctcagggaggccggctgtcctcagggggacacggcaggagaatcgagctgggggagtggcccaggatcccggcccacagccgtggaaggactggcccttggcagctctgcatcatcgtcgtcagagccaccgcagattatcatcaaccctgcccgacagaagatggtccagaagctggccctgtacgaggatggggccctggacagcctgcagctgctgtcgtccagctccctcccaggcttgggcctggaacaggacaggcaggggcccgaagaaagtgatgaatttcagagctgatgtgttcacctgggcagatcccccaaatccggaagtcaaagttctcatggtcagaagttctcatggtgcacgagtcctcagcactctgccggcagtgggggtgggggcccatgcccgcgggggagagaaggaggtggccctgctgttctaggctctgtgggcataggcaggcagagtggaaccctgcctccatgccagcatctgggggcaaggaaggctggcatcatccagtgaggaggctggcgcatgttgggaggctgctggctgcacagacccgtgaggggaggagaggggctgctgtgcaggggtgtggagtagggagctggctcccctgagagccatgcagggcgtctgcagcccaggcctctggcagcagctctttgcccatctctttggacagtggccaccctgcacaatggggccgacgaggcctagggccctcctacctgcttacaatttggaaaagtgtggccgggtgcggtggctcacgcctgtaatcccagcactttgggaggccaaggcaggaggatcgctggagcccagtaggtcaagaccagccagggcaacatgatgagaccctgtctctgccaaaaaattttttaaactattagcctggcgtggtagcgcacgcctgtggtcccagctgctggggaggctgaagtaggaggatcatttatgcttgggaggtcgaggctgcagtgagtcatgattgtatgactgcactccagcctgggtgacagagcaagaccctgtttcaaaaagaaaaaccctgggaaaagtgaagtatggctgtaagtctcatggttcagtcctagcaagaagcgagaattctgagatcctccagaaagtcgagcagcacccacctccaacctcgggccagtgtcttcaggctttactggggacctgcgagctggcctaatgtggtggcctgcaagccaggccatccctgggcgccacagacgagctccgagccaggtcaggcttcggaggccacaagctcagcctcaggcccaggcactgattgtggcagaggggccactacccaaggtctagctaggcccaagacctagttacccagacagtgagaagcccctggaaggcagaaaagttgggagcatggcagacagggaagggaaacattttcagggaaaagacatgtatcacatgtcttcagaagcaagtcaggtttcatgtaaccgagtgtcctcttgcgtgtccaaaagtagcccagggctgtagcacaggcttcacagtgattttgtgttcagccgtgagtcacactacatgcccccgtgaagctgggcattggtgacgtccaggttgtccttgagtaataaaaacgtatgttgcaataaaaaaaaaaaaaaaaaa

SEQ ID NO: 1059 - DNA, 3352 bp, Homo sapiens
cgcggacccggccggcccaggcccgcgcccgccgcggccctgagaggccccggcaggtcccggcccggcggcggcagccatggccggggggccgggcccgggggagcccgcagcccccggcgcccagcacttcttgtacgaggtgccgccctgggtcatgtgccgcttctacaaagtgatggacgccctggagcccgccgactggtgccagttcgccgccctgatcgtgcgcgaccagaccgagctgcggctgtgcgagcgctccgggcagcgcacggccagcgtcctgtggccctggatcaaccgcaacgcccgtgtggccgacctcgtgcacatcctcacgcacctgcagctgctccgtgcgcgggacatcatcacagcctggcaccctcccgccccgcttccgtccccaggcaccactgccccgaggcccagcagcatccctgcacccgccgaggccgaggcctggagcccccggaagttgccatcctcagcctccaccttcctctccccagcttttccaggctcccagacccattcagggcctgagctcggcctggtcccaagccctgcttccctgtggcctccaccgccatctccagccccttcttctaccaagccaggcccagagagctcagtgtccctcctgcagggagcccgcccctttccgttttgctggcccctctgtgagatttcccggggcacccacaacttctcggaggagctcaagatcggggagggtggctttgggtgcgtgtaccgggcggtgatgaggaacacggtgtatgctgtgaagaggctgaaggagaacgctgacctggagtggactgcagtgaagcagagcttcctgaccgaggtggagcagctgtccaggtttcgtcacccaaacattgtggactttgctggctactgtgctcagaacggcttctactgcctggtgtacggcttcctgcccaacggctccctggaggaccgtctccactgccagacccaggcctgcccacctctctcctggcctcagcgactggacatccttctgggtacagcccgggcaattcagtttctacatcaggacagccccagcctcatccatggagacatcaagagttccaacgtccttctggatgagaggctgacacccaagctgggagactttggcctggcccggttcagccgctttgccgggtccagccccagccagagcagcatggtggcccggacacagacagtgcggggcaccctggcctacctgcccgaggagtacatcaagacgggaaggctggctgtggacacggacaccttcagctttggggtggtagtgctagagaccttggctggtcagagggctgtgaagacgcacggtgccaggaccaagtatctggtgtacgagaggctagagaagctgcaggcagtggtggcgggggtgcccgggcattcggaggccgccagctgcatccccccttccccgcaggagaactcctacgtgtccagcactggcagagcccacagtggggctgctccatggcagcccctggcagcgccatcaggagccagtgcccaggcagcagagcagctgcagagaggccccaaccagcccgtggagagtgacgagagcctaggcggcctctctgctgccctgcgctcctggcacttgactccaagctgccctctggacccagcacccctcagggaggccggctgtcctcagggggacacggcaggagaatcgagctgggggagtggcccaggatcccggcccacagccgtggaaggactggcccttggcagctctgcatcatcgtcgtcagagccaccgcagattatcatcaaccctgcccgacagaagatggtccagaagctggccctgtacgaggatggggccctggacagcctgcagctgctgtcgtccagctccctcccaggcttgggcctggaacaggacaggcaggggcccgaagaaagtgatgaatttcagagctgatgtgttcacctgggcagatcccccaaatccggaagtcaaagttctcatggtcagaagttctcatggtgcacgagtcctcagcactctgccggcagtgggggtgggggcccatgcccgcgggggagagaaggaggtggccctgctgttctaggctctgtgggcataggcaggcagagtggaaccctgcctccatgccagcatctgggggcaaggaaggctggcatcatccagtgaggaggctggcgcatgttgggaggctgctggctgcacagacccgtgaggggaggagaggggctgctgtgcaggggtgtggagtagggagctggctcccctgagagccatgcagggcgtctgcagcccaggcctctggcagcagctctttgcccatctctttggacagtggccaccctgcacaatggggccgacgaggcctagggccctcctacctgcttacaatttggaaaagtgtggccgggtgcggtggctcacgcctgtaatcccagcactttgggaggccaaggcaggaggatcgctggagcccagtaggtcaagaccagccagggcaacatgatgagaccctgtctctgccaaaaaattttttaaactattagcctggcgtggtagcgcacgcctgtggtcccagctgctggggaggctgaagtaggaggatcatttatgcttgggaggtcgaggctgcagtgagtcatgattgtatgactgcactccagcctgggtgacagagcaagaccctgtttcaaaaagaaaaaccctgggaaaagtgaagtatggctgtaagtctcatggttcagtcctagcaagaagcgagaattctgagatcctccagaaagtcgagcagcacccacctccaacctcgggccagtgtcttcaggctttactggggacctgcgagctggcctaatgtggtggcctgcaagccaggccatccctgggcgccacagacgagctccgagccaggtcaggcttcggaggccacaagctcagcctcaggcccaggcactgattgtggcagaggggccactacccaaggtctagctaggcccaagacctagttacccagacagtgagaagcccctggaaggcagaaaagttgggagcatggcagacagggaagggaaacattttcagggaaaagacatgtatcacatgtcttcagaagcaagtcaggtttcatgtaaccgagtgtcctcttgcgtgtccaaaagtagcccagggctgtagcacaggcttcacagtgattttgtgttcagccgtgagtcacactacatgcccccgtgaagctgggcattggtgacgtccaggttgtccttgagtaataaaaacgtatgttgcaataaaaaaaaaaaaaaaaaa

SEQ ID NO: 1060 - DNA, 3469 bp, Homo sapiens
gcccctggctagagaagccgcagcccgcagtgtccgacccagtcgtcccgcgccggagccggccccgtagcgtgccatggcctgctacatctaccagctgccctcctgggtgctggacgacctgtgccgcaacatggacgcgctcagcgagtgggactggatggagttcgcctcctacgtgatcacagacctgacccagctgcggaagatcaagtccatggagcgggtgcagggtgtgagcatcacgcgggagctgctgtggtggtggggcatgcggcaggccaccgtccagcaacttgtggacctcctgtgccgcctggagctctaccgggctgcccagatcatcctgaactggaaaccggctcctgaaatcaggtgtcccattccagccttccctgactctgtgaagccagaaaagcctttggcagcttctgtaagaaaggctgaggatgaacaggaagaggggcagcctgtgaggatggccacctttccaggcccagggtcctctccagccagagcccaccagccggcctttctccagcctcctgaagaagatgcccctcattccttgagaagcgacctccccacttcgtctgattcaaaggacttcagcacctccattcctaagcaggaaaaacttttgagcttggctggagacagccttttctggagtgaggcagacgtggtccaggcaaccgatgacttcaatcaaaaccgcaaaatcagccaggggacctttgctgacgtctacagagggcacaggcacgggaagccattcgtcttcaagaagctcagagagacagcctgttcaagtccaggatcaatcgaaagattcttccaggcagagttgcagatttgtcttagatgctgccaccccaatgtcttacctgtgctgggcttctgtgctgcaagacagtttcacagcttcatctacccctacatggcaaatggttccctacaggacagactgcagggtcagggtggctcggaccccctcccctggccccagcgtgtcagcatctgctcagggctgctctgtgccgtcgagtacctgcatggtctggagatcatccacagcaacgtcaagagctctaatgtcttgctggaccaaaatctcacccccaaacttgctcacccaatggctcatctgtgtcctgtcaacaaaaggtcaaaatacaccatgatgaagactcacctgctccggacgtcagccgcgtatctgccagaggatttcatccgggtggggcagctgacaaagcgagtggacatcttcagctgtggaatagtgttggccgaggtcctcacgggcatccctgcaatggataacaaccgaagcccggtttacctgaaggacttactcctcagtgatattccaagcagcaccgcctcgctctgctccaggaagacgggcgtggagaacgtgatggcaaaggagatctgccagaagtacctggagaagggcgcagggaggcttccggaggactgcgccgaggccctggccacggctgcctgcctgtgcctgcggaggcgtaacaccagcctgcaggaggtgtgtggctctgtggctgctgtggaagagcggctccgaggtcgggagacgttgctcccttggagtgggctttctgagggtacaggctcttcttccaacaccccagaggaaacagacgacgttgacaattccagccttgatgcctcctcctccatgagtgtggcaccctgggcaggggctgccaccccacttctccccacagagaatggggaaggaaggctgcgggtcatcgtgggaagggaggctgactcctcctctgaggcctgtgttggcctggagcctccccaggatgttacagaaacttcgtggcaaattgagatcaatgaggccaaaaggaaactgatggagaatattctgctctacaaagaggaaaaagtggacagcattgagctctttggcccctgatgaccggaacacagctgaggacccttgtcctcagttggaaagatgagcatcagatcaagaaaaaggtctgaggcagaatccaagatctgccaggaaacacacaacaaaacatctgctgtcctgggtgggagggaaacttcatttcactggaatgagttgggagagaaaggccctcagcttttagagacacaaaaatccatgaagtctcttcctttctgggctttgttagtcagagcaggggatcagaggagactgaagcagaaaccctgcacacgggcccaggatgtggctgattttgtggttccggggagtatgtgatgataatcacccccagcagattccattacctcagcagctcttgttcccccgccactggcagttctgcaatgccatagcattttccagagctaagatctctgggttgtatttgctgacagcctgcaagcttgcatgctctgaaagattttttttagtttttaatttttttgtagagatggggtctcgctttgttggcgcaatcctcccacctcagactcccaaagtgctggaattacagttgggagccactgtgcctggcctggaagactttcaacttgtgtctcagtgcagttcttgactcacctctctgggcctcaggttctacaaatgccagacacctagcgaagagctctgcaggctttccactgcctgtattggaaatcttgcaattcacataattattcagtcactgcctggtacctttatcttcccatcccactaatgttagtgttttttaatggagcttttattctgagaatatgtgtttgtctgtttgtttgttttttgagacagagtctcactttgtcacccaggctggagtgcagtggcacgatctcagctcactgcaagctctgcctctcaggttcaagtgattctcctgcctcagcctcctgagtagatgggactgtaggcacctgccactatgcctggctaatttttgtgtttttagtagagacagggtttcaccatattggccaggctggtctcgaactactgacctcgtgatctgcccgccttggcctatcaaagtgttgggattacaggcttgagccaccgcacccggccgagaatatgtgttgttatttatgactggattatgaagaatcaggagaatgcatttcatgtctgattctgctgctaattaagtcaatcatttaatttttgggacctcagtttctttgtaagtaaaataacacctgcttgttcttcatccctgggctgttgggaggaacagatgagacagtggctatagaagcacttggaaaatgcacttgtcctgttttgtaaaataaaaaggtattaaatgtgtatttctgccatgtacctaatgattattcagtgcgtatatatctgaaaagtcatgttgcaaatctttctgtgaaacagatgctattttaaattcactgggagaaatatcctatttaaagtaatctatagtaatttctttttatataataaaaatatatttgtaaagtc

SEQ ID NO: 1061 - DNA, 2288 bp, Homo sapiens
gcctgtcgcaggcgtgcagggacctggactccgcctcgtccccggggctcgggcagccgagccatggcggggaactgtggggcccgcggcgcgctgtcggcgcacacgctgctgttcgacctgccgcccgcgctgctcggagagctctgcgctgttctggacagctgcgacggcgcgctgggctggcgcggcctggcagagagactttcaagcagctggctggatgttcgtcatattgaaaagtatgtagaccaaggtaaaagtggaacaagagaattactttggtcctgggcacagaaaaacaagaccatcggtgaccttttacaggtcctccaggagatgggacatcgtcgagctattcatttaattacaaactatggagcagtgttgagtccttcagagaagagttatcaggaaggtggatttccaaatatattattcaaggaaacagccaatgtcaccgtggataatgttcttattcctgaacataatgaaaaaggagtactgcttaaatcttccatcagctttcaaaatatcatagaaggaactagaaatttccacaaagacttcctaattggagaaggagagatttttgaggtatacagagtggagattcaaaacctaacatatgctgtcaaattatttaaacaggagaaaaaaatgcagtgtaagaagcattggaagaggtttttatctgagcttgaagttttactactgtttcatcacccaaacatactagagttggctgcatattttacagagactgagaagttctgtctgatttatccatacatgagaaatggaacactttttgacagattgcagtgtgtaggtgacacggccccactcccttggcacattcgaatcggtatattaataggaatatccaaagccattcactacctgcacaacgttcaaccatgctcggtcatctgtggcagtatatcaagtgcaaacatccttttggatgatcagtttcaacccaaactaactgattttgccatggcacacttccggtcccacctagaacatcagagttgtaccataaatatgaccagcagcagcagtaaacatctgtggtacatgccagaagagtacatcagacaggggaaactttccattaaaacagatgtctacagctttggaattgtaataatggaagttctaacaggatgtagagtagtgttagatgatccaaaacatatccagctgcgggatctccttagagaattgatggagaagagaggcctggattcatgtctctcatttctagataagaaagtgcctccctgccctcggaatttctctgccaagctcttctgtttggcaggccggtgtgctgcaacgcgggcaaagttaagaccatcaatggatgaagttttaaatactcttgaaagtactcaagccagcttgtattttgctgaagatcctcccacatcactaaagtccttcaggtgtccttctcctctattcctggagaatgtaccaagtattccagtggaagatgatgaaagccagaataacaatttactaccttctgatgaaggcctgaggatagacagaatgactcagaaaactccttttgaatgcagccagtctgaggttatgtttctgagcttggacaaaaagccagagagcaagagaaatgaggaagcttgcaacatgcccagttcttcttgtgaagaaagttggttcccaaagtatatagttccatcccaggacttaaggccctataaggtaaatatagatccttcttcagaagctccagggcattcttgcaggagcaggccagtggagagcagctgttcctccaaattttcctgggatgaatatgaacagtacaaaaaagaataaattctaccagaagataaagaaaaaagcaagtattgcataggcacctgagcataggtatgaccttgggaagacattggctccataagcaatgccaagagaatgatcaatagtgagtttgggtgatgcagataaacaatctggataattccatttcttttttcccaaaccctcaaacagagtgccttaaaaaattgttttatcaggataattgtctcatgaccaaatccacgctcaattagagccattcaaaattccttaagatcatgggttctgacttcagccaaacaaaacaatcaaaacctaccaaaaagggactggattgtaatgtcctctccatcatcctcagtgtgagtcctcagagcctccatctgccaagaacattcagttggattccatcgtttggtttagcttgcttgcacgggttgtaggaaatg

SEQ ID NO: 1062 - DNA, 1606 bp, Homo sapiens
aaaaaagggcataggggcgggaacagcccagcgggccgtcccatcggcttttgggtctgttacccaaagaatgataaagttggttttatttcaagaagtcgatcaaaaagaaagccccagcgctctagagctcagctgacgggaaagggggtgcgcagcctcgagtttgagagctacccggagctccaagacaggggtgggttccagctgcccgcacgccccgaccttccatcgtaggccggaccatgggaaccccaaagccacggatcctgccctggctggtgtcgcagctggacctggggcaactggagggcgtggcctgggtgaacaagagccgcacgcgcttccgcatcccttggaagcacggcctacggcaggatgcacagcaggaggatttcggaatcttccaggcctgggccgaggccactggtgcatatgttcccgggagggataagccagacctgccaacctggaagaggaatttccgctctgccctcaaccgcaaagaagggttgcgtttagcagaggaccggagcaaggaccctcacgacccacataaaatctacgagtttgtgaactcaggagttggggacttttcccagccagacacctctccggacaccaatggtggaggcagtacttctgatacccaggaagacattctggatgagttactgggtaacatggtgttggccccactcccagatccgggacccccaagcctggctgtagcccctgagccctgccctcagcccctgcggagccccagcttggacaatcccactcccttcccaaacctggggccctctgagaacccactgaagcggctgttggtgccgggggaagagtgggagttcgaggtgacagccttctaccggggccgccaagtcttccagcagaccatctcctgcccggagggcctgcggctggtggggtccgaagtgggagacaggacgctgcctggatggccagtcacactgccagaccctggcatgtccctgacagacaggggagtgatgagctacgtgaggcatgtgctgagctgcctgggtgggggactggctctctggcgggccgggcagtggctctgggcccagcggctggggcactgccacacatactgggcagtgagcgaggagctgctccccaacagcgggcatgggcctgatggcgaggtccccaaggacaaggaaggaggcgtgtttgacctggggcccttcattgtagatctgattaccttcacggaaggaagcggacgctcaccacgctatgccctctggttctgtgtgggggagtcatggccccaggaccagccgtggaccaagaggctcgtgatggtcaaggttgtgcccacgtgcctcagggccttggtagaaatggcccgggtagggggtgcctcctccctggagaatactgtggacctgcacatttccaacagccacccactctccctcacctccgaccagtacaaggcctacctgcaggacttggtggagggcatggatttccagggccctggggagagctgagccctcgctcctcatggtgtgcctccaacccccctgttccccaccacctcaaccaataaactggttcctgctatgaa

SEQ ID NO: 1063 - DNA, 1836 bp, Homo sapiens
gcaaagagccgaggccgggcgcgcgaccctcgtccttctgcccctggccgcacactttgcgcacatctctttttctgcatggtggatattatttttcattatccttttctgggtgctatgggtgatcattccaagaagaagcccgggacggccatgtgcgtgggctgcgggagtcagatccacgaccagtttatcctgcgggtgtcgcccgacctcgagtggcacgcggcctgcctcaagtgtgccgagtgcagccagtacctggacgagacgtgcacgtgcttcgtgagagacgggaagacctactgcaagcgggactacgtcaggctgttcggcatcaagtgcgccaagtgccaggtgggcttcagcagcagcgacctggtgatgagggcgcgggacagcgtgtaccacatcgagtgcttccgctgctccgtgtgcagccgccagctgctgcctggggacgagttctcgctgcgggagcacgagctgctctgccgcgccgaccacggcctcctgctcgagcgcgccgcggccggcagcccgcgcagccccggcccgcttcccggcgcccgcggcctgcatctgcccgacgctgggtcgggccggcagcccgcgttgcgcccgcacgtgcacaagcagacggagaagacgacccgcgtgcggactgtgctgaacgagaagcagctgcacactctgcggacctgctacgccgccaacccgcggcccgacgctctcatgaaggagcagctggtggagatgaccggcctgagcccgcgggtcatccgcgtctggttccagaacaagcgctgcaaggacaagaagaaatccattctcatgaagcagctgcagcagcagcagcacagcgacaagacgagccttcagggactgactgggacgcccctggtggcgggcagtcccatccgccatgagaacgccgtgcagggcagcgcagtggaggtgcagacgtaccagccgccgtggaaggcgctcagcgagtttgccctccagagcgacctggaccaacccgccttccaacagctggtctccttctccgagtccggctccctaggcaactcctccggcagcgacgtgacctccctgtcctcgcagctcccggacacccccaacagtatggtgccgagtcccgtggagacgtgagggggacccctccctgccagcccgcggacctcgcatgctccctgcatgagactcacccatgctcaggccattccagttccgaaagctctctcgccttcgtaattattctattgttatttatgagagagtaccgagagacacggtctggacagcccaaggcgccaggatgcaacctgctttcaccagactgcagacccctgctccgaggactcttagtttttcaaaaccagaatctgggacttaccagggttagctctgccctctcctctcctctctacgtggccgccgctctgtctctccacgccccacctgtgtccccatctcggccggcccggagctcgcccacgcggacccccgccctgccccagctcagcgctccctggcggcttcgcccgggctcctagcggggaaaaggaaggggataactcagaggaacagacactcaaactcccaaagcgcatgattgctgggaaacagtagaaaccagacttgccttgaaagtgtttaagttattcgacggaggacagagtatgtgagcctttgccgaacaaacaaacgtaagttattgttatttattgtgagaacagccagttcatagtgggacttgtattttgatcttaataaaaaataataacccgggaaaaaaaaaaaaaaaaaaaaaaaaaaaaaaaaaaaaaa

SEQ ID NO: 1064 - DNA, 4204 bp, Homo sapiens
caggacagggaagagcgggcgctatggggagccggacgccagagtcccctctccacgccgtgcagctgcgctggggcccccggcgccgacccccgctcgtgccgctgctgttgctgctcgtgccgccgccacccagggtcgggggcttcaacttagacgcggaggccccagcagtactctcggggcccccgggctccttcttcggattctcagtggagttttaccggccgggaacagacggggtcagtgtgctggtgggagcacccaaggctaataccagccagccaggagtgctgcagggtggtgctgtctacctctgtccttggggtgccagccccacacagtgcacccccattgaatttgacagcaaaggctctcggctcctggagtcctcactgtccagctcagagggagaggagcctgtggagtacaagtccttgcagtggttcggggcaacagttcgagcccatggctcctccatcttggcatgcgctccactgtacagctggcgcacagagaaggagccactgagcgaccccgtgggcacctgctacctctccacagataacttcacccgaattctggagtatgcaccctgccgctcagatttcagctgggcagcaggacagggttactgccaaggaggcttcagtgccgagttcaccaagactggccgtgtggttttaggtggaccaggaagctatttctggcaaggccagatcctgtctgccactcaggagcagattgcagaatcttattaccccgagtacctgatcaacctggttcaggggcagctgcagactcgccaggccagttccatctatgatgacagctacctaggatactctgtggctgttggtgaattcagtggtgatgacacagaagactttgttgctggtgtgcccaaagggaacctcacttacggctatgtcaccatccttaatggctcagacattcgatccctctacaacttctcaggggaacagatggcctcctactttggctatgcagtggccgccacagacgtcaatggggacgggctggatgacttgctggtgggggcacccctgctcatggatcggacccctgacgggcggcctcaggaggtgggcagggtctacgtctacctgcagcacccagccggcatagagcccacgcccacccttaccctcactggccatgatgagtttggccgatttggcagctccttgacccccctgggggacctggaccaggatggctacaatgatgtggccatcggggctccctttggtggggagacccagcagggagtagtgtttgtatttcctgggggcccaggagggctgggctctaagccttcccaggttctgcagcccctgtgggcagccagccacaccccagacttctttggctctgcccttcgaggaggccgagacctggatggcaatggatatcctgatctgattgtggggtcctttggtgtggacaaggctgtggtatacaggggccgccccatcgtgtccgctagtgcctccctcaccatcttccccgccatgttcaacccagaggagcggagctgcagcttagaggggaaccctgtggcctgcatcaaccttagcttctgcctcaatgcttctggaaaacacgttgctgactccattggtttcacagtggaacttcagctggactggcagaagcagaagggaggggtacggcgggcactgttcctggcctccaggcaggcaaccctgacccagaccctgctcatccagaatggggctcgagaggattgcagagagatgaagatctacctcaggaacgagtcagaatttcgagacaaactctcgccgattcacatcgctctcaacttctccttggacccccaagccccagtggacagccacggcctcaggccagccctacattatcagagcaagagccggatagaggacaaggctcagatcttgctggactgtggagaagacaacatctgtgtgcctgacctgcagctggaagtgtttggggagcagaaccatgtgtacctgggtgacaagaatgccctgaacctcactttccatgcccagaatgtgggtgagggtggcgcctatgaggctgagcttcgggtcaccgcccctccagaggctgagtactcaggactcgtcagacacccagggaacttctccagcctgagctgtgactactttgccgtgaaccagagccgcctgctggtgtgtgacctgggcaaccccatgaaggcaggagccagtctgtggggtggccttcggtttacagtccctcatctccgggacactaagaaaaccatccagtttgacttccagatcctcagcaagaatctcaacaactcgcaaagcgacgtggtttcctttcggctctccgtggaggctcaggcccaggtcaccctgaacggtgtctccaagcctgaggcagtgctattcccagtaagcgactggcatccccgagaccagcctcagaaggaggaggacctgggacctgctgtccaccatgtctatgagctcatcaaccaaggccccagctccattagccagggtgtgctggaactcagctgtccccaggctctggaaggtcagcagctcctatatgtgaccagagttacgggactcaactgcaccaccaatcaccccattaacccaaagggcctggagttggatcccgagggttccctgcaccaccagcaaaaacgggaagctccaagccgcagctctgcttcctcgggacctcagatcctgaaatgcccggaggctgagtgtttcaggctgcgctgtgagctcgggcccctgcaccaacaagagagccaaagtctgcagttgcatttccgagtctgggccaagactttcttgcagcgggagcaccagccatttagcctgcagtgtgaggctgtgtacaaagccctgaagatgccctaccgaatcctgcctcggcagctgccccaaaaagagcgtcaggtggccacagctgtgcaatggaccaaggcagaaggcagctatggcgtcccactgtggatcatcatcctagccatcctgtttggcctcctgctcctaggtctactcatctacatcctctacaagcttggattcttcaaacgctccctcccatatggcaccgccatggaaaaagctcagctcaagcctccagccacctctgatgcctgagtcctcccaatttcagactcccattcctgaagaaccagtccccccaccctcattctactgaaaaggaggggtctgggtacttcttgaaggtgctgacggccagggagaagctcctctccccagcccagagacatacttgaagggccagagccaggggggtgaggagctggggatccctcccccccatgcactgtgaaggacccttgtttacacataccctcttcatggatgggggaactcagatccagggacagaggcccagcctccctgaagcctttgcattttggagagtttcctgaaacaactggaaagataactaggaaatccattcacagttctttgggccagacatgccacaaggacttcctgtccagctccaacctgcaaagatctgtcctcagccttgccagagatccaaaagaagcccccagtaagaacctggaacttggggagttaagacctggcagctctggacagccccaccctggtgggccaacaaagaacactaactatgcatggtgccccaggaccagctcaggacagatgccacaaggatagatgctggcccagggccagagcccagctccaaggggaatcagaactcaaatggggccagatccagcctggggtctggagttgatctggaacccagactcagacattggcaccaatccaggcagatccaggactatatttgggcctgctccagacctgatcctggaggcccagttcaccctgatttaggagaagccaggaatttcccaggacctgaaggggccatgatggcaacagatctggaacctcagcctggccagacacaggccctccctgttccccagagaaaggggagcccactgtcctgggcctgcagaatttgggttctgcctgccagctgcactgatgctgcccctcatctctctgcccaacccttccctcaccttggcaccagacacccaggacttatttaaactctgttgcaagtgcaataaatctgacccagtgcccccactgaccagaactagaaaaaaaaa

SEQ ID NO: 1065 - DNA, 5810 bp, Homo sapiens
aacgggctcattcagcggtcgcgagctgcccgcgagggggagcggccggacggagagcgcgacccgtcccgggggtggggccgggcgcagcggcgagaggaggcgaaggtggctgcggtagcagcagcgcggcagcctcggacccagcccggagcgcagggcggccgctgcaggtccccgctcccctccccgtgcgtccgcccatggccgccgccgggcagctgtgcttgctctacctgtcggcggggctcctgtcccggctcggcgcagccttcaacttggacactcgggaggacaacgtgatccggaaatatggagaccccgggagcctcttcggcttctcgctggccatgcactggcaactgcagcccgaggacaagcggctgttgctcgtgggggccccgcgggcagaagcgcttccactgcagagagccaacagaacgggagggctgtacagctgcgacatcaccgcccgggggccatgcacgcggatcgagtttgataacgatgctgaccccacgtcagaaagcaaggaagatcagtggatgggggtcaccgtccagagccaaggtccagggggcaaggtcgtgacatgtgctcaccgatatgaaaaaaggcagcatgttaatacgaagcaggaatcccgagacatctttgggcggtgttatgtcctgagtcagaatctcaggattgaagacgatatggatgggggagattggagcttttgtgatgggcgattgagaggccatgagaaatttggctcttgccagcaaggtgtagcagctacttttactaaagactttcattacattgtatttggagccccgggtacttataactggaaagggattgttcgtgtagagcaaaagaataacactttttttgacatgaacatctttgaagatgggccttatgaagttggtggagagactgagcatgatgaaagtctcgttcctgttcctgctaacagttacttaggtttttctttggactcagggaaaggtattgtttctaaagatgagatcacttttgtatctggtgctcccagagccaatcacagtggagccgtggttttgctgaagagagacatgaagtctgcacatctcctccctgagcacatattcgatggagaaggtctggcctcttcatttggctatgatgtggcggtggtggacctcaacaaggatgggtggcaagatatagttattggagccccacagtattttgatagagatggagaagttggaggtgcagtgtatgtctacatgaaccagcaaggcagatggaataatgtgaagccaattcgtcttaatggaaccaaagattctatgtttggcattgcagtaaaaaatattggagatattaatcaagatggctacccagatattgcagttggagctccgtatgatgacttgggaaaggtttttatctatcatggatctgcaaatggaataaataccaaaccaacacaggttctcaagggtatatcaccttattttggatattcaattgctggaaacatggaccttgatcgaaattcctaccctgatgttgctgttggttccctctcagattcagtaactattttcagatcccggcctgtgattaatattcagaaaaccatcacagtaactcctaacagaattgacctccgccagaaaacagcgtgtggggcgcctagtgggatatgcctccaggttaaatcctgttttgaatatactgctaaccccgctggttataatccttcaatatcaattgtgggcacacttgaagctgaaaaagaaagaagaaaatctgggctatcctcaagagttcagtttcgaaaccaaggttctgagcccaaatatactcaagaactaactctgaagaggcagaaacagaaagtgtgcatggaggaaaccctgtggctacaggataatatcagagataaactgcgtcccattcccataactgcctcagtggagatccaagagccaagctctcgtaggcgagtgaattcacttccagaagttcttccaattctgaattcagatgaacccaagacagctcatattgatgttcacttcttaaaagagggatgtggagacgacaatgtatgtaacagcaaccttaaactagaatataaattttgcacccgagaaggaaatcaagacaaattttcttatttaccaattcaaaaaggtgtaccagaactagttctaaaagatcagaaggatattgctttagaaataacagtgacaaacagcccttccaacccaaggaatcccacaaaagatggcgatgacgcccatgaggctaaactgattgcaacgtttccagacactttaacctattctgcatatagagaactgagggctttccctgagaaacagttgagttgtgttgccaaccagaatggctcgcaagctgactgtgagctcggaaatccttttaaaagaaattcaaatgtcactttttatttggttttaagtacaactgaagtcacctttgacaccccagatctggatattaatctgaagttagaaacaacaagcaatcaagataatttggctccaattacagctaaagcaaaagtggttattgaactgcttttatcggtctcgggagttgctaaaccttcccaggtgtattttggaggtacagttgttggcgagcaagctatgaaatctgaagatgaagtgggaagtttaatagagtatgaattcagggtaataaacttaggtaaacctcttacaaacctcggcacagcaaccttgaacattcagtggccaaaagaaattagcaatgggaaatggttgctttatttggtgaaagtagaatccaaaggattggaaaaggtaacttgtgagccacaaaaggagataaactccctgaacctaacggagtctcacaactcaagaaagaaacgggaaattactgaaaaacagatagatgataacagaaaattttctttatttgctgaaagaaaataccagactcttaactgtagcgtgaacgtgaactgtgtgaacatcagatgcccgctgcgggggctggacagcaaggcgtctcttattttgcgctcgaggttatggaacagcacatttctagaggaatattccaaactgaactacttggacattctcatgcgagccttcattgatgtgactgctgctgccgaaaatatcaggctgccaaatgcaggcactcaggttcgagtgactgtgtttccctcaaagactgtagctcagtattcgggagtaccttggtggatcatcctagtggctattctcgctgggatcttgatgcttgctttattagtgtttatactatggaagtgtggtttcttcaagagaaataagaaagatcattatgatgccacatatcacaaggctgagatccatgctcagccatctgataaagagaggcttacttctgatgcatagtattgatctacttctgtaattgtgtggattctttaaacgctctaggtacgatgacagtgttccccgataccatgctgtaaggatccggaaagaagagcgagagatcaaagatgaaaagtatattgataaccttgaaaaaaaacagtggatcacaaagtggaacgaaaatgaaagctactcatagcgggggcctaaaaaaaaaaagcttcacagtacccaaactgctttttccaactcagaaattcaatttggatttaaaagcctgctcaatccctgaggactgatttcagagtgactacacacagtacgaacctacagttttaactgtggatattgttacgtagcctaaggctcctgttttgcacagccaaatttaaaactgttggaatggatttttctttaactgccgtaatttaactttctgggttgcctttatttttggcgtggctgacttacatcatgtgttggggaagggcctgcccagttgcactcaggtgacatcctccagatagtgtagctgaggaggcacctacactcacctgcactaacagagtggccgtcctaacctcgggcctgctgcgcagacgtccatcacgttagctgtcccacatcacaagactatgccattggggtagttgtgtttcaacggaaagtgctgtcttaaactaaatgtgcaatagaaggtgatgttgccatcctaccgtcttttcctgtttcctagctgtgtgaatacctgctcacgtcaaatgcatacaagtttcattctccctttcactaaaacacacaggtgcaacagacttgaatgctagttatacttatttgtatatggtatttattttttcttttctttacaaaccattttgttattgactaacaggccaaagagtctccagtttacccttcaggttggtttaatcaatcagaattagagcatgggaggtcatcactttgacctaaattatttactgcaaaaagaaaatctttataaatgtaccagagagagttgttttaataacttatctataaactataacctctccttcatgacagcctccaccccacaacccaaaaggtttaagaaatagaattataactgtaaagatgtttatttcaggcattggatattttttactttagaagcctgcataatgtttctggatttcatactgtaacattcaggaattcttggagaaaatgggtttattcactgaactctagtgcggtttactcactgctgcaaatactgtatattcaggacttgaaagaaatggtgaatgcctatggtggatccaaactgatccagtataagactactgaatctgctaccaaaacagttaatcagtgagtcgatgttctattttttgttttgtttcctcccctatctgtattcccaaaaattactttggggctaatttaacaagaactttaaattgtgttttaattgtaaaaatggcagggggtggaattattactctatacattcaacagagactgaatagatatgaaagctgattttttttaattaccatgcttcacaatgttaagttatatggggagcaacagcaaacaggtgctaatttgttttggatatagtataagcagtgtctgtgttttgaaagaatagaacacagtttgtagtgccactgttgttttgggggggcttttttcttttcggaaatcttaaaccttaagatactaaggacgttgttttggttgtactttggaattcttagtcacaaaatatattttgtttacaaaaatttctgtaaaacaggttataacagtgtttaaagtctcagtttcttgcttggggaacttgtgtccctaatgtgtttagattgctagattgctaaggagctgatactttgacagtgtttttagacctgtgttactaaaaaaaagatgaatgtcctgaaaagggtgttgggagggtggttcaacaaagaaacaaagatgttatggtgtttagatttatggttgttaaaaatgtcatctcaagtcaagtcactggtctgtttgcatttgatacatttttgtactaactagcattgtaaaattatttcatgattagaaattacctgtggatatttgtataaaagtgtgaaataaattttttataaaagtgttcattgtttcgtaacacagcattgtatatgtgaagcaaactctaaaattataaatgacaacctgaattatctatttcatcaaaccaaagttcagtgtttttatttttggtgtctcatgtaatctcagatcagccaaagatactagtgccaaagcaatgggattcggggtttttttctgttttcgctctatgtaggtgatcctcaagtctttcattttccttctttatgattaaaagaaacctacaggtatttaacaacc

SEQ ID NO: 1066 - DNA, 5226 bp, Homo sapiens
acacctccctccccgcctgccagtgtcaccagcctgttgcctctgtgagaaagtaccactgtaagaggccaaagggcatgatcattttcctctttcaccctgtctaggttgccagcaaatcccacgggcctcctgacgctgcccctggggccacaggtccctcgagtgctggaaggatgaaggattcctgcatcactgtgatggccatggcgctgctgtctgggttctttttcttcgcgccggcctcgagctacaacctggacgtgcggggcgcgcggagcttctccccaccgcgcgccgggaggcactttggataccgcgtcctgcaggtcggaaacggggtcatcgtgggagctccaggggaggggaacagcacaggaagcctctatcagtgccagtcgggcacaggacactgcctgccagtcaccctgagaggttccaactatacctccaagtacttgggaatgaccttggcaacagaccccacagatggaagcattttggcctgtgaccctgggctgtctcgaacgtgtgaccagaacacctatctgagtggcctgtgttacctcttccgccagaatctgcagggtcccatgctgcaggggcgccctggttttcaggaatgtatcaagggcaacgtagacctggtatttctgtttgatggttcgatgagcttgcagccagatgaatttcagaaaattctggacttcatgaaggatgtgatgaagaaactcagcaacacttcgtaccagtttgctgctgttcagttttccacaagctacaaaacagaatttgatttctcagattatgttaaacggaaggaccctgatgctctgctgaagcatgtaaagcacatgttgctgttgaccaatacctttggtgccatcaattatgtcgcgacagaggtgttccgggaggagctgggggcccggccagatgccaccaaagtgcttatcatcatcacggatggggaggccactgacagtggcaacatcgatgcggccaaagacatcatccgctacatcatcgggattggaaagcattttcagaccaaggagagtcaggagaccctccacaaatttgcatcaaaacccgcgagcgagtttgtgaaaattctggacacatttgagaagctgaaagatctattcactgagctgcagaagaagatctatgtcattgagggcacaagcaaacaggacctgacttccttcaacatggagctgtcctccagcggcatcagtgctgacctcagcaggggccatgcagtcgtgggggcagtaggagccaaggactgggctgggggctttcttgacctgaaggcagacctgcaggatgacacatttattgggaatgaaccattgacaccagaagtgagagcaggctatttgggttacaccgtgacctggctgccctcccggcaaaagacttcgttgctggcctcgggagcccctcgataccagcacatgggccgagtgctgctgttccaagagccacagggcggaggacactggagccaggtccagacaatccatgggacccagattggctcttatttcggtggggagctgtgtggcgtcgacgtggaccaagatggggagacagagctgctgctgattggtgccccactgttctatggggagcagagaggaggccgggtgtttatctaccagagaagacagttggggtttgaagaagtctcagagctgcagggggaccccggctacccactcgggcggtttggagaagccatcactgctctgacagacatcaacggcgatgggctggtagacgtggctgtgggggcccctctggaggagcagggggctgtgtacatcttcaatgggaggcacggggggcttagtccccagccaagtcagcggatagaagggacccaagtgctctcaggaattcagtggtttggacgctccatccatggggtgaaggaccttgaaggggatggcttggcagatgtggctgtgggggctgagagccagatgatcgtgctgagctcccggcccgtggtggatatggtcaccctgatgtccttctctccagctgagatcccagtgcatgaagtggagtgctcctattcaaccagtaacaagatgaaagaaggagttaatatcacaatctgtttccagatcaagtctctcatcccccagttccaaggccgcctggttgccaatctcacttacactctgcagctggatggccaccggaccagaagacgggggttgttcccaggagggagacatgaactcagaaggaatatagctgtcaccaccagcatgtcatgcactgacttctcatttcatttcccggtatgtgttcaagacctcatctcccccatcaatgtttccctgaatttctctctttgggaggaggaagggacaccgagggaccaaagggcgcagggcaaggacataccgcccatcctgagaccctccctgcactcggaaacctgggagatcccttttgagaagaactgtggggaggacaagaagtgtgaggcaaacttgagagtgtccttctctcctgcaagatccagagccctgcgtctaactgcttttgccagcctctctgtggagctgagcctgagtaacttggaagaagatgcttactgggtccagctggacctgcacttccccccgggactctccttccgcaaggtggagatgctgaagccccatagccagatacctgtgagctgcgaggagcttcctgaagagtccaggcttctgtccagggcattatcttgcaatgtgagctctcccatcttcaaagcaggccactcggttgctctgcagatgatgtttaatacactggtaaacagctcctggggggactcggttgaattgcacgccaatgtgacctgtaacaatgaggactcagacctcctggaggacaactcagccactaccatcatccccatcctgtaccccatcaacatcctcatccaggaccaagaagactccacactctatgtcagtttcacccccaaaggccccaagatccaccaagtcaagcacatgtaccaggtgaggatccagccttccatccacgaccacaacatacccaccctggaggctgtggttggggtgccacagcctcccagcgaggggcccatcacacaccagtggagcgtgcagatggagcctcccgtgccctgccactatgaggatctggagaggctcccggatgcagctgagccttgtctccccggagccctgttccgctgccctgttgtcttcaggcaggagatcctcgtccaagtgatcgggactctggagctggtgggagagatcgaggcctcttccatgttcagcctctgcagctccctctccatctccttcaacagcagcaagcatttccacctctatggcagcaacgcctccctggcccaggttgtcatgaaggttgacgtggtgtatgagaagcagatgctctacctctacgtgctgagcggcatcggggggctgctgctgctgctgctcattttcatagtgctgtacaaggttggtttcttcaaacggaacctgaaggagaagatggaggctggcagaggtgtcccgaatggaatccctgcagaagactctgagcagctggcatctgggcaagaggctggggatcccggctgcctgaagcccctccatgagaaggactctgagagtggtggtggcaaggactgagtccaggcctgtgaggtgcagagtgcccagaactggactcaggatgcccagggccactctgcctctgcctgcattctgccgtgtgccctcgggcgagtcactgcctctccctggccctcagtttccctatctcgaacatggaactcattcctgcctgtctcctttgcaggctcatagggaagacctgctgagggaccagccaagagggctgcaaaagtgagggcttgtcattaccagacggttcaccagcctctcttggtttccttccttggaagagaatgtctgatctaaatgtggagaaactgtagtctcaggacctagggatgttctggccctcacccctgccctgggatgtccacagatgcctccaccccccagaacctgtccttgcacactcccctgcactggagtccagtctcttctgctggcagaaagcaaatgtgacctgtgtcactacgtgactgtggcacacgccttgttcttggccaaagaccaaattccttggcatgccttccagcaccctgcaaaatgagaccctcgtggccttccccagcctcttctagagccgtgatgcctccctgttgaagctctggtgacaccagcctttctcccaggccaggctccttcctgtcttcctgcattcacccagacagctccctctgcctgaaccttccatctcgccacccctccttccttgaccagcagatcccagctcacgtcacacttggttgggtcctcacatctttcacacttccaccagcctgcactactccctcaaagcacacgtcatgtttcttcatccggcagcctggatgttttttccctgtttaatgattgacgtacttagcagctatctctcagtgaactgtgagggtaaaggctatacttgtcttgttcaccttgggatgatgcctcatgatatgtcagggcgtgggacatctagtaggtgcttgacataatttcactgaattaatgacagagccagtgggaagatacagaaaaagaggggctgggctgggcgcggtggttcacgcctgtaatcccagcactttgggaggccaaggagggtggatcacctgaggtcaggagttagaggccagcctggcgaaaccccatctctactaaaaatacaaaatccaggcgtggtggcacacacctgtagtcccagctactcaggaggttgaggtaggagaattgcttgaacctgggaggtggaggttgcagtgagccaagattgcgccattgcactccagcctgggcaacacagcgagactccgtctcaaggaaaaaataaaaataaaaagcgggcacgggcccgtgacatccccacccttggaggctgtcttctcaggctctgccctgccctagctccacaccctctcccaggacccatcacgcctgtgcagtggcccccacagaaagactgagctcaaggtgggaaccacgtctgctaacttggagccccagtgccaagcacagtgcctgcatgtatttatccaataaatgtgaaattctgtccaaaaaaaaaaaaaaaaaa

SEQ ID NO: 1067 - DNA, 4740 bp, Homo sapiens
tggcttccttgtggttcctcagtggtgcctgcaacccctggttcacctccttccaggttctggctccttccagccatggctctcagagtccttctgttaacagccttgaccttatgtcatgggttcaacttggacactgaaaacgcaatgaccttccaagagaacgcaaggggcttcgggcagagcgtggtccagcttcagggatccagggtggtggttggagccccccaggagatagtggctgccaaccaaaggggcagcctctaccagtgcgactacagcacaggctcatgcgagcccatccgcctgcaggtccccgtggaggccgtgaacatgtccctgggcctgtccctggcagccaccaccagcccccctcagctgctggcctgtggtcccaccgtgcaccagacttgcagtgagaacacgtatgtgaaagggctctgcttcctgtttggatccaacctacggcagcagccccagaagttcccagaggccctccgagggtgtcctcaagaggatagtgacattgccttcttgattgatggctctggtagcatcatcccacatgactttcggcggatgaaggagtttgtctcaactgtgatggagcaattaaaaaagtccaaaaccttgttctctttgatgcagtactctgaagaattccggattcactttaccttcaaagagttccagaacaaccctaacccaagatcactggtgaagccaataacgcagctgcttgggcggacacacacggccacgggcatccgcaaagtggtacgagagctgtttaacatcaccaacggagcccgaaagaatgcctttaagatcctagttgtcatcacggatggagaaaagtttggcgatcccttgggatatgaggatgtcatccctgaggcagacagagagggagtcattcgctacgtcattggggtgggagatgccttccgcagtgagaaatcccgccaagagcttaataccatcgcatccaagccgcctcgtgatcacgtgttccaggtgaataactttgaggctctgaagaccattcagaaccagcttcgggagaagatctttgcgatcgagggtactcagacaggaagtagcagctcctttgagcatgagatgtctcaggaaggcttcagcgctgccatcacctctaatggccccttgctgagcactgtggggagctatgactgggctggtggagtctttctatatacatcaaaggagaaaagcaccttcatcaacatgaccagagtggattcagacatgaatgatgcttacttgggttatgctgccgccatcatcttacggaaccgggtgcaaagcctggttctgggggcacctcgatatcagcacatcggcctggtagcgatgttcaggcagaacactggcatgtgggagtccaacgctaatgtcaagggcacccagatcggcgcctacttcggggcctccctctgctccgtggacgtggacagcaacggcagcaccgacctggtcctcatcggggccccccattactacgagcagacccgagggggccaggtgtccgtgtgccccttgcccagggggagggctcggtggcagtgtgatgctgttctctacggggagcagggccaaccctggggccgctttggggcagccctaacagtgctgggggacgtaaatggggacaagctgacggacgtggccattggggccccaggagaggaggacaaccggggtgctgtttacctgtttcacggaacctcaggatctggcatcagcccctcccatagccagcggatagcaggctccaagctctctcccaggctccagtattttggtcagtcactgagtgggggccaggacctcacaatggatggactggtagacctgactgtaggagcccaggggcacgtgctgctgctcaggtcccagccagtactgagagtcaaggcaatcatggagttcaatcccagggaagtggcaaggaatgtatttgagtgtaatgatcaggtggtgaaaggcaaggaagccggagaggtcagagtctgcctccatgtccagaagagcacacgggatcggctaagagaaggacagatccagagtgttgtgacttatgacctggctctggactccggccgcccacattcccgcgccgtcttcaatgagacaaagaacagcacacgcagacagacacaggtcttggggctgacccagacttgtgagaccctgaaactacagttgccgaattgcatcgaggacccagtgagccccattgtgctgcgcctgaacttctctctggtgggaacgccattgtctgctttcgggaacctccggccagtgctggcggaggatgctcagagactcttcacagccttgtttccctttgagaagaattgtggcaatgacaacatctgccaggatgacctcagcatcaccttcagtttcatgagcctggactgcctcgtggtgggtgggccccgggagttcaacgtgacagtgactgtgagaaatgatggtgaggactcctacaggacacaggtcaccttcttcttcccgcttgacctgtcctaccggaaggtgtccacactccagaaccagcgctcacagcgatcctggcgcctggcctgtgagtctgcctcctccaccgaagtgtctggggccttgaagagcaccagctgcagcataaaccaccccatcttcccggaaaactcagaggtcacctttaatatcacgtttgatgtagactctaaggcttcccttggaaacaaactgctcctcaaggccaatgtgaccagtgagaacaacatgcccagaaccaacaaaaccgaattccaactggagctgccggtgaaatatgctgtctacatggtggtcaccagccatggggtctccactaaatatctcaacttcacggcctcagagaataccagtcgggtcatgcagcatcaatatcaggtcagcaacctggggcagaggagcccccccatcagcctggtgttcttggtgcccgtccggctgaaccagactgtcatatgggaccgcccccaggtcaccttctccgagaacctctcgagtacgtgccacaccaaggagcgcttgccctctcactccgactttctggctgagcttcggaaggcccccgtggtgaactgctccatcgctgtctgccagagaatccagtgtgacatcccgttctttggcatccaggaagaattcaatgctaccctcaaaggcaacctctcgtttgactggtacatcaagacctcgcataaccacctcctgatcgtgagcacagctgagatcttgtttaacgattccgtgttcaccctgctgccgggacagggggcgtttgtgaggtcccagacggagaccaaagtggagccgttcgaggtccccaaccccctgccgctcatcgtgggcagctctgtcgggggactgctgctcctggccctcatcaccgccgcgctgtacaagctcggcttcttcaagcggcaatacaaggacatgatgagtgaagggggtcccccgggggccgaaccccagtagcggctccttcccgacagagctgcctctcggtggccagcaggactctgcccagaccacacgagcccccaggctgctggacacgtcggacagcgaagtatccccgacaggacgggcttgggcttccatttgtgtgtgtgcaagtgtgtatgtgcgtgtgtgcgagtgtgtgcaagtgtctgtgtgcaagtgtgtgcacgtgtgcgtgtgcgtgcatgtgcactcgcacgcccatgtgtgagtgtgtgcaagtatgtgagtgtgtccagtgtgtgtgcgtgtgtccatgtgtgtgcagtgtgtgcatgtgtgcgagtgtgtgcatgtgtgtgctcaggggctgtggctcacgtgtgtgactcagagtgtctctggcgtgtgggtaggtgacggcagcgtagcctctccggcagaagggaactgcctgggctcccttgtgcgtgggtaagccgctgctgggttttcctccgggagaggggacggtcaatcctgtgggtgaagagagagggaaacacagcagcatctctccactgaaagaagtgggacttcccgtcgcctgcgagcctgcggcctgctggagcctgcgcagcttggatggatactccatgagaaaagccgtgggtggaaccaggagcctcctccacaccagcgctgatgcccaataaagatgcccactgaggaatcatgaagcttcctttctggattcatttattatttcaatgtgactttaattttttggatggataagcctgtctatggtacaaaaatcacaaggcattcaagtgtacagtgaaaagtctccctttccagatattcaagtcacctccttaaaggtagtcaagattgtgttttgaggtttccttcagacagattccaggcgatgtgcaagtgtatgcacgtgtgcacacaccacacacatacacacacacaagcttttttacacaaatggtagcatactttatattggtctgtatcttgctttttttcaccaatatttctcagacatcggttcatattaagacataaattactttttcattcttttataccgctgcatagtattccattgtgtgagtgtaccataatgtatttaaccagtcttcttttgatatactattttcatctcttgttattgcatctgctgagttaataaatcaaatatatgtcaaaaaaaaaaaaaaaaaaaaaaaaaaaaaaaaaaaaaaaaat

SEQ ID NO: 1068 - DNA, 3700 bp, Homo sapiens
agccgccgccacccgccgcgcccgacacccgggaggccccgccagcccgcgggagaggcccagcgggagtcgcggaacagcaggcccgagcccaccgcgccgggccccggacgccgcgcggaaaagatgaatttacaaccaattttctggattggactgatcagttcagtttgctgtgtgtttgctcaaacagatgaaaatagatgtttaaaagcaaatgccaaatcatgtggagaatgtatacaagcagggccaaattgtgggtggtgcacaaattcaacatttttacaggaaggaatgcctacttctgcacgatgtgatgatttagaagccttaaaaaagaagggttgccctccagatgacatagaaaatcccagaggctccaaagatataaagaaaaataaaaatgtaaccaaccgtagcaaaggaacagcagagaagctcaagccagaggatattactcagatccaaccacagcagttggttttgcgattaagatcaggggagccacagacatttacattaaaattcaagagagctgaagactatcccattgacctctactaccttatggacctgtcttactcaatgaaagacgatttggagaatgtaaaaagtcttggaacagatctgatgaatgaaatgaggaggattacttcggacttcagaattggatttggctcatttgtggaaaagactgtgatgccttacattagcacaacaccagctaagctcaggaacccttgcacaagtgaacagaactgcaccagcccatttagctacaaaaatgtgctcagtcttactaataaaggagaagtatttaatgaacttgttggaaaacagcgcatatctggaaatttggattctccagaaggtggtttcgatgccatcatgcaagttgcagtttgtggatcactgattggctggaggaatgttacacggctgctggtgttttccacagatgccgggtttcactttgctggagatgggaaacttggtggcattgttttaccaaatgatggacaatgtcacctggaaaataatatgtacacaatgagccattattatgattatccttctattgctcaccttgtccagaaactgagtgaaaataatattcagacaatttttgcagttactgaagaatttcagcctgtttacaaggagctgaaaaacttgatccctaagtcagcagtaggaacattatctgcaaattctagcaatgtaattcagttgatcattgatgcatacaattccctttcctcagaagtcattttggaaaacggcaaattgtcagaaggagtaacaataagttacaaatcttactgcaagaacggggtgaatggaacaggggaaaatggaagaaaatgttccaatatttccattggagatgaggttcaatttgaaattagcataacttcaaataagtgtccaaaaaaggattctgacagctttaaaattaggcctctgggctttacggaggaagtagaggttattcttcagtacatctgtgaatgtgaatgccaaagcgaaggcatccctgaaagtcccaagtgtcatgaaggaaatgggacatttgagtgtggcgcgtgcaggtgcaatgaagggcgtgttggtagacattgtgaatgcagcacagatgaagttaacagtgaagacatggatgcttactgcaggaaagaaaacagttcagaaatctgcagtaacaatggagagtgcgtctgcggacagtgtgtttgtaggaagagggataatacaaatgaaatttattctggcaaattctgcgagtgtgataatttcaactgtgatagatccaatggcttaatttgtggaggaaatggtgtttgcaagtgtcgtgtgtgtgagtgcaaccccaactacactggcagtgcatgtgactgttctttggatactagtacttgtgaagccagcaacggacagatctgcaatggccggggcatctgcgagtgtggtgtctgtaagtgtacagatccgaagtttcaagggcaaacgtgtgagatgtgtcagacctgccttggtgtctgtgctgagcataaagaatgtgttcagtgcagagccttcaataaaggagaaaagaaagacacatgcacacaggaatgttcctattttaacattaccaaggtagaaagtcgggacaaattaccccagccggtccaacctgatcctgtgtcccattgtaaggagaaggatgttgacgactgttggttctattttacgtattcagtgaatgggaacaacgaggtcatggttcatgttgtggagaatccagagtgtcccactggtccagacatcattccaattgtagctggtgtggttgctggaattgttcttattggccttgcattactgctgatatggaagcttttaatgataattcatgacagaagggagtttgctaaatttgaaaaggagaaaatgaatgccaaatgggacacgggtgaaaatcctatttataagagtgccgtaacaactgtggtcaatccgaagtatgagggaaaatgagtactgcccgtgcaaatcccacaacactgaatgcaaagtagcaatttccatagtcacagttaggtagctttagggcaatattgccatggttttactcatgtgcaggttttgaaaatgtacaatatgtataatttttaaaatgttttattattttgaaaataatgttgtaattcatgccagggactgacaaaagacttgagacaggatggttattcttgtcagctaaggtcacattgtgcctttttgaccttttcttcctggactattgaaatcaagcttattggattaagtgatatttctatagcgattgaaagggcaatagttaaagtaatgagcatgatgagagtttctgttaatcatgtattaaaactgatttttagctttacaaatatgtcagtttgcagttatgcagaatccaaagtaaatgtcctgctagctagttaaggattgttttaaatctgttattttgctatttgcctgttagacatgactgatgacatatctgaaagacaagtatgttgagagttgctggtgtaaaatacgtttgaaatagttgatctacaaaggccatgggaaaaattcagagagttaggaaggaaaaaccaatagctttaaaacctgtgtgccattttaagagttacttaatgtttggtaacttttatgccttcactttacaaattcaagccttagataaaagaaccgagcaattttctgctaaaaagtccttgatttagcactatttacatacaggccatactttacaaagtatttgctgaatggggaccttttgagttgaatttattttattatttttattttgtttaatgtctggtgctttctatcacctcttctaatcttttaatgtatttgtttgcaattttggggtaagacttttttatgagtactttttctttgaagttttagcggtcaatttgcctttttaatgaacatgtgaagttatactgtggctatgcaacagctctcacctacgcgagtcttactttgagttagtgccataacagaccactgtatgtttacttctcaccatttgagttgcccatcttgtttcacactagtcacattcttgttttaagtgcctttagttttaacagttcactttttacagtgctatttactgaagttatttattaaatatgcctaaaatacttaaatcgga

SEQ ID NO: 1069 - DNA, 2498 bp, Homo sapiens
atgaatttacaaccaattttctggattggactgatcagttcagtttgctgtgtgtttgctcaaacagatgaaaatagatgtttaaaagcaaatgccaaatcatgtggagaatgtatacaagcagggccaaattgtgggtggtgcacaaattcaacatttttacaggaaggaatgcctacttctgcacgatgtgatgatttagaagccttaaaaaagaagggttgccctccagatgacatagaaaatcccagaggctccaaagatataaagaaaaataaaaatgtaaccaaccgtagcaaaggaacagcagagaagctcaagccagaggatattactcagatccaaccacagcagttggttttgcgattaagatcaggggagccacagacatttacattaaaattcaagagagctgaagactatcccattgacctctactaccttatggacctgtcttactcaatgaaagacgatttggagaatgtaaaaagtcttggaacagatctgatgaatgaaatgaggaggattacttcggacttcagaattggatttggctcatttgtggaaaagactgtgatgccttacattagcacaacaccagctaagctcaggaacccttgcacaagtgaacagaactgcaccagcccatttagctacaaaaatgtgctcagtcttactaataaaggagaagtatttaatgaacttgttggaaaacagcgcatatctggaaatttggattctccagaaggtggtttcgatgccatcatgcaagttgcagtttgtggatcactgattggctggaggaatgttacacggctgctggtgttttccacagatgccgggtttcactttgctggagatgggaaacttggtggcattgttttaccaaatgatggacaatgtcacctggaaaataatatgtacacaatgagccattattatgattatccttctattgctcaccttgtccagaaactgagtgaaaataatattcagacaatttttgcagttactgaagaatttcagcctgtttacaaggagctgaaaaacttgatccctaagtcagcagtaggaacattatctgcaaattctagcaatgtaattcagttgatcattgatgcatacaattccctttcctcagaagtcattttggaaaacggcaaattgtcagaaggagtaacaataagttacaaatcttactgcaagaacggggtgaatggaacaggggaaaatggaagaaaatgttccaatatttccattggagatgaggttcaatttgaaattagcataacttcaaataagtgtccaaaaaaggattctgacagctttaaaattaggcctctgggctttacggaggaagtagaggttattcttcagtacatctgtgaatgtgaatgccaaagcgaaggcatccctgaaagtcccaagtgtcatgaaggaaatgggacatttgagtgtggcgcgtgcaggtgcaatgaagggcgtgttggtagacattgtgaatgcagcacagatgaagttaacagtgaagacatggatgcttactgcaggaaagaaaacagttcagaaatctgcagtaacaatggagagtgcgtctgcggacagtgtgtttgtaggaagagggataatacaaatgaaatttattctggcaaattctgcgagtgtgataatttcaactgtgatagatccaatggcttaatttgtggaggaaatggtgtttgcaagtgtcgtgtgtgtgagtgcaaccccaactacactggcagtgcatgtgactgttctttggatactagtacttgtgaagccagcaacggacagatctgcaatggccggggcatctgcgagtgtggtgtctgtaagtgtacagatccgaagtttcaagggcaaacgtgtgagatgtgtcagacctgccttggtgtctgtgctgagcataaagaatgtgttcagtgcagagccttcaataaaggagaaaagaaagacacatgcacacaggaatgttcctattttaacattaccaaggtagaaagtcgggacaaattaccccagccggtccaacctgatcctgtgtcccattgtaaggagaaggatgttgacgactgttggttctattttacgtattcagtgaatgggaacaacgaggtcatggttcatgttgtggagaatccagagtgtcccactggtccagacatcattccaattgtagctggtgtggttgctggaattgttcttattggccttgcattactgctgatatggaagcttttaatgataattcatgacagaagggagtttgctaaatttgaaaaggagaaaatgaatgccaaatgggacacgcctggagtgcagtggtgtgatatcagctcactgcaacctctgacttccagattccagcaattctcctgcctcagcctcccgagtacctgggattacagggtgaaaatcctatttataagagtgccgtaacaactgtggtcaatccgaagtatgagggaaaatgagta

SEQ ID NO: 1070 - DNA, 3399 bp, Homo sapiens
atgaatttacaaccaattttctggattggactgatcagttcagtttgctgtgtgtttgctcaaacagatgaaaatagatgtttaaaagcaaatgccaaatcatgtggagaatgtatacaagcagggccaaattgtgggtggtgcacaaattcaacatttttacaggaaggaatgcctacttctgcacgatgtgatgatttagaagccttaaaaaagaagggttgccctccagatgacatagaaaatcccagaggctccaaagatataaagaaaaataaaaatgtaaccaaccgtagcaaaggaacagcagagaagctcaagccagaggatattactcagatccaaccacagcagttggttttgcgattaagatcaggggagccacagacatttacattaaaattcaagagagctgaagactatcccattgacctctactaccttatggacctgtcttactcaatgaaagacgatttggagaatgtaaaaagtcttggaacagatctgatgaatgaaatgaggaggattacttcggacttcagaattggatttggctcatttgtggaaaagactgtgatgccttacattagcacaacaccagctaagctcaggaacccttgcacaagtgaacagaactgcaccagcccatttagctacaaaaatgtgctcagtcttactaataaaggagaagtatttaatgaacttgttggaaaacagcgcatatctggaaatttggattctccagaaggtggtttcgatgccatcatgcaagttgcagtttgtggatcactgattggctggaggaatgttacacggctgctggtgttttccacagatgccgggtttcactttgctggagatgggaaacttggtggcattgttttaccaaatgatggacaatgtcacctggaaaataatatgtacacaatgagccattattatgattatccttctattgctcaccttgtccagaaactgagtgaaaataatattcagacaatttttgcagttactgaagaatttcagcctgtttacaaggagctgaaaaacttgatccctaagtcagcagtaggaacattatctgcaaattctagcaatgtaattcagttgatcattgatgcatacaattccctttcctcagaagtcattttggaaaacggcaaattgtcagaaggagtaacaataagttacaaatcttactgcaagaacggggtgaatggaacaggggaaaatggaagaaaatgttccaatatttccattggagatgaggttcaatttgaaattagcataacttcaaataagtgtccaaaaaaggattctgacagctttaaaattaggcctctgggctttacggaggaagtagaggttattcttcagtacatctgtgaatgtgaatgccaaagcgaaggcatccctgaaagtcccaagtgtcatgaaggaaatgggacatttgagtgtggcgcgtgcaggtgcaatgaagggcgtgttggtagacattgtgaatgcagcacagatgaagttaacagtgaagacatggatgcttactgcaggaaagaaaacagttcagaaatctgcagtaacaatggagagtgcgtctgcggacagtgtgtttgtaggaagagggataatacaaatgaaatttattctggcaaattctgcgagtgtgataatttcaactgtgatagatccaatggcttaatttgtggaggaaatggtgtttgcaagtgtcgtgtgtgtgagtgcaaccccaactacactggcagtgcatgtgactgttctttggatactagtacttgtgaagccagcaacggacagatctgcaatggccggggcatctgcgagtgtggtgtctgtaagtgtacagatccgaagtttcaagggcaaacgtgtgagatgtgtcagacctgccttggtgtctgtgctgagcataaagaatgtgttcagtgcagagccttcaataaaggagaaaagaaagacacatgcacacaggaatgttcctattttaacattaccaaggtagaaagtcgggacaaattaccccagccggtccaacctgatcctgtgtcccattgtaaggagaaggatgttgacgactgttggttctattttacgtattcagtgaatgggaacaacgaggtcatggttcatgttgtggagaatccagagtgtcccactggtccagacatcattccaattgtagctggtgtggttgctggaattgttcttattggccttgcattactgctgatatggaagcttttaatgataattcatgacagaagggagtttgctaaatttgaaaaggagaaaatgaatgccaaatgggacacggtaagttacaaaacatccaaaaagcaaagtggcttataaagtaaatgtaatactcctaagacttatgtattagctgtcaggctgattattaaagtcctttctaagtattttattcccccaaaagtttcttactcaaggaatttgcatttagtgaaaaacagaaagcatcctaaatatatcccattgaaacaaaacattgattataagcatgtatattctggttcatgtggccgatatttttatttctttaatgattttgatcctaaatctgccttttcatctaatgtgaagtagaatcctaaataatgttatctgtgtagcaagctattcaatgggaaagctgcttctttctttaaaacaaacaaacaaaaaaaaccttcagtggaaagccaaattccaaaaggttatataccaagcttgtccaactcgcagctcgtcggccaggacatgcagcccagaatagctttgaatgtggccccaacacaaatttgtaaactttcttagaaattgtaattattattattatttttttttggtaactttttttaaagctcatcagctatcgttagtgtattttatgtgtggcccaagacagttcttcttcttgccagtgtggcccagggaagccaaaagattggacacccctgctatatactatatgattccatttagaggacattctggaaaagcaaaactgtaggggcaaaaatcagtggttgctaggggctggaatgggggaaagtgttgaccacagaggggcgtaagggatcttccttgggatgacttgattgtgggtggatttatgtatttgaaaactcacagaactatgtactttaaaaagatgtatgttcctctatgaaaattatatctcagtaaactttggcttataaaaatcttaaaagccctaagtgaccgaaaggttatgttagcattgagtgctttgaaatatggagtcagagggtggggtaaccaaatgttggcctttgtgtattcatcttttgatacaagaaagcaatgccaatcttcagtatttttaaattgtaaatgaattttgtagttcccgaattc

SEQ ID NO: 1071 - DNA, 4894 bp, Homo sapiens
cgccgcgggaggcggacgagatgcgagcgcggccgcggccccggccgctctgggcgactgtgctggcgctgggggcgctggcgggcgttggcgtaggagggcccaacatctgtaccacgcgaggtgtgagctcctgccagcagtgcctggctgtgagccccatgtgtgcctggtgctctgatgaggccctgcctctgggctcacctcgctgtgacctgaaggagaatctgctgaaggataactgtgccccagaatccatcgagttcccagtgagtgaggcccgagtactagaggacaggcccctcagcgacaagggctctggagacagctcccaggtcactcaagtcagtccccagaggattgcactccggctccggccagatgattcgaagaatttctccatccaagtgcggcaggtggaggattaccctgtggacatctactacttgatggacctgtcttactccatgaaggatgatctgtggagcatccagaacctgggtaccaagctggccacccagatgcgaaagctcaccagtaacctgcggattggcttcggggcatttgtggacaagcctgtgtcaccatacatgtatatctccccaccagaggccctcgaaaacccctgctatgatatgaagaccacctgcttgcccatgtttggctacaaacacgtgctgacgctaactgaccaggtgacccgcttcaatgaggaagtgaagaagcagagtgtgtcacggaaccgagatgccccagagggtggctttgatgccatcatgcaggctacagtctgtgatgaaaagattggctggaggaatgatgcatcccacttgctggtgtttaccactgatgccaagactcatatagcattggacggaaggctggcaggcattgtccagcctaatgacgggcagtgtcatgttggtagtgacaatcattactctgcctccactaccatggattatccctctttggggctgatgactgagaagctatcccagaaaaacatcaatttgatctttgcagtgactgaaaatgtagtcaatctctatcagaactatagtgagctcatcccagggaccacagttggggttctgtccatggattccagcaatgtcctccagctcattgttgatgcttatgggaaaatccgttctaaagtagagctggaagtgcgtgacctccctgaagagttgtctctatccttcaatgccacctgcctcaacaatgaggtcatccctggcctcaagtcttgtatgggactcaagattggagacacggtgagcttcagcattgaggccaaggtgcgaggctgtccccaggagaaggagaagtcctttaccataaagcccgtgggcttcaaggacagcctgatcgtccaggtcacctttgattgtgactgtgcctgccaggcccaagctgaacctaatagccatcgctgcaacaatggcaatgggacctttgagtgtggggtatgccgttgtgggcctggctggctgggatcccagtgtgagtgctcagaggaggactatcgcccttcccagcaggacgaatgcagcccccgggagggtcagcccgtctgcagccagcggggcgagtgcctctgtggtcaatgtgtctgccacagcagtgactttggcaagatcacgggcaagtactgcgagtgtgacgacttctcctgtgtccgctacaagggggagatgtgctcaggccatggccagtgcagctgtggggactgcctgtgtgactccgactggaccggctactactgcaactgtaccacgcgtactgacacctgcatgtccagcaatgggctgctgtgcagcggccgcggcaagtgtgaatgtggcagctgtgtctgtatccagccgggctcctatggggacacctgtgagaagtgccccacctgcccagatgcctgcacctttaagaaagaatgtgtggagtgtaagaagtttgaccggggagccctacatgacgaaaatacctgcaaccgttactgccgtgacgagattgagtcagtgaaagagcttaaggacactggcaaggatgcagtgaattgtacctataagaatgaggatgactgtgtcgtcagattccagtactatgaagattctagtggaaagtccatcctgtatgtggtagaagagccagagtgtcccaagggccctgacatcctggtggtcctgctctcagtgatgggggccattctgctcattggccttgccgccctgctcatctggaaactcctcatcaccatccacgaccgaaaagaattcgctaaatttgaggaagaacgcgccagagcaaaatgggacacagccaacaacccactgtataaagaggccacgtctaccttcaccaatatcacgtaccggggcacttaatgataagcagtcatcctcagatcattatcagcctgtgccacgattgcaggagtccctgccatcatgtttacagaggacagtatttgtggggagggatttggggctcagagtggggtaggttgggagaatgtcagtatgtggaagtgtgggtctgtgtgtgtgtatgtgggggtctgtgtgtttatgtgtgtgtgttgtgtgtgggagtgtgtaatttaaaattgtgatgtgtcctgataagctgagctccttagcctttgtcccagaatgcctcctgcagggattcttcctgcttagcttgagggtgactatggagctgagcaggtgttcttcattacctcagtgagaagccagctttcctcatcaggccattgtccctgaagagaagggcagggctgaggcctctcattccagaggaagggacaccaagccttggctctaccctgagttcataaatttatggttctcaggcctgactctcagcagctatggtaggaactgctgggcttggcagcccgggtcatctgtacctctgcctcctttcccctccctcaggccgaaggaggagtcagggagagctgaactattagagctgcctgtgccttttgccatcccctcaacccagctatggttctctcgcaagggaagtccttgcaagctaattctttgacctgttgggagtgaggatgtctgggccactcaggggtcattcatggcctgggggatgtaccagcatctcccagttcataatcacaacccttcagatttgccttattggcagctctactctggaggtttgtttagaagaagtgtgtcacccttaggccagcaccatctctttacctcctaattccacaccctcactgctgtagacatttgctatgagctggggatgtctctcatgaccaaatgcttttcctcaaagggagagagtgctattgtagagccagaggtctggccctatgcttccggcctcctgtccctcatccatagcacctccacatacctggccctgtgccttggtgtgctgtatccatccatggggctgattgtatttaccttctacctcttggctgccttgtgaaggaattattcccatgagttggctgggaataagtgccaggatggaatgatgggtcagttgtatcagcacgtgtggcctgttcttctatgggttggacaacctcattttaactcagtctttaatctgagaggccacagtgcaattttattttatttttctcatgatgaggttttcttaacttaaaagaacatgtatataaacatgcttgcattatatttgtaaatttatgtgatggcaaagaaggagagcataggaaaccacacagacttgggcagggtacagacactcccacttggcatcattcacagcaagtcactggccagtggctggatctgtgaggggctctctcatgatagaaggctatggggatagatgtgtggacacattggacctttcctgaggaagagggactgttcttttgtcccagaaaagcagtggctccattggtgttgacatacatccaacattaaaagccacccccaaatgcccaagaaaaaaagaaagacttatcaacatttgttccatgagcagaaaactggagctctggcctcagtgttacagctaaataatctttaattaaggcaagtcactttcttcttcttaaagctgttttctagtttgagaaatgatgggattttagcagccagtcttgaaggtctctttcagtatcaacattctaagatgctgggacttactgtgtcatcaaatgtgcggttaagattctctgggatattgatactgtttgtgtttttagttgggagatctgagagacctggctttggcaagagcagatgtcattccatatcacctttctcaatgaaagtctcattctatcctctctccaaacccgttttccaacatttgttaatagttacgtctctcctgatgtagcacttaagcttcatttagttattatttctttcttcactttgcacacatttgcatccacatattagggaagaggaatccataagtagctgaaatatctattctgtattattgtgttaacattgagaataagccttggaattagatatggggcaatgactgagccctgtctcacccatggattactccttactgtagggaatggcagtatggtagagggataaatagggggcggggagggatagtcatggatccaagaagtccttagaaatagtggcagggaacaggtgtggaagctcatgcctgtaattataaccttcagctactaagacaggtgtggtggctcacgcctgtgattataatcttcagttactaagacagagtccatgagagtgttaatgggacattttctttagataagatgttttatatgaagaaactgtatcaaagggggaagaaaatgtatttaacaggtgaatcaaatcaggaatcttgtctgagctactggaatgaagttcacaggtcttgaagacca

SEQ ID NO: 1072 - DNA, 9813 bp, Homo sapiens
agtaaccatgtggatgtgctgctgaagcgtttcctcaagctcgctggggtgggaggagaggaggaggaggaggtggtggtggaggaggaggcagggggtggagagagagaaagcgcacgccgagaggaggtgtgggtgttccgcttccatcctaacggaacgagctccctcttcgcggacatgggattacccagcggctgctaacccctctcctcgccctgctcccccaaaccggcgtggctccccgggcaccaaggagctgactacagaggagcaggatttgcacccctcgctgggcttgctttggcaacagagtgcctgacccaggtcaggattttcaagaaagacatgtctgacaaaatgtctagcttcctacatattggagacatttgttctctgtacgcggagggatcgacaaatggatttattagcaccttgggcctggttgatgatcgttgtgttgtacagccagaaaccggggaccttaacaatccacctaagaaattcagagactgcctctttaagctatgtcccatgaaccgctactctgcccaaaagcagttctggaaagccgctaagcctggggccaacagcaccacagacgcagtgctactcaacaaactgcaccacgctgcagacttggaaaagaagcagaatgagacagaaaacaggaaattgctggggaccgtaatccagtatggcaatgtgatccagctcctgcatttgaaaagtaataaatacctaacagtgaataagaggcttcctgctctgttggagaagaatgccatgagagtcacattggacgaggctggaaatgaagggtcctggttttatattcagccattctacaagctgcgatccattggagacagcgtggtcataggtgacaaggtggttctgaaccccgtcaatgctggtcagcccctacatgctagcagccatcaactggtagataacccaggctgcaatgaggtcaattccgtcaactgcaatacaagctggaaaatagtccttttcatgaaatggagtgataacaaagacgacatattaaaggggggtgacgtggtgaggctgtttcatgctgagcaggagaagtttctcacctgtgacgaacacaggaagaagcagcacgtcttcctgagaaccacgggccggcagtcggccacatctgccaccagttcaaaagccctgtgggaggtggaggtggtccagcatgacccatgtcggggcggagcagggtattggaacagccttttccgtttcaagcatctggccacggggcattacttggcagcagaggtggaccctgatcaggacgcctctcgaagtaggttgcggaatgcccaagaaaagatggtatactccctggtctctgtgcctgaaggcaatgacatctcctccattttcgagctagatcccaccactctgcgtggaggtgacagccttgtcccaaggaactcttatgttcggctcagacacctatgtactaatacctgggttcacagcacaaatattcctattgacaaggaagaagaaaagcccgtgatgctgaaaattggcacctctcctgtgaaggaggataaggaagcatttgccatagttccggtttctcctgctgaagttcgggacctggactttgccaatgatgccagcaaggtgctgggctccattgctgggaagctagagaagggcaccatcacccagaatgaaaggaggtctgtaaccaagctgctagaagatttggtttacttcgtcactggtggaactaattctggtcaagatgttctcgaagttgtcttctccaagcccaacagagaacggcagaaactgatgagagaacagaatattctcaagcagatcttcaagttgttacaagccccattcacagactgcggtgatggcccaatgcttcggctggaagagctcggggaccagcggcacgctcctttcagacacatctgccggctctgctacagggtgctgagacactcgcagcaagactacaggaagaaccaggagtatatagccaagcagtttggcttcatgcagaagcagattggctatgatgtgttggctgaagacactatcactgccctgctccacaataatcggaaactcctggaaaaacacattaccgcggcagagattgacacatttgtcagcctggtgcgaaagaacagggagcccagattcttagattacctctccgacctctgtgtctccatgaacaaatcaattccagtgacccaggaactgatatgtaaagctgtgctgaaccccaccaacgctgacatcctgattgagaccaagttggttctttctcgttttgaatttgaaggtgtctcttccactggagagaatgctctggaggcaggagaagacgaggaagaggtgtggctgttttggagggacagcaacaaagagattcgcagcaagagtgtgagggaattggctcaggatgctaaagaagggcagaaggaggaccgagacgttctcagctactacagatatcagctgaacctctttgcgaggatgtgtctggaccgccaatacctggccatcaacgaaatctcaggccagctggatgtcgatctcattctccgctgcatgtctgacgagaacctgccctatgacctcagggcgtccttctgccgcctcatgcttcacatgcatgtggaccgagatccccaggaacaagtcacccccgtgaaatatgcccgcctctggtcggagattccctcggagatcgccattgacgactatgatagtagtggagcttccaaagatgaaattaaggagagatttgctcagaccatggagtttgtggaggagtatttaagagatgtggtttgtcagaggttccctttctctgataaagagaagaataagcttacgtttgaggttgtaaatttagctaggaatctcatatactttggtttctacaacttctctgaccttctacgattaactaagatccttctggccatattggactgtgtacatgtgacaacaatcttccccattagcaagatggcgaaaggagaagagaataaaggcagtaacgtgatgagatctattcatggcgtgggagagctgatgacccaggtggtgctccggggaggaggctttttgcccatgactcccatggctgctgcccctgaaggcaatgtgaagcaggcagagcctgagaaggaggacatcatggtcatggacaccaagctgaagatcattgagatactccagtttattttgaatgtgaggttggattataggatctcctgcctcctgtgtatatttaagcgagagtttgatgaaagcaattcccagacttcagaaacatcctccggaaacagcagccaagaagggccaagtaatgtaccaggtgctcttgactttgaacacattgaagaacaagcagaaggcatctttggaggaaggaaagagaacaccccactggacttggatgaccacggcggcagaacctttctccgtgtcctgctccacttgacgatgcatgactacccacccctggtgtcaggggccctgcagctcctcttccggcacttcagccagaggcaggaggtgctccaggccttcaaacaggttcaactgctggttaccagccaagatgtggacaactacaaacagatcaaacaagacttggatcaactgaggtccatcgtggaaaagtcagagctttgggtgtacaaagggcagggccccgatgagactatggatggtgcatctggagaaaatgaacataagaaaacggaggagggaaataacaagccacaaaagcatgaaagcaccagcagctacaactacagagtggtcaaagagattttgattcggcttagcaaactctgtgttcaagagagtgcctcagtgagaaagagcaggaagcagcaacagcgtctgctccggaacatgggcgcgcacgccgtggtgctggagctgctgcagattccctatgagaaggccgaagataccaagatgcaagagataatgaggttggctcatgaatttttgcagaatttctgcgcaggcaaccagcagaatcaagctttgctacataaacacataaacctgtttctcaacccagggatcctggaggcagtaaccatgcagcacatcttcatgaacaatttccagctttgcagtgagatcaacgagagagttgttcagcacttcgttcactgcatagagactcacggtcggaatgtccagtatataaagttcttacagacaattgtcaaggcagaagggaaatttattaaaaaatgccaagacatggttatggccgagctggtcaattcgggagaggatgtcctcgtgttctacaacgacagagcctctttccagactctgatccagatgatgcggtcagaacgggatcggatggatgagaacagccctctcatgtaccacatccacttggtcgagctcctggctgtgtgcacggagggtaagaatgtctacacagagatcaagtgcaactccctgctcccgctggatgacatcgttcgcgtggtgacccacgaggactgcatccctgaggttaaaattgcatacattaacttcctgaatcactgctatgtggatacagaggtggaaatgaaggagatttataccagcaatcacatgtggaaattgtttgagaatttccttgtagacatctgcagggcctgtaacaacactagtgacaggaaacatgcagactcgattttggagaagtatgtcaccgaaatcgtcatgagtattgttactactttcttcagctctcccttctcagaccagagtacgactttgcagactcgccagcctgtctttgtgcaactgctgcaaggcgtgttcagggtttaccactgcaactggttaatgccaagccaaaaagcctccgtggagagctgtattcgggtgctgtctgatgtagccaagagccgggccattgccattcccgtggacctggacagccaagtcaacaacctctttctcaagtcccacagcattgtgcagaaaacagccatgaactggcggctctcagcccgcaatgccgcacgcagggactctgttctggcagcttccagagactaccggaatatcattgagagattgcaggacatcgtctccgcgctggaggaccgtctcaggcccctggtgcaggcagagttatctgtgctcgtggatgttctccacagacccgagctgcttttcccagagaacacagacgccagaaggaaatgtgaaagtggcggtttcatttgcaagttaataaagcatacaaaacagctgctagaagaaaatgaagagaagctctgcattaaggtcctacagaccctgagggaaatgatgaccaaagatagaggctatggagaaaagggtgaggcgctcaggcaagttctggtcaaccgttactatggaaacgtcagaccttcgggacgaagagagagccttaccagctttggcaatggcccactgtcagcaggaggacccggcaagcccgggggaggagggggaggttccggatccagctctatgagcaggggtgagatgagtctggccgaggttcagtgtcaccttgacaaggagggggcttccaatctagttatcgacctcatcatgaacgcatccagtgaccgagtgttccatgaaagcattctcctggccattgcccttctggaaggaggcaacaccaccatccagcactcctttttctgtcgcttgacagaagataagaagtcagagaaattctttaaggtgttttatgaccggatgaaggtggcccagcaagaaatcaaagcaacagtgacagtgaacaccagtgacttgggaaataaaaagaaagacgatgaggtagacagggatgccccatcacggaaaaaagctaaagagcccacaacacagataacagaagaggtccgggatcagctcctggaggcctccgctgccaccaggaaagccttcaccactttcaggagggaggctgatcccgacgaccactaccagcctggagagggcacccaggccactgccgacaaggccaaggacgacctggagatgagcgcggtcatcaccatcatgcagcccatcctccgcttccttcagctcctgtgtgaaaaccacaaccgagacctgcagaacttcctccgttgccaaaataacaagaccaactacaatttggtatgtgagaccctgcagtttctggactgtatttgtggaagcacaactggaggccttggtcttctgggcttgtatataaatgaaaagaacgtagcgcttatcaaccaaaccctggaaagtctgaccgaatactgtcaaggaccttgccatgagaaccagaactgcatagccacccatgaatccaatggcattgacatcatcacagccctgatcctcaatgatatcaatcctttgggaaagaagaggatggaccttgtgttagaactgaagaacaatgcctcgaagttgctcctggccatcatggaaagcaggcacgacagtgaaaacgcagagaggatactttataacatgaggcccaaggaactggtggaagtgatcaagaaagcctacatgcaaggtgaagtggaatttgaggatggagaaaacggtgaggatggggcggcgtcccccaggaacgtggggcacaacatctacatattagcccatcagttggctcggcataacaaagaacttcagagcatgctgaaacctggtggccaagtggacggagatgaagccctggagttttatgccaagcacacggcgcagatagagattgtcagattagaccgaacaatggaacagatagtctttcccgtgcccagcatatgtgaattcctaaccaaggagtcaaaactacgaatttactatactacagagagagacgaacaaggcagcaaaatcaatgatttctttctgcggtctgaagacctcttcaatgaaatgaattggcagaagaaactgagagcccagcccgtgttgtactggtgtgcccgcaacatgtctttctggagcagcatttcgtttaacctggccgtcctgatgaacctgctggtggcgtttttctacccgtttaagggagtccgaggaggaaccctggagccccactggtcgggactcctgtggacagccatgctcatctctctggccatcgtcattgccctccccaagccccatggcatccgggccttaattgcctccacaattctacgactgatattttcagtcgggttacaacccacgttgtttcttctgggcgctttcaatgtatgcaataaaatcatctttctaatgagctttgtgggcaactgtgggacattcacaagaggctaccgagccatggttctggatgttgagttcctctatcatttgttgtatctggtgatctgtgccatggggctctttgtccatgaattcttctacagtctgctgctttttgatttagtgtacagagaagagactttgcttaatgtcattaaaagtgtcactcgcaatggacggtccatcatcctgacagcagttctggctctgatcctcgtttacctgttctcaatagtgggctatcttttcttcaaggatgactttatcttggaagtagataggctgcccaatgaaacagctgttccagaaaccggcgagagtttggcaagcgagttcctgttctccgatgtgtgtagggtggagagtggggagaactgctcctctcctgcacccagagaagagctggtccctgcagaagagacggaacaggataaagagcacacatgtgagacgctgctgatgtgcattgtcactgtgctgagtcacgggctgcggagcgggggtggagtaggagatgtactcaggaagccgtccaaagaggaacccctgtttgctgctagagttatttatgacctcttgttcttcttcatggtcatcatcattgttcttaacctgatttttggggttatcattgacacttttgctgacctgaggagtgagaagcagaagaaggaagagatcttgaagaccacgtgctttatctgtggcttggaaagagacaagtttgacaacaagactgtcacctttgaagagcacatcaaggaagaacacaacatgtggcactatctgtgcttcatcgtcctggtgaaagtaaaggactccaccgaatatactgggcctgagagttacgtggcagaaatgatcaaggaaagaaaccttgactggttccccaggatgagagccatgtcattggtcagcagtgattctgaaggagaacagaatgagctgagaaacctgcaggagaagctggagtccaccatgaaacttgtcacgaacctttctggccagctgtcggaattaaaggatcagatgacagaacaaaggaagcagaaacaaagaattggtcttctaggacatcctcctcacatgaatgtcaacccacaacaaccagcataagcaaatgaaagaaaggaattgtatttaccttttataattattattagtgtgggtatggctaatgagttctgattcacccacgaaggttacatttatgctgaatacatttgtaaatactcagttttatactgtatgtatatgattgctactctaaaggtttggatatatgtattgtaattagaattgttggcatgatgacatttcatttgtgccaaaaatattaaaaatgccttttttggaaggactaacagaaagcacctgatttgcacttgaaccagattatagatttaaaagtatatgacatgtattttgtatttaaaactagaatagccagtatttatgttttttataaaactgtgcaatacgaattatgcaatcacaatacatttgtagctcccgagtgtcctaaagggagtgcacttctttgaagctggtgtgttaatactatgtaataaatggttaactttcaaatgatgctgctgccaaaattatattaatagtgagtttcaggcccctgggcattttgtaccatgtaattatcctctggtgatgctgtttctcgttagtggcagtagtgcctccgtctcctagtgataatgctccaagtctatgaactgttaaatcagcattcattttaagaaaagcaactttagtttcaaagatacttttaagcttctaaattgatcatttaaactatttctttaaataagagagccaaattagaggctcatactttagcttgtgaagaagataatgaattttttaaagggaactttctatgcaatgttcaggataaatgcatactgctggccaatcagtgtcatctcctgggtaaattttgatgtcgcattataaagacatgcataattgatggtttctagattatctagtccaaacaatagagtttattttttcttcatctgaaccaacatgctacagtagctaagaagtattaaaactatatacatccatataaagatgaaatatgaactatctcattagaagtcatagttgaccacagacatgttattcttctgaaagagccacattttggttttatttcttgtcacatgatttcttttcttgatggatgaaaaatatgaaaggaaacttttatatctgttgcctagttttgtacatggatctcattttacaagagaatctctctgcaaaaaaaaaaaaaacagtttaaaaatgcattgaaagcagagttctgaaatgagtaaagtttgtaaatgcatatataaaaatatttaataaatgatgcagaatatacagtgactggttggtggctttcatttggcatttgtgacttaactgctattccatttatgtactttctttaggatcagtttgaagtacagtcggtttgattac

SEQ ID NO: 1073 - DNA, 6092 bp, Homo sapiens
ggctgaggcggcgccggcggagccctgagcggctgtgacaggctacgcaacaggttcgcgggcggcggcctgacgaccaagccagctgcagtggcggcgacggcggcagagcagggtctccccgcgcctgcccgcgcccaggctgccggtgctgagggacgcggagtcgcgctgtgacgagcgggaggcgcggcgagggcgccagatggctgagagctagcaaggaaaactcaggaccatgatggctcagtttcccacagctatgaatggagggccaaacatgtgggctattacctctgaagaacgtactaagcatgacaggcagtttgataacctcaaaccttcaggaggttacataacaggtgatcaagcacgtaattttttcctacaatcaggtctgccggcccctgttttagctgaaatatgggctttatcagacctaaacaaggatgggaagatggatcagcaagagttctccatagctatgaaactcatcaaactgaagcttcaaggccaacagttgcctgtggttctccctcctattatgaagcaaccccctatgttttctccattaatttctgctcgttttggaatgggaagcatgcccaatctgtccattcctcagccattgcctccagctgcacctataacatcattgtcttctgcgacttcagggaccaaccttcctcccttaatgatgcccactcccctagtgccttctgttagcacatcatcattaccaaatggaaccgccagtctcattcagcctttacccattccttattcttcttcaacattgcctcatgggtcatcttatagtctgatgatgggaggatttggaggtgctagtatacagaaagcgcagtctctgattgatttaggatctagtagctcaacttcctcgactgcttcactctcagggaactcacccaagactgggacctcagagtgggcagttcctcagcctacaagattaaaatatcggcaaaaatttaatactcttgacaaaagtatgagtggatatctctcaggttttcaagctagaaatgcccttcttcagtcaaatctttctcaaactcagctggctactatttggactctggctgacgttgatggtgatggacagctaaaagcagaagagtttattcttgcaatgcaccttactgacatggccaaagctggacagccattaccactgactttacctcctgagcttgttcctccatctttcagaggaggaaagcaaattgattccattaatggaactctgccttcatatcagaaaatgcaagaagaggagcctcagaagaaattaccagttacttttgaggacaaacggaaagccaactatgagcgagggaacatggagctggaaaagcgacgccaagccttgatggagcagcaacaaagggaggcagaacgtaaagcccagaaagaaaaggaagagtgggaacgaaaacagagagaattacaagaacaagaatggaagaaacaacttgaattagaaaaacgcttagagaagcaacgggaattggagagacaacgagaggaagaaaggagaaaagacatagaaagacgagaggcagcaaaacaggaacttgaacgacaacgtcgcttagaatgggagagaattcggcgacaggagcttctcaatcaaaagaatagagaacaagaagaaattgtcaggttaaactctaaaaagaagaatcttcatcttgagttggaagcactgaatggcaaacatcagcagatctcaggcagacttcaggatgtccgactcaaaaagcaaactcaaaagactgagctggaagttctggataagcagtgtgacttggaaattatggaaatcaagcaacttcaacaggaacttcaggaatatcagaataagcttatctatctggtacctgagaagcaattattaaatgaaagaattaaaaacatgcagttcagtaacacacctgattcaggggtcagtttacttcataaaaaatcattagaaaaggaagaattatgccaaagacttaaagaacagttagatgctcttgaaaaagaaactgcatctaagctgtcagaaatggattcttttaacaatcaactaaagtgtgggaatatggatgactctgttcttcagtgccttttgtctctgctaagctgtctcaacaacctcttcctcttacttaaggaactgagagaaacctacaacacacagcagttagcccttgaacagctttataagatcaaacgtgacaagttgaaggaaattgaaaggaaaagattagaactaatgcagaaaaagaaactagaagatgaggctgcaaggaaagcaaagcaaggaaaagaaaacttatggaaagaaaatcttagaaaggaggaagaagaaaaacaaaagcgactccaggaagaaaaaacacaagaaaaaattcaagaagaggaacggaaagctgaggagaaacaacgtaaggataaggatactttgaaagctgaggagaaaaaacgtgagacagctagtgttttggtgaattatagagcattatacccctttgaagcaaggaaccatgatgagatgagttttaattctggagatataattcaggttgatgaaaaaaccgtaggagaacctggttggctttatggtagttttcaaggaaattttggctggtttccatgcaattatgtagaaaaaatgccatcaagtgaaaatgaaaaagctgtatctccaaagaaggccttacttcctcctacagtttctttatctgctacctcaacttcctctgaaccactttcttcaaatcaaccagcatcagtgactgattatcaaaatgtatctttttcaaacctaactgtaaatacatcatggcagaaaaaatcagccttcactcgaactgtgtcccctggatctgtatcacctattcatggacagggacaagtggtagaaaacttaaaagcacaggccctttgttcctggactgcaaagaaagataaccacttgaacttctcaaaacatgacattattactgtcttggagcagcaagaaaattggtggtttggggaggtgcatggaggaagaggatggtttcccaaatcttatgtcaagatcattcctgggagtgaagtaaaacgggaagaaccagaagctttgtatgcagctgtaaataagaaacctacctcggcagcctattcagttggagaagaatatattgcactttatccatattcaagtgtggaacctggagatttgactttcacagaaggtgaagaaatattggtgacccagaaagatggagagtggtggacaggaagtattggagatagaagtggaatttttccatcaaactatgtcaaaccaaaggatcaagagagttttgggagtgctagcaagtctggagcatcaaataaaaaacctgagattgctcaggtaacttcagcatatgttgcttctggttctgaacaacttagccttgcaccaggacagttaatattaattctaaagaaaaatacaagtgggtggtggcaaggagagttacaggccagaggaaaaaagcgacagaaaggatggtttcctgccagtcatgttaaacttttgggtccaagtagtgaaagagccacacctgcctttcatcctgtatgtcaggtgattgctatgtatgactatgcagcaaataatgaagatgagctcagtttctccaagggacaactcattaatgttatgaacaaagatgatcctgattggtggcaaggagagatcaacggggtgactggtctctttccttcaaactacgttaagatgacgacagactcagatccaagtcaacagtggtgtgctgatctgcaaaccctggacacaatgcagccaattgagaggaaaagacagggctatattcatgagctgattcagaccgaagagcggtacatggctgaccttcagctcgtcgtcgaggtttttcagaaacgcatggcagagtcaggctttctcactgaaggggagatggccctgatttttgttaactggaaggagctcatcatgtccaacacaaagctgctgaaggctttgcgggtgcggaagaagaccgggggcgagaagatgccggtgcagatgattggggacatcctggccgctgagctgtcccacatgcaggcttacatcaggttctgcagctgccagcttaatggagcagctctgttacagcagaagacagatgaagacacagatttcaaagaatttttaaagaagctggcatctgacccgcggtgtaaaggaatgcccctctccagcttcctgctgaaacccatgcagaggatcacccgctacccactgctcatcagaagtattctggagaacaccccggagagccatgcagaccattcctccctaaagctggccctcgagcgggcagaggagctgtgctctcaagtgaatgagggagttcgggagaaggaaaactcggaccgactggagtggatccaggcgcacgtgcagtgtgaaggcctcgcggagcaacttattttcaactctctcaccaactgcctggggccccggaagctcttacacagtgggaaattatacaagaccaagagcaacaaggaactgcacggattcctcttcaatgacttcctgcttcttacctacatggtcaagcagtttgctgtttcctctggctctgagaaacttttcagctcgaagtccaatgctcaattcaaaatgtataaaacgcccattttcctgaatgaagtcttggtgaaactgcccacagacccttccagcgatgagcctgtcttccacatttcccacattgatcgggtctacaccctccgaacagacaacattaatgagaggaccgcctgggtgcagaagatcaaggcggcgtctgagcagtacatcgacaccgagaagaagaagcgtgagaaagcttaccaagcccgctcccaaaagacttcaggcattgggcgcctgatggtgcatgtcattgaagctacagaattaaaagcctgcaaaccaaatggaaagagcaacccatactgtgaaatcagcatgggctcccagagctacaccaccaggaccatccaggacacactcaatcccaagtggaattttaactgccagttctttattaaggatctctaccaagacgtgctgtgtctcaccctgtttgacagagaccagttttcaccagatgatttcctgggtcgtactgaaattccagtggcaaaaattcgaacagaacaggaaagcaaaggccctatgacccgccgactgctgctgcatgaggtccccaccggggaggtctgggtccgttttgacctgcagctttttgagcaaaaaactctcctgtaggggttctaaaggacagcaccagcgggacagcccacaaggctggggctggagaatgagagactgcgctctcttggggctgagggagcaccatgcagcttcacccctcacaaagccatgcacgctgggggctctgttttcctgcacactaaatagctagcaatctatgcaaacacctttcccataaagaaaccaaaccccatagtacagtgccttgtcctagtgttcacatgttcagctctgtttgtttagatgccaaggtttccattttcagggctataaaaagtattacttggaaatgaggcatcagaccaccagatgttaccgctcggttgaatgtgtccaccgtggagtggtttggtgacgctgtaaccattccacgccagtgacctctgctgggtcacagccactcaggaggggaagggtcaggatgagaggctgcagcctcgacacttggcgcggcctgatactgaaatagcgtctactcgtgcactgaataaaaacagaaacttgatcattttattcctgattagattttatcactctctgctaagacaatatagtctggagtataagtgggaaagcttgatttaaatactgtgaactctaataatgtggaaaatatttttcaactttaattttctgaagtataaattatttatgtaaattcattgtttttgcatatttcttaggacatgcatctttaagctttatcattgcccatatgtacagaaagagaataaagacatatgtttatggatgg

SEQ ID NO: 1074 - DNA, 5053 bp, Homo sapiens
tgcagacagtgcgggcctgcgcccagtcccggctgtcctcgccgcgacccctcctcagccctgggcgcgcgcacgctggggccccgcggggctggccgcctagcgagcctgccggtcgaccccagccagcgcagcgacggggcgctgcctggcccaggcgcacacggaagtgcgcttctctgaagtagctttggaaagtagagaagaaaatccagtttgcttcttggagaacactggacagctgaataaatgcagtatctaaatataaaagaggactgcaatgccatggctttctgtgctaaaatgaggagctccaagaagactgaggtgaacctggaggcccctgagccaggggtggaagtgatcttctatctgtcggacagggagcccctccggctgggcagtggagagtacacagcagaggaactgtgcatcagggctgcacaggcatgccgtatctctcctctttgtcacaacctctttgccctgtatgacgagaacaccaagctctggtatgctccaaatcgcaccatcaccgttgatgacaagatgtccctccggctccactaccggatgaggttctatttcaccaattggcatggaaccaacgacaatgagcagtcagtgtggcgtcattctccaaagaagcagaaaaatggctacgagaaaaaaaagattccagatgcaacccctctccttgatgccagctcactggagtatctgtttgctcagggacagtatgatttggtgaaatgcctggctcctattcgagaccccaagaccgagcaggatggacatgatattgagaacgagtgtctagggatggctgtcctggccatctcacactatgccatgatgaagaagatgcagttgccagaactgcccaaggacatcagctacaagcgatatattccagaaacattgaataagtccatcagacagaggaaccttctcaccaggatgcggataaataatgttttcaaggatttcctaaaggaatttaacaacaagaccatttgtgacagcagcgtgtccacgcatgacctgaaggtgaaatacttggctaccttggaaactttgacaaaacattacggtgctgaaatatttgagacttccatgttactgatttcatcagaaaatgagatgaattggtttcattcgaatgacggtggaaacgttctctactacgaagtgatggtgactgggaatcttggaatccagtggaggcataaaccaaatgttgtttctgttgaaaaggaaaaaaataaactgaagcggaaaaaactggaaaataaacacaagaaggatgaggagaaaaacaagatccgggaagagtggaacaatttttcttacttccctgaaatcactcacattgtaataaaggagtctgtggtcagcattaacaagcaggacaacaagaaaatggaactgaagctctcttcccacgaggaggccttgtcctttgtgtccctggtagatggctacttccggctcacagcagatgcccatcattacctctgcaccgacgtggcccccccgttgatcgtccacaacatacagaatggctgtcatggtccaatctgtacagaatacgccatcaataaattgcggcaagaaggaagcgaggaggggatgtacgtgctgaggtggagctgcaccgactttgacaacatcctcatgaccgtcacctgctttgagaagtctgagcaggtgcagggtgcccagaagcagttcaagaactttcagatcgaggtgcagaagggccgctacagtctgcacggttcggaccgcagcttccccagcttgggagacctcatgagccacctcaagaagcagatcctgcgcacggataacatcagcttcatgctaaaacgctgctgccagcccaagccccgagaaatctccaacctgctggtggctactaagaaagcccaggagtggcagcccgtctaccccatgagccagctgagtttcgatcggatcctcaagaaggatctggtgcagggcgagcaccttgggagaggcacgagaacacacatctattctgggaccctgatggattacaaggatgacgaaggaacttctgaagagaagaagataaaagtgatcctcaaagtcttagaccccagccacagggatatttccctggccttcttcgaggcagccagcatgatgagacaggtctcccacaaacacatcgtgtacctctatggcgtctgtgtccgcgacgtggagaatatcatggtggaagagtttgtggaagggggtcctctggatctcttcatgcaccggaaaagcgatgtccttaccacaccatggaaattcaaagttgccaaacagctggccagtgccctgagctacttggaggataaagacctggtccatggaaatgtgtgtactaaaaacctcctcctggcccgtgagggcatcgacagtgagtgtggcccattcatcaagctcagtgaccccggcatccccattacggtgctgtctaggcaagaatgcattgaacgaatcccatggattgctcctgagtgtgttgaggactccaagaacctgagtgtggctgctgacaagtggagctttggaaccacgctctgggaaatctgctacaatggcgagatccccttgaaagacaagacgctgattgagaaagagagattctatgaaagccggtgcaggccagtgacaccatcatgtaaggagctggctgacctcatgacccgctgcatgaactatgaccccaatcagaggcctttcttccgagccatcatgagagacattaataagcttgaagagcagaatccagatattgtttcagaaaaaaaaccagcaactgaagtggaccccacacattttgaaaagcgcttcctaaagaggatccgtgacttgggagagggccactttgggaaggttgagctctgcaggtatgaccccgaaggggacaatacaggggagcaggtggctgttaaatctctgaagcctgagagtggaggtaaccacatagctgatctgaaaaaggaaatcgagatcttaaggaacctctatcatgagaacattgtgaagtacaaaggaatctgcacagaagacggaggaaatggtattaagctcatcatggaatttctgccttcgggaagccttaaggaatatcttccaaagaataagaacaaaataaacctcaaacagcagctaaaatatgccgttcagatttgtaaggggatggactatttgggttctcggcaatacgttcaccgggacttggcagcaagaaatgtccttgttgagagtgaacaccaagtgaaaattggagacttcggtttaaccaaagcaattgaaaccgataaggagtattacaccgtcaaggatgaccgggacagccctgtgttttggtatgctccagaatgtttaatgcaatctaaattttatattgcctctgacgtctggtcttttggagtcactctgcatgagctgctgacttactgtgattcagattctagtcccatggctttgttcctgaaaatgataggcccaacccatggccagatgacagtcacaagacttgtgaatacgttaaaagaaggaaaacgcctgccgtgcccacctaactgtccagatgaggtttatcaacttatgaggaaatgctgggaattccaaccatccaatcggacaagctttcagaaccttattgaaggatttgaagcacttttaaaataagaagcatgaataacatttaaattccacagattatcaagtccttctcctgcaacaaatgcccaagtcattttttaaaaatttctaatgaaagaagtttgtgttctgtccaaaaagtcactgaactcatacttcagtacatatacatgtataaggcacactgtagtgcttaatatgtgtaaggacttcctctttaaatttggtaccagtaacttagtgacacataatgacaaccaaaatatttgaaagcacttaagcactcctccttgtggaaagaatataccaccatttcatctggctagttcaccatcacaactgcattaccaaaaggggatttttgaaaacgaggagttgaccaaaataatatctgaagatgattgcttttccctgctgccagctgatctgaaatgttttgctggcacattaatcatagataaagaaagattgatggacttagccctcaaatttcagtatctatacagtactagaccatgcattcttaaaatattagataccaggtagtatatattgtttctgtacaaaaatgactgtattctctcaccagtaggacttaaactttgtttctccagtggcttagctcctgttcctttgggtgatcactagcacccatttttgagaaagctggttctacatggggggatagctgtggaatagataatttgctgcatgttaattctcaagaactaagcctgtgccagtgctttcctaagcagtatacctttaatcagaactcattcccagaacctggatgctattacacatgcttttaagaaacgtcaatgtatatccttttataactctaccactttggggcaagctattccagcactggttttgaatgctgtatgcaaccagtctgaataccacatacgctgcactgttcttagagggtttccatacttaccaccgatctacaagggttgatccctgtttttaccatcaatcatcaccctgtggtgcaacacttgaaagacccggctagaggcactatggacttcaggatccactagacagttttcagtttgcttggaggtagctgggtaatcaaaaatgtttagtcattgattcaatgtgaacgattacggtctttatgaccaagagtctgaaaatctttttgttatgctgtttagtattcgtttgatattgttacttttcacctgttgagcccaaattcaggattggttcagtggcagcaatgaagttgccatttaaatttgttcatagcctacatcaccaaggtctctgtgtcaaacctgtggccactctatatgcactttgtttactctttatacaaataaatatactaaagactttacatgca

SEQ ID NO: 1075 - DNA, 5756 bp, Homo sapiens
gttttactaaagtgaatttttttttgtttgcttcgttcgtctttggctctttttttttccttcccaatttcggatttatttcaaggcgaatctggctttgggggaagaggaagaaaagtcggattacaagatcaaccaccaccaacaacaataaaaaccaccaggatatttttttgcaaatttctgacggctttaaattcatgaagcaattgtccccttttgcaatcagcatttggatctcagaatgagcaaggaaagacccaagaggaatatcattcagaagaaatacgatgacagtgatgggattccgtggtcagaagaacgggtggtacgtaaagtcctttatttgtctctgaaggagttcaagaattcccagaagaggcagcatgcggaaggcattgctgggagcctgaaaactgtgaatgggctccttggtaatgaccagtctaagggattaggaccagcatcagaacagtcagagaatgaaaaggacgatgcatcccaagtgtcctccactagcaacgatgttagttcttcagattttgaagaagggccgtcgaggaaaaggcccaggctgcaagcacaaaggaagtttgctcagtctcagccgaatagtcccagcacaactccagtaaagatagtggagccattgctaccccctccagctactcagatatcagacctctctaaaaggaagcctaagacagaagattttcttacctttctctgccttcgaggttctcctgcgctgcccaacagcatggtgtattttggaagctctcaggatgaggaggaagtcgaggaggaagatgatgagacagaagacgtcaaaacagccaccaacaatgcttcatcttcatgccagtcgacccccaggaaaggaaaaacccacaaacatgttcacaacgggcatgttttcaatggttccagcaggtcaacacgggagaaggaacctgttcaaaaacacaaaagcaaagaggccactcccgcaaaggagaagcacagcgatcaccgggctgacagccgccgggagcaggcttcagctaaccaccccgcagcggccccctccacgggttcctcggccaaggggcttgctgccacccatcaccacccccctctgcatcggtcggctcaggacttacggaaacaggtttctaaggtaaacggagtcactcgaatgtcatctctgggtgcaggtgtaaccagtgccaaaaagatgcgcgaggtcagaccttcaccatccaaaactgtgaagtacactgccacggtgacgaagggggctgtcacatacaccaaagccaagagagaactggtcaaggacaccaaacccaatcaccacaagcccagttccgctgtcaaccacacaatctcagggaaaactgaaagtagcaatgcaaaaacccgcaaacaggtgctatccctcgggggggcgtccaagtccactgggcccgccgtcaatggcctcaaggtcagtggcaggttgaacccaaagtcatgcactaaggaggtgggggggcggcagctgcgggagggcctgcagctgcgggaggggctgcggaactccaagaggagactggaagaggcacaccaggcggagaagccgcagtcgccccccaagaagatgaaaggggcggctggccccgccgaaggccctggcaagaaggccccggccgagagaggtctgctgaacggacacgtgaagaaggaagtgccggagcgcagtctggagaggaatcggccgaagcgggccacggccgggaagagcacgccaggcagacaagcacatggcaaggcggacagcgcctcctgtgaaaatcgttctacctcgcaaccggagtccgtgcacaagccgcaggactcgggcaaggccgagaagggcggcggcaaggccgggtgggcggccatggacgagatccccgtcctcaggccctccgccaaggagttccacgatccgctcatctacatcgagtcggtccgcgctcaggtggagaagttcgggatgtgcagggtgatcccccctccggactggcggcccgagtgcaagctcaacgatgagatgcggtttgtcacgcagattcagcacatccacaagctgggccggcgctggggccccaacgtgcagcggctggcctgcatcaagaagcacctcaaatctcagggcatcaccatggacgagctcccgctcatagggggctgtgagctcgacctggcctgctttttccggctgattaatgagatgggcggcatgcagcaagtgactgacctcaaaaaatggaacaaactagcagacatgctgcgcatccccagaactgcccaggaccggctggccaagctgcaggaggcctactgccagtacctactctcctacgactccctgtccccagaggagcaccggcggctggagaaggaggtgctgatggagaaggagatcctggagaagcgcaaggggccgctggaaggccacacagagaacgaccaccacaagttccaccctctgccccgcttcgagcccaagaatgggctcatccacggcgtggcccccaggaacggcttccgcagcaagctcaaggaggtgggccaggcccagttgaagactggccggcggcgactcttcgctcaggaaaaagaagtggtcaaggaagaggaggaggacaaaggcgtcctcaatgacttccacaagtgcatctataagggaaggtctgtttctctaacaactttttatcgaacagcgaggaatatcatgagcatgtgtttcagcaaggagcctgccccagccgaaatcgagcaagagtactggaggctagtggaagagaaggactgccacgtggcagtgcactgcggcaaggtggacaccaacactcacggcagtggattcccagtaggaaaatcagaacccttttcgaggcatggatggaacctcaccgtcctccccaataacacagggtccatcctgcgtcacctcggtgctgtgcctggagtgactattccctggctaaatattggcatggtcttttctacctcatgctggtctcgagaccaaaatcaccttccatacattgactacttacacactggtgctgactgcatttggtattgcattcctgctgaggaggagaacaagctggaagatgtggtccacaccctgctgcaagccaatggcaccccagggctgcagatgctggaaagcaacgtcatgatctccccggaggtgctgtgcaaagaggggatcaaggtgcacaggaccgtgcagcagagtggccagtttgtcgtctgcttcccgggatcctttgtgtccaaagtgtgctgtgggtacagcgtgtctgaaaccgtgcactttgctaccacccagtggacaagtatgggctttgagaccgccaaggaaatgaagcgtcgccatatagctaagccattctccatggagaagttactctaccagattgcacaagcagaagcaaaaaaagaaaacggtcccactctcagtaccatctcagccctcctggatgagctcagggatacagagctgcggcagcgcaggcagctgttcgaggctggcctccactcctccgcacgctatggcagccacgatggcagcagcacggtggcggacgggaagaaaaagcctcgaaagtggctgcagttggagacgtcagagaggaggtgtcagatctgccagcacctgtgctacctgtccatggtggtacaagagaacgaaaacgtcgtgttctgtctggagtgtgctctgcgccacgtggagaaacagaagtcctgccgagggctgaagttgatgtaccgctacgatgaggaacagattatcagtctggtcaatcagatctgcggcaaagtgtctggtaaaaacggcagcattgagaactgtctcagtaaacccacaccaaaaagaggtccccgcaagagagcgacagtggacgtgcccccctcccgtctgtcagcctccagttcatccaaaagtgcttcgagctcatcatgaagatgccaacgcccgtggtcgatttatatatatttttttgtaattattatattctagtttggagtacttgctgtaggattcaagctgtctttgcactagctctaaagaagattttcttctggttttagagaactaattttgttttagcattaaactgttgaacttttttttgtacttagaaaacctagatactgcagtcagattttggaaactgccgtatagtcactgttttaaaaaccccggaggggctgtattaatttgtattgccccatggctgacaaaagcctttttttttggttttgatttttttttttttgtaactgttggggggaaaaaggctttttaacccatttttgaagagggtgaagtttggagaacaaatttaaaaaccatcagtcatgtgagcagattttttagaagggataggagacacacgcgcacacacacacacacacgaaacttgaaatggctttgctttggctgtcgtcttctgccgtgtgccagatgagcttgtgatctgggaagccggggcacccccgttttgtttctctgggcggttgtggcagctgaaggcggacgttgtttcctaaccataggtggaacgaggagacgggagcgagtgggctctccaccagcacatcactatgcatctgttccaggaaagaagaaaagcgagcgaggaagacggaaaagactgcctgccttggaggggtcacatgagggagacctgtgcctgatttcattaggaaatccattctgttattttttggtgctgttggctactttatcaaaaaacccttcaatagcatccttaagatttaaaaaaaaaaaaaaaaaaaaggaaaaaaaagtgatggaagccgtaagtgcttctttgtcatcgacgtgcaatctttctaacattccatctccatctcaccgcttcttgtttgacaccttcacaagtcagcattaatctttcttttaaaacttgtttcatttatgatcatgtagagagccactaggaggcctgcagttatttttgaatgtgaaaatgcatttgcgttcatcttgtctattttttctcttcatgttgtaacaaaaaggaaaaaagaaaaaaaaatcccatcccttttgtacatatgcctgtaaattgttttaaatacttgagcctttttctcggtggggggtggggaggggggtgagaagacaagatgaagaaaagccttacatttcagtttcttcatcggttggattggatgcttacagggtttttcttgtaacatttataagtgctgcttacatcactgaacaacaacaaaaaaataataatggagtagctgttgcccttctccggttgtgtgtacagtatgtgtggaataaaaaagggaaactgttttcacaagctgttctttgtttcataattggattcatcaatcccgtagctacccatattgcactgagcttgccagtggtgactgccaggaacgtcctatgatccactttgttggttgttgttgcagaagactgaactgttttggaatatttaacaattacagaaacagtcaagtgttttccaatgtggttgtccggtttctatggccttgctgtgtactttccctctttttgacagtaaacttctgcctatggcttacagtttgacatttaatttattagcgctgctctgcacccctcccttgggagggagacttcatgtggtttattgcgagttttttgtttacttttcaggtttgtactacaaggtttaataataaaaacaaagttttttgga

SEQ ID NO: 1076 - DNA, 1813 bp, Homo sapiens
tgcaggagggctatgtgtcctggaccatgaagaaggatgacttctgactgctcctccacacactgctctcctgagtcctgtggcacggcttccggttgtgcacctgcctcaagctgctccgtggaaacagcttgtctccccggtacctgtgctacatcccgatgtcagactccaagcttcctatccaggtctcgcgggctgactggttgcctcctgccatgctactttactgggagttgtaatagtccctgcttggtggggaactgtgcctggtgtgaggatggggtgttcactagcaatgagaaggagacgatgcagttcctgaatgacagactcgccagctatctggagaaggtgcgcagcctggaggagaccaacgcagagctggaatccaggatccaagaacaatgtgaacaggatatcccaatggtgtgcccggattatcagcgttacttcaacaccattgaagatctccaacaaaagatcttatgcacgaaagcagagaattctagacttgctgtacagcttgacaactgcaaactggccactgatgactttaagtcaaagtacgagagtgaactgtcccttcgccagctgttagaggctgacatcagcagcctgcatgggatcctggaggaactgaccctgtgcaaatctgatctggaggcccatgtggagtctctgaaggaagatctcctttgccttaagaaaaaccatgaagaggaagtcaacttgcttcgtgaacagcttggcgaccgcctcagtgtggagctggacactgcccccacccttgacctcaacagggtcctggatgagatgcgctgtcagtgtgaaacggtgcttgccaacaatcgcagagaagctgaagaatggttggctgttcagacagaagagctgaatcagcagcaactgtccagcgcggagcagctgcagggctgccagatggagatcttggaactgaaacgcacagccagtgctctggaaattgagctccaagcacagcaaagcctgacagaatctctggaatgcaccgtggcagaaaccgaggcccagtacagctcccagctggcccaaattcagtgtctgatcgataacctggagaaccagctggccgagatccgctgcgacctggagcgacagaaccaggagtaccaggtgctcctggacgtgaaggcccggctggagggtgagatcaacacgtactggggcctgctggacagcgaggacagcaggctttcctgtagcccatgttcgaccacatgcacctcgagcaacacttgtgagccatgctcagcctatgtcatctgcactgttgaaaactgctgcttgtgaatgttaaggacagcaggtagaggaatcaaagccagcagcatcctagaaaggagatggggcttcaaccagggacatccaaaccggaagcacaaatccaggaggctctcatatcctggaattgccctccaggtatcctcagtctttctgctttactatttcctctccttccggcttatttgtggtatactggaagcccataaagcattcttgctcatctccaaataaaacgtgttttattcctttagcgtggtaaatatagctctatggctgattactgttgatagaatattcattttatggcaaggaaatcatctaaacccataaccatagtttcaatgtacataaacccaggctgaaaatattttttaactcctcaaatacaaataaattaatgaacccatgagaaatgtcatatatcttagaaaatagttgtgtgtatctttctgaggaaaaatattaggaataaaatatgataaaatgt

SEQ ID NO: 1077 - DNA, 1782 bp, Homo sapiens
gaaggatgacttctgactgctcctccacacactgctctcctgagtcctgtggcacggcttccggttgtgcacctgcctcaagctgctccgtggaaacagcttgtctccccggtacctgtgctacatcccgatgtcagactccaagcttcctatccaggtctcgcgggctgactggttgcctcctgccatgctactttactgggagttgtaatagtccctgcttggtggggaactgtgcctggtgtgaggatggggtgttcactagcaatgagaaggagacgatgcagttcctgaatgacagactcgccagctatctggagaaggtgcgcagcctggaggagaccaacgcagagctggaatccaggatccaagaacaatgtgaacaggatatcccaatggtgtgcccggattatcagcgttacttcaacaccattgaagatctccaacaaaagatcttatgcacgaaagcagagaattctagacttgctgtacagcttgacaactgcaaactggccactgatgactttaagtcaaagtacgagagtgaactgtcccttcgccagctgttagaggctgacatcagcagcctgcatgggatcctggaggaactgaccctgtgcaaatctgatctggaggcccatgtggagtctctgaaggaagatctcctttgccttaagaaaaaccatgaagaggaagtcaacttgcttcgtgaacagcttggcgaccgcctcagtgtggagctggacactgcccccacccttgacctcaacagggtcctggatgagatgcgctgtcagtgtgaaacggtgcttgccaacaatcgcagagaagctgaagaatggttggctgttcagacagaagagctgaatcagcagcaactgtccagcgcggagcagctgcagggctgccagatggagatcttggaactgaaacgcacagccagtgctctggaaattgagctccaagcacagcaaagcctgacagaatctctggaatgcaccgtggcagaaaccgaggcccagtacagctcccagctggcccaaattcagtgtctgatcgataacctggagaaccagctggccgagatccgctgcgacctggagcgacagaaccaggagtaccaggtgctcctggacgtgaaggcccggctggagggtgagatcaacacgtactggggcctgctggacagcgaggacagcaggctttcctgtagcccatgttcgaccacatgcacctcgagcaacacttgtgagccatgctcagcctatgtcatctgcactgttgaaaactgctgcttgtgaatgttaaggacagcaggtagaggaatcaaagccagcagcatcctagaaaggagatggggcttcaaccagggacatccaaaccggaagcacaaatccaggaggctctcatatcctggaattgccctccaggtatcctcagtctttctgctttactatttcctctccttccggcttatttgtggtatactggaagcccataaagcattcttgctcatctccaaataaaacgtgttttattcctttagcgtggtaaatatagctctatggctgattactgttgatagaatattcattttatggcaaggaaatcatctaaacccataaccatagtttcaatgtacataaacccaggctgaaaatattttttaactcctcaaatacaaataaattaatgaacccatgagaaatgtcatatatcttagaaaatagttgtgtgtatctttctgaggaaaaatattaggaataaaatatgataaaatgt

SEQ ID NO: 1078 - DNA, 1771 bp, Homo sapiens
ggcggccaggccgggcgcggagtgggcgcgcggggccggaggaggggccagcgaccgcggcaccgcctgtgcccgcccgcccctccgcagccgctacttaagaggctccagcgccggccccgccctagtgcgttacttacctcgactcttagcttgtcggggacggtaaccgggacccggtgtctgctcctgtcgccttcgcctcctaatccctagccactatgcgtgagtgcatctccatccacgttggccaggctggtgtccagattggcaatgcctgctgggagctctactgcctggaacacggcatccagcccgatggccagatgccaagtgacaagaccattgggggaggagatgactccttcaacaccttcttcagtgagacgggcgctggcaagcacgtgccccgggctgtgtttgtagacttggaacccacagtcattgatgaagttcgcactggcacctaccgccagctcttccaccctgagcagctcatcacaggcaaggaagatgctgccaataactatgcccgagggcactacaccattggcaaggagatcattgaccttgtgttggaccgaattcgcaagctggctgaccagtgcaccggtcttcagggcttcttggttttccacagctttggtgggggaactggttctgggttcacctccctgctcatggaacgtctctcagttgattatggcaagaagtccaagctggagttctccatttacccagcaccccaggtttccacagctgtagttgagccctacaactccatcctcaccacccacaccaccctggagcactctgattgtgccttcatggtagacaatgaggccatctatgacatctgtcgtagaaacctcgatatcgagcgcccaacctacactaaccttaaccgccttattagccagattgtgtcctccatcactgcttccctgagatttgatggagccctgaatgttgacctgacagaattccagaccaacctggtgccctacccccgcatccacttccctctggccacatatgcccctgtcatctctgctgagaaagcctaccatgaacagctttctgtagcagagatcaccaatgcttgctttgagccagccaaccagatggtgaaatgtgaccctcgccatggtaaatacatggcttgctgcctgttgtaccgtggtgacgtggttcccaaagatgtcaatgctgccattgccaccatcaaaaccaagcgcagcatccagtttgtggattggtgccccactggcttcaaggttggcatcaactaccagcctcccactgtggtgcctggtggagacctggccaaggtacagagagctgtgtgcatgctgagcaacaccacagccattgctgaggcctgggctcgcctggaccacaagtttgacctgatgtatgccaagcgtgcctttgttcactggtacgtgggtgaggggatggaggaaggcgagttttcagaggcccgtgaagatatggctgcccttgagaaggattatgaggaggttggtgtggattctgttgaaggagagggtgaggaagaaggagaggaatactaattatccattccttttggccctgcagcatgtcatgctcccagaatttcagcttcagcttaactgacagacgttaaagctttctggttagattgttttcacttggtgatcatgtcttttccatgtgtacctgtaatatttttccatcatatctcaaagtaaagtcattaacatcaaaaaaaaaaaaaaaaaaaaaa

SEQ ID NO: 1079 - DNA, 1896 bp, Homo sapiens
agtaactgactacttttctcccttctctagggtcctagcacagtgtctgatggagctttcctaccagaccctgaaattcacgcatcaggcgcgggaagcggtatatcgatacagcaaatgctttggagcaagaaactaaactggggttacgacggtttgaagtttgtgacaacattgatcttgaaactattttgatggaatatgagagttattattttgtaaaatttcagaaataccccaaaattgtcaaaaagtcatcagacacagcagaaaataatttaccgcaaagaagtagagggaagaccagaaggatgatgaacgacagttgtcaaaatcttcccaagatcaatcagcagaggccccggtccaaaaccacagcggggaagacaggggacaccaaatcgctcaataaggagcatcctaatcaggaggtagttgataacactcgcctggaaaatgccaacttcggcctacatatatcaagaatccgtaaagacagtggagaggaaaatgcccacccacgaagaggccaaatcattgacttccaagggctgctcacagatgccatcaagggagcaaccagtgaacttgccttgaacaccttcgaccataatccagacccctcagaacgactgctgaaacctctgagtgcatttattggcatgaacagtgagatgcgagaattggcagccgtggtgagccgggacatttatctccataatccaaacataaagtggaatgacattattggacttgatgcagccaagcagttagtcaaagaagctgttgtgtatcctataaggtatccacagctatttacaggaattctttctccctggaaaggactactgctgtacggccctccaggtacaggaaagactttactggccaaagctgtggccactgaatgtaaaacaaccttctttaacatttctgcatccaccattgtcagcaaatggagaggggattcagaaaaactcgttcgggtgttatttgagcttgcccgctaccacgccccatccacgatcttcctggacgagctggagtcggtgatgagtcagagaggcacagcttctgggggagaacatgaaggaagcctgcggatgaagacagagttactggtgcagatggatgggctggcacgctcagaagatctcgtatttgtcttagcagcttctaacctgccgtgggagctggactgtgccatgttacgccgcctggagaagaggattctggtcgatctccccagccgggaggccaggcaggccatgatctaccactggctgcctcctgtgagcaagagcagggccttggagctgcacacagagctggagtacagtgtgctgagccaggagactgagggctactcaggctcagatattaagctcgtctgcagggaagcagccatgcggcccgtgaggaagatctttgatgcacttgaaaatcaccagtcagaaagcagcgacttacccaggatccagttggatatagtaaccactgccgactttctggatgtgctaactcacaccaagccctccgcaaagaatctggctcagagatactcagactggcaaagagagttcgagtctgtctgaaaccacatttaccctgacctggccacaaaggcaaccacaaagacctcctagtttattaatgtccgtgggagaacaaaatgattggaatggaaaagagaaaattatttttgaagactggattaacttgagccactgtattgttttggatagctgagatatatttattaacttaccattatcgatgtcagcaaaatattgagagtttcagttacatacatatatgtgctattgggtcatacaatggagatttttctgacaattagactccataaaattttaatgaacaaaaaaaaaaaaaaaa

SEQ ID NO: 1080 - DNA, 3171 bp, Homo sapiens
gctgcaccaacttcctgttgggtgctgtggtcccaaggcgcgtgctttgcagcagatgtgtgacctggcgttcccctgagtgctcggaaaatggccttgtctccggtcgttcccgttcaggagcagaattttcccactgtaaaaaaccgagcaagtctggataagtgaggctggctccatgtatccagaatcaacgacgggctccccggctcggctctcgctgcggcagacgggctcccccgggatgatctacagtactcggtatgggagtcccaaaagacagctccagttttacaggaacctgggcaagtctggcctgcgggtctcctgcctgggacttggaacatgggtgaccttcggaggccagatcaccgatgagatggcagagcagctcatgaccttggcctatgataatggcatcaacctcttcgatacagcagaagtctacgcagccggcaaggctgaagtggtactgggaaacatcattaagaagaaaggatggaggcggtccagcctcgtcatcaccaccaagatcttctggggcggaaaggcggagacggagcggggcctgtccaggaagcacataatcgaaggtctgaaagcttccctggagcgactgcagctggagtacgtggatgtggtgtttgccaaccgcccggaccccaacaccccgatggaagagaccgtccgcgccatgacccacgtcatcaaccaggggatggccatgtactggggcacgtcacgctggagctccatggagatcatggaggcctactccgtggcccggcagttcaacctgaccccgcccatctgcgagcaggctgagtaccacatgttccagcgtgagaaagtggaggtgcagctgccggagctgttccacaagataggagtgggcgccatgacctggtcccctctggcctgtggcattgtttctggcaagtacgacagtggcatcccaccctactcaagagcctccttgaagggctaccagtggctgaaggacaagatcctcagtgaggagggccggcgccagcaagccaagctgaaggagctgcaggccatcgccgagcgcctgggctgcaccctgccccagctggccatagcctggtgcctgaggaatgagggagtcagctccgtgctcctgggggcctccaatgcggaccagctcatggagaacattggggcaatacaggtccttccgaaactgtcatcttccattatccacgagattgatagtattttgggcaataaaccctacagcaaaaaggactacagatcctaagccgcccccgcccgcctgctcggacagtttccgttccctcctagtctctgttcgctcgcttaagctgttttgaagccaagtgaagagtgtggtttgcatccaagagaaaacaccacactgtgatgtcatcgggaaatgatctcccaagtcgctgccagacaccacccactgcttcgccggacaatgtcgaagtccagtctgtgccggggaaggcactggttaggaaggatgttcaaacggtcccacccaagcctgtcacctctgctcatcctccaagaccacccagctttctcccagccacagccaagattcccaaagtcaaggcccaaagatttccaaggttcccaaagtcaaggccaggccaaggcctggttgggtccttggggcgggcagggccagcctctcctctgctgagaatccccacttggtgtagggggagaggggaaaggggtctggcccatcgaggggccccttctgccagggccttggttgctggggcagggcctccccactgggggtcttcctccacctcccactttccaagggctccaggaatctggggcctgaccacagattcctctcccatccttttctgctccaacctgccccactgggtcccggcaggggccatgcctaccaagctcgagctggcccttgacccccacccacccccacccttgctggcaggggcagggaccccagggggattgactctgcagtttgggagccacaaaaagcgtagcggtgtgatttctagctcagcctcccaccgtcttcctcctacacaccaatgatgagcctcatgccagtgaggcccggagcgcttgggaggggtcccagtggggcaggcccctctgtctggccacccctctgtcctggccccggaaggccctgtggtcatgtgctcctagctgcacggtggctgctggccacaccacggcaagtggcagcaggggccggccctgtgcacaaggatgcactcctctcggcccctgtagactttctctaaagccgcccgccagcccaggccgctgctctgcaccgagctggtgggcttgggttttgtggagcgcatgcttggaccctttcagtaaggaagggtctttggggttttctgtgcccatgacttgggggctgcacccccacagcacccccacaatgtaggaaaagacctcagggaacctctccctggaaagacgggcagggctggttagcccctcccactgcctgacacctgggacaggctgggcagaggggagagagggcaggacaggccagagtgacgcccccgtgcagcttgggccggagggcaagggatgccagtaagtctgcaggtgcggggtgccacctacaggcccaggcctgtgtcccaagcagtacccaggctttgcagaccacgcggggcagggctccactgaagccacccccacccctcgccagctagctccatagggaagcctgtgtctcctgcccccagggcgcaccctcagtgcaggcacctctgttcccgctttgcccctggaggagccactattccagaaggctccaccctgccgtcctgcgggagcctgctgtccagtcctggccgggccaaggcctgggaaactgtgaaagtcagaaaggccagcggggagaggctggggcgaggggaggagggggatcagcttctgctattaccgaccccccttcatgctgcccctggcgcctagaacccttgcccctcctcatagaccaagtcccgggggtctccactcagtcctgctgcctgcttcaccagaagcagccctgtgagtgtggggtggggaagtcccttcccaacggaggtcccagcctatggccctgggcccaggtgggggtcgcctgcttccttcccggacagggtcctgcag

SEQ ID NO: 1081 - DNA, 3129 bp, Homo sapiens
gctgcaccaacttcctgttgggtgctgtggtcccaaggcgcgtgctttgcagcagatgtgtgacctggcgttcccctgagtgctcggaaaatggccttgtctccggtcgttcccgttcaggagcagaattttcccactgtaaaaaaccgagcaagtctggataagtgaggctggctccatgtatccagaatcaacgacgggctccccggctcggctctcgctgcggcagacgggctcccccgggatgatctacaggaacctgggcaagtctggcctgcgggtctcctgcctgggacttggaacatgggtgaccttcggaggccagatcaccgatgagatggcagagcagctcatgaccttggcctatgataatggcatcaacctcttcgatacagcagaagtctacgcagccggcaaggctgaagtggtactgggaaacatcattaagaagaaaggatggaggcggtccagcctcgtcatcaccaccaagatcttctggggcggaaaggcggagacggagcggggcctgtccaggaagcacataatcgaaggtctgaaagcttccctggagcgactgcagctggagtacgtggatgtggtgtttgccaaccgcccggaccccaacaccccgatggaagagaccgtccgcgccatgacccacgtcatcaaccaggggatggccatgtactggggcacgtcacgctggagctccatggagatcatggaggcctactccgtggcccggcagttcaacctgaccccgcccatctgcgagcaggctgagtaccacatgttccagcgtgagaaagtggaggtgcagctgccggagctgttccacaagataggagtgggcgccatgacctggtcccctctggcctgtggcattgtttctggcaagtacgacagtggcatcccaccctactcaagagcctccttgaagggctaccagtggctgaaggacaagatcctcagtgaggagggccggcgccagcaagccaagctgaaggagctgcaggccatcgccgagcgcctgggctgcaccctgccccagctggccatagcctggtgcctgaggaatgagggagtcagctccgtgctcctgggggcctccaatgcggaccagctcatggagaacattggggcaatacaggtccttccgaaactgtcatcttccattatccacgagattgatagtattttgggcaataaaccctacagcaaaaaggactacagatcctaagccgcccccgcccgcctgctcggacagtttccgttccctcctagtctctgttcgctcgcttaagctgttttgaagccaagtgaagagtgtggtttgcatccaagagaaaacaccacactgtgatgtcatcgggaaatgatctcccaagtcgctgccagacaccacccactgcttcgccggacaatgtcgaagtccagtctgtgccggggaaggcactggttaggaaggatgttcaaacggtcccacccaagcctgtcacctctgctcatcctccaagaccacccagctttctcccagccacagccaagattcccaaagtcaaggcccaaagatttccaaggttcccaaagtcaaggccaggccaaggcctggttgggtccttggggcgggcagggccagcctctcctctgctgagaatccccacttggtgtagggggagaggggaaaggggtctggcccatcgaggggccccttctgccagggccttggttgctggggcagggcctccccactgggggtcttcctccacctcccactttccaagggctccaggaatctggggcctgaccacagattcctctcccatccttttctgctccaacctgccccactgggtcccggcaggggccatgcctaccaagctcgagctggcccttgacccccacccacccccacccttgctggcaggggcagggaccccagggggattgactctgcagtttgggagccacaaaaagcgtagcggtgtgatttctagctcagcctcccaccgtcttcctcctacacaccaatgatgagcctcatgccagtgaggcccggagcgcttgggaggggtcccagtggggcaggcccctctgtctggccacccctctgtcctggccccggaaggccctgtggtcatgtgctcctagctgcacggtggctgctggccacaccacggcaagtggcagcaggggccggccctgtgcacaaggatgcactcctctcggcccctgtagactttctctaaagccgcccgccagcccaggccgctgctctgcaccgagctggtgggcttgggttttgtggagcgcatgcttggaccctttcagtaaggaagggtctttggggttttctgtgcccatgacttgggggctgcacccccacagcacccccacaatgtaggaaaagacctcagggaacctctccctggaaagacgggcagggctggttagcccctcccactgcctgacacctgggacaggctgggcagaggggagagagggcaggacaggccagagtgacgcccccgtgcagcttgggccggagggcaagggatgccagtaagtctgcaggtgcggggtgccacctacaggcccaggcctgtgtcccaagcagtacccaggctttgcagaccacgcggggcagggctccactgaagccacccccacccctcgccagctagctccatagggaagcctgtgtctcctgcccccagggcgcaccctcagtgcaggcacctctgttcccgctttgcccctggaggagccactattccagaaggctccaccctgccgtcctgcgggagcctgctgtccagtcctggccgggccaaggcctgggaaactgtgaaagtcagaaaggccagcggggagaggctggggcgaggggaggagggggatcagcttctgctattaccgaccccccttcatgctgcccctggcgcctagaacccttgcccctcctcatagaccaagtcccgggggtctccactcagtcctgctgcctgcttcaccagaagcagccctgtgagtgtggggtggggaagtcccttcccaacggaggtcccagcctatggccctgggcccaggtgggggtcgcctgcttccttcccggacagggtcctgcag

SEQ ID NO: 1082 - DNA, 3262 bp, Homo sapiens
gcggcggggctggcagcagtggctgcccgcactgcgcccgggcgctcgccttcgctgcagctcccggtgccgccgctcgggccggccccccggcaggccctcctcgttatggccgcggcctcctccccgcccagggccgagaggaagcgctggggttggggccgcctgccaggcgcccggcggggcagcgcgggcctggccaagaagtgccccttctcgctggagctggcggagggcggcccggcgggcggcgcgctctacgcgcccatcgcgcccggcgccccaggtcccgcgccccctgcgtccccggccgcgcccgccgcgcccccagttgcctccgaccttggcccgcggccgccggtgagcctagacccgcgcgtctccatctacagcacgcgccgcccggtgttggcgcgcacccacgtccagggccgcgtctacaacttcctcgagcgtcccaccggctggaaatgcttcgtttaccacttcgccgtcttcctcatcgtcctggtctgcctcatcttcagcgtgctgtccaccatcgagcagtatgccgccctggccacggggactctcttctggatggagatcgtgctggtggtgttcttcgggacggagtacgtggtccgcctctggtccgccggctgccgcagcaagtacgtgggcctctgggggcggctgcgctttgcccggaagcccatttccatcatcgacctcatcgtggtcgtggcctccatggtggtcctctgcgtgggctccaaggggcaggtgtttgccacgtcggccatcaggggcatccgcttcctgcagatcctgaggatgctacacgtcgaccgccagggaggcacctggaggctcctgggctccgtggtcttcatccaccgccaggagctgataaccaccctgtacatcggcttcctgggcctcatcttctcctcgtactttgtgtacctggctgagaaggacgcggtgaacgagtcaggccgcgtggagttcggcagctacgcagatgcgctgtggtggggggtggtcacagtcaccaccatcggctatggggacaaggtgccccagacgtgggtcgggaagaccatcgcctcctgcttctctgtctttgccatctccttctttgcgctcccagcggggattcttggctcggggtttgccctgaaggtgcagcagaagcagaggcagaagcacttcaaccggcagatcccggcggcagcctcactcattcagaccgcatggaggtgctatgctgccgagaaccccgactcctccacctggaagatctacatccggaaggccccccggagccacactctgctgtcacccagccccaaacccaagaagtctgtggtggtaaagaaaaaaaagttcaagctggacaaagacaatggggtgactcctggagagaagatgctcacagtcccccatatcacgtgcgaccccccagaagagcggcggctggaccacttctctgtcgacggctatgacagttctgtaaggaagagcccaacactgctggaagtgagcatgccccatttcatgagaaccaacagcttcgccgaggacctggacctggaaggggagactctgctgacacccatcacccacatctcacagctgcgggaacaccatcgggccaccattaaggtcattcgacgcatgcagtactttgtggccaagaagaaattccagcaagcgcggaagccttacgatgtgcgggacgtcattgagcagtactcgcagggccacctcaacctcatggtgcgcatcaaggagctgcagaggaggctggaccagtccattgggaagccctcactgttcatctccgtctcagaaaagagcaaggatcgcggcagcaacacgatcggcgcccgcctgaaccgagtagaagacaaggtgacgcagctggaccagaggctggcactcatcaccgacatgcttcaccagctgctctccttgcacggtggcagcacccccggcagcggcggcccccccagagagggcggggcccacatcacccagccctgcggcagtggcggctccgtcgaccctgagctcttcctgcccagcaacaccctgcccacctacgagcagctgaccgtgcccaggaggggccccgatgaggggtcctgaggaggggatggggctgggggatgggcctgagtgagaggggaggccaagagtggccccacctggccctctctgaaggaggccacctcctaaaaggcccagagagaagagccccactctcagaggccccaataccccatggaccatgctgtctggcacagcctgcacttgggggctcagcaaggccacctcttcctggccggtgtgggggccccgtctcaggtctgagttgttaccccaagcgccctggcccccacatggtgatgttgacatcactggcatggtggttgggacccagtggcagggcacagggcctggcccatgtatggccaggaagtagcacaggctgagtgcaggcccaccctgcttggcccagggggcttcctgaggggagacagagcaacccctggaccccagcctcaaatccaggaccctgccaggcacaggcagggcaggaccagcccacgctgactacagggccgccggcaataaaagcccaggagcccatttggagggcctgggcctggctccctcactctcaggaaatgctgacccatgggcaggagactgtggagactgctcctgagcccccagcttccagcaggagggacagtctcaccatttccccagggcacgtggttgagtggggggaacgcccacttccctgggttagactgccagctcttcctagctggagaggagccctgcctctccgcccctgagcccactgtgcgtggggctcccgcctccaacccctcgcccagtcccagcagccagccaaacacacagaaggggactgccacctccccttgccagctgctgagccgcagagaagtgacggttcctacacaggacaggggttccttctgggcattacatcgcatagaaatcaataatttgtggtgatttggatctgtgttttaatgagtttcacagtgtgattttgattattaattgtgcaagcttttcctaataaacgtggagaatcacaggctgggctgggcactgctctcaccttggttcctggggcatccatggggtctctcacagacaggacccctgcagttcccctggaagcagtgcccaggtggctgtggaataggaacgctaaaaaaaaaaaaaaaaa

SEQ ID NO: 1083 - DNA, 3029 bp, Homo sapiens
gcagcttccatggcctggggctgtgagaggcccgggaaggcactgtctttgcgcctgcacatgtgtgtgtctggagtgtaggatggcactggtgccgggcctggatttactcagcccagatcacggctgcttttgtttacgtggcccctgctctcacccacaactccaggtttctggctctcgggaatttgaggcctgtggctgctgtggaccctgggaaagagcctgtgcttcctgagccagtgcggggcctggcatggacttcctcatcgtcctggtctgcctcatcttcagcgtgctgtccaccatcgagcagtatgccgccctggccacggggactctcttctggatggagatcgtgctggtggtgttcttcgggacggagtacgtggtccgcctctggtccgccggctgccgcagcaagtacgtgggcctctgggggcggctgcgctttgcccggaagcccatttccatcatcgacctcatcgtggtcgtggcctccatggtggtcctctgcgtgggctccaaggggcaggtgtttgccacgtcggccatcaggggcatccgcttcctgcagatcctgaggatgctacacgtcgaccgccagggaggcacctggaggctcctgggctccgtggtcttcatccaccgccaggagctgataaccaccctgtacatcggcttcctgggcctcatcttctcctcgtactttgtgtacctggctgagaaggacgcggtgaacgagtcaggccgcgtggagttcggcagctacgcagatgcgctgtggtggggggtggtcacagtcaccaccatcggctatggggacaaggtgccccagacgtgggtcgggaagaccatcgcctcctgcttctctgtctttgccatctccttctttgcgctcccagcggggattcttggctcggggtttgccctgaaggtgcagcagaagcagaggcagaagcacttcaaccggcagatcccggcggcagcctcactcattcagaccgcatggaggtgctatgctgccgagaaccccgactcctccacctggaagatctacatccggaaggccccccggagccacactctgctgtcacccagccccaaacccaagaagtctgtggtggtaaagaaaaaaaagttcaagctggacaaagacaatggggtgactcctggagagaagatgctcacagtcccccatatcacgtgcgaccccccagaagagcggcggctggaccacttctctgtcgacggctatgacagttctgtaaggaagagcccaacactgctggaagtgagcatgccccatttcatgagaaccaacagcttcgccgaggacctggacctggaaggggagactctgctgacacccatcacccacatctcacagctgcgggaacaccatcgggccaccattaaggtcattcgacgcatgcagtactttgtggccaagaagaaattccagcaagcgcggaagccttacgatgtgcgggacgtcattgagcagtactcgcagggccacctcaacctcatggtgcgcatcaaggagctgcagaggaggctggaccagtccattgggaagccctcactgttcatctccgtctcagaaaagagcaaggatcgcggcagcaacacgatcggcgcccgcctgaaccgagtagaagacaaggtgacgcagctggaccagaggctggcactcatcaccgacatgcttcaccagctgctctccttgcacggtggcagcacccccggcagcggcggcccccccagagagggcggggcccacatcacccagccctgcggcagtggcggctccgtcgaccctgagctcttcctgcccagcaacaccctgcccacctacgagcagctgaccgtgcccaggaggggccccgatgaggggtcctgaggaggggatggggctgggggatgggcctgagtgagaggggaggccaagagtggccccacctggccctctctgaaggaggccacctcctaaaaggcccagagagaagagccccactctcagaggccccaataccccatggaccatgctgtctggcacagcctgcacttgggggctcagcaaggccacctcttcctggccggtgtgggggccccgtctcaggtctgagttgttaccccaagcgccctggcccccacatggtgatgttgacatcactggcatggtggttgggacccagtggcagggcacagggcctggcccatgtatggccaggaagtagcacaggctgagtgcaggcccaccctgcttggcccagggggcttcctgaggggagacagagcaacccctggaccccagcctcaaatccaggaccctgccaggcacaggcagggcaggaccagcccacgctgactacagggccgccggcaataaaagcccaggagcccatttggagggcctgggcctggctccctcactctcaggaaatgctgacccatgggcaggagactgtggagactgctcctgagcccccagcttccagcaggagggacagtctcaccatttccccagggcacgtggttgagtggggggaacgcccacttccctgggttagactgccagctcttcctagctggagaggagccctgcctctccgcccctgagcccactgtgcgtggggctcccgcctccaacccctcgcccagtcccagcagccagccaaacacacagaaggggactgccacctccccttgccagctgctgagccgcagagaagtgacggttcctacacaggacaggggttccttctgggcattacatcgcatagaaatcaataatttgtggtgatttggatctgtgttttaatgagtttcacagtgtgattttgattattaattgtgcaagcttttcctaataaacgtggagaatcacaggctgggctgggcactgctctcaccttggttcctggggcatccatggggtctctcacagacaggacccctgcagttcccctggaagcagtgcccaggtggctgtggaataggaacgctaaaaaaaaaaaaaaaaa

SEQ ID NO: 1084 - DNA, 809 bp, Homo sapiens
gtaaggtgaaggtgcccagcaggctgaggcttgtgtgcaacccagaagagagctcgctaacgccagcaagaaggttcagaacagcctggctttggaaaggaatttcatcctgcccacacactgcatagcaggagggaagcatgtctactttatccaatttcacacagacgctggaagacgtcttccgaaggatttttattacttatatggacaattggcgccagaacacaacagctgagcaagaggccctccaagccaaagttgatgctgagaacttctactatgtcatcctgtacctcatggtgatgattggaatgttctctttcatcatcgtggccatcctggtgagcactgtgaaatccaagagacgggaacactccaatgacccctaccaccagtacattgtagaggactggcaggaaaagtacaagagccaaatcttgaatctagaagaatcgaaggccaccatccatgagaacattggtgcggctgggttcaaaatgtccccctgataagggagaaaggcaccaagctaacatctgacgtccagacatgaagagatgccagtgccacgaggcaaatccaaattgtctttgcttagaagaaagtgagttccttgctctctgttgagaattttcatggagattatgtggttggccaataaagatagatgacatttcaatctcagtgatttatgcttgcttgttggagcaatattttgtgctgaagacctcttttactttccgggcaagtgaatgtcattttaatcaatatcaatgatgaaaataaagccaaatttgaagaaaaaa

SEQ ID NO: 1085 - DNA, 2490 bp, Homo sapiens
tgagcaaatgaaagacaccaacaaaatccaacacataaagattcacacttgaaacagattaatcaggaatcaagtttcttactgggaaatgcccagattgtggattggcctgtagtttatagtaatgacggtttttgtaaactctctggatatcatcgagctgacgtcatgcagaaaagcagcacttgcagttttatgtatggggaattgactgacaagaagaccattgagaaagtcaggcaaacttttgacaactacgaatcaaactgctttgaagttcttctgtacaagaaaaacagaacccctgtttggttttatatgcaaattgcaccaataagaaatgaacatgaaaaggtggtcttgttcctgtgtactttcaaggatattacgttgttcaaacagccaatagaggatgattcaacaaaaggttggacgaaatttgcccgattgacacgggctttgacaaatagccgaagtgttttgcagcagctcacgccaatgaataaaacagaggtggtccataaacattcaagactagctgaagttcttcagctgggatcagatatccttcctcagtataaacaagaagcgccaaagacgccaccacacattattttacattattgtgcttttaaaactacttgggattgggtgattttaattcttaccttctacaccgccattatggttccttataatgtttccttcaaaacaaagcagaacaacatagcctggctggtactggatagtgtggtggacgttatttttctggttgacatcgttttaaattttcacacgactttcgtggggcccggtggagaggtcatttctgaccctaagctcataaggatgaactatctgaaaacttggtttgtgatcgatctgctgtcttgtttaccttatgacatcatcaatgcctttgaaaatgtggatgagggaatcagcagtctcttcagttctttaaaagtggtgcgtctcttacgactgggccgtgtggctaggaaactggaccattacctagaatatggagcagcagtcctcgtgctcctggtgtgtgtgtttggactggtggcccactggctggcctgcatatggtatagcatcggagactacgaggtcattgatgaagtcactaacaccatccaaatagacagttggctctaccagctggctttgagcattgggactccatatcgctacaataccagtgctgggatatgggaaggaggacccagcaaggattcattgtacgtgtcctctctctactttaccatgacaagccttacaaccataggatttggaaacatagctcctaccacagatgtggagaagatgttttcggtggctatgatgatggttggctctcttctttatgcaactatttttggaaatgttacaacaattttccagcaaatgtatgccaacaccaaccgataccatgagatgctgaataatgtacgggacttcctaaaactctatcaggtcccaaaaggccttagtgagcgagtcatggattatattgtctcaacatggtccatgtcaaaaggcattgatacagaaaaggtcctctccatctgtcccaaggacatgagagctgatatctgtgttcatctaaaccggaaggtttttaatgaacatcctgcttttcgattggccagcgatgggtgtctgcgcgccttggcggtagagttccaaaccattcactgtgctcccggggacctcatttaccatgctggagaaagtgtggatgccctctgctttgtggtgtcaggatccttggaagtcatccaggatgatgaggtggtggctattttagggaagggtgatgtatttggagacatcttctggaaggaaaccacccttgcccatgcatgtgcgaacgtccgggcactgacgtactgtgacctacacatcatcaagcgggaagccttgctcaaagtcctggacttttatacagcttttgcaaactccttctcaaggaatctcactcttacttgcaatctgaggaaacggggatggttctccatggcaaacgctctgtgaagggtgacctgctgggtgtgaaactgctgcacgacttcctacttcacccattcatctatccgagttttcacggagtccaggagaaagtataaaagttaccttgaggagcaggagagtggaatggttaagactgtttggaatctgaccccttggatttgcatcctggacacacagttgtgtgacctaagggaaaccacttaaactctttatgcctcaatttgcttctctgtgataaaagaataatatgacctgtgtcctacagtagagaataataggtcctagctcgtaaaatgttctcattccatgacacttaaatgagaaaatacgtgtgtggaagtgaccactttgctatatacagatattttattatcattttacaatgccattattttgttccatagtcaaaagtataataaaacaaatgtcaatttgtcttattctaatcct

SEQ ID NO: 1086 - DNA, 2981 bp, Homo sapiens
agtctaagaagagaacctacaaactagacttgtagattaaaattatctgatcaaaaaggcagactctgtaaatttccttaagacctaccttggcataaaggctgacccagcaaaagaactgagaaatacagcctgagatggacagcagtaattgcaaagttattgctcctctcctaagtcaaagataccggaggatggtcaccaaggatggccacagcacacttcaaatggatggcgctcaaagaggtcttgcatatcttcgagatgcttggggaatcctaatggacatgcgctggcgttggatgatgttggtcttttctgcttcttttgttgtccactggcttgtctttgcagtgctctggtatgttctggctgagatgaatggtgatctggaactagatcatgatgccccacctgaaaaccacactatctgtgtcaagtatatcaccagtttcacagctgcattctccttctccctggagacacaactcacaattggttatggtaccatgttccccagtggtgactgtccaagtgcaatcgccttacttgccatacaaatgctcctaggcctcatgctagaggcttttatcacaggtgcttttgtggcgaagattgcccggccaaaaaatcgagctttttcaattcgctttactgacatagcagtagtagctcacatggatggcaaacctaatcttatcttccaagtggccaacacccgacctagccctctaaccagtgtccgggtctcagctgtactctatcaggaaagagaaaatggcaaactctaccagaccagtgtggatttccaccttgatggcatcagttctgacgaatgtccattcttcatctttccactaacgtactatcactccattacaccatcaagtcctctggctactctgctccagcatgaaaatccttctcactttgaattagttgtattcctttcagcaatgcaggagggcactggagaaatatgccaaaggaggacatcctacctacagtctgaaatcatgttacatcactgttttgcatctctgttgacccgaggttccaaatgtgaatatcaaatcaagatggagaattttgacaagactgtccctgaatttccaactcctctggtttctaaaagcccaaacaggactgacctggatatccacatcaatggacaaagcattgacaattttcagatctctgaaacaggactgacagaataagacttatccattttttaatgtattaaatacacccagccagttatgcagctactttttctttactgtatctcatgttttcttttttcaatgctaattatagctctctacatcacggtaatcatgcctatgcctacgtaagaatggctgagctaacaatacacattctggaaacataacactctacattacaaagtttgttacctgctgaaatcaatgtaactcaacttgacagacacttatacagaaatgttgctggtgaatttataagaatgtggtatgatactagtaatgaaggcaaaatggacagtgaagtttaacacaactgaactctaagaaaatcaaccattaatctctcattttcatctgcaaattgaagcaacagtttagtttcaaacctagctccctgggtggaatgacgacttcactatacttagtgaatatcctttaagagctgggatttttttcaagacaacaaagatcattcatttggttctttatactatgaaacttgagtaagtattacctccttaatttttaacaactaagaacaaaaattaacgagaaaaacaacaaagtacagatttatacataaacctaaaagcatttgaacatgacaccagaacacatacatatatgttcacttatttgtggcagaaggtgatcagataagctccagcccaaatggaacctgtggggtggtattttgcattgcaaggagacgcaaaattttattttaaaactgtcctccataataatcaaacggtgattcatctaaatgacttctagcaacctaagtaaagacattcccctcctatgtatgattcatttgatcatataaaacatcatgatggctctaattcataaatacaaaaatatatttaagtctttatagatataaagctttacttagatataacttgagtgagtagggaaaaaaatctacagtagataaagcaaaagataattaggcaacaaagcattttcaaactcaaattcctgtttccaacttcaaatagttttttctataaacacaaaatcagtgtttattcaccagtaggaggttggactagatgaactctattatttctttctaaatctaatagtctataaaaattatgtttcctctgttttttattttatctatgctaaaatgagccctttcccttatgtccagtttaagatgatcatttgcatgattttcatttcaataaaaaaaagagaaactgtccttaaaacaaaacaaaaaccaaaaaagtcaccctatcaggtttcaaacagatttgtggctgttcttttctgaaatttcccttattcaggtttctgtgggaaaaatgaaagattaaccttccccactggtgatgacctaggcaggaatcatctcttgaaataaatactagctgagtaaaggcaagcaggtgtgaagagcagggctcagcagcaagtcacatttttctactatttgaccaaaaggaaaagaaaataaagaagaactctggagtggtctaagactgataatagcagaagaatatcaagaacacagaaacttaattattgtgaacttttgctgtttgaaaatcttagacattcattcttaagtagaaatcagaccaacagattttcccaacccaagactattgtaacacataaagacagcaagaattcttatttctataataaattaacaagattcacctaacctttgaaaataaagtagtattgaagacttaaaaaaaaaaaaaaaaaaaataaaaaaaaaaaaaa

SEQ ID NO: 1087 - DNA, 4025 bp, Homo sapiens
gagaactcagtggcctttgtctgtggtgaatgtatccggaaaggcaaagaagagagagattctcctgtggggtttctcatctccatggcggtaggtgctgacagcttcagaagggtactaacagggccaagagaaaagggccctgagatgctcagctacggtgctcttacaagatgaaaaggacatggggttcagatctgcacttcatcatctttcactaagacatccacattccaccctgggccttgcccgtctggtgagcccaatctctgctggtcagtcacgcagttgaggtcagggaaggagtaactcaagatgattttgatgttgcagttttaaatttcactttgacttgagctgggaaatcctttggcctattataccatggatgctaaaaatggttctaactgaaaacccaaaccaagaaatagcaacaagtctagaattcttactactacaaaactcacctggatccctaagggcacagcaaagaatgagctattacggcagcagctatcatattatcaatgcggacgcaaaatacccaggctacccgccagagcacattatagctgagaagagaagagcaagaagacgattacttcacaaagatggcagctgtaatgtctacttcaagcacatttttggagaatggggaagctatgtggttgacatcttcaccactcttgtggacaccaagtggcgccatatgtttgtgatattttctttatcttatattctctcgtggttgatatttggctctgtcttttggctcatagcctttcatcatggcgatctattaaatgatccagacatcacaccttgtgttgacaacgtccattctttcacaggggcctttttgttctccctagagacccaaaccaccataggatatggttatcgctgtgttactgaagaatgttctgtggccgtgctcatggtgatcctccagtccatcttaagttgcatcataaatacctttatcattggagctgccttggccaaaatggcaactgctcgaaagagagcccaaaccattcgtttcagctactttgcacttataggtatgagagatgggaagctttgcctcatgtggcgcattggtgattttcggccaaaccacgtggtagaaggaacagttagagcccaacttctccgctatacagaagacagtgaagggaggatgacgatggcatttaaagacctcaaattagtcaacgaccaaatcatcctggtcaccccggtaactattgtccatgaaattgaccatgagagccctctgtatgcccttgaccgcaaagcagtagccaaagataactttgagattttggtgacatttatctatactggtgattccactggaacatctcaccaatctagaagctcctatgttccccgagaaattctctggggccataggtttaatgatgtcttggaagttaagaggaagtattacaaagtgaactgcttacagtttgaaggaagtgtggaagtatatgcccccttttgcagtgccaagcaattggactggaaagaccagcagctccacatagaaaaagcaccaccagttcgagaatcctgcacgtcggacaccaaggcgagacgaaggtcatttagtgcagttgccattgtcagcagctgtgaaaaccctgaggagaccaccacttccgccacacatgaatatagggaaacaccttatcagaaagctctcctgactttaaacagaatctctgtagaatcccaaatgtagtcctaaattgcaattatgagggctaccactgaatcattttatctttcagccaatcaagtcgttgtaaacgtggcttttttgaaagtgttatggctatgttttatgatgatgctgggtaagtagagtaagttaaacttggtaaaagataatctaaaaattccatagttctcagttattaaaatttttcttgttcgccaattttgtattaagaatgctattaagcctaattgattaaaatttatcttttttattatcttacatgcttgtatcttcagttggaggtgtagtattcaaaaacggggaatgaaggcaggaaggaggctggaataaataaaaataaaaatagacaagtaagacagcataaataatacatttttaaacatgtcaacattgataatacaatgaagatttaccataaaaagtatcatatctaaccaagatatgcaaaagatgcattcagtaagctgtaacgttgagaaatgtaactgtgaaatcagctcaccagttcaagtcactaggtttgccacttggaccgtcttggtttcagcgagcatagcgagtggctgtaagaaattgtccatgccaccaattccactgctacttgcccaggtagtgatcagtgagagttagaagcaattttttctctaaccgatgaggcagaagaaaagttaacagtatttaaagcagcatttctctcttaacgttcctgggagactccaacaaatggagaccagaaacaaggcaaccacgaccttgctaggttctctgaggaggggactttctatgttcacgtcccaccttcttcgaggacatgaccaagggacaggatcatacagatgaggtgaggggatggttagcagcgataaacattctcagacccttggagagaaaccgttgctagcttgctggtcccgaaagattgcaactttggctgctacagaaaggatagaacctttttggggggagggtggggagggagatatttatttgtgcccagaagcagttatgtatgcttcttgtcttggttactgtacaagatacaaatgactcgagttgtggattgcaagaaactcttttattaaacttggaacaaccatttaaatgaaggattttgtgagatagaattcaattaaagcgatttgaatgcacagtaagtggataatctgagtacaatgaaatttcttaagttttagaacatgagataaagttgtatactctactttcatgttaaaatgttaatcatgattactttaagcccacatccactgagtaaagagtcactttaaactttataaatcaaagagatattaggaacattcagaattatttgtgttttgtttttgttttacattgttgctgcactggcaataagtatgtggcactgtttttatttgtttatgttatttaaatacacacccagacacacacacacacagtttttgctttttctggaaaatctttctttctcttctctctccatgaaaattaaaacacacaagtgaatgaagtaattacatagtccaagattagaaatacaagtaaaatatataggtataggtagatagagtgcctttctgtttcttttcttttcttttttctttttttgttcttccttcctttcttccctcctccccctcatccttccctttctccttcttttcccttttttttttttttttgacctgggagtaataaagttactttttaaatgcacgtatgcaatcttttattcctcttgttttatggataagagatttgttcaggtcaaaagttgcaaaactgttctgaagcttaatattagagacccaagtaagattgtttttagtcttgcttgaggaatgcacactccatttaaaaaattgtgcgctctgtagatttggattttacagcagcaattacttggctaaattagagtactgcaatcttgtaagtagaaaacagccaccatgacaataaacaaaaacacttaaaaatatttttagcttgttttacctacatctagtttcatttcatcttgctttgctttgttgactctgctaccgctgatgtttgccttgtcaatatcagaataggggcatcagtgtcccgtgaaatacattttgttgtgctatgagcctctgtaatcaaatgcttgtactcagaagagagtgtaaaatcagcatttctatgtaacatatatctctaattatctgtgtaattttataacatactttgacaaccccagtgagttacttaataataaagatcttaaaataatgcaaaaaaaaaaaaaaaa

SEQ ID NO: 1088 - DNA, 1901 bp, Homo sapiens
gggcaggaagacggcgctgcccggaggagcggggcgggcgggcgcgcgggggagcgggcggcgggcgggagccaggcccgggcgggggcgggggcggcggggccagaagaggcggcgggccgcgctccggccggtctgcggcgttggccttggctttggctttggcggcggcggtggagaagatgctgcagtccctggccggcagctcgtgcgtgcgcctggtggagcggcaccgctcggcctggtgcttcggcttcctggtgctgggctacttgctctacctggtcttcggcgcagtggtcttctcctcggtggagctgccctatgaggacctgctgcgccaggagctgcgcaagctgaagcgacgcttcttggaggagcacgagtgcctgtctgagcagcagctggagcagttcctgggccgggtgctggaggccagcaactacggcgtgtcggtgctcagcaacgcctcgggcaactggaactgggacttcacctccgcgctcttcttcgccagcaccgtgctctccaccacaggttatggccacaccgtgcccttgtcagatggaggtaaggccttctgcatcatctactccgtcattggcattcccttcaccctcctgttcctgacggctgtggtccagcgcatcaccgtgcacgtcacccgcaggccggtcctctacttccacatccgctggggcttctccaagcaggtggtggccatcgtccatgccgtgctccttgggtttgtcactgtgtcctgcttcttcttcatcccggccgctgtcttctcagtcctggaggatgactggaacttcctggaatccttttatttttgttttatttccctgagcaccattggcctgggggattatgtgcctggggaaggctacaatcaaaaattcagagagctctataagattgggatcacgtgttacctgctacttggccttattgccatgttggtagttctggaaaccttctgtgaactccatgagctgaaaaaattcagaaaaatgttctatgtgaagaaggacaaggacgaggatcaggtgcacatcatagagcatgaccaactgtccttctcctcgatcacagaccaggcagctggcatgaaagaggaccagaagcaaaatgagccttttgtggccacccagtcatctgcctgcgtggatggccctgcaaaccattgagcgtaggatttgttgcattatgctagagcaccagggtcagggtgcaaggaagaggcttaagtatgttcatttttatcagaatgcaaaagcgaaaattatgtcactttaagaaatagctactgtttgcaatgtcttattaaaaaacaacaaaaaaagacacatggaacaaagaagctgtgaccccagcaggatgtctaatatgtgaggaaatgagatgtccacctaaaattcatatgtgacaaaattatctcgaccttacataggaggagaatacttgaagcagtatgctgctgtggttagaagcagattttatacttttaactggaaactttggggtttgcatttagatcatttagctgatggctaaatagcaaaatttatatttagaagcaaaaaaaaaaagcatagagatgtgttttataaataggtttatgtgtactggtttgcatgtacccacccaaaatgattatttttggagaatctaagtcaaactcactatttataatgcataggtaaccattaactatgtacatataaagtataaatatgtttatattctgtacatatggtttaggtcaccagatcctagtgtagttctgaaactaagactatagatattttgtttcttttgatttctctttatactaaagaatccagagttgctacaataaaataaggggaataataaacttgagagtgaataaccat

SEQ ID NO: 1089 - DNA, 2772 bp, Homo sapiens
cagtcggcaccggcgaggccgtgctggaacccgggcctcagccgcagccgcagcggggccgacatgacgacagctccccaggagccccccgcccggcccctccaggcgggcagtggagctggcccggcgcctgggcgcgccatgcgcagcaccacgctcctggccctgctggcgctggtcttgctttacttggtgtctggtgccctggtgttccgggccctggagcagccccacgagcagcaggcccagagggagctgggggaggtccgagagaagttcctgagggcccatccgtgtgtgagcgaccaggagctgggcctcctcatcaaggaggtggctgatgccctgggagggggtgcggacccagaaaccaactcgaccagcaacagcagccactcagcctgggacctgggcagcgccttctttttctcagggaccatcatcaccaccatcggctatggcaatgtggccctgcgcacagatgccgggcgcctcttctgcatcttttatgcgctggtggggattccgctgtttgggatcctactggcaggggtcggggaccggctgggctcctccctgcgccatggcatcggtcacattgaagccatcttcttgaagtggcacgtgccaccggagctagtaagagtgctgtcggcgatgcttttcctgctgatcggctgcctgctctttgtcctcacgcccacgttcgtgttctgctatatggaggactggagcaagctggaggccatctactttgtcatagtgacgcttaccaccgtgggctttggcgactatgtggccggcgcggaccccaggcaggactccccggcctatcagccgctggtgtggttctggatcctgctcggcctggcttacttcgcctcagtgctcaccaccatcgggaactggctgcgagtagtgtcccgccgcactcgggcagagatgggcggcctcacggctcaggctgccagctggactggcacagtgacagcgcgcgtgacccagcgagccgggcccgccgccccgccgccggagaaggagcagccactgctgcctccaccgccctgtccagcgcagccgctgggcaggccccgatccccttcgccccccgagaaggctcagccgccttccccgcccacggcctcggccctggattatcccagcgagaacctggccttcatcgacgagtcctcggatacgcagagcgagcgcggctgcccgctgccccgcgcgccgagaggtcgccgccgcccaaatccccccaggaagcccgtgcggccccgcggccccgggcgtccccgagacaaaggcgtgccggtgtaggggcaggatccctggccgggcctctcaagggcttcgtttctgctctccccggcatgcctggcttgtttgaccaaagagccctctttccacgagactgaagtctggggaggaggctacagttgcctctccgcctcctccctggccccggcccttccctcacttccatccatctctagacccccccaaggctttctgtgtcgctgccccgggcgggtgtatccctcacagcacctcacgactgtgcctcaaagcctgcatcaataaatgaaaacggtctgcaccgctgcgggcgtgacgctcccggacgcgagtgggtgtggaattgctttcctcgggccaccgtgggggcacctctggcctcccgtgacccccaggccgagggtccccgggcacccaggtcggtcaagtctcggccctctcaggcccgcgtctctgcctggaggagactgtgtagggtccggcgtggggatcagccgggatgggctgcgcgtctccagcctctgcacacacattggcgggtggggtgcagggagggagaggcaggggagagagaatggcatctcgcgtggagggctgtcgtttgaactctcccagcgcgagagaccctgccccgcccccttcctggagcgttgactcccttctcgtctcgaggcctgtggcgtctgggtccgttggggcagaaccatggaggaaaagccttcgaaagtgtcgctcaagtcttccgaccgccaaggctcggacgaggagagcgtgcatagcgacactcgggacctgtggaccacgaccacgctgtcccaggcacagctgaacatgccgctgtccgaggtctgcgagggcttcgacgaggagggccgcaacattagcaagacccgcgggtggcacagcccggggcggggctcgttggacgaggggtacaaggccagccacaagccggaggaactggacgagcacgcgctggtggagctggagttgcaccgcggcagctccatggaaatcaatctgggggagaaggacactgcatcccagatcgaggccgaaaagtcttcctcaatgtcatcactcaatattgcgaagcacatgccccatcgagcctactgggcagagcagcagagcaggctgccactgcccctgatggaactcatggagaatgaagctctggaaatcctcaccaaagccctccggagctaccagttagggatcggcagggaccacttcctgactaaggagctgcagcgatacatcgaagggctcaagaagcgccggagcaagaggctgtacgtgaattaaaaacgccaccttgggctcgagcagcgacccgaaccagccccgtgccagcccggtccccagacccaagcctgaccccatccgagtggaatttgagtcctaaagaaataaaagagtcgatgcatgaaaaaaaaaaaaaaaaaaaaaaaaaaaaaaaaaaaaaaa

SEQ ID NO: 1090 - DNA, 1702 bp, Homo sapiens
gcccttagagacgggccagctgatgcccaggtcggggccctgccgctggccacactgggctccggtccaaggctagaaggctggcccctgctgcaacccctctccggctcctctgccacccacctcccggggctggccggctgtggggagccaggcggccgcagtgacgacagctccccaggagccccccgcccggcccctccaggcgggcagtggagctggcccggcgcctgggcgcgccatgcgcagcaccacgctcctggccctgctggcgctggtcttgctttacttggtgtctggtgccctggtgttccgggccctggagcagccccacgagcagcaggcccagagggagctgggggaggtccgagagaagttcctgagggcccatccgtgtgtgagcgaccaggagctgggcctcctcatcaaggaggtggctgatgccctgggagggggtgcggacccagaaaccaactcgaccagcaacagcagccactcagcctgggacctgggcagcgccttctttttctcagggaccatcatcaccaccatcggctatggcaatgtggccctgcgcacagatgccgggcgcctcttctgcatcttttatgcgctggtggggattccgctgtttgggatcctactggcaggggtcggggaccggctgggctcctccctgcgccatggcatcggtcacattgaagccatcttcttgaagtggcacgtgccaccggagctagtaagagtgctgtcggcgatgcttttcctgctgatcggctgcctgctctttgtcctcacgcccacgttcgtgttctgctatatggaggactggagcaagctggaggccatctactttgtcatagtgacgcttaccaccgtgggctttggcgactatgtggccggcgcggaccccaggcaggactccccggcctatcagccgctggtgtggttctggatcctgctcggcctggcttacttcgcctcagtgctcaccaccatcgggaactggctgcgagtagtgtcccgccgcactcgggcagagatgggcggcctcacggctcaggctgccagctggactggcacagtgacagcgcgcgtgacccagcgagccgggcccgccgccccgccgccggagaaggagcagccactgctgcctccaccgccctgtccagcgcagccgctgggcaggccccgatccccttcgccccccgagaaggctcagccgccttccccgcccacggcctcggccctggattatcccagcgagaacctggccttcatcgacgagtcctcggatacgcagagcgagcgcggctgcccgctgccccgcgcgccgagaggtcgccgccgcccaaatccccccaggaagcccgtgcggccccgcggccccgggcgtccccgagacaaaggcgtgccggtgtaggggcaggatccctggccgggcctctcaagggcttcgtttctgctctccccggcatgcctggcttgtttgaccaaagagccctctttccacgagactgaagtctggggaggaggctacagttgcctctccgcctcctccctggccccggcccttccctcacttccatccatctctagacccccccaaggctttctgtgtcgctgccccgggcgggtgtatccctcacagcacctcacgactgtgcctcaaagcctgcatcaataaatgaaaacggtctgc

SEQ ID NO: 1091 - DNA, 1816 bp, Homo sapiens
caggcttaggctctctttcggcctcccactcgccttcctttcccttctcggtgccctcctctctttcctcacccggtagtcccagacaggggctgagggccgggcagcggaggtaaggggaaggctggagataggagggggactgggtgtgtccagccagagggatgtctgtggacagtgcagctgggggctttatggatctttgggtgtgtaggggatagaggaggagggtgtgggtgtcaggccagctcagtgaccccagcatccctggttttgcccgcagtgacgacagctccccaggagccccccgcccggcccctccaggcgggcagtggagctggcccggcgcctgggcgcgccatgcgcagcaccacgctcctggccctgctggcgctggtcttgctttacttggtgtctggtgccctggtgttccgggccctggagcagccccacgagcagcaggcccagagggagctgggggaggtccgagagaagttcctgagggcccatccgtgtgtgagcgaccaggagctgggcctcctcatcaaggaggtggctgatgccctgggagggggtgcggacccagaaaccaactcgaccagcaacagcagccactcagcctgggacctgggcagcgccttctttttctcagggaccatcatcaccaccatcggctatggcaatgtggccctgcgcacagatgccgggcgcctcttctgcatcttttatgcgctggtggggattccgctgtttgggatcctactggcaggggtcggggaccggctgggctcctccctgcgccatggcatcggtcacattgaagccatcttcttgaagtggcacgtgccaccggagctagtaagagtgctgtcggcgatgcttttcctgctgatcggctgcctgctctttgtcctcacgcccacgttcgtgttctgctatatggaggactggagcaagctggaggccatctactttgtcatagtgacgcttaccaccgtgggctttggcgactatgtggccggcgcggaccccaggcaggactccccggcctatcagccgctggtgtggttctggatcctgctcggcctggcttacttcgcctcagtgctcaccaccatcgggaactggctgcgagtagtgtcccgccgcactcgggcagagatgggcggcctcacggctcaggctgccagctggactggcacagtgacagcgcgcgtgacccagcgagccgggcccgccgccccgccgccggagaaggagcagccactgctgcctccaccgccctgtccagcgcagccgctgggcaggccccgatccccttcgccccccgagaaggctcagccgccttccccgcccacggcctcggccctggattatcccagcgagaacctggccttcatcgacgagtcctcggatacgcagagcgagcgcggctgcccgctgccccgcgcgccgagaggtcgccgccgcccaaatccccccaggaagcccgtgcggccccgcggccccgggcgtccccgagacaaaggcgtgccggtgtagggatccctggccgggcctctcaagggcttcgtttctgctctccccggcatgcctggcttgtttgaccaaagagccctctttccacgagactgaagtctggggaggaggctacagttgcctctccgcctcctccctggccccggcccttccctcacttccatccatctctagacccccccaaggctttctgtgtcgctgccccgggcgggtgtatccctcacagcacctcacgactgtgcctcaaagcctgcatcaataaatgaaaacggtctgc

SEQ ID NO: 1092 - DNA, 4057 bp, Homo sapiens
ccccgcctccgcccccggctggcgtgagctgggtgtttcctgcctctctcagtccgggtttggagactcctgcgtcctccgacttttcatggaagagatgtcaggagaaagtgtggtgagctcagcggtgccagcggctgctacccgcaccacttccttcaagggcacgagccccagctccaaatacgtgaagctgaatgtgggtggagccctctactataccaccatgcagacgctgaccaagcaggacaccatgctgaaggccatgttcagcgggcgcatggaagtgctcaccgacagtgaaggctggatcctcattgaccgctgtgggaagcactttggtacgatactcaactaccttcgagacggggcggtgcctttacccgagagccgccgggagatcgaggagctgctagcagaagccaagtactacctagtccaaggcctggtggaagagtgccaggcggccctacaaaacaaagatacttatgagcctttctgcaaggtccctgtgatcacctcatccaaggaagaacaaaaacttatagcgacttcaaataagccagccgtgaagttgctctacaacagaagtaacaacaaatactcatataccagcaattctgacgacaatatgttgaaaaacattgaactgtttgataagctgtctctgcgctttaacggaagggtcctgttcataaaggatgttattggggatgaaatctgctgctggtccttttatggtcagggccggaagattgctgaagtctgttgtacctccatcgtctatgccactgagaagaaacagaccaaggtggagtttcccgaagcccggatttatgaggagaccctgaacattttgctgtatgaggcccaggatggccggggacctgacaatgcgctcctggaggccacaggcggggcggcggggcgctcccaccacctggacgaggacgaggagcgggagcggatcgagcgcgtgcggaggatccacatcaagcgccctgatgaccgggcccacctccaccagtgagcaggcaagagaccgagccgccctcctctcaccgcccccactccctgccgtgctacacccagatcctgtgcaggctgccgggccccttctgcttcccttggagcctggagatacttttgtaacaagccagatgattattttggtattgcttgacaaggcaaattgattgtcttgacccaggcgtatgacccctgtcgttgaacaagctgtgtctaagatctctacttttcatgagaatctgagactctttggagccaggctttctcggttctcagaggaaaagtatgaatgagtgtgaagtgtatgtgagaacttttgtttgcaatatttatttttgtgggtgtcgacttcctatgtgggctttttgggtgacactcccttaagggttcagtttgacaattctgagagttgtcctgcagttggaggccaccagaggtatctgagctccctgcttcctatttcataatcctccagccccagcaggtccactcctggttcctgtgtgtttggcccgggcacaatccccactgctttgctagacgtgctttctgccatgtggctttgggcctagagcttgttgataattgcagcttgtggcagtggaaatatggctgaatgagcgtctaaatcgttgagaccagtgcaactttgggtgcaaggctttgtttagggatcaagccttttgccaccttgggctggtctttggcctggtgctcactgggaccccatatgtctgcgtaggagcagaactttccatggcagtaagtgtccagctctgtttctggttctttccccaactccagccccgtccagttgttctcctgattgacccgactccactccaggaaggccatctgaccctgtgacaggcatagctcataaactacccctccctgggatcccgctcctcttcagcctccttccccatgaagctgggctaactttctaagtcattttgcttagaaattcagtgtggcccataccctttgtcctcccagcctggcatccaggcagggacaccctcacaccaccagccccagggagcttccctgctataaacacagacccccttgtctttgcctctgatttttacacagtgtagagtggccagcagtgaacaggttgaggatgtgcgggtagatagataactttgggtctggtttgtgtctgtgttcatgtttgtttaagggatatgtgtgactgtgggtggggacgtgtgcttgtggggcacaggtggcggcccctgctggagcccggctgggcgcagcgcctatgtaggacgggtgttctcagtgacctacctcccaggctcctctgcacctgcaaaggaacaggagtgagtcgtgactgacaggggtggttgagactagactaggtagagtagttaccaggagatgtgaatgtgcgtcaggtgatggatgggtttgtcaagggaatcgttaccgttttataccaaaggtattaacatgggcagcctttgacacatgtattccaaaaacgagtttatattttcaaacggtttttacagcttagactttgtacttactgccctgcctgtgacagttgtatgccttcattttgtatccaacagcaaagtctacaataaaactttaaaacaatcatgactgaatgtcaaaatcgtgtattgggcagatgctttttaaactgtcgtgtgagaaacttttatattaggccatttggattttattaagtgctaaggaaagagggcttacaaaatgtttcgtaaatattttatactgtttaagtgttaaacaccaaccctgtctttcttttgggttgagcttttttagaaagtcgaagtgaatgttggccaggaaaatggaaaagccattgtataaatttttttttgaggcggagtcttgctctattggccaggctggagtgtagtggcaccatctccacttaccacaacttgtgcctcctgggttcaagcgattctgctgcctcagcctcccgagtagctgggattgcaggtacccatcagcccatgcccagctaattttgtatttttagtagagatggggtttcaccatgttggccaggctggtcttgaactcctgaccctgtgatccgaccaccttggcctcccaaagtgctgggattacaggtgtgagtcaccacacctggctgcatagtgttttaaatgtttgtgtgaagaatgagtttgtggaacaatttgatttgctgtggcctctatgcctaatgagctagtgtttctggcagctctctctacccaactttgcacttgtagttttgagtctttgtctctctggaatatgaacaggtttataaaacattccatggtgaacaattctgtcggctgcattatagccatgagtgaatagacagcattggctggtccaagctctgttattgagtatacaaggaactgatttttcttatgttagcactaagggcaaaaaccaatatttataatgtaagcactatccaggtaaaacactggcccaagatttggtaaagagatttcattgcaatgtaataactacagttttttacaaattggaacagctttggtgtgtcgtaatcaagggttttttttgtttgtttgtttcaaataagccatctgattgtggtgactggggcccatgtccaagacaattcctggcatattctgtcaccctcccgtggggcgatcactgtgtggggaccccattccccagttaaagtgtgtctctgtaccttacaacagcgattcaggacccaagtgtgaacaacactcagcccgccctctggagcgtgtgctgtctttagggccctacccaaagtcactgtaacagttaagtgtgtcattaacctttctgtctctttgcgccataaaaaaatgctcaaagttttagatgtagccactgtatgttgtacaaacgttggcgacatgtaaaataaaagtcataaaatgctaaaaaaaaaaaaaaaaaaaaaaaaaaaaaaaaaaaaaaaaaaaaaaaaaaaaaaaaaaaaaaaaaaaaaaaaaaaaaaaaaaaaaaa

SEQ ID NO: 1093 - DNA, 2475 bp, Homo sapiens
aaaagccggacgcttccggtggaagggagctgttgcggggcttgctgggatcatggcggagaatcactgcgagctcctgtcgccggcccggggcggcatcggggcggggctggggggcggcctgtgccgccgctgcagcgctgggctcggcgccctggcccagcgccctggcagcgtgtccaagtgggtccgactcaacgtcggcggcacctacttcctcaccactcggcagaccctgtgccgggacccgaaatccttcctgtaccgcttatgccaggccgatcccgacctggactcagacaaggatgaaacaggcgcctatttaatcgacagagaccccacctactttgggcctgtgctgaactacctgagacacggcaagctggtgattaacaaagacctcgcggaggaaggagtgttggaggaagcagaattttacaatatcacctcattaataaaacttgtaaaggacaaaattagagaacgagacagcaaaacatcgcaggtgcctgtgaagcatgtgtaccgtgtgctgcagtgccaggaggaggagctcacgcagatggtgtccaccatgtccgacggctggaagttcgagcagttggtcagcatcggctcctcttacaactatgggaacgaagaccaagccgagttcctctgtgtggtgtccaaggagctgcacaacaccccgtacggtacggccagcgagcccagcgagaaggccaagattttgcaagaacgaggctcaaggatgtgagggacacagtattgacagctgaagaaatgatttacgttttcccgagatgtaatgaactgccatgtccaggaagcttggctgtgagaagaaacctgcttttgatcatttttctagagatctgggtgtgaatccttttttgcctctgaggtgggtggtgagagacgggcccagctgtccaaggccagacgtccccaagttgggggagcacggcggccgggtgggcgctgcctcttgggggggcctcgctctgttttttccaagtgccacgtgggactgaggcagacactcccagtcagcccgctcgatcctgaagatcgtgtgaaggaagcgttcttggtgctacacacagtctggaaaagcagcctgggcttcactggcaggaagcggccgcagccgcgtcagtgtccagcacgtcgtggcctctggtccgaccaccaggccctagtctcggtcagggagtctgctctgcctcccaggcgggatcgctggtttctctcgacctcgcagagctcctgacaaaggcggcttctgcgtcgtcactgcttcccggcgccattccgaggccgggccttcttctgacacgggctccaaccccacctgaccaagcccgggacagtcaaggcttctcaatttgtactttccaggcaagagaactttgtaccccttctctgtgtggatagactccccagcgtttttcctctggaaatgcccacagggcttgccgcgtggagactgatctgttccatccgttagcgcgaggtagcagtgtcgcctcgcccctcccactgcgggctcacggggagctggcgtctgtcagtgccttgtcacgcctggcatagaggttgggctggaggcctgtccactggcttctggagctgaaggtctgcgtcacggtgaaaattcgggatgtttacagagcatcacaaatgcctctctctcgccgctctctcattttctttgtataactatgcagccttccctctctttctgggatgtttgggacttcactcgacctgcacgggctctgcccgacatgccgtgggagctgctgggattcctttagaaaccgctgcccgcatgctttgaaaacagacctttctcagctggctgtggggacctgtcagagtctggggactcggcgtgcagggcgggctccaagcgctttgcttccggaactccggcttcccaaggggtactgtgcagactgaccaccggcctcccgcctgcaggtcagaggctctgacactgtctggtttccaatgcttctggagacttcctgcctaggcctcatcctcctctttgccagtcacctgattaaccaattctccagcattaggacttacctccttctttttgtaaggtctcttgtatgttgttaaatgtttggcttaaacaattataaaagcctttctagaaggcagacttagccccagcagagcctgggaggaaggcggccgctggggctcctgggcatcctctctggggagctgctggccgcttagcgttgtttgatttttgaccttgacatagtagataggcttgtggtttttttaatttaaagatattaagacttaattcactaaaatttattctaaggggatatttatacttttatacttttttaggtatcgtattttatcagcttacagtttaatgcctaagtttcccctggaaatagcaaataaaattgtgtatttatgaaaaaaaaaaaaaaaaaa

SEQ ID NO: 1094 - DNA, 5830 bp, Homo sapiens
actgagtcccgggaccccgggagagcggtcagtgtgtggtcgctgcgtttcctctgcctgcgccgggcatcacttgcgcgccgcagaaagtccgtctggcagcctggatatcctctcctaccggcacccgcagacgcccctgcagccgccggtcggcgcccgggctccctagccctgtgcgctcaactgtcctgcgctgcggggtgccgcgagttccacctccgcgcctccttctctagacaggcgctgggagaaagaaccggctcccgagttctgggcatttcgcccggctcgaggtgcaggatgcagagcaaggtgctgctggccgtcgccctgtggctctgcgtggagacccgggccgcctctgtgggtttgcctagtgtttctcttgatctgcccaggctcagcatacaaaaagacatacttacaattaaggctaatacaactcttcaaattacttgcaggggacagagggacttggactggctttggcccaataatcagagtggcagtgagcaaagggtggaggtgactgagtgcagcgatggcctcttctgtaagacactcacaattccaaaagtgatcggaaatgacactggagcctacaagtgcttctaccgggaaactgacttggcctcggtcatttatgtctatgttcaagattacagatctccatttattgcttctgttagtgaccaacatggagtcgtgtacattactgagaacaaaaacaaaactgtggtgattccatgtctcgggtccatttcaaatctcaacgtgtcactttgtgcaagatacccagaaaagagatttgttcctgatggtaacagaatttcctgggacagcaagaagggctttactattcccagctacatgatcagctatgctggcatggtcttctgtgaagcaaaaattaatgatgaaagttaccagtctattatgtacatagttgtcgttgtagggtataggatttatgatgtggttctgagtccgtctcatggaattgaactatctgttggagaaaagcttgtcttaaattgtacagcaagaactgaactaaatgtggggattgacttcaactgggaatacccttcttcgaagcatcagcataagaaacttgtaaaccgagacctaaaaacccagtctgggagtgagatgaagaaatttttgagcaccttaactatagatggtgtaacccggagtgaccaaggattgtacacctgtgcagcatccagtgggctgatgaccaagaagaacagcacatttgtcagggtccatgaaaaaccttttgttgcttttggaagtggcatggaatctctggtggaagccacggtgggggagcgtgtcagaatccctgcgaagtaccttggttacccacccccagaaataaaatggtataaaaatggaataccccttgagtccaatcacacaattaaagcggggcatgtactgacgattatggaagtgagtgaaagagacacaggaaattacactgtcatccttaccaatcccatttcaaaggagaagcagagccatgtggtctctctggttgtgtatgtcccaccccagattggtgagaaatctctaatctctcctgtggattcctaccagtacggcaccactcaaacgctgacatgtacggtctatgccattcctcccccgcatcacatccactggtattggcagttggaggaagagtgcgccaacgagcccagccaagctgtctcagtgacaaacccatacccttgtgaagaatggagaagtgtggaggacttccagggaggaaataaaattgaagttaataaaaatcaatttgctctaattgaaggaaaaaacaaaactgtaagtacccttgttatccaagcggcaaatgtgtcagctttgtacaaatgtgaagcggtcaacaaagtcgggagaggagagagggtgatctccttccacgtgaccaggggtcctgaaattactttgcaacctgacatgcagcccactgagcaggagagcgtgtctttgtggtgcactgcagacagatctacgtttgagaacctcacatggtacaagcttggcccacagcctctgccaatccatgtgggagagttgcccacacctgtttgcaagaacttggatactctttggaaattgaatgccaccatgttctctaatagcacaaatgacattttgatcatggagcttaagaatgcatccttgcaggaccaaggagactatgtctgccttgctcaagacaggaagaccaagaaaagacattgcgtggtcaggcagctcacagtcctagagcgtgtggcacccacgatcacaggaaacctggagaatcagacgacaagtattggggaaagcatcgaagtctcatgcacggcatctgggaatccccctccacagatcatgtggtttaaagataatgagacccttgtagaagactcaggcattgtattgaaggatgggaaccggaacctcactatccgcagagtgaggaaggaggacgaaggcctctacacctgccaggcatgcagtgttcttggctgtgcaaaagtggaggcatttttcataatagaaggtgcccaggaaaagacgaacttggaaatcattattctagtaggcacggcggtgattgccatgttcttctggctacttcttgtcatcatcctacggaccgttaagcgggccaatggaggggaactgaagacaggctacttgtccatcgtcatggatccagatgaactcccattggatgaacattgtgaacgactgccttatgatgccagcaaatgggaattccccagagaccggctgaagctaggtaagcctcttggccgtggtgcctttggccaagtgattgaagcagatgcctttggaattgacaagacagcaacttgcaggacagtagcagtcaaaatgttgaaagaaggagcaacacacagtgagcatcgagctctcatgtctgaactcaagatcctcattcatattggtcaccatctcaatgtggtcaaccttctaggtgcctgtaccaagccaggagggccactcatggtgattgtggaattctgcaaatttggaaacctgtccacttacctgaggagcaagagaaatgaatttgtcccctacaagaccaaaggggcacgattccgtcaagggaaagactacgttggagcaatccctgtggatctgaaacggcgcttggacagcatcaccagtagccagagctcagccagctctggatttgtggaggagaagtccctcagtgatgtagaagaagaggaagctcctgaagatctgtataaggacttcctgaccttggagcatctcatctgttacagcttccaagtggctaagggcatggagttcttggcatcgcgaaagtgtatccacagggacctggcggcacgaaatatcctcttatcggagaagaacgtggttaaaatctgtgactttggcttggcccgggatatttataaagatccagattatgtcagaaaaggagatgctcgcctccctttgaaatggatggccccagaaacaatttttgacagagtgtacacaatccagagtgacgtctggtcttttggtgttttgctgtgggaaatattttccttaggtgcttctccatatcctggggtaaagattgatgaagaattttgtaggcgattgaaagaaggaactagaatgagggcccctgattatactacaccagaaatgtaccagaccatgctggactgctggcacggggagcccagtcagagacccacgttttcagagttggtggaacatttgggaaatctcttgcaagctaatgctcagcaggatggcaaagactacattgttcttccgatatcagagactttgagcatggaagaggattctggactctctctgcctacctcacctgtttcctgtatggaggaggaggaagtatgtgaccccaaattccattatgacaacacagcaggaatcagtcagtatctgcagaacagtaagcgaaagagccggcctgtgagtgtaaaaacatttgaagatatcccgttagaagaaccagaagtaaaagtaatcccagatgacaaccagacggacagtggtatggttcttgcctcagaagagctgaaaactttggaagacagaaccaaattatctccatcttttggtggaatggtgcccagcaaaagcagggagtctgtggcatctgaaggctcaaaccagacaagcggctaccagtccggatatcactccgatgacacagacaccaccgtgtactccagtgaggaagcagaacttttaaagctgatagagattggagtgcaaaccggtagcacagcccagattctccagcctgactcggggaccacactgagctctcctcctgtttaaaaggaagcatccacaccccaactcccggacatcacatgagaggtctgctcagattttgaagtgttgttctttccaccagcaggaagtagccgcatttgattttcatttcgacaacagaaaaaggacctcggactgcagggagccagtcttctaggcatatcctggaagaggcttgtgacccaagaatgtgtctgtgtcttctcccagtgttgacctgatcctcttttttcattcatttaaaaagcattatcatgcccctgctgcgggtctcaccatgggtttagaacaaagagcttcaagcaatggccccatcctcaaagaagtagcagtacctggggagctgacacttctgtaaaactagaagataaaccaggcaacgtaagtgttcgaggtgttgaagatgggaaggatttgcagggctgagtctatccaagaggctttgtttaggacgtgggtcccaagccaagccttaagtgtggaattcggattgatagaaaggaagactaacgttaccttgctttggagagtactggagcctgcaaatgcattgtgtttgctctggtggaggtgggcatggggtctgttctgaaatgtaaagggttcagacggggtttctggttttagaaggttgcgtgttcttcgagttgggctaaagtagagttcgttgtgctgtttctgactcctaatgagagttccttccagaccgttagctgtctccttgccaagccccaggaagaaaatgatgcagctctggctccttgtctcccaggctgatcctttattcagaataccacaaagaaaggacattcagctcaaggctccctgccgtgttgaagagttctgactgcacaaaccagcttctggtttcttctggaatgaataccctcatatctgtcctgatgtgatatgtctgagactgaatgcgggaggttcaatgtgaagctgtgtgtggtgtcaaagtttcaggaaggattttacccttttgttcttccccctgtccccaacccactctcaccccgcaacccatcagtattttagttatttggcctctactccagtaaacctgattgggtttgttcactctctgaatgattattagccagacttcaaaattattttatagcccaaattataacatctattgtattatttagacttttaacatatagagctatttctactgatttttgcccttgttctgtcctttttttcaaaaaagaaaatgtgttttttgtttggtaccatagtgtgaaatgctgggaacaatgactataagacatgctatggcacatatatttatagtctgtttatgtagaaacaaatgtaatatattaaagccttatatataatgaactttgtactattcacattttgtatcagtattatgtagcataacaaaggtcataatgctttcagcaattgatgtcattttattaaagaacattgaaaaacttga

SEQ ID NO: 1095 - DNA, 2577 bp, Homo sapiens
tctgcttagtcatggtgacctgcgcgcgctccgcgcctcccccacgcgcagcgatggaggcgccggggctcgggcggtggaggcggagccggagcgcggccatggcggggtccctgagtgccagaggtggtggtgttgcttatcttctggaaccccatgcagccagatcccaggcctagcggggctggggcctgctgccgattcctgcccctgcagtcacagtgccctgagggggcaggggacgcggtgatgtacgcctccactgagtgcaaggcggaggtgacgccctcccagcatggcaaccgcaccttcagctacaccctggaggatcataccaagcaggcctttggcatcatgaacgagctgcggctcagccagcagctgtgtgacgtcacactgcaggtcaagtaccaggatgcaccggccgcccagttcatggcccacaaggtggtgctggcctcatccagccctgtcttcaaggccatgttcaccaacgggctgcgggagcagggcatggaggtggtgtccattgagggtatccaccccaaggtcatggagcgcctcattgaattcgcctacacggcctccatctccatgggcgagaagtgtgtcctccacgtcatgaacggtgctgtcatgtaccagatcgacagcgttgtccgtgcctgcagtgacttcctggtgcagcagctggaccccagcaatgccatcggcatcgccaacttcgctgagcagattggctgtgtggagttgcaccagcgtgcccgggagtacatctacatgcattttggggaggtggccaagcaagaggagttcttcaacctgtcccactgccaactggtgaccctcatcagccgggacgacctgaacgtgcgctgcgagtccgaggtcttccacgcctgcatcaactgggtcaagtacgactgcgaacagcgacggttctacgtccaggcgctgctgcgggccgtgcgctgccactcgttgacgccgaacttcctgcagatgcagctgcagaagtgcgagatcctgcagtccgactcccgctgcaaggactacctggtcaagatcttcgaggagctcaccctgcacaagcccacgcaggtgatgccctgccgggcgcccaaggtgggccgcctgatctacaccgcgggcggctacttccgacagtcgctcagctacctggaggcttacaaccccagtgacggcacctggctccggttggcggacctgcaggtgccgcggagcggcctggccggctgcgtggtgggcgggctgttgtacgccgtgggcggcaggaacaactcgcccgacggcaacaccgactccagcgccctggactgttacaaccccatgaccaatcagtggtcgccctgcgcccccatgagcgtgccccgtaaccgcatcggggtgggggtcatcgatggccacatctatgccgtcggcggctcccacggctgcatccaccacaacagtgtggagaggtatgagccagagcgggatgagtggcacttggtggccccaatgctgacacgaaggatcggggtgggcgtggctgtcctcaatcgtctcctttatgccgtggggggctttgacgggacaaaccgccttaattcagctgagtgttactacccagagaggaacgagtggcgaatgatcacagcaatgaacaccatccgaagcggggcaggcgtctgcgtcctgcacaactgtatctatgctgctgggggctatgatggtcaggaccagctgaacagcgtggagcgctacgatgtggaaacagagacgtggactttcgtagcccccatgaagcaccggcgaagtgccctggggatcactgtccaccaggggagaatctacgtccttggaggctatgatggtcacacgttcctggacagtgtggagtgttacgacccagatacagacacctggagcgaggtgacccgaatgacatcgggccggagtggggtgggcgtggctgtcaccatggagccctgccggaagcagattgaccagcagaactgtacctgttgaggcacttttgtttcttgggcaaaaatacagtccaatggggagtatcattgtttttgtacaaaaaccgggactaaaagaaaagacagcactgcaaataacccatcttccgggaagggaggccaggatgcctcagtgttaaaatgacatctcaaaagaagtccaaagcgggaatcatgtgcccctcagcggagccccgggagtgtccaagacagcctggctgggaaagggggtgtggaaagagcaggcttccaggagagaggcccccaaaccctctggccgggtaataggcctgggtcccactcacccatgccggcagctgtcaccatgtgatttattcttggatacctgggagggggccaatgggggcctcagggggaggccccctctggaaatgtggttcccagggatgggcctgtacatagaagccaccggatggcacttccccaccggatggacagttattttgttgataagtaaccctgtaattttccaaggaaaataaagaacagactaactagtgtctttcaccctgaaaaaaaaaaaaaa

SEQ ID NO: 1096 - DNA, 2606 bp, Homo sapiens
ctttccgccctctccccgcctccttttcgggcgtcccgaggccgctccccaaccgacaaccaagaccccgcaggccacgcagccctggagccgaggccccccgacggcggaggcgcccgcgggtcccctacagccaaggtccctgagtgccagaggtggtggtgttgcttatcttctggaaccccatgcagccagatcccaggcctagcggggctggggcctgctgccgattcctgcccctgcagtcacagtgccctgagggggcaggggacgcggtgatgtacgcctccactgagtgcaaggcggaggtgacgccctcccagcatggcaaccgcaccttcagctacaccctggaggatcataccaagcaggcctttggcatcatgaacgagctgcggctcagccagcagctgtgtgacgtcacactgcaggtcaagtaccaggatgcaccggccgcccagttcatggcccacaaggtggtgctggcctcatccagccctgtcttcaaggccatgttcaccaacgggctgcgggagcagggcatggaggtggtgtccattgagggtatccaccccaaggtcatggagcgcctcattgaattcgcctacacggcctccatctccatgggcgagaagtgtgtcctccacgtcatgaacggtgctgtcatgtaccagatcgacagcgttgtccgtgcctgcagtgacttcctggtgcagcagctggaccccagcaatgccatcggcatcgccaacttcgctgagcagattggctgtgtggagttgcaccagcgtgcccgggagtacatctacatgcattttggggaggtggccaagcaagaggagttcttcaacctgtcccactgccaactggtgaccctcatcagccgggacgacctgaacgtgcgctgcgagtccgaggtcttccacgcctgcatcaactgggtcaagtacgactgcgaacagcgacggttctacgtccaggcgctgctgcgggccgtgcgctgccactcgttgacgccgaacttcctgcagatgcagctgcagaagtgcgagatcctgcagtccgactcccgctgcaaggactacctggtcaagatcttcgaggagctcaccctgcacaagcccacgcaggtgatgccctgccgggcgcccaaggtgggccgcctgatctacaccgcgggcggctacttccgacagtcgctcagctacctggaggcttacaaccccagtgacggcacctggctccggttggcggacctgcaggtgccgcggagcggcctggccggctgcgtggtgggcgggctgttgtacgccgtgggcggcaggaacaactcgcccgacggcaacaccgactccagcgccctggactgttacaaccccatgaccaatcagtggtcgccctgcgcccccatgagcgtgccccgtaaccgcatcggggtgggggtcatcgatggccacatctatgccgtcggcggctcccacggctgcatccaccacaacagtgtggagaggtatgagccagagcgggatgagtggcacttggtggccccaatgctgacacgaaggatcggggtgggcgtggctgtcctcaatcgtctcctttatgccgtggggggctttgacgggacaaaccgccttaattcagctgagtgttactacccagagaggaacgagtggcgaatgatcacagcaatgaacaccatccgaagcggggcaggcgtctgcgtcctgcacaactgtatctatgctgctgggggctatgatggtcaggaccagctgaacagcgtggagcgctacgatgtggaaacagagacgtggactttcgtagcccccatgaagcaccggcgaagtgccctggggatcactgtccaccaggggagaatctacgtccttggaggctatgatggtcacacgttcctggacagtgtggagtgttacgacccagatacagacacctggagcgaggtgacccgaatgacatcgggccggagtggggtgggcgtggctgtcaccatggagccctgccggaagcagattgaccagcagaactgtacctgttgaggcacttttgtttcttgggcaaaaatacagtccaatggggagtatcattgtttttgtacaaaaaccgggactaaaagaaaagacagcactgcaaataacccatcttccgggaagggaggccaggatgcctcagtgttaaaatgacatctcaaaagaagtccaaagcgggaatcatgtgcccctcagcggagccccgggagtgtccaagacagcctggctgggaaagggggtgtggaaagagcaggcttccaggagagaggcccccaaaccctctggccgggtaataggcctgggtcccactcacccatgccggcagctgtcaccatgtgatttattcttggatacctgggagggggccaatgggggcctcagggggaggccccctctggaaatgtggttcccagggatgggcctgtacatagaagccaccggatggcacttccccaccggatggacagttattttgttgataagtaaccctgtaattttccaaggaaaataaagaacagactaactagtgtctttcaccctgaaaaaaaaaaaaaa

SEQ ID NO: 1097 - DNA, 3009 bp, Homo sapiens
tgtggagcgaagccttgttcccgcgttgagccgccgccgccgccgccgcctcctcagcttcagcctccgcgccaggcccggccccgccgcgccatgtcggactacagcacgggaggacccccgcccgggccgccgccgcccgccggcgggggcgggggagccggaggcgccgggggaggccctccgccgggcccgccaggcgcgggggaccggggcggcggcggtccctgcggcggcggcccgggcggggggtcggccgggggcccctctcagccacccggcggaggcggcccgggaatccgcaaggacgctttcgccgacgccgtgcagcgggcccgccagattgcagccaaaattggaggcgatgctgccacgacagtgaataacagcactcctgattttggttttgggggccaaaagagacagttggaagatggagatcaaccggagagcaagaagctggcttcccagggagactcaatcagttctcaacttggacccatccatcctcccccaaggacttcaatgacagaagagtacagggtcccagacggcatggtgggcctgatcattggcagaggaggtgaacaaattaacaaaatccaacaggattcaggctgcaaagtacagatttctccagacagcggtggcctacccgagcgcagtgtgtccttgacaggagccccagaatctgtccagaaagccaagatgatgctggatgacattgtgtctcggggtcgtgggggccccccaggacagttccacgacaacgccaacgggggccagaacggcaccgtgcaggagatcatgatccccgcgggcaaggccggcctggtcattggcaagggcggggagaccattaagcagctgcaggaacgcgctggagtgaagatgatcttaattcaggacggatctcagaatacgaatgtggacaaacctctccgcatcattggggatccttacaaagtgcagcaagcctgtgagatggtgatggacatcctccgggaacgtgaccaaggcggctttggggaccggaatgagtacggatctcggattggcggaggcatcgatgtgccagtgcccaggcattctgttggcgtggtcattggccggagtggagagatgatcaagaagatccagaatgatgctggcgtgcggatacagttcaagcaagatgacgggacagggcccgagaagattgctcatataatggggcccccagacaggtgcgagcacgcagcccggatcatcaacgacctcctccagagcctcaggagtggtcccccaggtcctccagggggtccaggcatgcccccggggggccgaggccgaggaagaggccaaggcaattggggtccccctggcggggagatgaccttctccatccccactcacaagtgtgggctggtcatcggccgaggtggcgagaatgtgaaagccataaaccagcagacgggagccttcgtagagatctcccggcagctgccacccaacggggaccccaacttcaagttgttcatcatccggggttcaccccagcagattgaccacgccaagcagcttatcgaggaaaagatcgagggtcctctctgcccagttggaccaggcccaggtggcccaggccctgctggcccaatggggcccttcaatcctgggcccttcaaccaggggccacccggggctcccccacatgccggggggccccctcctcaccagtacccaccccagggctggggcaatacctacccccagtggcagccgcctgctcctcatgacccaagcaaagcagctgcagcggccgcggaccccaacgccgcgtgggccgcctactactcacactactaccagcagcccccgggccccgtccccggccccgcaccggcccctgcggccccaccggctcagggtgagccccctcagcccccacccaccggccagtcggactacactaaggcctgggaagagtattacaaaaagatcggccagcagccccagcagcccggagcgcccccacagcaggactacacgaaggcttgggaggagtactacaagaagcaagcgcaagtggccaccggagggggtccaggagctcccccaggctcccagccagactacagtgccgcctgggcggaatattacagacagcaggccgcttactacggacagaccccaggtcctggcggcccccagccgccgcccacgcagcagggacagcagcaggctcaatgaatcgaatgaatgtgaacttcttcatctgtgaaaaatcttttttttttccattttgttctgtttgggggcttctgttttgtttggcgagagagcgatggtgccgtggggagtactggggagccctcgcggcaagcagggtgggggggacttgggggcatgccgggccctcactctctcgcctgttctgtgtctcacatgctttttctttcaaaattgggatccttccatgttgagccagccagagaagatagcgagatctaaatctctgccaaaaaaaaaaaaaacttaaaaattaaaaacacaaagagcaaagcagaacttataaaattatatatatatatattaaaaagtctctattcttcaccccccagccttcctgaacctgcctctctgaggataaagcaattcattttctcccaccctcggccctcttgtttttaaaataaacttttaaaaaggaaaaaaaaaagtcactcttgctatttcttttttttagttagaggtggaacattccttggaccaggtgttgtattgcaggaccccttcccccagcagccaagccccctcttctctccctcccgccctggctcagctcccgcggccccgcccgtcccccctcccaggactggtctgttgtcttttcatctgttcaagaggagattgaaactgaaaacaaaatgagaacaacaaaaaaaattgtatggcagtttttactttttatcgctcgtttttaacttcacaaataaatgataacaaaacctcaaaaaaaaaaaaaaaaaa

SEQ ID NO: 1098 - DNA, 5023 bp, Homo sapiens
ggcggcggcgagccggtgccctgggatcatggtggcgttgcggggccttggtagcggcctgcagccctggtgtccgctggatcttagactcgaatgggttgacacagtgtgggaactggatttcacagagactgagcctttggatcccagcatagaagcagagatcatagagactggattggctgcattcacaaaactctatgaaagccttttaccctttgctactggagaacatggatctatggagagtatctggaccttcttcattgagaacaatgtttcccatagtacactggtggcattgttctatcattttgttcaaatagttcataagaagaatgtcagtgtacagtatcgagaatatggccttcatgccgctgggctttactttttgctactagaagtaccaggcagtgtagccaatcaagtattccacccagtgatgtttgacaaatgcattcagactctaaagaagagctggccccaggaatctaacttgaatcggaaaagaaagaaagaacagcctaagagctctcaggctaaccccgggaggcatagaaaaaggggaaagccacccaggagagaagatattgagatggatgaaattatagaagaacaagaagatgagaatatttgtttttctgcccgggacctttctcaaattcgaaatgccatctttcaccttttaaagaattttttaaggcttctgccaaagttttccttgaaagaaaagccacaatgtgtacagaattgtatagaggtctttgtttcattaactaattttgagccagttcttcatgaatgtcatgttacacaagccagagctcttaaccaagcaaaatacataccagaactggcttattatggattgtatttgctgtgctctcccattcatggagaaggagataaggtcatcagttgtgttttccatcaaatgctcagtgtaatattaatgttagaagttggtgaaggatcccatcgtgccccccttgctgttacctcccaagtcatcaactgtagaaaccaggcggtccagtttatcagcgcccttgtggatgaattaaaggagagtatattcccagtcgtccgtatcttactgcagcacatctgtgccaaggtggtagataaatcagagtatcgtacttttgcagcccagtccctagtccagctgctcagtaaacttccttgtggggaatacgctatgttcattgcctggctttacaaatactcccgaagttccaagatcccacaccgggtttttactcttgatgttgtcttagctctgttagaactgcctgaaagagaggtggataacaccctctccttggagcatcagaagttcttaaagcataagttcctggtgcaggaaattatgtttgatcgttgcttagacaaggcgcctactgtccgcagcaaggcactgtccagctttgcacactgtctggagttgactgttaccagtgcgtcggagagtatcctggagctcctgattaacagtcctacgttttctgtaatagagagtcaccctggtaccttactgagaaattcatcagctttttcctaccaaaggcagacatctaaccgttccgaaccctcaggggagatcaacatagacagcagtggtgaaacagttggatctggagaaagatgtgtcatggcaatgctgagaaggaggatcagggatgagaagaccaacgttaggaagtctgcactgcaggtattagtgagtattttgaaacactgtgatgtctcaggcatgaaggaagacctgtggattctgcaggaccagtgtcgggaccctgcagtgtctgtccggaagcaggccctccagtctcttactgaactccttatggctcagcctagatgcgtgcagatccagaaagcctggttgcggggggtggtcccggtggtgatggactgcgagagcactgtgcaggagaaggccctggagttcctggaccagctgctgctgcagaacatccggcatcacagtcattttcactctggggacgacagccaggtcctcgcctgggcgcttcttactctcctcaccaccgaaagccaggaactgagccgatatttaaataaggcttttcatatctggtccaagaaagaaaaattctcacccacttttataaacaatgtaatatctcacactggcacggaacattcggcacctgcctggatgctgctctccaagattgctggctcctcacccaggctggactacagcagaataatacaatcttgggagaaaatcagcagtcagcagaatcccaattcaaacaccttaggacatattctctgtgtgattgggcatattgcaaagcatcttcctaagagcacccgggacaaagtgactgatgctgtcaagtgtaagctgaatggatttcagtggtctctagaggtgatcagttcagctgttgacgccttgcagaggctttgtagagcatctgcagagacaccagcagaggagcaggaattgctgacgcaggtgtgtggggatgtactctccacctgcgagcaccgcctctccaacatcgttctcaaggagaatggaacagggaatatggacgaagacctgttggtgaagtacatttttaccttaggggatatagcccagctgtgtccagccagggtggagaagcgcatcttccttctgattcagtccgtcctggcttcgtctgctgatgctgaccactcaccatcatctcaaggcagcagtgaggccccagcgtctcagccacccccccaggtcagaggttctgtcatgccctctgtgattagagcacatgccatcattaccttaggtaagctgtgcttacagcacgaggatctggcaaagaagagcatcccagccctggtgcgagagctcgaggtgtgtgaggacgtggctgtccgcaacaacgtcatcattgtaatgtgcgatctctgcattcgctacaccatcatggtggacaagtatattcccaacatctccatgtgtctgaaggattccgacccattcatccggaagcagacactcatcttgcttaccaatctcttgcaggaggaatttgtgaaatggaagggctccctgttcttccgatttgtcagcactctgatcgattcacacccagacattgccagcttcggggagttttgcctggctcacctgttactgaagaggaaccctgtcatgttcttccaacacttcattgaatgtatttttcactttaataactatgagaagcatgagaagtacaacaagttcccccagtcagagagagagaagcggctgttttcattgaagggaaagtcaaacaaagagagacgaatgaaaatctacaaatttcttctagagcacttcacagatgaacagcgattcaacatcacttccaaaatctgccttagtattttggcgtgctttgctgatggcatcctacccctggacctggacgccagtgagttactctcagacacgtttgaggtcctcagctcaaaggagatcaagcttttggcaatgagatctaaaccagacaaagacctccttatggaagaagatgacatggccttggcaaatgtagtcatgcaggaagctcagaagaagctcatctcacaagttcagaagaggaatttcatagaaaatattattccaattatcatctccctgaagactgtgctggagaaaaataagatcccagctttgcgggaactcatgcactatctcagggaggtgatgcaggattaccgagatgagctcaaggacttctttgcagttgacaaacagctggcatcagagcttgagtatgacatgaagaagtaccaggaacagctggtccaggagcaggagctagcaaaacatgcagatgtggccgggacggctggaggtgctgaggtggcacctgtggcacaggttgccctgtgtttagaaacagtgccagttcctgctggccaagaaaaccctgccatgtcacctgccgtgagccagccctgcacacccagggcaagtgctggccatgtagcagtatcatctcctacacctgaaacagggccattgcagaggttgctgcccaaagccaggcccatgtccctgagcaccattgcaatcctgaattctgtcaagaaagccgtggagtcaaagagcaggcatcggagtcggagcttaggagtgctgcctttcactttaaattctggaagcccagaaaaaacgtgcagtcaggtgtcttcatacagtttggagcaagagtcgaatggcgagattgagcacgtgaccaagcgggccatcagcacccccgagaagagcatcagtgatgtcacgtttggagcaggggtcagttacatcgggacaccacggactccgtcgtcagccaaagagaaaattgaaggccggagtcaaggaaatgacatcttatgtttatcactgcctgataaaccgcccccacagcctcagcagtggaatgtgcggtctcccgccaggaataaagacactccagcctgcagcaggaggtccctccgaaagacccctctgaaaacagccaactaaacagcgcctcccaccagtgtccaggcaggcaggagcccttgaggaagcagtctcgtgtcctccgtgtgaaggcagctggatcacttcccgcagtccttgggcagcgctttgctgtggaacacgagagctcctcctcaggggcctggcactcaccttctattctgtatgatgtatttggttaaacactgtcaaataatagagatgtgccagatttagattttcttaccctaatctgtttaatattgtaactttattccatttgaaagtgtcaagcccattcagataagctataatctggtctttaaggaatacaactttaaaactgcagctttcttttatataaatcaagcctctgttaacttgaattccttatagtacatattttcccatctgtaatgccggaattttgattctaatattttttctattatttataagtgcaaatttttttaaaaagtgtacagctttcttaaagtaataaaggtttagcataaatac

SEQ ID NO: 1099 - DNA, 5103 bp, Homo sapiens
agaaggcggagcctacctctcatcaggaccagtctgactgcacctgcatccttagctcagagcatccccggagcatcttaagagctgagcgcagctgacaactaggggccggaccgtcgcaggaggcgtccgctggataccttcccccttccctgacctagagctctacagctgctgcctcggtactgaccgagggttcccagagctgtctcaccattgcaaaaacgttatagcaacagcctctgattacgacatggctgagatcaccaatatccgacctagctttgatgtgtcaccggtggtggccggcctcatcggggcctctgtgctggtggtgtgtgtctcggtgaccgtctttgtctggtcatgctgccaccagcaggcagagaagaagcacaagaacccaccatacaagtttattcacatgctcaaaggcatcagcatatacccagagaccctcagcaacaagaagaaaatcatcaaagtgcggagagacaaagatggtcctgggagggaaggtggacgtaggaacctgttggtggacgcagcagaggctggcctgctaagccgagacaaagatcccagggggcctagctctggatcttgtatagaccaattacccatcaaaatggactatggggaagaactaaggagccctattacaagcctgacccctggggagagcaaaaccacctctccatcatctccagaggaggatgtcatgctaggatccctcaccttctcagtggactataacttcccgaaaaaagccctggtggtgacaatccaggaggcccacgggctgccagtgatggatgaccagacccagggatctgacccctacatcaaaatgaccatccttcctgacaaacggcatcgggtgaagaccagagtgctgcggaagaccctggaccctgtgtttgacgagaccttcaccttctatgtcatcccctacagccagctgcaggacctggtgctgcacttccttgtcctcagctttgaccgcttctctcgggatgatgtcattggcgaggtcatggtgccactggcaggggtggaccccagcacaggcaaggtacaactgaccagggacatcatcaaaaggaatatccagaagtgcatcagcagaggggagctccaggtgtctctgtcatatcagcctgtggcacagagaatgacagtggtggtcctcaaagccagacacttgccgaagatggatatcaccggtctctcaggtaatccttatgtcaaggtgaacgtctactacggcagaaagcgcattgccaagaagaaaacccatgtgaagaagtgcactttgaaccccatcttcaatgaatctttcatctacgacatccccactgacctcctgcctgatatcagcatcgagttcctcgttatcgacttcgatcgcaccaccaagaatgaggtggtggggaggctgatcctgggggcacacagtgtcacagccagtggtgctgaacactggagagaggtctgcgagagcccccgcaagcctgtggccaagtggcacagtctgagcgagtactaatcctgttcttctctcctctaatccccgggggccaagctggggagggatgtggaggggaaaaagatgacagagaagtggactccaaacctcattttagttgtagaagaaaatttcttacaaaacaaattccacaaagaacaccctatatgaccacagctgcagatcagttcttagcaatgatgtttttttttctgctttgcaaggcgctagaatcttttattttactttattttttttgaggtggagtttcgctcttgttgcccgggctggagtgcaatggtgagatctcaactcactgcaacctctgcccttcaggttcaagtgattctcctccctcagcctcccaagtagctgggattacaggcacccacgagcatgcccggctaattttttgtattttcagtagagatgggtttcaccatgttggccaggctggtctcgaattccagacctcaggtgatccacccgcctcggcctcccaaagtgctgggattacaggtgcgagccaccgtgcccggcctctggttttgttttgttttttttttttaatgggggacaaaagagagggaaagacccctataaatctatatataacaatgtaaccatatacttgcatgtctaatacaaactgaagaaattagcctaactgccaatatcaagttgcagattttaatccatggaaattgtgttttgtgctgaattgtatttgctgattacctgaaattggcttctttttattgggcttctctggagaatttctcccactccccacctctgcagaagaaaattttgctcttataaaacctcatgttttcatcattcctatcttttctttttattgcctcttatatctctgctctttgacctcaaggtctagaggtctgcagtaagccaagaaacaaaggtggggtggatgaggcaaggtttgcaggagaaagaggaattgagaaatggggtatttttgctatcagctcttctgctatgaagtagtaaaaggcagtctataattaactgacagacctaactgaagcacagagaatacatcagacttatgcatccaagacatcagaacttggattttatcaaacttgatgacttctctaaaaggagctttggaaacttcaaattcagctataggatagtaccaatgaacacatccagctgatcccaaaagctgttttcaggtataaggacaaggagaggagacaagtgacgacagccattcccctttgcagctatctactgtagtgacagccatttcttggttgatgggttggaagtcatcagaggtttgaagaattacactggcctttgtttttctggaaatgccgaccatggagatgctttagagtcttctaaaatagcttagatgttgtaatgaggttagctttgcttcataaaacaggggccctcagaagttctccttaaatttttcaataaaaatttagctcttaaaaaaataacagtgtgactgagtgaatgaagataagttggattctttcagagcattcttttcctcaaaacgagctgcataattcttggaatttatgtcttaccacatggtggagggatgggggaactacaggatgcaattcttcttctaccaatgggcaatagaggttgagagagattcagcatctttctgggattagaattcaagtctctttactcctacagcagctgcgtctccaacgttgagactttgcagatggcacagactccatggataataggtaaacttggggccgggcgcagtggctcacgcctgtaatcccggtattttgggaggccgaggtggaaagatcgcttgagcccaggagttcaagaccagcctgggctacatgacgaaactccatctctatcaaaaatacaaaaaattaactaggtgtggtgctgcacgcctgtggtcccagctattcaggaggctgaggtgggaggatcatttgagcccagaggtagaggctgcagtgagccatgatcatgccactgcactctgggctgggtaacagagtgagatcctgtctcaaaaattaattaattaattaattaaaataaactaggtaaacttggataggcagtagatatttttgcccacctgaggaggatctcagtcaagctgttgcttaacagcttgatccagggcgtgaaaggttagttgagactgaagtgttcacttccatagaagaacatcacttttaaccttgctttggcgaagggagtcggaaagctgagtctctatggacgggggggtgatcttgctttcagtgttccctcagcttttgtggatttaaaaccattctgctccccctaaaccttttgtttgatttcagcccatgttcttgacaatgcagagcaattctgagcagtcacaaagcctactctctgttcttgtccctgccaacccccaccccccataatctgactcacaacttcaccatcagttggggtcataccactagtctctgtcctataccccatgaaatgtaaatactgtatcataagtagaagaaaataatttttgttttctaaaaatgcattttgagatagtttaatgtaaatctgacaggagcattctgaagccccattaggaaaaaatttaaatggttcctcttcatcgccttaatgtctaaagatcagaaatcgctgagcaaacccgcttttgtttccttcccagaaacaatgcaaaacaacaggtggagatagtctggtctttgccctgctgtgtgtgcctctgtagctcctcctgacaaacgtctgggaaaacagcctcaccccactctcctctctcttccccatttccttgtagctttattccttgcatctttgggtctactgagcagtgggtgctgaggtgacaggggaggaaccagttgttctgtagcctaggaactgcctcagtgtctttgccagaaaaaggcaaagaggcggacagtgcagggctcctccctcctacctcaggcctgatccatcgtgcccttgactttgccgtctcaaagtttcttagctgactttggctttcacatttgttctttccagagctaactgataagagtggaggaggaatgccttctcctaagagtcagttgaaagaaagacaagagagtcacatcttagcttttgcacaaggcattcgtggtcaggaataggttagggaatggtcacttctgattttccaacagttgctccttctctgaagagatcttgattcctttgggaagacaagaatttttcttaataacaaaggtcactttatgagttattccttctttcagttcatctcactggagcacagccaagatggacatgtttatggacagtgctctagatgtgaaaacagatagaactggtttgtgggacaggggcagcttgctcaggagagggaataacgcaggtcccttttcttggaaggcttgtactatggccatgacagtgacattgccctcaccatgatccctctccaaagtggttgtctttctttaccttgtgtcttctcttgtaaaaatgaaactcaaaaataaaataaatgtgtcaaatttcgaaaaaaaaaaaaaaaa

SEQ ID NO: 1100 - DNA, 1268 bp, Homo sapiens
gccctctcaccccgctgcctctaggttctgggaagatggcgaaggtctcagagctttacgatgtcacttgggaagaaatgagagataaaatgagaaaatggagagaagaaaactcaagaaatagtgagcaaattgtggaagttggagaagaattaattaatgaatatgcttctaagctgggagatgatatttggatcatatatgaacaggtgatgattgcagcactagactatggtcgggatgacttggcattgttttgtcttcaagagctgagaagacagttccctggcagtcacagagtcaagcgattaacaggcatgagatttgaagccatggaaagatatgatgatgctatacagctatatgataggattttacaagaagatccaactaacactgctgcaagaaagcgtaagattgccattcgaaaagcccaggggaaaaatgtggaggccattcgggagctgaatgagtatctggaacaatttgttggagaccaagaagcctggcatgaacttgcagaactttacatcaatgaacatgactatgcaaaagcagccttttgtttagaggaactaatgatgactaatccacacaaccacttatactgtcagcagtatgctgaagttaagtatacccaaggtggacttgaaaacctcgaactttcaagaaagtattttgcacaggcattgaaactgaacaacagaaatatgagagctttgtttggactttatatgtcggcaagtcatattgcttctaatccaaaagcaagtgcaaaaacgaaaaaggacaacatgaaatatgctagttgggcagctagtcaaataaacagagcttatcagtttgcaggtcgaagtaagaaggaaaccaaatattctcttaaggctgtcgaagacatgttggaaacattgcagatcacccagtcttaaggtttcaaaaactctttgacattagatttcacaactgcacaattgaacttattggcctgtaacttatttactaaatgctcagtgctatttatatactacagtaattttctgttaagaaggcagttgtaaagaatgtgtttatataaacctaaaaatgccttttactgctaagtggggagatgggggaaatccatggaagagagatttaagacttattgattgtacatcagtctcttcatatcacatatacatgtatatatataaaactctaatgtagtataaccttgttaaataaaccatgatgatttacaaaaaaaaaaaaaaaaaaaaaaaaaaaaa

SEQ ID NO: 1101 - DNA, 1702 bp, Homo sapiens; identical to SEQ ID NO: 469

SEQ ID NO: 1102 - DNA, 1431 bp, Homo sapiens
agctgcagtctgggagtctttggagtaagaatggccttggaagggatgagcaaacggaagagaaagagaagtgtccaggagggagagaatcctgacgacggcgttcgcgggagtccgccggaagactacaggcttggacaggtcgccagtagcttatttcgcggcgaacaccattccagaggtggcaccggtcggctggcgtccctcttcagttctctggagccccagattcaacccgtgtacgtgcctgtgcctaaacaaaccatcaaaaaaacgaaacggaatgaggaggaagaaagtacatcccagattgaaagaccactttcgcaagaacctgccaaaaaagtgaaagcgaagaagaaacacactaacgcagaaaaaaagttggcagacagggaaagcgctctagcgagtgctgatttagaagaagaaattcaccagaaacaagggcagaaaaggaaaaattctcaacctggtgttaaagtagcagatagaaaaatacttgatgacacagaagacacagttgtcagtcaaagaaagaaaattcaaatcaaccaagaagaagagagattaaagaatgagagaactgtgtttgttgggaatttgcctgttacatgtaataagaagaagctgaagtcgttttttaaagagtatggacaaatagaatctgtacgatttcgttctctgattccagcagagggaacgctatccaaaaagttggcagcaataaaacgtaaaattcatcctgatcagaaaaatattaatgcctatgttgtgtttaaggaggagagtgctgccacgcaagcattgaaaagaaatggggcccagattgcagatggatttcgtattagagttgatctcgcatctgagacctcatctagagacaagagatcggtttttgtggggaatctcccttataaagttgaagaatctgccattgagaagcactttctggactgtggaagtatcatggccgtgaggattgtgagagacaaaatgacaggcatcggcaaagggtttggctatgtgctctttgagaatacagattctgttcatcttgctctgaaattaaataattctgaactcatggggagaaaactcagagtcatgcgttctgttaataaagaaaaatttaaacaacaaaattcaaatccacgattgaagaatgtcagtaaacctaagcagggacttaattttacttccaaaactgcagaaggacatcctaaaagcttatttattggagaaaaagctgttctccttaaaacgaagaagaaaggacagaagaaaagtggacgccctaagaaacagagaaaacagaaataacaaccaggaactgctttttcttttcctgctgagtactgctaataaaagtgctattatctgctgatagcatcgtctgctaaaaaaaaaaaaaaaaaaaaaaaaaaaaaa

SEQ ID NO: 1103 - DNA, 3353 bp, Homo sapiens
gcggcgctggagtcggcgcgggtgctggcgccatggaggccgagcggggtcccgagcgccggcctgcggagcgtagcagcccgggccagacgccggaggagggcgcgcaggccttggccgagttcgcggcgctgcacggcccggcgctgcgcgcttcgggggtccccgaacgttactggggccgcctcctgcacaagctggagcacgaggttttcgacgctggggaagtgtttgggatcatgcaagtggaggaggtagaagaggaggaggacgaggcagcccgggaggtgcggaagcagcagcccaacccggggaacgagctgtgctacaaggtcatcgtgaccagggagagcgggctccaggcagcccaccccaacagcatcttcctcatcgaccacgcctggacgtgccgtgtggagcacgcgcgccagcagctgcagcaggtgcccgggctgctgcaccgcatggccaacctgatgggcattgagttccacggtgagctgcccagtacagaggctgtggccctggtgctggaggagatgtggaagttcaaccagacctaccagctggcccatgggacagctgaggagaagatgccggtgtggtatatcatggacgagttcggttcgcggatccagcacgcggacgtgcccagcttcgccacggcacccttcttctacatgccgcagcaggtggcctacacgctgctgtggcccctgagggacctggacactggcgaggaggtgacccgagactttgcctacggagagacggaccccctgatccggaagtgcatgctgctgccctgggcccccaccgacatgctggacctcagctcttgcacacccgagccgcccgccgagcactaccaggccattctggaggaaaacaaggagaagctgccacttgacatcaaccccgtggtgcacccccacggccacatcttcaaggtctacacggacgtgcagcaggtggccagcagcctcacccacccgcgcttcaccctcacccagagtgaggcggacgccgacatcctcttcaacttctcacacttcaaggactacaggaaactcagccaggagaggccaggcgtgctgctgaaccagttcccctgcgagaacctgctgactgtcaaggactgcctggcctccatcgcgcgccgggcaggtggccccgagggcccaccctggctgccccgaaccttcaacctgcgcactgagctgccccagtttgtcagctacttccagcagcgggaaaggtggggcgaggacaaccactggatctgcaagccctggaacctggcgcgcagcctggacacccacgtcaccaagagcctgcacagcatcatccggcaccgagagagcacccccaaggttgtgtccaagtacatcgaaagtcccgtgttgttccttcgagaagacgtgggaaaggtcaagttcgacatccgctacatcgtgctgctgcggtcagtgaggcccctacggttgttcgtgtatgatgtgttctggctgcggttctccaaccgggcctttgcactcaacgacctggatgactacgagaagcacttcacggtcatgaactatgacccggatgtggtgctgaagcaggtgcactgtgaagagttcatccccgagtttgagaagcaatacccagaatttccctggacggacgtccaggctgagatcttccgggccttcacggagctgttccaggtggcctgtgccaagccaccacccctgggcctctgcgactacccctcatcccgggccatgtatgccgtcgacctcatgctgaagtgggacaacggcccagatggaaggcgggtgatgcagccgcagatcctggaggtgaacttcaaccccgactgtgagcgagcctgcaggtaccaccccaccttcttcaacgacgtcttcagcaccttgtttctggaccagcccggtggctgccacgttacctgccttgtctaggcactcgctgtccccaaaacctgtgcttggggcaggattccaacctcagttctctgagctgcttctgcaaaggcccccatgtccctccccacaccggccctgggcatagcctcagccccaggcctctgtcctgccgagccatcctcccggcgccacactccgggagcacagcatcctcctctcacctgtgggtcagagcaggacagtgatggtgtccccagggctgagcaccaccccacgccctgccctcacccctcaccaccatctgtgcactgatgagtctccagtttagccaagggctttgttcctggcatggagaatttgttcctggctgctgtgtttccagggggtgctgggggaagggttccgtggagcgagacaaggtgtcctcgggagcagggttccaccgggaagcgtttgggagccctgtatcacacggggcaggcgggtttctcttccggggtctctgctcttatgcatcaggacgaccccgggacggctgtggggccccacactgcacccacagggctctatgcgacaggggcccaggaacagcctgaggccaccacccagcaagcccgccttatcacccattccagctcacccagaaccttcaccagcaaacctcctgctgaggtcctggcaggaggccaccgtcttgttaccgtttccttttcgtttgctgagggtcacagaccccaacagggaaatcagtatctgtcttcccagtggttgccctgctcgccgggcactccacggggtcccgcccttgtgtgagatgggccaggatccttcggcaaggggcgcctggggctggggctgattgtgggcggtggagcgccagacagaaaaggattccaatgagaacttcaggttaaagtcagatgccacctaccagggtctacagtcaaaatgttggctttttcttattttttaatgtatgggagaaaaatgtaaaattccagttcttttctaattgtgtttctgaaattaggagtcagctgccagcgtttttgtgtggctgcagtgtgcctgggcccagctcacgggcagtgggtggacctaactgcccaggcaggcgagagctacttccagagccttccagtgcatgggagggcagggctaggtgtagcggtgtctcctctttgaaattaagaactatctttcttgtagcaaagctgcacctgatgatgctgcctctcctctctgtgttgtctgggcccttgtttacaagcacgcgttacccttcctgaggggagccatgctctagcccctggagggcctgttgcaggggcagggcgggcccgtcgcctttggcagctcctggagagctgtggacatgcagtccccctcagttcgtgctgcaataaaggccatcttctctta

SEQ ID NO: 1104 - DNA, 2377 bp, Homo sapiens
gaaccctgaagtcggtgtctgctgcgttcacggcaggattcggttaggaggaacagcacagcatgctgggctctggatttaaagctgagcgcttaagagtgaatttgagattagtcataaatcgccttaaactattggagaaaaagaaaacggaactggcccagaaagcaaggaaggagattgctgactatctggctgctgggaaagatgaacgagctcggatccgtgtggagcacattatccgggaagactacctcgtggaggccatggagatcctggagctgtactgtgacctgctgctggctcggtttggccttatccagtctatgaaggaactagattctggtctggctgaatctgtgtctacattgatctgggctgctcctcgactccagtcagaagtggctgagttgaaaatagttgctgatcagctctgtgccaagtatagcaaggaatatggcaagctatgtaggaccaaccagattggaactgtgaatgacaggctaatgcacaagctgagtgtggaagccccacccaaaatcctggtggagagatacctgattgaaattgcaaagaattacaacgtaccctatgaacctgactctgtggtcatggcagaagctcctcctggggtagagacagatcttattgatgttggattcacagatgatgtgaagaaaggaggccctggaagaggagggagtggtggcttcacagcaccagttggtggacctgatggaacggtgccaatgcccatgcccatgcccatgcctatgccatctgcaaatacgcctttctcatatccactgccaaagggaccatcagatttcaatggactgccaatggggacttatcaggcctttcccaatattcatccacctcagataccagcaactcccccatcgtatgaatctatgacattaatgctgataagaatatctcttctgcacagattgttggtcctggacccaagccagaagcctctgcaaagcttccttccagacctgcagataactatgacaactttgtcctaccagagttgccatctgtgccagacacactaccaactgcatctgctggtgccagcacctcagcatctgaagacattgactttgatgatctttcccggaggtttgaagagctgaaaaagaaaacataggtctcttaaaccaggcaactttcacgttttgggagttgagactgagcaatttctccttgtaacaaagaatctccatgaaattctgtttcatctgttaaccgtcactcagcacaacactccctctgggctctcttcctgctcctccagattctgctgctttccagttctctgttgatcctgagactaacaattggagactgaggccagagcaactggctcctggcagctgtgcttgtccgtttcctgtcagagtgatcccaggtttcctcctggcccgtcccatggtccctccacaggagtgtgagaggatgggggaagcactgtgggaagaccaccaaagatggctggacagtgggagagagcacgttgtgaagcatcccagcctcgtgttgaggttccagacttagaaacagacccctctgtacagggggattgtggtgagtgagaatcaaggccaccttgtgtgttttctcactctcgaatgcaagtgggagagggaaaatgactcgggacgccattgtaacggttcctggaagctgggccctctcattggcatatacagtactcctcgctgcagggcactgtcccaccgggatccagttgcaaagtttgtcttgacagttgaaggcctcgcttagttgtactggattctcagggagccctctgtggccttttgctttgcgtgctgtttcccttgtaccagagggcggcaccgtggaaattctgttttccctgtagcatattgtgttggattgcattactggcagagaaaggacaaggtgccattcaagtcctagggtgggcttccagctgccttaatagaagtactcaagtcttttgggtagtgagctggaaagcctacaggaaaagaggggtacctgttttcatttgaaaactttgattcatggaacctttaaaactaatctcagaaaaatttttggtgcccatgcagctgtagttgttcactgctttcctggatggatgggactcttatgtcataacttctgttactcctttggcccatagctaaggtcatccttccccacaggggtggctttgggattggatgatacagcttttgcttctgtgtagtatacctgtacatacttgtttcaggcagcctttctttaatgttttcagttggtttgtattctgtagctcagtagctgctaataaagttaaagatcctgaaaaaaaaaaaaaaaaaaaaaaaaaaaa

SEQ ID NO: 1105 - DNA, 5087 bp, Homo sapiens
cgccgccttctgtgcagtcgcggcccgggcggacggtggctggctgctccgcagcgctcggctggctgcagcggcaccgcgggttgcgcggccggggatgctccagcgggcgcgatggcccccgccatgcagccggccgagatccaatttgcccagcggctggcgtccagcgagaagggcatccgggaccgagcggtgaagaagctgcgccagtacatcagcgtgaagacgcagagggagacaggaggtttcagtcaggaagaacttctgaaaatctggaaggggctcttctactgcatgtgggtgcaggatgaaccccttctacaggaagagctcgccaacaccattgcacagctagtccatgctgttaacaactcagcggctcaacacctgttcattcagaccttttggcaaaccatgaatcgagaatggaaaggaatagacaggctacgcctggacaaatactatatgctgattcgtctggtcctgaggcagtcctttgaagtcttgaagcgaaatggctgggaagaaagccgaatcaaggttttcttggatgtcctgatgaaggaggtcctgtgtcctgagagtcagtctcctaatggagtgagattccacttcattgatatttacctggatgaactctccaaagtcggggggaaggagcttttagcagatcagaatctcaagtttatcgatccattctgcaaaattgctgcgaagacgaaggaccacaccctggtacagaccatagctcggggtgtcttcgaagctatcgtagatcagtctccttttgtgcctgaagagacgatggaggaacagaagacaaaagtgggtgatggtgacctctctgctgaggagatacctgaaaatgaggtatccttgagaagagctgtcagtaaaaagaagacagcactgggcaaaaaccattccagaaaagatggactcagtgatgaaagaggaagagatgactgtggaacctttgaggacacagggccccttctccagtttgactataaggctgttgctgatcgactcctggaaatgaccagcaggaagaacacgccccacttcaacaggaagcgcctctccaaactcatcaagaaattccaagacctttctgaaggaagcagtatatctcaactcagttttgcggaggacatttctgctgatgaagatgaccaaatcctcagtcaaggaaagcataagaagaaaggaaataaacttttagagaaaactaacttggaaaaggagaaaggaagcagagtcttttgtgtagaggaagaggacagtgaaagcagtcttcaaaagagaagaaggaagaagaagaagaagcaccacctgcagcctgaaaatccaggcccagggggtgcagccccatccctggaacagaaccggggcagggagcccgaggcctctgggctgaaagccctgaaggcacgtgtggccgagccaggtgcagaggccacgtccagcactggggaggagagtggctccgagcatcctccagccgtccccatgcacaataaaaggaaacggccacggaagaagagcccgagggcccacagggaaatgttggaatcagcagtgttgcccccagaggacatgtctcagagtggcccgagtggcagtcatcctcagggacctagagggtccccgacaggtggagcccaactcctaaaaaggaagcggaaacttggagttgtgcccgtcaatggcagtggcctgtccacgccggcctggcctccattgcagcaggaaggccctcccacaggccccgcagagggggcgaacagccacaccacgctgccccagcgcaggaggctgcagaaaaagaaggcagggcccggcagcctggagctctgtggcctgcccagccagaaaacagcaagtttgaaaaagaggaagaaaatgagagtgatgtcaaacttggtggagcacaacggggtgctggagtccgaagctgggcaaccccaggctctgggaagcagtgggacttgcagttccctgaagaagcagaagctgagggcagagagcgactttgtgaagtttgacacccccttcttaccaaagcccctgttcttcagaagagccaagagcagcactgccacccaccctccaggccctgccgtccagctaaacaagacaccatccagctccaagaaagtcacctttgggctgaacagaaacatgactgccgaattcaagaagacagacaagagtatcttggtcagtcccacgggcccttctcgagtggccttcgaccctgaacagaagcccctccacggggtgctgaagacccccaccagctcacctgccagctcacccctggtggccaagaagcccctgaccaccacaccaaggagaaggcccagggctatggatttcttctgaggagcagcagagtcccttgtaaaagactgcttttgtacagaatgcgctataaattatacctttaagaatgtggggccttttttatgattttgtaagttcccataagttgtgtgcacgaggttctgagagtgcccgcaggctgctgcgtcctggcccctctgtagtggctgcgggcgtcttggttgaatcttttgctacaaaccatgtttgcgtttgagctctccaggattttacatttttgggtaacctcagtgattcccattggtgtaggaaatgagaccctctctgaagctgaggagagcacgttgatctgaactttaaatcaatcagtgctgctggcacaatgaaaggtggaactgcacttctgttgagctctcagttctgcggaatttggtactcattaccgtattcgccgtactaagttggtttctgttagtcttaacagtctgttttcttttaaaagcatgtagggcttcattgccatgttctgtgggtgtttggcaggttaccgatggggaagattcttgtcacagaatcagcaataccatagtttttctacatgtgctcagctgggggtgtggacaggtaggggtggggaaagaagaggctctgcgttctgggggctttttcttctcctccccctacccggtttccctccctgttttcctacctctacggcaagcccaaagtgtcttcccgggagcccagcgcagcccccggctcttacccaggaccccgccccgtgctgagccttctgctgaggtccttgcgtggagcacactcattcctccaagcccttgcgctcccgtttctctctctctccgtccacgttccagccgagtcactgcctgaccggctccatggcagctccccatcttccctagaggctgcctgcgcatctggagcctgcgctccggctcagcgacctttcctctcaaatgcggaagcgtgcacttacagttcagaccgttctcctgtaagttcattacaaacacgggcggaaggcactcaggctttcgttggagaaacagaaataaggccttcttttgagcagcgattgctggatcattgatctgtttgaggaagtgtctgacctgggcctgagagctggagaaggtgcagattcaaagtgagcggctcctgaggagagccgccaaggctgctcgccttctccgtggcttccgcagctaccgtctgcacggtgagagggcacgggcacacggttcgggctggcgtgcagctctcccagccagccacgctctgctcaggcctggaagtgaaagccgcctccttcccgttatgccccccatacaggagcctcggtttttcagcaaaacgcggccagtccccttctccactgctgcctcccagcagagggccccaggatctccaaggtcccagctatggctttggacaacgtggcttcggcccctggggttgcagagcttgcattgggtttacctcggtctcattcattcatggagccaagggtggggtttcacctgcgaacatcagactgacttgctggcgtcaagagcagttgactcactgatgaaggccctggtgaggagaaagcactctgttcttcgcctactctgtaatcgttttgtcataatgagccatgaaaaaagtaatgaacttgtgctgttaatcgtcactgtaatgagaagtcttacgtacaacatagctgtggtggcttaatggctgcattagataggatcctcacatcccattcagaaccaaaactgatacagtgaaacaattaaggtgagcaaatagttttaacttttcttttttttttttaagtttcattcttcctagaatatttttctaacaatttttatttcagctttaaagatgggtcatatagccaaacgggccatataatccaacattgttgagatgtcttaggacatctaaggcaaaactggcacatttgttctgcagactattgcaggaatgttttttcctagcatttctatattatctgtccattctgaggaaccagtgaatgtcctataaatgcacctcctgtcaaaaccatgcctgagaggtcccggctgggagtgacagggtgcttcttagattctattggtccttctctcattctccgaacttactcctttttatgggtaagtcaactaggtttacagtcccttatttttaatgcctaagttttgacagcaggaagaaaacaattttttaaaaattctcattacatagacgcacaagaatatgtcacataaagaaaatgtgtttagaatactggttttctatttacgcatgatattttcctaagtaaaattgccaagtggacttggaagtccagaaaggaaaataatttaaattaatgctggtgatcttaacaatattttgtaaaatgatgcttcccccttctccatggtctagtcaattttgtacaattaggtatctgactttacaagtttgttatcctttctaatttttactgaactgaaagcacaaagaagactacacagaaaatctggaaacagttgcaggtgttgggaggaagatgaaatcgagctgtcttttaacttttgtatgtgttttatcagaatttgctggactatgctggcaaggactttgtttacgatcaaattgtactagtgtctgcagggtttgtcagtactcgtcaaagccaagtccaattaaaaaaaaaagtctttgccctccaa

SEQ ID NO: 1106 - DNA, 6447 bp, Homo sapiens
atcctcagaattcctcgggtccctcgatactcggctgaaaattctcatcggactctgagaggagcgctgggctggaggcattttccccagggacagaagcgggctattctctcacttgggccagtaagaaaaatccaaaaaaagttgtcgactctgccagcagggattggctaacgggccgttattttcttgactccaccaaggcggatgaaggggaggctacggctgaggccgggaacagtggcgaatctgcagcctctcagaatttggcagtgcaaggaagggacggggaagagaagcaaagcggcgcgcatcctgtccagcgattcgccccgcccgcccggtgaatctgcgtctgcagaacgcgccactgaaggttccccagcgctggctggcctcctcccctccgccccgccccttttcctcagggactagtcgcagctttcgtcgccgccgattcgtcaaggtcccgggccgcagcatctagatcgtcgtggcgaagccgactctccgggggatgcggccaatctccaagctccctgggccgcaacttccgagcctcccagggcgccggccgaggcgaagccgctaccctcggccccgtgggtcccccggcagcgcctgtggcgaaagtgcgaatgcagaccctgtgcccgctgggcctcgcgcagtgtaaatgagcaaagatggatcaggaaggtgggggagatgggcagaaggccccgagcttccagtggcggaactacaagctcatcgtggatcctgccttggaccctgccctgcgcaggccttctcagaaggtgtaccgctatgatggagtccacttcagtgtcaacgactcaaagtatataccagtcgaagacctccaagacccccgttgccatgtcaggtccaaaaacagagacttttccctcccagtccctaagtttaagctggacgagttctatattggacagattccactgaaggaagtgacttttgcaaggctgaatgacaacgtgcgggagaccttcctgaaggatatgtgccgtaagtacggtgaggtggaagaggtagagatcctccttcacccccgtacgcgcaagcacctgggcctggcccgtgtgctcttcaccagcactcggggcgccaaggaaacggtcaaaaacctccaccttacctccgtcatgggcaacatcatccatgcccagcttgacatcaaaggacaacaacgaatgaaatactatgaactaattgtcaatggctcctacacccctcagactgtgcccactgggggcaaggccctgagtgagaagttccaaggctcgggtgcagccactgagacggccgaatcccgccgccgctcttcctctgacacagctgcctacccagcaggcaccactgcggtgggcactcctggcaacggcaccccctgctcccaggacacaagcttctccagcagccgacaagataccccatcttcctttggccagttcacacctcagtcctcccaaggaaccccctacacgtctcggggcagcaccccctactctcaggactctgcctactccagcagcaccacttcaacctccttcaagccccggcggtcagagaacagctaccaagatgccttttcccgccgccacttctctgcatcttcagcctccacaaccgcctccacggccatcgccgccaccactgcagccactgcctcatcctccgcctcttcctcctcattgtcctcgtcctcctcgtcatcctcttcctcctcgtcctctcagtttcgtagttctgatgcaaactacccagcgtattatgaaagctggaatcgctaccagcgccatacttcctacccaccacgccgggccacacgggaggaaccccctggagccccttttgctgaaaatacagctgagcgcttcccaccttcttacacctcctacctgccccccgagcccagccggcccaccgaccaggactaccggcctcctgcctcagaggctccacccccggagcctccagaacctggtggaggcgggggtggaggagggcccagccctgagagagaagaagttcggacttccccccgcccagcctcccctgcccgctctggctccccagccccggagaccaccaatgagagtgtgcccttcgcccagcacagcagcctggattcccgcatcgagatgctgctgaaggagcagcgctccaagttttccttcttggcctctgacacagaggaggaggaagagaacagcagcatggtccttggggccagagatacagggagtgaggtgccttctgggtcagggcatgggccctgcacaccccctccggccccagctaattttgaggatgtggcacctacagggagcggggagccaggggctacccgggagtctcccaaggcaaatggacagaaccaggcttctccatgctcttctggagacgacatggagatctccgacgacgaccggggtggctcaccccctccggccccgacgccccctcagcagcctccgccacctccccctcccccgccgcctcctcctccctacctggcgtcccttcctcttggttatcctccccaccaacctgcctacctcctcccacccagacctgatgggccgccgccccctgagtaccccccacctcctccaccacccccgcacatctatgactttgtgaactccttggagctcatggaccgacttggggctcagtggggagggatgcccatgtccttccagatgcagacccagatgttaactcggctccatcagctgcggcagggcaagggattgattgccgcctcagctggcccccccggtggggcctttggggaggccttcctcccgtttccacccccgcaggaggcagcctacggcttgccgtatgctctatatgcacaggggcaggagggcagaggggcatactcacgggaggcctaccacctgcccatgccaatggcagccgagcccctgccctcctcctcagtctcgggagaggaggcccggctgccacccagggaagaagcagagctggcagagggcaagaccctcccgacagcaggcaccgtgggccgtgtgctcgccatgctggtccaggagatgaagagcatcatgcagcgagacctcaaccgcaagatggtggagaacgtggccttcggagcctttgaccagtggtgggagagcaaggaggagaaggccaagccattccagaacgcggccaagcagcaagccaaggaggaggataaagagaagacgaagctgaaggagcctggcctgctgtccctcgtggactgggccaagagcgggggcactacgggcatcgaggctttcgcctttgggtcagggctgagaggggccctgcggctgccttcattcaaggtaaagcggaaagagccatcggaaatttccgaggccagtgaggaaaagaggcctcgtccctccactcctgctgaggaagatgaagacgaccctgaacaagagaaggaggctggagagccaggacgtccggggaccaagcccccgaagcgggacgaagagcgaggcaagacccagggcaagcaccgcaagtcctttgctctggacagcgaaggggaggaggcatcccaggagtcctcctcggagaaggatgaggaggatgacgaggaagatgaggaagatgaagatcgagaggaagctgtggataccacaaagaaggagacagaggtgtcggatggcgaggacgaggaaagcgattcgtcttccaaatgttctctgtatgctgactcagatggcgaaaatgacagcacatcagactccgagagcagcagctcttccagctcctcatcctcctcctcctcctcgtcctcatcctcctcgtcctcttcatcctctgagtcctcctctgaagatgaagaggaagaggagcggccagcagcccttccctcagcctccccgccccccagagaagtcccagtgcccacgccagcacctgtggaggtgccagtgccggaaagggttgcaggctccccagtcacacccctgcccgaacaggaggcgtctccagcaaggcctgcaggccccacggaggagtcaccccccagtgcgcctctgcgtcccccagaaccacctgctgggcccccggcccctgccccacgccccgatgagcgtccctcttctcccatccccctcctgcccccacccaagaaacgccggaaaactgtctccttctctgccatcgaggtggtgccagccccggagccccctccagccacaccgccgcaggccaagtttcccggcccagcctcccgcaaggctccccggggcgtggagcggaccatccgcaacctgcccctggaccacgcatctctggtcaagagttggcccgaggaggtgtcccgaggaggccggagccgggctggaggccgaggccgcctcaccgaggaagaggaggctgagccagggacagaggtggacctggcggtcctggccgacctggccctgacccctgcccggcgcgggctgcctgccctgcctgctgttgaagactcagaggccacagagacatcggacgaggccgagcgccctaggcccctgctcagccacatcctcctggagcacaactatgccctggccgtcaagcccacgccccctgcgccagccctgcggcccccggagccagtgcccgcacccgccgccctcttcagttccccagctgatgaggtcctggaggcccccgaggtggtggtggctgaggcggaggagcccaagccgcagcaactgcagcagcagcgggaggagggcgaagaggagggggaggaagagggggaggaagaggaggaggagtcctctgacagcagcagcagcagcgatggggagggcgccctccggaggcgcagcctccgctcccacgcccggcgccgccgccctccgcccccacccccgccgccaccgccccgcgcctacgagccacgcagtgagtttgaacagatgaccatcctgtatgacatttggaactcgggcctggactcagaggacatgagttacctgcggcttacgtacgagcggctgctgcagcagacaagcggggctgactggctcaacgacactcactgggtccatcacacaatcaccaacctgaccaccccaaaacgcaagcggcggccccaggatgggccccgggagcaccagacaggctcagcccgcagcgaaggctactaccccatcagcaagaaggagaaggacaagtacctggacgtgtgcccagtctcggcccggcagctggagggcgtggacactcaggggacgaaccgcgtgctgtccgagcgccggtccgagcagcggcggctgctgagcgccatcggtacctccgccatcatggacagtgacctgctgaaactcaaccagctcaagttccggaagaagaagctccgatttggccggagccggatccacgagtggggtctgtttgccatggaacccattgctgctgacgagatggtcatcgaatacgtgggtcagaacatccgtcagatggtggccgacatgcgggagaagcgctacgtgcaggagggcattggcagcagctacctgttccgggtggaccacgacaccatcatcgatgccaccaagtgtggcaacctggccagattcatcaaccactgctgcacgcctaactgctacgccaaggtcatcaccatcgagtcccagaagaagatcgtgatctactccaagcagcccattggcgtggacgaggagatcacctacgactacaagttcccactggaagacaacaagatcccgtgtctgtgtggcacagagagctgccggggctccctaaactgaggtggggcaggatgggtgcccacacccctatttattccccctggtgccctgagctcccagcacccccccagccttagtgggctcagcagggcccacatgcccccatctccaagcgtggggttgggggccccaagcccagcgagggagcctcagtccctggaggcagcttctgcctctcctgtcgcccctgcccaccaccccctgattgtttttctttgcggagaagaagctgtaaatgttttgtagcagccagcagctgtttcctgtggaaacctggggtgccggcctgtacagattctgtcctggggggctacacagtcctctcgctttgtgttaatggggacttccccttacgccctgcgtgtacccctccccagtttaggggtctctggggcagtggccatgttctccccctgggggggctctgcacccccagtcctggggactccgtgcctggaaccctgcctcatctgttcctgccagaccctgagggtcacccttccaccctggtgtcactccccggctcagccaggccaggatggcggggtgggtcccttttgctgggctggactgtacatatgttaatagcgcaaacccgacgccacatttttataattgtgattaaactttattgtac

SEQ ID NO: 1107 - DNA, 6786 bp, Homo sapiens
gaggaaggcggctcgcggttcctccaccgcctccgccgccgcatcctccgcttgtgctaccgccgcgggcgctgggccgctctgctggtccggcatgagaccgtgagacgagagacgggtcggggccgccgacatgtttggccgctcgcggagctgggtgggcgggggccatggcaagacttcccgcaacatccactccttggaccacctcaagtatctgtaccacgttttgaccaaaaacaccacagtcacagaacagaaccggaacctgctagtggagaccatccgttccatcactgagatcctgatctggggagatcaaaatgacagctctgtatttgacttcttcctggagaagaatatgtttgttttcttcttgaacatcttgcggcaaaagtcgggccgttacgtgtgcgttcagctgctgcagaccttgaacatcctctttgagaacatcagtcacgagacctcactttattatttgctctcaaataactacgtaaattctatcatcgttcataaatttgacttttctgatgaggagattatggcctattatatatcgttcctgaaaacactttcgttaaaactcaacaaccacactgtccatttcttttataatgagcacaccaatgactttgccctgtacacagaagccatcaagtttttcaaccaccctgaaagcatggttagaattgctgtaagaaccataactttgaatgtctataaagtgtcattggataaccaggccatgctgcactacatccgagataaaactgctgttccttacttctccaatttggtctggttcattgggagccatgtgatcgaactcgatgactgcgtgcagactgatgaggagcatcggaatcggggtaaactgagtgatctggtggcagagcacctagaccacctgcactatctcaatgacatcctgatcatcaactgtgagttcctcaacgatgtgctcactgaccacctgctcaacaggctcttcctgcccctctacgtgtactcactggagaaccaggacaagggaggagaacggccgaaaattagcctgccggtgtctctttatcttctgtcacaggtcttcttaattatacatcatgcaccgctggtgaactcgttagctgaagtcattctgaatggtgatctgtctgagatgtacgctaagactgaacaggatattcagagaagttctgccaagcccagcattcggtgcttcattaaacccaccgagacactcgagcggtcccttgagatgaacaagcacaagggcaagaggcgggtgcaaaagagacccaactacaaaaacgttggggaagaagaagatgaggagaaagggcccaccgaggatgcccaagaagacgccgagaaggctaaaggtacagagggtggttcaaaaggcatcaagacgagtggggagagtgaagagatcgagatggtgatcatggagcgtagcaagctctcagagctggccgccagcacctccgtgcaggagcagaacaccacggacgaggagaaaagcgccgccgccacctgctctgagagcacgcaatggagcagacccttcctggatatggtgtaccacgcgctggacagcccggatgatgattaccatgccctgttcgtgctctgcctcctctatgccatgtctcataataaaggcatggatcctgaaaaattagagcgaatccagctccccgtgccaaatgcggccgagaagaccacctacaaccacccgctagctgaaagactcatcaggatcatgaacaacgctgcccagccagatgggaagatccggctggcgacgctggagctgagctgcctgcttctgaagcagcaagtcctgatgagtgctggctgcatcatgaaggacgtgcacctggcctgcctggagggtgcgagagaagaaagtgttcaccttgtacgacatttttataagggagaagacatttttttggacatgtttgaagatgagtataggagcatgacaatgaagcccatgaacgtggaatatctcatgatggacgcctccatcctgctgcccccaacaggcacgccactgacgggcattgacttcgtgaagcggctgccgtgtggcgatgtggagaagacccggcgggccatccgggtgttcttcatgctgcgttccctgtcactgcaattgcgaggggagcctgagacacagttgccgctgactcgggaggaggacctgatcaagactgatgatgtcctggatctgaataacagcgacttgattgcatgtacagtgatcaccaaggatggcggcatggtccagcgattcctggctgtggatatttaccagatgagtttggtggagcctgatgtgtccaggcttggctggggagtggtcaagtttgcaggcctattgcaggacatgcaggtgactggcgtggaggacgacagccgtgccctgaacatcaccatccacaagcctgcgtccagcccccattccaagcccttccccatcctccaggccaccttcatcttctcagaccacatccgctgcatcatcgccaagcagcgcctggccaaaggccgcatccaggcaaggcgcatgaagatgcagagaatagctgccctcctggacctcccaatccagcccaccactgaagtcctggggtttggactcggctcctccacctccactcagcacctgcctttccgcttctacgaccaggggcgccggggcagcagcgaccccacagtgcagcgctccgtgtttgcatcggtggacaaggtgccaggcttcgccgtggcccagtgcataaaccagcacagctccccgtccctgtcctcacagtcgccaccctccgccagcgggagccccagcggcagcgggagcaccagccactgcgactctggaggcaccagctcgtcctccaccccctccacagcccagagtccagcagatgcccccatgagtccagaactgcctaagcctcaccttcctgaccagttggtaatcgtcaacgaaacggaagcagactctaagcccagcaagaacgtggccaggagcgcagccgtggagacagccagcctgtcccccagcctcgtccctgcccggcagcccaccatttccctgctctgcgaggacacggctgacacgctgagcgtcgaatcgctgacccttgtccccccagttgacccccacagcctccgcagcctcaccggcatgcccccgctgtccacgccggctgccgcctgcacagagcccgtgggcgaagaggctgcatgtgctgagcctgtgggcaccgctgaggactgagtcagtgccggggcctccctttgtgtgtgtggccccgctggtagggaccccagtgccgctgactggcaagacacactgggagcacccaccattctgtgcggcccccagcagccatctcaaccacctatccctgcgctcccttgaatgggaagaagccccacgttgtccttgaattcctttttcactttgcatctcttcacgtgcaggctgggaccagcggagacaccgcggcgaatgcagatgactgcaccggccactcagggagctgcctgggctccgtgtctctgagccccgggtggcaggacccaccggcacctctttcttcctctgtcatatggctcctctgtcaccagccccagtgtgcacagaagaattggaccaggtcactgtacgtagaaatttgtagaaaagcagacttagataaacatctcctttggatatttatttccgcttttggcagcaggtgaacatttatttttaaaacttctatttaaaagaagtccaaaaacatcaacactaaggtttgatgtcatgtgaaaagtgtaataataacagttaagatttcatgatcattttcactggacctttcctgatattttgtttcagagttcttagtgtggctttttccatttatttaagtgattctttgttactcactaactctgcaagcctgtggaataatgaagtaccttcctggaaagtttggattattttttaaacaaaaacaagggagatacatgtattctcaggtacacacagagctgagagggctgaatggttttctgctatagcagccgagaggcctcccatcatggaaagatttctccaggaaaaggaggaatgtagccagctccccactcaggacgcttcctcatttctcttcaccaaaaccaaacagagacagcttccagcaccttcttcagtgttaccatctctaagaaggaaccagttgggaccgtgaagactcccgaccctgtggccatgatggaaatcaaaggaagacaccctctacgtcacctgccctcgactgtgtgtgcccacatgtgccgagagatggcccagagccagttcccctccagctgcaagggcatggtgtccccagagctctgagtctgtcactctccctctgctactgctgctgatctgaatatggaaaccccatggttcccttccccattcggactgggtgtgtacaagcaaggacccagatgcatcagacacagcccccaagatgttcctttctactcggccagctcgggagccagacacagcactcacagcccaggccgtgatccaccctccccaagtccaccagggccagcggcccctcacctctctggtcactggtgagaccttccacaactttcctccagacctgccagcagatgtgcccaccaggggcattaggtatccgccggagcctggccatagggtagtctcgggagccgcgctgagatcttttgccacctgcattttagaagaacatggtctctgtctcctcggcccagccagctgtcccggcaaggcctgccgagggcagttttcaacctcatgaaggaaacacagtcctgccaaggagggggagtggcgcccatggggacaggcctcagtccttagaagccctctgggtagctgtgcccacccagccttcatggctgcaggtacaaggacctttgcttccatagagaaaacgcacagctcagaaagggggccacatgggcagaaacccaaaggaaggacaaaccacgaccaccgtggccatctgcagaatccctggaagagaaggaaggcagggtggagcggggggaagaccatcatggagagaaggaccacagcatcaggagacgggacacgccacacccagcaggcagcctgtgtgttgcttaattttttaagagcaagaggggtagagaggatcaagctggccctggctggagatggctagcccctgagacatgcacttctggttttgaaatgactctgtctgtggggcagcagaaactagagaaggcaagtggctgccccaccccaaggcgtgaccaggaggaacagcctgcagctcactccatgccacacgggtgggccaccagcctgctgtcagaagtctctgggctccaactggtcttgtaaccactgagcactgaaggagagaggtcttggtcagggctggacagcatgcccgggaggaccagcagaggattaaaggtgactgggaggaccagcggaggataaaagacactgctcagggcagggcttctaccctgcatccctggccaagaaaagggcagtccccatgtgggcttgcagggtcactctcaggggcctctttcagctggggctggcaacttgcgtctgggggacacctccaggtgtgtggggtgaggatttcctataaccagggctcccagaagctttgcttatgtaaggaggtctgggagccagcccattggaggccaccagccattttggcttcaaaggaccccacctcacccaggtctcagcggcagtgggcacagctatgtcttcaggagctcccgtcaaacctcatagctggggcgctcccagacaggccagtccagacaggacacgctgggcccctggcatccagaggaagagccaggagtgtgggaaggcccacagtgggggctgtggcttctgacactcaggtcatagcctcagaggtctgaggtcagcccccacagacccatccggcccgccccccaagtccctgcagagagcacttagagttatggcccaggccctggtccacccttcccctgtgcacctccggctgggtttgccaagtcagggagcagggctggccgcaggaactcccaaaccttggctttgaatattgttgtggaggtgtgctcgtccctttctggacgtgcaaggtacctgtcccagcaggtcagatggggccagctgaggcgctcccccaggcaggaagggccagccttcaccatcgcgtgggattgggaggaggggcctccgtgagcagcccctcctctgccgctgtcccagcccagtccctctcccggagccttggcagcctcccacaacccagacacttgcgttcacaagcaacctaaggggcaggtgaagaagcgcagccctgccagacgcgctagattcctctaaggtctctgagatgcaccgttttttaaaaaggcgtggggtgaactgattttgatcttcttgtctagatgcaataaataaatctgaagcatttaatgtagtcatcttgacattgggcctacactgtacgagttccttatgtttccttgagctaaaaatatgtaaataatttttgtcccagtgagaaccgagggttagaaaacctcgatgcctctgagcctcgggaccgctctagggaagtacctgctttcgccagcatgactcatgcttcgtgggtactgaacacgagggtggaaatgaaaactggaacttccttgtaaatttaaacttggcaataaaagagaaaaaaagtt

SEQ ID NO: 1108 - DNA, 7391 bp, Homo sapiens
atgacctcacggacaaagcgaaggcagaaagttaaaatcagcatatcgaaaataaatcactctagttaccgaaaagaacataggccgttttgggagcaccagccacctccacaccagaactgggctgtcgggggccgctgcggcgcaggggctcgtccgggactgagtcagcgccggggccgagaagttcggcgggaggcgcagggcggggcttcctcccgccgactccgagcccggctctacttttctgagtccacgtctcttcctttggacaggcgtggcagcccgggcccgctcggcccagcccctcacggactgcggcgcgcggctccccggggcccggcccgccgaacgcctcgctctacagccctcacctcgcggcgccgagcgcagcgtccgcggcatggagaccggctccgactcaggtcagaggcccgcccccgggccgcgggggactggccctgcgcgcgcggcggcgcggttaggccgggccgcccgcacaggccgccgcgtgtcgagtccgcgcggggagcgcacgcggggcgggcggcgacagatcagcttgaacgggtctttttacgacttggccatgctgaaacagatgaacaattacagaatattatatctaaattccttcctcctgttttgctcaaactctctagcacccaagaaggagtacgtaaaaaggtaatggaactgctggtccatctgaataaacgtataaaaagccgccccaaaatacaacttccagtagagacactgttggttcagtaccaggaccctgctgcagtttcctttgtcacaaattttactataatttatgttaaaatgggctatcctcgcctaccagtggaaaaacaatgtgaactggcccctacgcttcttactgccatggaagggaagcctcagccacagcaggatagcttaatgcatcttttaataccaaccctttttcacatgaaataccctgttgaatcatcaaaatcagcttctccatttaatcttgctgagaaaccaaagactgtgcagctgcttttggacttcatgctagatgtccttctgatgccttatggttacgtgttaaatgaatcccagagtcgccaaaattcatcttcagcacagggttcttcttcaaacagtggcggaggttctggaatcccacagcctcctccgggaatgagcttttatgcagccaaacgagttattggtgataacccatggacacctgaacaattggaacagtgcaaattgggaatcgtgaaattcatagaagctgaacaggtgcctgaacttgaagctgttctccacttggtgattgcctctagtgatacacgccacagtgtggcaacggcagcagacctggaattgaaaagcaaacagagcttaattgactggaataatcctgccatcattaataagatgtacaaggtgtaccttggagatataccactgaagacaaaagagggtgcagttctgaagccagagttgaaaagggaccctgtcagtacaagagtcaagttaaagattgtcccccatctcctccgctctagacaagctgctgaaacgttcccagccaacattcaggtggtgtatgatggactttttggtacaaatacaaattcaaagttaagaacattatccctgcaatttgtgcatcatatttgtataacctgtccagaaatcaagattaagccattaggtccaatgcttttgaatggcctcaccaagctaatcaatgaatacaaagaggaccctaaactactgtcaatggcatattcagctgttggaaaactctccagtcggatgccacatttattcactaaggatatagcgcttgtgcagcagctttttgaagccctttgcaaggaagagcctgagactcgacttgctattcaagaagctttatctatgatggttggagcgtatagtactttggaaggggcacagcgaactctcatggaggcacttgtggcttcgtacttaataaagcctgaagttcaagttcgacaagtggctgtgaaatttgccagtacggtgtttccctcagatcatatcccttccagatatttgctgctactggctgcaggagatccacgtgaagaagttcatggagaagcacaacgcgtattaaggtgtcttccaggtagaaacagaaaagaaagtacttctgagcagatgccttccttcccagaaatggtttattacatccaagaaaaggcttctcatcgaatgaaaactccagtcaagtacatgaccgggaccactgtccttccatttaacccagcagcctttggagagatcgttctgtacttgcgcatgtgccttgcgcacagtgcgggggtggtgcccacctctcagagtttggctgatatgcaggatcatgccccagccattgggcgctacatacggactttaatgtcaagcgggcagatggcaccctcatcatctaacaagagtggggagactaaccctgtccagatctacattggcctgcttcagcagctgttagcaggtgttggaggtttgccggttatgtactgtctattggaagctgtgtcagtgtatccagaaaagctggctaccaaatttgtagacaaaacagaatggataaagagtctgatgaataacagtaaagaagaaatgcgcgaactggcagcgttgttttattctgtagtggtatcaacagtgtcggggaatgagttgaaatcaatgatagaacagcttataaagactacaaaagacaatcacagcccggagatacagcatggatccttgcttgcattgggattcacggtgggaaggtatttggctaaaaagaaaatgagaatgtcagagcaacaagacctggagagaaatgctgacaccctccctgatcaagaggaactcattcagagtgctacagaaacaataggctcatttttggacagtacatcacccctcctggcaattgctgcctgcacagccctgggtgaaattggcagaaatggtccacttccaatccccagtgagggatctggctttaccaaattgcatcttgtagaaagcttactaagtagaataccttccagtaaagaaacaaataagatgaaagaacgagcaatccaaacactgggatattttccagttggggatggagattttcctcaccagaaactcctcttgcaaggtctgatggattctgtggaggccaagcagatagaacttcagttcactattggcgaagccattaccagtgctgcaataggaactagttctgtggctgcccgagatgcctggcaaatgactgaagaggaatatactccacctgctggagccaaagtgaatgatgtggttccatgggtgttggatgtgattttaaataaacatatcatcagccccaacccacacgtgaggcaagcagcctgcatctggctcctttcccttgtcaggaagctaagtacccacaaagaagtgaagtctcatcttaaagaaattcaaagtgcatttgtttcagttctatcagaaaatgatgaacttagccaagatgttgcatcaaagggccttgggttggtttatgaactaggcaatgaacaagatcaacaggaattggtttctacacttgtggaaacacttatgactggcaaaagagttaaacatgaagtttctggagagacagtggtatttcaagggggagctcttggcaaaacaccagatggtcagggcctttctacttacaaggaactttgttctctggcaagtgatcttagccagccagatctggtgtataaatttatgaatttagccaaccatcatgcaatgtggaactctaggaagggtgctgcttttggttttaatgtaattgctaccagagctggagagcagctggctccttttctgcctcagctagttcctcgactttatcgttaccagtttgatcccaaccttggcattcgacaggccatgacaagtatttggaatgcgttggtcactgacaaatccatggtggataaatatttgaaagaaattcttcaagatttggttaagaaccttacaagcaatatgtggcgagttcgagaatccagctgtttagctttgaatgatttattgagaggaagacccttagatgacatcattgataaacttccagaaatttgggaaacgctttttagagtacaagatgatatcaaggaatctgtacgaaaagcggcagaactagctctgaaaactctgagcaaggtctgtgtgaaaatgtgtgaccctgccaaaggagcagctggccagagaaccatcgctgcccttctgccttgccttctggacaaaggaatgatgagcaccgtgacggaagttcgagccctcagcattaacacccttgtgaagatcagcaaaagtgcaggagccatgttgaaaccgcatgcaccaaaactcattccagctctgctagagtccttaagtgtattggagccccaagttctcaattatttgagcctccgggcgacagagcaagaaaaggctgcgatggatagtgctcggcttagtgctgccaaatcttctccaatgatggaaacaatcaacatgtgcctgcaataccttgatgtgtcagtgctgggcgagctagttcctaggttgtgtgaactgatcagaagtggtgtaggtcttggaactaagggtggctgtgccagtgtcattgtgtcattaactactcagtgtcctcaggacctaacaccttactcaggtaaacttatgagtgctttgctgagtggcctgacagatcggaacagtgtgattcagaaatcttgtgcatttgctatgggccatttagttcggacctcacgggatagcagcactgaaaaactcctgcagaagctcaatgggtggtatatggagaaagaagaacctatctacaagacctcttgtgctttgactattcatgctattggacgatacagccctgatgtattaaagaatcatgcaaaagaagtcctgcctctggcatttttaggcatgcatgaaattgctgatgaggagaaatccgaaaaagaagaatgtaatttatggaccgaagtgtggcaggaaaacgtacctggatcctttggtggcattcgattatacctgcaggagttaattactattacccagaaggctttgcagtctcagtcctggaaaatgaaagcccagggtgcaattgccatggcatcaattgcaaaacagactagctctctagtacctccatatctcggaatgatactgaccgcattgctgcaaggcctggctggaagaacgtgggcaggaaaggaggagctattgaaagccattgcctgtgtggtgacagcttgcagtgcagagctggaaaagtctgtgcccaatcaacccagcacaaatgaaattcttcaagctgttctgaaggaatgtagcaaagagaatgtcaaatacaagattgtagcaatcagctgtgcagctgatatcttgaaggccaccaaagaggacagattccaggagttctctaacattgtcatacctctcatcaagaagaactcacttgaaagcagtggggtccggacaaccaaaaatgaagaggagaatgaaaaggaaaaggagctccagctggaatatctgctgggtgcctttgaaagcctgggcaaagcctggccgcgaaacgcggagacccaacgttgttatcgtcaggagctgtgcaaactgatgtgtgaacggctaaaactcagcacgtggaaagtgcagctaggagtcctgcaatcaatgaatgccttttttcaggggttaatgcttttggaagaagaacatgccgatcctgaggctttggctgaaattctgcttgaaacttgtaaatcaatcacatattctttagaaaataagacctactcatctgtgagaacagaagctttatctgtgatagaattgctgcttaaaaaacttgaagaatctaaacagtgggaatgtttgacatctgaatgcagagtgctcctaattgagtctttagctactatggagccagacagcagacctgaactgcaggagaaagcagcgttactgaagaaaacacttgaaaatctggaataaattagaaggggaagaaacaaacaagtgccatgttcattgggggttgaagtggtggtgttctttgaaaaaccaagtgggaaaaagtaaagattaatctgtagcatgcatcattccttggctgaaataaaaagaaaaagccttaaattttgttccttattagctttattttactttatgtttttaaagtatctgggctgagtgagcttaatggaaccttggatgtttgaggggtggttgtaaaggaaactggcagaaatagttactaaaagagttcaagctgttattaaaggaattaatagacagagttgcagagcaagctggataaaaatcttagaactgcattcaaattagttatttcaggaaggggccctataaataacttattttaacctccctcttacacctgaagaaataggaagctgtgtcatctcagaggctttctgaggcctgtgccaaagtcagaacccaggtgtttaatgtctggccctggatactttcttttatggccatctgccaaatcagtgctaaccccggcttacccaagaaacttccaagatgaggtacgtttagggtggcacacagcagtctttgtgccagaactaaactgacccttaccattgggtttctgaaagccagaagctaaacattgtcttgtcatgtgtttaggtggttgatttggagaaaatgattgtttagcatctttacagatggagaggacagagtcagtctccttcggataattccaatcgtcttccttttacaggtggataaagtagattaggacaagatcacacattctatctgtgtctgtggctgcatattttgcaaaaccagaaacaaaatcgcagactgccgtggtttagaccatttataatgtcaaaactgtaatgacaaatttctgttcacttttatgctaccagtatgactttataggggagaaggaaagccttttaattagccacctgggaattactcttttaaaaaatgccttttctcaaaagaacatgataccactccaagtaaatcattgccactaggggttttcctccttccttctgttgcccatgcccctgcctgaaagtgtagggtaagaggaaaaacaagtaaaaccttagtgttgatggtaaactgagaactctgtagcttaccttggattccagagcagaagactggtttacattcagtactcatccttattgacgttaacaccaggaatctccatgtttattatttttcgtggaaactccatgtttattatttttggtggtctctattgaccaatgtatttcaaacttttttgactgcaagtcataataaaaataactttttacatcacg

SEQ ID NO: 1109 - DNA, 7567 bp, Homo sapiens
atgactgccatcgtgtccagcactggtggaacgggtaggtgtaccttccggtttcccagcacggccatcaagatccagttcacgtcgctctatcacaaagaagaggccccagcctccccgctgcggccactgtacccccagatctcccctctgaagatccacatcccggagccggacctccggagcatgggtccacagttagaactacacactggcttctcttggaacacagccatcaggggcacagctcctctaccctgctttgccgacaagttaccagtgacctacaagttacaagggcactttacagctcttagcggctgtgaggctcgagcagcctctgcttcccgcctccgtcagctgcaggcctggtatcgggggccttggtatcaggagcctggtaccaggcacagccccgtggccgaggcccgcctgcggaggacagttgaatggggcttattgagagacgggctgctccgagggctggaggagccatgtgaacaaacacatgtggtccctcagcccagggcgatggcacctccacagcctctttccaggatctgcctctgtgaccacacggggttgtcctgggcccgagccttttcccacagcgccgccttgtggacacctgtgcaggagccagcagcccgcggaggctacctgctccgggtgcacatccttgtccccaactcctgcccagccagtccacgcggtgccggctcctccagttaccgctttgtgcagaacgtgacctcggacctgcagctggcagcagagtttgcagcaaaggccgcgtcggagcagcaggcagacacgtctggaggagacagccccaaggatgagtcaaagccgccgttctcctacgcgcagctgatcgtgcaggccatctcctccgcccaggaccggcagctgaccctgagcgggatctacgcccacatcaccaagcattacccctactaccggacggccgacaaaggctggcagaattctatccggcacaacctctctttgaaccgttactttatcaaagtcccacgttcccaggaggagcctgggaaggggtccttttggcgaatagaccctgcctctgaagccaagctcgtggaacaggcattccggaaacggaggcagaggggtgtctcctgcttccgcacccccttcgggcctctgtcctcaaggagcgctccagcttcgcccacacaccccgggctgatgtcccctcgctccggcggcctgcagaccccagagtgcctgtctcgggagggctcccccattccacacgaccctgagtttgggtccaagttagcttctgtcccagagtaccggtattcccaaagcgcacccggctcccccgtcagcgcccagccagtgatcatggccgtgcctccccgaccgtccagcctcgtggccaagcccgtggcctacatgcccgcctccatcgtaacctcacagcagcccgcgggccacgccatccacgtcgtgcagcaggcccccaccgtcaccatggtcagggtggtcaccacatctgccaactcggccaacggatacatcctcaccagccagggcgcggcggggggctcccatgatgcggcgggcgcagccgtgctggacctgggcagcgaggccagaggcctggaggagaaacccaccattgcgtttgccacaatccccgcggctggtggagtcatccagacggtggccagccagatggcccccggggtccccggacacacggtcaccatcctgcagcccgccacacccgtgaccctcgggcagcaccaccttccagtccgggccgtgacccagaacggaaagcatgcggttcccacgaacagtttagccggcaacgcttacgccctcaccagccctttgcagctccttgcgacccaagcgagttcatccgcgccggtggtggtcacccgggtgtgcgagccccccgaattgagtcgtttctatggcactaacctttccatgggaaataagctctttgtggaagtccgtacctgttgccctggccacgtaaggccgctgcgctcacgtgacgcggtcccggaagttgaccggggtgcggagctcctgggctgcagctcctggagtttccgaggttcgtgcgcgtctggtggcggcggcgtgatgttctcggcaggagcggagagtttgctccaccaggccagggagatccaggacgaggagctgaagaagttctgttcccggatctgtaaactgctgcaggcggaggacttggggccggacaccctcgactccctgcagaggctcttcctcatcatctcagccacgaagtacagccggaggctggagaagacatgcgtagacctgctgcaggccaccctcggcctgcctgcatgccccgagcagctccaggtgctttgcgccgccatcctgcgagagatgtccccctctgacagcctcagcctggcctgggaccacacgcagaacagccggcagctgagcctggtggcctccgttctcttggcccagggtgacagaaacgaggaggtcagagccgtgggccagggcgtgctacgagcgctggagagccggcagcctgagggacccagcctcagacacctcctccccgtcatggccaaggtcgtggtcctcagcccgggcaccctccaggaggaccaggccaccctgctcagcaagcggctggtcgactggctgcgctacgccagcctccagcaagggctcccacactccggcggcttcttctccacgcccagggcccggcagccgggccccgtcaccgaggtggacggggcggtagccacagacttcttcacggtgctctccagcggccaccgcttcacagacgaccagtggctgaacgtgcaggccttctctatgctgcgggcgtggctgctgcacagcggccccgagggcccgggcaccctggacacagatgacaggtcagagcaggagggctccactctgtcggtgatctccgccacctcctctgccggccgcctgctgccgccccgggagcggcttcgggaggtggccttcgagtactgccagcgcctcattgagcaaagtaaccgacgagccctgaggaagggggactccgacctgcagaaagcttgcctggtggaggccgtgctggtgctggacgtgctgtgccggcaggacccgtccttcctgtaccgaagtctctcctgcctgaaggccctgcacgggcgggtgcgcggggacccggcctctgtgcgggtgctgctgcccctcgcccacttcttcctgagccacggggaagcggctgcagtggactcggaagccgtctaccagcacctgttcaccaggatcccggtggagcagttccacagccccatgctggcctttgaattcatccagttctgcagggacaacctccacctgttcagcgggcacctcagcaccctcagattgagcttccccaacctctttaagttcctggcctggaacagcccacccctcacctccgagtttgtggcgctcctcccggccctggtggacgctggcacagccctggagatgctgcacgcgctgctggacctgccctgcttgacggcggtgctggacctgcagctcaggtcagcaccggctgcatccgagaggccactctgggacacctctctcagggcccccagctgcctggaggccttccgggacccgcagttccagggtcttttccaatacctgctgcgccccaaggccagtggcgccactgagaggttggcgccactccaccagctgctgcagcccatggccggctgtgcccgcgtggcccagtgtgcccaggccgtgcccacgctgctgcaggcattcttctcagcagtgacccaggtggctgacgggtccctgatcaaccagctggcgctgctgctcctgggcaggagcgactcgctctacccggccccagggtacgctgccggtgtgcacagtgtgctgagttctcagttcctggccctgtgtacgctgaaaccctccctggtggtggagctggcaagagacctgctggagttcctgggcagcgtgaatggtctctgcagcagggcgagcctcgtcaccagcgtggtgtgggccatcggcgagtacctgtcggtgacctacgatcggaggtgcaccgtggagcagatcaacaagttcttcgaagccctggaggctctgctattcgaggtcacccagtgccgcccctctgctgccctgcccaggtgtcccccccaggtggtcaccgtgctgatgaccacgctgacgaagctggcctcccggagccaagatctgatccccagggcctctttattgctgtcaaagatgaggaccctggctcacagtccagccaccagctccacgcacagcgaggagggcgcggaagccatccgtacccgggccacagagctgctgaccctgctgaagatgcctagcgtggcccagtttgtgctcacacccagcacggaggtgtgcagcccccgctatcaccgcgatgccaacacggccctgcccctggccctgcgcacggtcagccggctggtggagagggaggccggcctcatgccagggtgaagggacagtggccagggacttcggtgcagattaagagcctgggcagccagcttgctactgaggccaggctgataggagctcaggagggcgcgggagtcctgggagaggaggcaaggcccacggtgggcttggcaccctcacagacacgcggggctggcccccctgctcaccctctgggctttgtctccgagccttttgctcccaggcaacactgagctgagctgaggggtgccatggagcggctctgattggaggcttgaggccctgtggctgggtcgggtggaggctgctgggtctgtttcctagtcttttgtttttggacagttgatgggcaagaagagctgcagtaaaagtaaatctcctttaataagcgtctgtatgaagagtgcgcgatcagttccgttacctgccctgcaccctggggagaggaccagggatgggaacccctggcagctgctgccagtcctggaggctcagcccggcgtgccactgctgctacagaaaccaggtcatttgtgcacagcccggaaggcagcggcgcgagttcccgggtgtggtcaccgctctgggtggtgcgcttgtcaatgccccttttgatgcccttgaatagcctgaagatgaaggggaccgggggagggttgcaagcgccatggcctatgcaggctgcggcctctggccattcggagggaaggccccagggagccacctgagtggagctcagaacactggattcgcgcgaaggggaggtgtctgggcgtgcggccccagccccgccaccttcctgggccctgtggtcccaccctccggactaccaaggcacagctgtgtcgcacgttccgcccggtgcctgggacgggctcagccgccagggggcgccgccgccccgagagcctcacgccccgcccccaggctcaaactcttccccctccccactctggctccgcccccggtctcctcttttgctctggccccgcccacctcccctccggcctcggccccgcccccaatcccccatagctctgcgactaagaaaccacaggctgaaggcgactgcagggtcctgccccttgcccagcctcaggactatggagggggcgagtgacgcgcaaggaacggagcaggggacaccgtgcgggctcaggagctccccagatgcccgagccgaaccgcggggtcctcaccgccaggttccagcccaggaagcgctcgcctgccccacagcctgggccttgggtcgcgttccgagctccaggacggctggtgtcccccgcggcctgcgatgacagcccagggccgctgagccggggccgcaggaaaggctggcgctggcaggcgcttccgtcggcagcactgtgtttgtgtttccacgtggaaacagcagcgcacgtgtacaactgtgcataccaaggcgtgcgtgccagtgcgcgggtctcgggatcacttcccagtgcggtgcacgaccccgcctgcagcagtgggtgtgggggcgctgctgggctcatcccgaagctcagagagcgtggggctgcccctaggctcggaatgagtctcccactgagtccgcagctcccctcctgccctggggcggggcttccctgacctgaaggcgtcgggggtgtcctggctcccagctcccaggcactcgtggggccaccgcccaggccagctggtgctaagtccgcagcctgtgcagcagcgcccggcttaggactgggagtgtgacttgaagggccgtcccgctcatccaagggacaaggaggagctcatggccacagggcctcggagggcatgaccccagcccagggaggagcaaccttcaggtggcctccaggaggcagctgggaaaagggcaaagctcaccagctctcaactttttttttaaataaactgaaattttagaatagtttttcagatttacagaaaagatgataaaccttagaaacattatatgctaagtgaaagtgagaagtgacagcctgctggcagtcctcacagccctcgctcgctcttggcgcctcctctgcctgggctcccactttggcagcacttgaggagcccttcagcccgccactgcactgtgggagcccctttcagggctggccaaggccggagccggctccctcagcttgcggggaggtgtggagggagaggcgcggtgggaaccagggctgcacgcggtgcttgcgggccagcgcgagttccgggtgggcgtgggctctgtgggccccgcactcggagccgccggctagccccgccagcctgggcagtgaggggcttagcacctggaccagcagctgctgtgctcgatttctcactgggccttagctgccttcctgcggggcagggctggggacctgcagcccgccatgcctgagcctcccccctcccctccgtgggttcctgcgcagtccgagcctccccaacgagtgttgccacctgctcagggcacccagtcccatcgaccacccaagggctgaggagtgcctttggagcagggcacgggactggcaggcagctctacctgcagcccctgtgcaggatccactgggtgaaagccagctgggctcctgagtctggtggggacttggagaacctttatgtctagctaagggattgtaaataaaccaattggcactctgtatctagctcaaggtttgtaaacacaccaatcagcaccttgtgtctagctcagggtttgtgaatgcaccaatagacactctgtatctagctactctggtggggacttggaaaacctttttgtcaacactctgtatctagttaatctggtggggacatggagaacctttgtgtctagctcagggattgtaaacgcaccaatcagcaccctgtcaaaacagaccactcggctctaccagtcagcaggatgtgggtggggccagatgagaataaaagcaggctgcccgagccagcagtgacaacccactcgggtccccttccacaccgggatgctttgtttgttcgctctttgcaataaatcttgctgctgctc

SEQ ID NO: 1110 - DNA, 7567 bp, Homo sapiens; identical to SEQ ID NO: 1109

SEQ ID NO: 1111 - DNA, 9646 bp, Homo sapiens
tcgcccgccgcgcgcgccggtccggcagcgcacgggttaaggctggcaccgcgcccggcgggagggggggcgcccacctcccctcctccccgcgccgggcatgcggggcccagtgggcaccgaggaggagctgccgcggctgttcgccgaggagatggagaatgaggacgagatgtcagaagaagaagatggtggtcttgaagccttcgatgactttttccctgtggagcccgtgagccttcctaagaagaagaaacccaagaagctcaaggaaaacaagtgtaaagggaagcggaagaagaaagaggggagcaatgatgagctatcagagaatgaagaggatctggaagagaagtcggagagtgaaggcagtgactactccccgaataaaaagaagaagaagaaactcaaggacaagaaggagaaaaaagccaagcgaaaaaagaaggatgaggatgaggatgataatgatgatggatgcttaaaggagcccaagtcctcggggcagctcatggccgagtggggcctggacgacgtggactacctgttctcggaggaggattaccacacgctgaccaactacaaggccttcagccagttcctcaggccactcattgccaagaagaacccgaagatccccatgtccaaaatgatgaccgtcctgggtgccaagtggcgggagttcagcgccaacaaccccttcaagggcagctccgcggcagcagcggcggcggcggtggctgcggctgtagagacggtcaccatctcccctccgctagccgtcagccccccgcaggtgccccagcctgtgcctatccgcaaggccaagaccaaggagggcaaagggcctggagtgaggaagaagatcaaaggctccaaagatgggaagaaaaagggcaaagggaaaaagacggccgggctcaagttccgcttcggggggatcagcaacaagaggaagaaaggctcctcgagtgaagaagatgagagggaggagtcggacttcgacagcgccagcatccacagtgcctccgtgcgctccgaatgctctgcagccctgggcaagaagagcaagaggaggcgcaagaagaagaggattgatgatggtgacggctatgagacagaccaccaggattactgtgaggtgtgccagcagggtggggagatcatcctgtgcgacacctgcccgagggcctaccatctcgtatgcctggacccagagctggagaaggctcccgagggcaagtggagctgcccccactgtgagaaggaggggatccagtgggagccgaaggacgacgacgatgaagaggaggagggcggctgcgaggaggaggaggacgaccacatggagttctgccgcgtgtgcaaggacgggggcgagctgctctgctgcgacgcctgcccctcctcctaccacctgcattgcctcaacccgccgctgcccgagatcccaaacggtgaatggctctgcccgcgctgtacttgccccccactgaagggcaaagtccagcggattctacactggaggtggacggagccccctgcccccttcatggtggggctgccggggcctgacgtggagcccagcctccctccacctaagcccctggagggcatccctgagagagagttctttgtcaagtgggcagggctgtcctactggcattgctcctgggtgaaggagctacagctggagctgtaccacacggtgatgtatcgcaactaccaaagaaagaacgacatggatgagccgcccccctttgactacggctctggggatgaagacggcaagagcgagaagaggaagaacaaggaccccctctatgccaagatggaggagcgcttctaccgctatggcatcaagccagagtggatgatgattcaccgaatcctgaaccatagctttgacaagaagggggatgtgcactacctgatcaagtggaaagacctgccctacgaccagtgcacctgggagatcgatgacatcgacatcccctactacgacaacctcaagcaggcctactggggccacagggagctgatgctgggagaagacaccaggctgcccaagaggctgctcaagaagggcaagaagctgagggacgacaagcaggagaagccgccggacacgcccattgtggaccccacggtcaagttcgacaagcagccatggtacatcgactccacaggcggcacactgcacccgtaccagctggagggcctcaactggctgcgcttctcttgggcccagggcactgacaccatcctggccgatgagatgggtctgggcaagacggtgcagaccatcgtgttcctttactccctctacaaggagggccactccaaagggccctacctggttagcgcgcccctctccaccatcatcaactgggaacgcgagtttgagatgtgggcgcccgacttctacgtggtcacctacacgggggacaaggagagccgctcggtgattcgggagaacgagttttcctttgaggacaacgccattcggagtgggaagaaggtattccgtatgaagaaagaagtgcagatcaaattccacgtgctgctcacctcctatgagctcatcaccattgaccaggccatcctgggctccatcgagtgggcctgcctggtggtagatgaggcccaccgcctcaagaacaaccagtccaagttttttagggtcttaaacagctacaagattgattacaagctgctgctgacagggaccccccttcagaacaacctggaggagctgttccatctcctcaacttcctgactccagagaggttcaacaacctggagggcttcctggaggagtttgctgacatctccaaggaagaccagatcaagaagctgcatgacctgctggggccgcacatgctcaggcggctcaaggctgacgtgttcaagaacatgccggccaagaccgagctcattgtccgggtggagctgagccagatgcagaagaagtactacaagttcatcctcacacggaactttgaggcactgaactccaaggggggcgggaaccaagtatcgctgctcaacatcatgatggacctgaaaaagtgctgcaaccacccctacctcttccctgtggctgccgtggaggcccctgtcttgcccaatggctcctacgatggaagctccctggtcaagtcttcagggaagctcatgctgctacagaagatgctgaagaaactgcgggatgaggggcaccgtgtgctcatcttctcccagatgaccaagatgctggacctcctggaggacttcctggagtacgaaggctacaagtatgagcggattgatggtggcatcaccgggggcctccggcaggaggcaatcgacagattcaatgcccccggggcccagcagttctgcttcctcctctcaacccgggcaggtggtctgggcatcaacctggccacggcggacactgtcatcatctacgactcggactggaacccgcacaatgacatccaggccttcagccgcgcccaccgcatcggccagaacaagaaggtgatgatctaccgcttcgtgactcgggcctcggtggaggagcgcatcacgcaggtggccaagcgcaagatgatgctcacccacctggtggtgcggcccggcctcggctccaagtcggggtccatgaccaagcaggagctggacgacatcctcaagttcggcacggaggaactcttcaaggacgacgtggagggcatgatgtctcagggccagaggccggtcacacccatccctgatgtccagtcctccaaaggggggaacttggccgccagtgcaaagaagaagcacggtagcaccccgccaggtgacaacaaggacgtggaggacagcagtgtgatccactatgacgatgcggccatctccaagctgctggaccggaaccaggacgctacagatgacacggagctacagaacatgaacgagtacctgagctccttcaaggtggcgcagtacgtggtgcgcgaggaggacggcgtggaggaggtggagcgggaaatcatcaagcaggaggagaacgtggaccccgactactgggagaagctgctgcggcaccactatgagcagcagcaggaggacctggcccgcaacctgggcaagggcaagcgcatccgcaagcaggtcaactacaacgatgcctcccaggaggaccaggagtggcaggatgagctctctgataaccagtcagaatattccattggctctgaggatgaggatgaggactttgaagagaggccggaagggcagagtggacgacgacaatcccggaggcagctgaagagtgacagggacaagcccctgcccccgcttctcgcccgagttggtggcaacatcgaggtgctgggcttcaatgcccgacagcggaaggcctttctgaacgccatcatgcgctggggcatgcccccgcaggacgccttcaactcccactggctggtgcgggaccttcgagggaagagcgagaaggagtttagagcctatgtgtccctcttcatgcggcacctgtgtgagccgggggcggatggtgcagagaccttcgcagacggcgtgccccgggagggcctctccaggcagcacgtgctgacccgcatcggggtcatgtcactagttaggaagaaggttcaggagtttgagcatgtcaacgggaagtacagcaccccagacttgatccctgaggggcccgaggggaagaagtcgggcgaggtgatctcctcggaccccaacacaccagtgcccgccagccctgcccacctcctgccagccccgctgggcctgccagacaaaatggaagcccagctgggctacatggatgagaaagaccccggggcacagaagccaaggcagcccctggaagtccaggcccttccagccgccttggatagagtggagagtgaggacaagcacgagagcccagccagcaaggagagagcccgagaggagcggccagaggagacggagaaggccccgccctccccggagcagctgccgagagaggaggtgcttcctgagaaggagaagatcctggacaagctggagctgagcttgatccacagcagaggggacagttccgaactcaggccagatgacaccaaggctgaggagaaggagcccattgaaacacagcaaaatggtgacaaagaggaagatgacgaggggaagaaggaggacaagaaggggaaattcaagttcatgttcaacatcgcggacgggggcttcacggagttgcacacgctgtggcagaacgaggagcgggctgctgtatcctctgggaaaatctacgacatctggcaccggcgccatgactactggctgctggcgggcatcgtgacgcacggctacgcccgctggcaggacatccagaatgacccacggtacatgatcctcaacgagcccttcaagtctgaggtccacaagggcaactacctggagatgaagaacaagttcctggcccgcaggtttaagctgctggagcaggcgttggtcattgaggagcagctccggagggccgcgtacctgaacatgacgcaggaccccaaccaccccgccatggccctcaacgcccgcctggctgaagtggagtgcctcgccgagagccaccagcacctgtccaaggagtcccttgctgggaacaagcctgccaatgccgtcctgcacaaggtcctgaaccagctggaggagctgctgagcgacatgaaggccgacgtgacccggctgccatccatgctgtcccgcatccccccggtggccgcccggctgcagatgtcggagcgcagcatcctgagccgcctgaccaaccgcgccggggaccccaccatccagcagggcgctttcggctcctcccagatgtacagcaacaactttgggcccaacttccggggccctggaccgggagggattgtcaactacaaccagatgcccctggggccctatgtgaccgatatctagccgtcctcgagacttccctgtgttgcagcgctcatttccagctgagccacgcctgccgggccacctgcccgacccacatgggagagaaaagctgccacctttttaggagccagcgccaccttgggacaaaaagggaaacctagtaatgccatcacatggaggacgaggcccagctcagctgggccagagcccagaagtgccacctcatcataattcaagtgttcttccacacagcgttgcccccacaaccacgccggacgtgccccctcgccaccttttccagacgacttcttagaagagatttcatttatttgtacatcttttgcactttcctattgaagacttgaacacgtttgtcttgataaaagttggatgacgtatggaagattcgaacctgcagcactgatgtctctttaccgatgggttccagacccaaggtagtcctggcactgccctgtggactcagcccagctggggaggacatggcgcccggtgccctaggagccctcagtgtcccctacctgacctgtctgcacctgtgtgacagccccttctgatttggccccctgcccgcttggagcctcccagcaccagacagggcaggtttggggagccgctgtcgagccctatggtgagaccctggctgacatttcccctccttcctgccaaggctggaggccgccaggtgtttgctctctccttgtggggaggtggatcctctgccagcaggtgtctgtccccggcccagcgcatcttgaaggccctggactctgttaccagtggggggcctgtggccccggctcttcacagcaggcagaagcgtatgatcccagggagggtgggctgggggggggccagcacttgcctcggagccactgctgcgttgggtttgccttctgccagaggtgtggttaagggcagtgatagctgcgccccagcaaggagggtcatgggccctgagctggcccaggagaccctggccctgccctgtgccctgggatgcctaccctgcccacctccggaggtggaaccgggctgcccctgggggcctggacttgtcccattcccctgtccctggaaaggccttcccgggggctttttgcctgaggctgcactcttggaaggtgtggggagagttctgcctggagggggactggacccagtgccctctgcagacccctcccagccgcagcaccaagggcttgctgccttgtttcctgccaggagcgccctgacatcccaaaaccatcttcccacatgtgggttgttggaatcccacccactcccccggaccctgcccctccaagttggggacggagatggggagcaggtcaggccctccctaggcctgtttgtgtgtgatccttctcctggccccaggtcgacctggaaggcgtttctgagtcttgtactgggaccttcccagggaaggtgccttggggtgcagaatcctgggaatgttaggaaagggctgcgtgaaaaacccagctgggcctggggtggaggtgcacacgggctggggctcagctccttggagagggcctgcctgggactgagggggccagggctgggtcaggattcaccagcttgtgttgcagacactggagcaattgcctggccctccctaagccctatatgcctcactcataatgaggctgtctctgaaccccggagggcgggacctacaagtccttcctcttggcgcattcccacactccagtctggatccaggtctgcaaggccagcccgaccctgacactgcacgtgggcgtagtggggagcaccctggagtggagatgattgtcagcgggctcacatgttatggttcatccacatgcgtgttgtgtgctctgcggtgcctcctggcaaagggtcctggctcgggtcagaagctcactcccgtgccctcgtccccaaacaagcagtggcaagcactggggttggccctcgttgggagcagtgcccaccttccttggcccacagcagataggtcccgagcagcaggactggaggcctgtggcggtcagggcaggggtctgtgtctccaccccaagggctgatggtccctcccctgtgcgccttcctctcaggcaggcttgctctgtcccttcctctctgcttccctcccaggcctcgccagggctcccttctcctctgcctggttagactcgggcacccaggaaagcctggccagggctcctttgggcctgggccccctgcactgcctggtccagaaggggtggtgctgtccgtggccagcaccccggggcccgggaggggtgggctactagagtcagagcgggtttggggctgaccagtttgggagaggagaaaagatctgagaatgtccttcttggtttgtcagtcatctctgccaaaagtggtgatggtggtgtccgtatgtttggcgtctttgggctgggtttggtttttgctgctggtagaatcagggtcctcgggcatgaacgcgagcccaaagtgccagtctgcgattggaaatttccagccactttaagccagtgctgagtagggcttctgcagagccatgtttgagccaaggtcttggaaggcattgccccatgggctcaggtgactcggggtggagtgagcacgtctgcagggccctctcatacacgcctgaggcagaagcagcgtcccccgtgaaagccaccttccgaagctcctgcgttttttgcaaacttggcttcccccaggggcaggctggactttccctgccccctatgattgaagtcctcctgcttttgggggctgccttcccagagtcccccgggtgctcccctgccgaggtcaggagctgaccaagccttggcccggtgacacctgcagccctcactcctgtcatcccaggacacttgaggcccaaggaggtggagtggagagtgggctcgggtacatgggagccagaagccagatggacttggtcaagtgttggtcacttggagcctccagtgtgcgtcagggtctgtgggcaggggacagggcgtgggtgggggccgaggctggcacgcccctctgccctcaccgtcttggtgacctggcctcggcccctcccccaagtctcttctgtgcaaggcccgcctcggcctcggcagctggttcctgtcccgttttctgtgtctgaaagtttacaggttgtggtgcatcagcccaaactcactggcgttgtgttttttttttctttaattttcagattttttttttaaacaaagtatttttttaggtgcgataacccagaaagggcccgttgggtgtgtgtgtgtgtcctgaactcctcaagcagcgattggagcccaagcacccctggagaggaagggagggtccccactggcccgtggggtctgagttcaggggtgtggagggagcagactccaccggcccaggcccagctaagagggggccgacccctttccccaggcacagccccaggctggcaaagggagggccctgggctgggtgcagggcgcgccaggagtcccagccagggtggccccggcgggggcgggtccagctttggaagccaggctcccctgtgagccgtggcttgtctggtcttcgcccacgggaggctggacagaggctgtagccaacacaatcacctttactttgtactctgtgtgtatgttttggttttctgtgttttaataaatcctttgggaaagg

SEQ ID NO: 1112 - DNA, 6013 bp, Homo sapiens
agctctgctcatgtgctttgcctgctttcccatggcaggctttttattggttaaataaagacacaaacttttcatcagtctttgcaaatacttggttccggcaagttcttggcccttcccaggcttggggctgccggctcacggttcttctctctgcatttcagccaggcccccatatgctgggtttgcaggtcacgaccacccatgacggctgtgctgcgtggggtgcagttccccgtgggcgccgagggtggtgtggggctgcctctcgctcgctccaccagccacccgagggcccgtgtcctggtcgtggccgcgtgtgctctgctgtgtgggtggtcagtcctccccaggggccacctggatggtgtccactcctgccccatggcaggaagtcccagcggcacctggccacgtccctctaacatgtttctggaagtgggattctaggctggagcctcatagcgggcagatactgccccctggccatgagccatgacagttggttgatgggacttgaaggggcctctggacagtgtggctgcagccctggaccctaggagaatagcagccgtgatggggggcagggaccccactttctgggtgggagtgaggagggccggctgctgccccttgctgcagtcatcttcagtcactttcccggccgccacggccccctcctggcttcttgctctcagcagaggggacaagacccttgtgagggtgggcacaggcactccaattgtttggggccttcgctgtcccttgctgtctgtgctggtctttccaggcatccccaggccgtgtgtgtcagcgggtggaggctgggcacctctcacccacccaagctgaagcggcctcacagggggtggcaccaggtgtttctccagctgaacaagctcgccctggaacccccaccctgaaagggctactgcccccatgagaggagcttctagagatggtggccagccttgggggcccggtggagatgtgttcgcggggtcctggtctgattctgtcttggaaggaacatcgggcccctgagaggtcagagcagtggccggcccacggctccgctcaggcgccacggcggctcctttctgtttcttgtagtcactgagttcgaggttcccacagggaggaggcttcctgtggctccgccgtcagggagcagtggggctgccccagcctctgggggctttttaggtgctctgaggcgatctgggtgtggcctggccggtgtgggcagctttgcccttcgtctgagaccccgagccctggggcaggatgaggggtgtggggagagtttgctttttccagagacgtttatctgtttttttttagacggagtctcgctctgtcgcccaggctggagtgcggtggcgcgatctcggctcactgcaagctccgctcccgggttcacgccattctcctgcctcagcctcccaagtagctgggactacaggcgtgtgccatcacactcggctaattttttgtatttttagtagagacggggtttcaccgtgttagccaggatgctctcgatctcctgaccttgtgatccacccacctcggcctcccaaggtgctgggattacaggctgagccaccgcactggccagcgtttatctttaaatgtgccttggacctggcccctggctctttgggagggagagtccttggcaggccccgttgcctccaccccaccagtgcaccttggctcctggtcactgcccaccctccctgcccgggcaggaattcttacaggccctacactcctgaagggaaatcaggctggtcctggggcaggcagcctctcagagctgttgagaattgagcaatctccttgtgctctttcaagctgttcttttctttggttcacactgagcaagggctggttgctccgatagggagaagacgtgaggagtggcatttactgtgattgagcacagggcctgtggactctcccattcacgcagccacatttcccaaaaagaagtggtcctgctccccaccccccgacccccactgcagcgccacctgcctttatctgtacttggagggacagcgcacaggctgtggctggctaccccaggtggctccacccagctctcagaagttcacctgctgcactcagaggccgtttacttgaggtttgatatttatctccaaaggaagggctgccccgactggcctggaccctccagggagttcagcaagccggaaatgcgtgtctgctgctctcctggcccctgggccacctgcttctgtggccctgggattggggagccagggctgagggcctgtagggccccctgtctgtgcctctagaggccctgagccacctcctgcagtgttttagatcccataagcaagagacagaattgtgcatggatggtgagaaaacatgaagctttttatttgtaaacagaaaatggcagggctcactgtgtggggctggggacagcgctaggcctgctttaggccgtgcaccccaacctggggtgttccaccaagaggggtacagtggcctccactgtgagtatgtggccatcctctggctcctgattgctgagttcctgattgctgtctttgcgtaacttaggaaccccgatgaagagcccgtgctcatagctccgttcctgacatgttcaggaacgcctctgttgaggtttttctctttggttctggaattcctgggtccctttgacccctgatgcgtttgttttgggtgttgatgagcactggagctgcttccccacagggatggggcattggggagattccgacacagcagggccctcacccaggaggctgctgtgggtgctggagcggttgcttccatggagctgggattcctctcatttggggctgtaggaaggggtctttcctctctgtgctaacagttgtttgtttaaaaagaaaggctgtttaaacctttcaaacttaaaacttctttttttctttggagatggagtctcaccctgtctcctcccaggttcaagtgattgtcatgcctcagcctcctgaatagctgagattacaggcacatgctaccatgcccagctaatttttgtagttttagtagagacggtgatatggtttggctgtgtccccaccccaatctcaacttgaattgtatctccaagaatttccatgtgttgtgggagggacccaggggaggcaattgaatcatcgggctggtcttttctgtgctattctcgtgatagtgagtaagtctcatgcgatctgataggtttattaggggtttctgcttttgcttcctcctcattttttctcttgccgctgccatgtaaaaagtgcctttcaccacccgccatgattctgaggcttccccagccatgtggaactgtaagtccaattaaacctctttttgttcccagtttcgggtatatcttcttcagcagcgtgaaaatggagtgcacacacacgtcagcactgtgggcgcacacacctgcactcacacattcatcaggacccatgggcacacgtgcacacacacgtcagtcctgtgggtgcacacacctgcactcacacattcatcaggacccatgggcacacgtgcacacacgtcagcaccgtgagcgcacacacctgcactcacgcacacacctgcactcacgcactcaggaccgacggacatacgtgcacacacacatcagcaccgtgggcgcacacacctgcactcaacgcactcgtcaggacccacgggcagatgtacacacatgcaccagcacccgtggacacgtgcacgcacacatcagcacccatgggcatacatggatgcacacatcagtaccatgggcacacacacatgcacccactcccgatggcttcggcttgctgggtgcctgcttcgccctcgggtgagcaagtctggaggcaggcacttggggtggggccacagtatggttcttaggagcccagtgtcccctggacccacttgctcccagccttgggtcccaaagtgctgctcccactggtctctgtgccccacccatcatgggcagggctgtctgaacagggcagagtcacgagtgatgcaagggtggggtgtggaggccttgcctagaggcagcagccagctctggcttggctgggccttaccttcactgtcctgctgtgagacgcaggagccctgggggaggacggcagtctgtatcagggcagtggtgaaactgcagattcctaaatgtgatctggagacgactcttgctggagaaatctacccaggtcccttgggtctgtccctcccttcaccctccacagtcagggacaggctgcgtggtgtgcctccccatctgtgcgtggcctcagcgcagcaggcctgtcctgcccattgctaaaggtagagcccggcagattcattgtgtggtgagggcttccccagacccaccaactcctgtgtcttcccatggtgagaagggtggggtctctctggggcctttttttttttaggaagtcactgatgccactcaggtgggtgcccagctccccacctgatctctggagtggccccttctgctggaggctgccccaggctggatgccgtggcctgcagaccccccttcttgcagtccctgggcaggcagcacccatgcgcacacgtgcacacaggccgtgagcactgccctgtgagccaggtggtggtggggggtgttggggctaaggtttggttagggcccgagtgcttgcgcacccccccatccaatttcccatggtgctgggatgctgccgcctcctggaccctggcgttgaagtgccaccttcatctccctccccagacagtaagctccagacaagggcaggctgtggccgtcactctggccagctgctcgggggcttggtggctgctgggtggtcgcctggactctgccctcctgtctcctggtgtcccggaggggccttgctgggctgggccctccaccgccccattgggcgcctgactctcagggcgcagtcagttctttggggatggccctgatctctgagcgggactgcctctggcctttcttctgcatcccctacggaacagcagcctgctagacgccctgaggaggcaggctgaggggtggaaggggcgtggccgtgcccagcagagaccaccctctgatgacggtgggcgtcctttccagcccctctcggggcatcgcttcatcccttcccccatttccttcctggccctgctctccaagtcttgtgtgtgtggtggggcctggcttccctcccggcctctcgcctgttcccgcccatccctctctggttctctcaggcctcctctgggcttgccaggaatgtaggggaattagggggagggggacacaggaaatgcctcccctcctctgacaacagctccagctgcagggggaggggggaggggagagcagagtgggtgagacgagggagggctgaaggggggagtcggcttggggggagagtgttctcctgcccacccaggcactgggcgtggcccagccccacagacagaacagttctttcttccttattttattttttattagagacagggtctcactctgtcgcccaggctggagtgcagtcgtgtgattggcctcaagcgattctcccacctcagccttccaaagcactgggattacagcagtgagccagtgtgcccagcctcttcctaagtttacaccagtgtgggcatccagtgaggggaactggcctgtgatgcggtggtccttgtgacatgtcaggcagttttagagtagggtttgttaaaacatgggttaaattgggccccacccccagccctccactcctcagccattcaggagaagcgcgaggcatgggtgcgcgaaaattctgagtctgccttccacctgaaccccctctggaaggtctgaccacgggctgggtgtggtggctcatgcctgtaatcccagcacttttgggaggccgaggcgggtggctaatgaggtcaggagttaaagattagcctggctgatatggtgaaaccacgtatctac

SEQ ID NO: 1113 - DNA, 7762 bp, Homo sapiens
caagagtgcctgaggctggatcagaaatagccacgatcgtccagtttgattgattgattgattgatttagttgtgatggagtctcgctgtatttcccaggctggagtgcagaggcacgatctccgttcactgcagcctccacctccccggttcaagtgattctcctgcctcagccttccgagtagctgggattacaggcacctgccaccacgcccggctgatttttgtgtttttagtagagacagggtttcgccatgttggccaggctggtcttgaactcctgacctcaggtgagccacccgcctcggcctcccaaagtgttgggattacaggcgtgagccactgcccccagccccagcttgatcttgaacctcctgtgtgtgggcagagagacatggccctgctactgcttgaacggcttccggagacagtgacttgtttcctttttccctctgaactatgccgtagggccaggtgagctgctgtgaaggactcattcttggtagccggcagttactggcaacttgtgagcttggtgggctcctactaacgcacctgggacaccaggctgctgggctcccctctaggcagcctcccctccaggcagcctcaccagcagctcccctgagccatggagaccccagaggtccccgtgggctcgctaatcgactttgggcctgaggcacccacctcttctcccctggaggcaccaccccctgtgctgcaggacggcgatggctccctgggggacggtgcatcagagagtgagaccactgagtctgcggacagtgagaatgacatgggcgagtcgccctcgcacccgtcctgggaccaagaccgccgttcctcctccaacgagtccttctcctccaaccagagcaccgagtctacccaggatgaagagaccctggcactcagggacttcatgcgtggctacgtggagaagatcttctctggaggggaggacttggatcaggaggagaaagccaagtttggagagtactgcagcagtgaaaatggaaaaggccgggagtggtttgctcgatacgtgagtgcccagcgctgcaactccaagtgtgtctcagaggcaaccttctaccgcctggtgcagtcttttgcagtggtgctgttcgagtgtcatcagatggatgactttgggcctgccaagaacctcatgaccatgtgcttcacctactaccacatcggaaaaccacagctgctgcccccggagtcccgggagaagcccgcgggcagcatcgactcctacctgaaatccgcaaacagctggctggccgaaaagaaggacatcgccgagcggctgctgaagaacacctcggccaggactgagaatgtcaagggcttcttcggggggctggagaccaagctgaaggggcccctggccaggaggaacgaggaagacgagaacaaaccccaggagaagcggcccagggctgtgaccgcgtacagccccgaggacgaaaagaagggggagaagatctacctgtacacgcacctgaagcaacagcccatctggcacactctgaggttctggaatgcagccttttttgacgctgtccattgtgagaggacaaagcgatctcccactaccagaggggatgctggagaggaggaggagaagagggagaagtggtgccacatgacccaggaggagcgcgacgacagcctccggttcaacgagaacatcaccttcgggcagctgggcacattcacgcacaacatgctggcctttggactgaacaagaagctgtgcaatgacttcctgaagaagcaggctgtgattggcaacctggatgaagagcaatacaagctgcttagtgaccacattgagcaaatggccactgagtaggccccagaggtcgcactccgcaggaggactgaggccatgtgccattctcccgggcccagcgcccggccgtcaccccacccgatgacctgcatgaagccagcagcacccagagccactcctgctgccctagaactagcggttagaagaatccgctgttcctccctcatctcctctgcctgtgtctgcgacccccatccatgtgccaaagtgtcccttgggtcacacagctaaagccgaggtgaccagttgtaccccgagtgccaggcttgtgagatgagaccaagagggaggaggggaaggactccatgggccatcgtgggccaagggctggcgagggtgggggcgggcaagggatgcaggcaggacagccatgaggtggggctgcagccggcacacccagtggtggagggccggcgctgccactcacggtgggtggccgtgggccaccttccctgcaatgggtgcacacgcggctcccatccagccctctcagcgtggggctgtggctggtcctcactattccccagtctcccgctgtggggcaggaacaggaagtgacgggaaccttgaggaggaaacgcctgtgttagggagagagtgggtgcggtgtagaggatgctcttggccggctggagcaagacctggctcccaccagagggacgtgtgtgtgcctgcagacggcccgggagctgtgtgtctccgccagagtcacagcagtgccgaggtgtccgcggcagaccacacagaccgtctgaaatgcgcccgcctggcggacagctcccttctgaagcagagaagcctccatggtcacgaagcagcgttgtgctgtgtgtccctcgcaagaagcacaggaaagagaagtttctttagtagccactagacaaccaccctttctgaaagcaaacagtgctgctctttattccagacaaggcaggaaagtctgagttgggagtgacagtggctggagagaagcagatctgtgcaacgtgcagggcaagccagtggcgtggcctctgcctctaagcgctgagcattgggccccttccccaccagacctttgtagctcctccagcctctgcagagactcccttcacctcgcacttactgcctgggaaccacggcccttctcttctgtgggtctgtaccaggtactccaggccagcccatgggcccggggcctgaccccaacacctgcatgctgggtccagagccttctgtttcaccgtgcgtggacactgctaggccgcctggggtcccctgcctcctgcctgtcgctgccgtggtccctgactgcgaaataggcccgcggggctctccctcctcctgccatcctcccctcccgcccttcctggctacctcctctgacatgcggtcagataagtcccgtcttgtttgtgagtaccacagaaacgcctgagagtcacttacccggccactgcttggaaggtttccctccggggaatgcctccctggaatgttccagagacggaacattctctagagacaacagtctgtgctgcagattggttggatcacagaatgtgtgtctggggcattatctgaaacgtggtgtcatctgatgcatttggaccatatgctgccagactgcagaacgggggagccggggctcagggcccctgactgcatggtgcatgagtgatctcagcctagcgatgccgctggccagaccgtgaccatgctgccagtgtgctcgccatgagctgggtcagggctggggagttgtgcaggctggggtgacccttcccccatcattgggccccaacgggcatgtctccaccgaatccatttagagaaatgtcagagcgagggttgtgtggacacccctcgctctgatgccaactgcagataatacacacctcctgcagcgtccagccacggctccagggcactgctctcctccttgcaccggtgaaactcaggccacactcaagggctgactgtccaggcgctcccttcagccgcctcgtcgtcagcgttcttagtcatgcattattcgtgttagctgaaatgcattcagactttgttctgcggtgcccacaggacttacccctgtatgtacaggatttttgtatgaaagttttgtttgattctgagactctcttgggaacgctggagagcttgtgcacagcctctggaaggaaaggcagcgctgacttcgttgggcttttttccaagcactttaacttcagaaatggtcttgacacttttttctccacatagactcttgaaatagccatttcaggggaggaaagggttggggttttctttgtttgtttgtttgtttccccctttactacctgttcttgtagatctagctcctcagagttggaggaaggctgacagagaaggtctcctctgtgctccatccacacaggatgccggagagacagccccttgtgctgtgagcagagcaggcagtggctctggaggctgcctgtggtctccttccggctgtggctgacagtggctctggccagggttgcttggagaaggctcagtgtgcctgggacagggcttaccacctgccaccaaggtttcctctcttcccccaggacctgggcagagcaggcatgagctgggctgtggtgcagagcaagcagacccagccacactgctcaaaggtccctgcgtggggaggtgtcacaccaggggcacacccagggccacctgggtgtaggagagctctggtggcccctccgtaaactcaggaagtgtcaggtgatttcctagggagaggttcccagtcccagcaggcagaatgcccaaaaccaggagcacgaaggcctgtcatccatggggccattgcaggcactctgccgcccgaccttgagggctgtgccaatcctagtgaaccaaaatgcaaacaactcacacaagtgaaaagctccctgctttgaaaacaggacatgttgacaggcagcatggtatgtttttagcctttgttacagttttagcaacattgatgtctaagaggggccgtggtaatagattgcatctgccctgtgcatgcgcatgtttaaccacaggccagagaactcaattctgatgtcgtaagttctctgtaagtgaaatggggtagactgtatgattttcctattgccaaaagaaagaaagggggccaaacagctctgaaatttccaaaaaatggctagagggagagtccagtttctgagctctgtacccaaattaaaatcctgatgttcaggttaatccaagcaacacgcattgggtttaaaaccagcaccgaggcccagtgggggaatcacagacatcaccaagtctcgtcttctttccttcctgtgagttgaaaccaaacaggcctctcgctcactcctcccagcccagtaatgctgaggagttcagttgtgaggaaagaaggctggagctgtgagattcgcttttccctaggctgttccgcgtgggttaccttatcaccctggagcacttggtattccagacccctgacatgaggaatgcaggttcacactgtaaagagtttgtgaaaggtttcagtctaactggggttccttagctggaagccagggctggaagctacaggcctgaccttcctgggtcccactatctgttggcattttttttttttttttttttttagacggagttttgctcttgttgcccaggctggagtgcagtgacacaatctctactcactgcaacctccacctcccgggttcaagcaattctcctgcctcagcctcctgagtagctgggatgacaggtgcacgccaccacgcccggctaatttttatatttttggtagagatggggtttcaccatgctggccaggctggtctcgaactcctgacctcaggtgatcccccccacctcagcctcccaaagtgctgggattacaggcgtgaggcatcacacctgcctctgttggctttttagttaggaaggatccagctaggcccgtgtggttagatcagctttgttactgaattacctaaaaccagaccacagcacagccagggagcccagtagtgtttccaagaacagtgtggagcttgagaaagagaactttaaaaattagagggtccctttctgcagaggaagggatgctcgcagggtggcagtggcccagccccagcctcagggacggggagggagagccccctctgggcccagcaggcaggtgttctgaggctggtccctcctcagtttccgcagccacaaggcgaaacggccagattctcactcaaggtcgttctcactccttttcctgtcccgtttccagtcccactgagccattcacttctgctgaaccatttttcttaggatgcagccgtctcactcccttgtcctgtaaatcgtgtattcatgttgatgattcttggagataggtttcactttttcccagctgcgtccacaggaaaggggagtcggatgccagctgcaccccgcctggctcgcacaggctaagaccacagacagagcagggcttcccggagccacacaggccacgcaccccaggaacccttgctgccgcgggccaggaacaggaatgtgttggtgcctgagacaccaaatggaagaagcacatcaagactgttctcctgcggccaacactggcccggaagccgccctccatacaggccctcagggggcctgccttctgcgcctcagtcccccgtgcatccctgggcctgggtatcacatgctctccaggaaagggacggaatcaatcctgtgaccgatgggctcgcaaggatgggtgccgccgtgggagccctgcctctggtgctggcaagggattgggtttgtgtgggtgtctctagcctgcagagtgcagtgagtgagagtccttgggagcgcggcgctgcctgtagctgtgcctggggatgcacgtggccacgggatttcagtgggacagcgctcccacaggggctgggggtgggggtggggtttcttagttactgttggaaagggaaaaattcaccatatccaaggggagagacgatgggctgggtttgtttactccaacttcccttctacacccctcctgcaggacagtacgatttggggagaacccagctccccactttatctgcagactctgggacctgacaaaacagtcagagcctgagtgcactgcagcctgaactcccttgagcagcgctataagggactttgcactttaaaaaggggatgcctgtcagtaaatcccctgtgcattgactagaactggggggctgcgcccgctccctccttaatcctagatgatttgctcatgaaatagaggtgggggacgaccgcatgcactctgggaggtgcagccctaaggggtggactccagatctccctgcaagagacagcttggcttggctttggctgttggggaggagtccctgccatcccggtgagcctggggctgttgcttagggtcttctgggtggacacgtggagaaagagaaggcaaacgttggaacactaggaaaagctagaaattcagacaacacacatggatccccttaaaacatgtaaatgtgtcagaacacggttgacctgccgccttcttgaacctggtggcccccgttggaactatcagtggcgtctcccatgcacacgccctctgctttctctttcctagactcgcggtgctcacatccagacattaccttgttggtagcccccaagtggcgtgcagtgacaccagtatcttctctgttgcatttttgcaatcttgtgtcccgctcggtgatgttctacaaactctgttttaaggttgagaaagtttcaagggtgaagatctcaaaacagtgctaaaatcaaaggtgtttgctgtgaagaaaaacatgtgtatatattgcaccttgagttgtcagaaggtagaaactgaaataaactaacttt

SEQ ID NO: 1114 - DNA, 5600 bp, Homo sapiens
ttattgttgctcctgtggccattctcttgtcatccccactttcacattttggcgtggtgtattaatagactgagtgggattaatgggtaaatatgactttatagtcagctctaatcctggattcaatatcagaatttagattttcagctttgtggatgttcgacattttaaaaacagttattgcaaagaggtgaaaattttgttctgaagtcttaaggaaacagagaaagtttttccgtccttaagtgtgggacttgttttgtgaccaacaatatgaaaggctctgaggtcagcttggagaagaaaaaaaagattaagatgccagtgaagagacttcgtgaggtagtttctcaaaatcatggagatcatttggttttgctgaaagatgagttgccctgtgttcctccggcattgtctgcaaataaacgtcttcctgttggaacggggactagtttgaatggaacatcacgtggttcatcagacttaacttctgctagaaattgttaccagcctctattagaaaatcccatggtgtcagaaagtgatttttctaaagacgttgcagtgcaagtgttgcctttggataaaatagaagagaacaacaagcaaaaagcaaatgacatcttcatttctcagtatacaatgggacagaaagatgctctaagaacagttttaaagcaaaaagctcaaagcatgcctgtttttaaggaagtaaaggtacatctgttagaagatgcaggcatagagaaggatgctgttactcaggagactagaatttcacccagtggaattgattcagctacaaccgtggctgcagcaactgctgctgccattgcaaccgcagctccgttgataaaggtgcagagtgatttggaagcaaaagtcaattctgttacagaattacttagtaaattacaggagactgataaacacctgcaacgtgttacagagcagcaaacaagcattcagaggaaacaagagaaattacattgtcatgatcacgaaaagcaaatgaatgtgtttatggagcagcacataaggcatcttgaaaagttacaacaacaacaaatagatattcagactcattttattagtgctgcactcaagactagtagttttcagcctgttagtatgccctcctccagagcagtggaaaagtattccgtaaaaccagaacaccctaatcttggtagctgtaatccatctttatataacacatttgcttccaaacaagcacctttaaaagaagttgaagatacgagttttgataaacagaaatctcctttggagacaccagcacctcgcagatttgctcctgtacctgtttcaagggatgatgaactatcaaagagggaaaatcttttggaagaaaaagaaaatatggaagtgtcgtgtcacagaggaaatgtaagactattggaacaaattttgaataataatgattctttgacaagaaaaagtgaatcatcaaacaccacctcactaactaggtcaaaaataggatggactcctgagaaaacaaacagatttccttcctgtgaagagctagaaacaactaaagtgactatgcagaagtctgatgatgttcttcatgaccttggccaaaaagagaaagaaacaaatagcatggtccagccaaaagaatctctgagtatgttgaagcttccagatcttccacagaattctgttaagcttcaaacaaccaatacaacaagatctgtattgaaagatgctgagaagattttgagaggagtacaaaacaataaaaaagtacttgaagaaaacctggaagctattattcgtgcaaaagatggagctgccatgtattcgcttatcaatgctttatctaccaacagagagatgtcagagaaaattaggatcagaaagacagtggatgaatggattaaaactatttctgcagaaattcaggggcttttgaaagcaaccacagtaatacaagatgaagattatatgttacaagtctatggaaagccagtttatcagggccatcgaagcactcttaaaaaaggaccatatctcagatttaattctccatctcctaagtccagaccacagagaccaaaagtaatagaacgagttaaaggcactaaggtaaagtcaataagaacacagactgacttctatgcaacaaaacctaagaagatggattctaaaatgaaacattctgttcctgtgttacctcatggcgatcagcaatatttgttcagcccaagtagagaaatgcctactttttcaggtacattggaaggtcatctgattcctatggcaattcttttaggacaaacccaaagtaatagtgataccatgccacctgctggagtgattgtcagcaagccacaccctgtaactgtgactacttctattcctccatcatctcgaaaagtagaaactggagtaaagaaacctaacatagccattgtagaaatgaagtcagaaaaaaaggatcctcctcagcttactgtgcaggtattacccagtgtagatattgacagcatttcaaatagtagtgctgatgtcctttcacctctgtctagccccaaagaagcatctcttcctcctgtgcaaacttggataaagactccagaaattatgaaggtagatgaagaagaggtgaagtttccaggaactaactttgatgaaataatcgatgtcatacaggaagaagaaaaatgtgatgaaattccagactctgaaccaattctggagtttaacagaagtgttaaagctgattctacaaaatataatggtcctccatttccgccagttgcttctacttttcagcccactgctgatattctggataaagtaattgagagaaaagaaacactggaaaatagcttaattcaatgggtagagcaagaaataatgtcaagaattatctctgggctctttccagtccagcaacagattgcacctagtatcagtgtttcagtcagtgagacaagtgaaccactgacttctgacattgtggaaggaacaagcagtggcgccctccagctttttgttgatgctggtgttcctgtgaactcaaatgtgattaaacattttgttaacgaagctcttgctgagaccattgctgtcatgctgggtgacagagaagcaaagaagcaaggtcctgttgctacaggtgtttctggggatgcttcaacaaatgaaacatatttgccggcaagagtgtgcaccccactgcctaccccacagcctacgcctccttgctcaccttcatcacctgctaaggagtgtgttttggtaaagactccagattcttctccctgtgattcggatcatgatatggcttttcctgtgaaagaaatatgtgctgaaaaaggagatgatatgcctgccatcatgcttgttaatactccaacagttacccctactactacacctcctccagcggcggcagtttttaccccaactttgtcagatatttccattgataaattgaaggtatcaagcccagagcttcccaagccatggggtgatggagacctgccactggaagaagagaaccctaactcacctcaagaagaacttcatccaagagctattgtaatgtctgtggctaaggatgaagaaccagagagtatggatttccctgctcagcctccacctccagagccagttccctttatgccatttcctgccggcaccaaggccccttccccctcacagatgccaggttctgattcatcaacactggagagcacattgagtgttactgtcactgaaactgaaactttagataaacccatctctgaaggagagattttatttagctgtggtcaaaaattggcccccaagattttagaagatataggactgtacctgacaaaccttaatgatagcttatccagcactctgcatgatgccgttgaaatggaggatgatcctcctagtgaagggcaagtgattaggatgtcccataaaaaatttcatgcagatgcaattctttcttttgctaaacaaaaccaggagtcagcagtttcccagcaagcagtctatcattcagaggacttggaaaacagtgtgggtgaacttagtgaaggacaaagaccccagctaacagcggcagcagagaacatcttaatgggacattctctctatatgcagccacctgtcactaatacacagtctttggatcaacaatgtgatcctaaaccattatctcggcaatttgacacagtttcaggtagtatttatgaagattcatgtgctagtcatggtccaatgagtttgggagaattggagttggagccaaattctaagctggttcttcccacaacacttctgacagcacaagaaaatgatgttaatttaccagtagccgctgaagatttttcccagtaccaactaaagcaaaatcaggatgttaagcaagttgaacacaaaccatcacaaagttacctacgtgttagaaataaatctgatattgcaccttcacagcaacaagtttcaccaggtgatatggatcggacacaaattgagcttaatccgtacctcacatgtgtattttcaggtgggaaagcagtgccactctccgcttcacagatgccccctgccaagatgtcagtgatgctgccgtcagtgaacctcgaggactgctctcagtctctgagtctcagcacaatgcaggaggacatggagtcttcgggggcagataccttctgaacgggaagagacagccagcacagtgtttatgccactggttttaaagtcattttaccttggcttaaaaccctctctcagactgtttggtttttgagcatattctgaaaaaaaaattccaatattttaaaataaaacaaaaagcataatttgggtatttaaagtttttaaataaaataagtataagtcattataagtctgattgtgagttgtttcttagaatcctgagatagcatagagtagtgaaagggcatggcttttgacatctaggcatttaatctataggtgtaattatctgtatgtatttataaaattatgtagctcaaggttattcattctaacatttttataacagcaaatagaaaaaatcaaatgtctatcaataatagactggttttaaagtgatggtacatcagtacaatggaatactatgtattacaaaaaaaaatttaaaaagtttattgatatggaataatctttgagatgcactgttaaagtgaaaaaagccatgtgcaaaatagtgtgtgaactatgcagttgttgaaattatttaaaatggggtggggaggaattcaaatgtatggtatgtcacatattcttacatgtatttgcttgtaaatatattatataaacaagaaactgctaagtttgtctccagggagtagaattgttggctgggtgataggagaggctaagtgataggaatcaaggataatcgtggttactatgtatttgaacttcagttgtgatagaaaaaaatcatcagtgagattaatttttatatgccttatgtataccatataaacctttataaacctgtgaaacatgtaactctattaccttttgcaacataaatacataaaattaaaggaaaataaaaagcattgcttcgtaatcagataaaaaaaaaa

SEQ ID NO: 1115 - DNA, 5252 bp, Homo sapiens
cggccgccccggccgacagcgcccgggaacacggctcgcaggccgggggcaaggggcggccgggcgcggccgagctgccatcagtcatgctcttaaacggggactgcccagagagcctgaagaaggaggcggcggcggccgagccacccagggaaaatgggcttgacgaggccggcccgggagatgagaccaccggccaggaagtcattgtcattcaggacacgggcttttctgtgaagatcctcgcccctgggatcgagcccttctccctgcaggtgtccccccaggagatggtgcaggagattcaccaggtgctcatggaccgggaggacacgtgtcaccgcacctgcttctcactgcacctggatggcaacgtgctggaccacttctcggagctgcgcagcgtcgaggggctgcaggagggctctgtgctgcgtgtggtggaagagccgtacacggtgcgtgaggcccgcatccacgtgcgccatgtccgagacctgctcaagagcctggacccatccgatgccttcaacggggttgactgcaactccttgtccttcctgagtgtcttcaccgacggcgacctgggagacagcgggaagcggaagaagggcttggagatggaccccatcgactgcacaccacccgagtacatcctgccagggagccgggagcggccactgtgtcccctgcagccccaaaaccgtgactggaagcccttgcagtgcctgaaagtactcaccatgagcggatggaacccgcccccggggaaccggaagatgcacggggacctcatgtacctgtttgtgatcacagccgaggaccggcaagtcagcatcaccgcgtccacacggggcttttacctgaatcagtccacagcttatcacttcaaccccaagcccgccagcccccgcttcctaagccattccctagtggagctgctcaaccagatcagcccgaccttcaagaagaacttcgctgtgctgcagaagaaaagggtccagcgccacccgttcgagaggatcgccaccccattccaggtgtacagctggacagccccccaggcggagcatgccatggattgcgtgcgtgcagaggacgcctacacctcgaggctgggctatgaggagcacattcctggacagacccgagactggaatgaggagctgcagacgacgagggagctgcctcgcaagaacctgcctgagcggctgctccgagaaagggccatattcaaggtgcacagcgacttcaccgcggcagccaccaggggcgccatggccgtcattgacggcaacgtgatggccatcaaccccagcgaggagaccaagatgcagatgttcatctggaacaacatcttcttcagcctgggcttcgacgtccgagaccactacaaggacttcgggggggacgtggcggcctacgtggcgcccaccaacgacctgaatggcgtccgcacgtacaacgcggtggacgtggaggggctgtacacgctgggcacggtggtggtggattaccgcggctaccgggtcacggcccagtccatcatccccggcatcctggagcgggaccaggagcagagcgtcatctacggctccatcgacttcggcaagaccgtggtgtcacacccgcggtacctggagctgctggagcgcacgagtcggcccctcaagatcctgcggcaccaggtgctcaacgaccgtgacgaggaggtggagctctgctcctcggtcgagtgcaagggcatcattggcaacgacgggcgccactacatcctcgacctgctgcgcaccttccccccggacctcaacttcctgcccgtgcctggcgaggagctgcctgaggaatgcgcccgcgccggcttcccccgcgcccaccggcacaagctctgctgcctgcgccaggagctggtggacgccttcgtggagcacaggtacctcctctttatgaagctggccgccttgcagctgatgcagcagaacgccagccagctggagaccccctcctccctggaaaatggtggtccttcctccttggagtccaagtctgaggatcctccaggacaggaggcgggaagtgaggaggagggtagcagcgccagcggcctggccaaggtgaaggagctggcagagaccatcgccgcagacgacggcacagaccctcggagccgggaggtgatccgcaacgcgtgcaaggcggtcggctccatcagcagcaccgccttcgacattcgcttcaatcctgacatcttctcaccaggggttcgtttccctgagtcctgccaggatgaagttcgggaccagaagcagctgctgaaggacgcggctgccttcctgctctcctgccagatccctggcttggtgaaggactgcatggagcacgcggtcctgcccgtggacggggcaacgctggcagaggtgatgcgccagcggggcatcaacatgcgctacctgggcaaggtgctggagctggtgctgcggagcccggcccgccaccagctggaccacgtctttaaaatcggcattggagaactcatcacccgctcggccaagcacatcttcaagacgtacttacagggagtcgagctctccggcctctcagccgccatcagccacttcctgaactgcttcctgagctcctacccaaaccccgtggcccacctgcccgccgacgagctggtctccaagaagcggaataagaggaggaaaaaccggcccccgggggctgcagataacacagcctgggctgtcatgaccccccaggagctctggaagaacatctgccaggaggccaagaactactttgacttcgacctcgagtgtgagaccgtggaccaggctgtggagacctacggcctgcagaagataacgctcctgcgggagatctcgctgaaaacagggatccaggtcctgctgaaggagtacagcttcgacagtcgccacaagcccgcgttcaccgaggaggacgtgctcaacatcttccccgtggtcaagcacgtcaaccccaaggcctcggatgccttccatttcttccagagcgggcaggccaaagtgcagcagggcttcctgaaggagggctgtgagctcatcaatgaggccctgaacctgtttaacaacgtctacggagccatgcacgtggagacctgcgcctgcctgcgcctcctcgcccgcctccactacatcatgggcgactacgcagaggccctgagtaaccagcagaaggcggtgctgatgagcgagcgggtgatgggcaccgagcaccccaacaccatccaggaatacatgcacctggccctgtactgcttcgccagcagccagctgtccaccgccctgagcctgctgtaccgcgcccgctacctcatgctgctggtgttcggggaagaccaccccgagatggcgctgctggacaacaacatcgggctggtgctgcacggggtgatggagtacgacctgtcgctgcgcttcctggagaacgcgctggccgtcagcaccaagtaccacgggcccaaggccctcaaggtggccctcagccaccaccttgtcgcccgagtctacgagagcaaagctgagttccggtcggccctgcagcacgagaaggagggttacaccatctacaagacgcagctgggcgaggaccatgagaagaccaaggaaagctccgagtacctcaagtgcctgacccagcaggccgtggccctgcagcgcaccatgaacgagatctaccgcaacggctccagcgccaacatcccgcccctcaagttcacggcccccagcatggccagcgtcttggagcagctgaacgtcattaacggcatcctcttcattcctctcagccaaaaagacctggagaatctgaaagccgaggtggcgcggcggcaccagctccaggaggccagcagaaacagggatagagccgaggagcccatggctaccgagcccgcgccagcgggggccccaggagacctgggctcccagcccccggctgccaaggacccttctccgagcgtgcagggatagagagggagccagacggacagccagccagcggccccgtcaccagggagcccgactgcgggagaagggggcgagcctgcgggcggaagaggaagcaaggccctcttcctccacgtctcaccccaccccacccccgtgtcctcctgggagcctggcctgcctgccccgcagaaggtgtttttgcgctggttcaatgaatagatgatgcagaggccccattggagacacgtgaatggcgtgtgcggccatcagttcccggctggggggcaggtgttgcttcggcccccgccctccggccggcgtgtgcgagtgcgcccctggctgtgagtgttgaccgttcctctcccctgtacatagcccgagccagtcctgagtgggtgactcctgagtgggtgacgcgcagacgggatttctcaggtcatttgtatggtcgacatgatggctgctgctttggctgccaccacccccgggcccagcctgtctgaaagttcagggtttaggccgaaaaacccggtggggaggggtggggagccggagctctgtggcggggctggagggctggggtgcactttagtttggggcgggacgggagccgccgttgtgactggcgtggtctggctgctgctcccgaacggaggggtcggggttggcttgctgggccctcagagcccagtgggtggctctgactcggctccctactccctgcacccagctgggcgcagccttggggcctgcggtctgaatgtatccctcccctcagttttaacctgagctgccgaacgcacagtgggccgggggcgaggctgggggaagcggggcccaattacggatcccgggagttacaggtgccgacgtgatgtcgcttctctggtgcccagctcccttcctggtctgagactagctctgggggtggcgggggcccccacacgctgctcccgctccaccctgcccgtgctgctgctctgtgcctgctgtcagagccctggtgggggaggatgtggccaccctgagacccggaggagacgggcgtctgcctgggtttgcggagagccgcttatgggtgtggtccgtccagacaccttgtttcaagggggatgggcgtgagcgggcaagcagagcatccccaccgctgagcaagaactttttcttgtttttaaaccatcacgtcctcatttcacattggaataaagtgagtttttgaaacctgcggcaaaaaaaaaaaaaaaaaaaaaaaaaaaa

SEQ ID NO: 1116 - DNA, 5319 bp, Homo sapiens
ctgatttcgtgcgcttcctcgtccttcatgttggatggccagtttttcgtttgtgcgtcatcctctacctgagaaatggtcgcttgcccctagtctagacacgcattaaagggcagtatttaaagtcagttggcaagcagtggaataagatttttgtaaagaaaccttgtgcagcatggattctctaccagatgaattttttgtgaggcatcctgctgtggaggatcagaggaaggaagaaactgagaataagctagaaaaatcatctggtcaactgaacaaacaggaaaatgacatacctactgatcttgtccctgttaacctactattagaagtgaagaagttattaaatgcaattaatactctaccaaaaggtgtggttcctcacattaagaagttcttacaagaagatttttccttccaaactatgcagagagaagttgcagctaacagccagaatggtgaggaaattgttcctgctttgactttacgtttcttgattacacagctagaagcagcacttaggaacattcaagctggcaattataccgcacaccagattaatattggttattatttgacattactgtttttatatggagtagcactcactgaaagaggaaagaaagaggattatacagaagctgagaataaatttctggtgatgaagatgatgatccaagaaaatgaaatttgtgaaaactttatgtctttagtttattttggacgtggtttactgcgatgtgctcaaaagagatataatggaggactgctagaatttcataaaagcttacaagaaattggagacaaaaatgaccattggtttgacatagatcctacagaagatgaagatttacctacaacttttaaagatcttcttaataattttatcaagacaactgaaagcaatataatgaagcagacgatttgtagttacctagattgtgaacgatcttgtgaagctgacattttgaagaacaccagttataagggattttttcagttaatgtgcagtaaaagttgctgtgtttatttccataaaatttgctggaaaaagttcaagaatttaaagtatccaggtgaaaatgatcagagttttagtgggaaaaaatgtttgaaggaaggatgtacaggtgacatggtaaggatgctgcaatgtgatgtacctggaattgttaaaattttgtttgaagttgtgagaaaggatgaatatatcaccattgaaaatttaggagcaagttatagaaagttgatatctctgaaaataactgatactgatataagaccgaagatcagtttaaaatttaatacaaaagatgaaatgcctatcttcaagcttgattataattatttctatcatctgcttcatataattattatttctggtactgacattgttcgacaaatatttgatgaggctatgccacctcctcttttgaaaaaagagcttcttatacacaagaatgtgctggaatcctactacaaccatctttggaccaatcatcctttgggtggatcatggcatctgctttatcctcctaacaaggagttaccgcaatccaaacagtttgacttatgcctcctgttagctcttataaaacatttaaatgtgttccctgcacccaaaaaaggatggaatatggaaccgccatcttctgacatctctaaatctgcagacatcctgagactgtgcaaatacagggatatcctccttagtgagattttgatgaatggtctcactgagtcacagttcaattcaatttggaaaaaagtttcagatattcttctgcgccttgggatgatgcaagaggatattgacaaagtgaaggagaatcccattgagaatatctcccttgattaccatcagctatctgtctacctaggcataccagtaccagaaatcatacagaggatgttatcctgctatcaacaaggaattgctctacagtcaataacaggcagtcagcgtattgaaatagaagagttacagaatgaggaagaagaactaagtccacctctcatggagtacaatataaatgtgaaatcacaccctgagatacagtttgcagaaattaataaagatgggacctcaatacccagtgaatcttcaacagaatctcttaaagatctccaggaagttaagagtaaacaaaggaaaaagaagaagactaagaataaaaagaataaagactcaaaagaagaccaagtcccatatgtggtagaaaaggaagagcagttgaggaaagaacaagcaaatccacactcagtcagtagacttataaaagatgatgcaagtgatgttcaagaggattctgcaatggaagacaagttctatagcctggatgaattgcatattctggacatgatagagcagggctcagctggcaaagtaactacagactatggagaaactgaaaaggaaaggcttgctcgtcaaaggcagctttataaattgcactatcagtgtgaagatttcaaaagacagttgagaacagtgacttttcggtggcaagaaaaccaaatgcagattaaaaagaaagacaaaattatcgcatctcttaatcaacaagttgcttttggaatcaataaggtttccaaattacagcgtcaaatccatgctaaagataatgaaatcaagaaccttaaagagcaactttctatgaaaagatctcagtgggaaatggaaaaacataatctggaaagcacaatgaaaacatacgtaagcaaactgaacgcagaaactagcagagctttaacagccgaggtgtatttcttacagtgtcgtagggattttggtttgcttcatctagagcagactgaaaaggaatgtctcaatcagcttgccagggtgactcacatggcagcaagcaacctagaatcacttcaattaaaggctgcggtagacagttggaatgccattgtggcagatgttagaaacaagattgcattcctcaggacacagtacaatgaacaaataaacaaagtcaagcaaggatttgccttgagtaccttgcctccagtccagcttcctcctccaccacccagtcctgagatactgatgcagcagttcttaggaagaccccttgtgaaagaatctttctttagacccatacttactgttcctcaaatgcctgcagtttgcccgggagtcgtctctgcaactggccaacctagagcccccctgatgactggcatagcctgggctctgccagcgcctgtgggagacgctgtgcctcccagtgcaggtctgcggagtgatccctccatcatgaattgggagagaattacagacaggctgaaaactgcctttccacagcaaaccagaaaggaacttacagatttcttacggaaattgaaggatgcttatggaaaatccttgtctgaactgacatttgatgaaattgtttgcaagatttcccagtttattgaccccaaaaagtctcagagtcaaggaaaatcagtgtcaaatgttaattgtgtttcacctagtcattctccatcacagcctgatgctgcccagcccccaaaaccagcctggaggccactcacttcacagggtcctgccacatgggaaggagccagtaatccagatgaggaagaggaagaagaagagccttgtgtgatctgtcatgagaatctgtctccagaaaatctttcagttttgccttgcgctcacaaattccatgctcagtgcattagaccatggttgatgcaacaggggacatgtccaacgtgcagactccacgttttgctaccagaagaattccctggtcaccccagccggcagttgcccaagatctgatacaaggtacccatgaagagattatgaactacttgaaggtggagactgtacggtggtgtgttggagctggcttgtaatgtcttatgagtgacaatcgttagtttgaggaattttgtgagacagttgtcaaattgttgctagcttgaaatctgcggcaattggagtatttacaccatagaaatgctataagtgaagacctacctttcccttaagagctagttgttaaacctttaccagcataccactggaccttgtctaaaatttctttgtgttcccagtgtcttgcccagtagatacaagataaatattgccagaatcagatcaggaagtagtaagaaaaggagttaatatgcaaactaaatcactcgctcaattgaataattgagatcttctgttcatttgttccttggaccttaatcatttgcattttggagaaaattttttctgctttaaaagtctgtaatttcagtttttgtgtcggggagagggaaaaactatttgtctgtagttgctttttgtgacaaagtgaatacccactgggctaagtttcatatctaaagcttgtcactaagaattttcatttttaggggtcaaaaacctattttgaaaatagtgttgtgtgaatgctgtaagtgttgtacatgtctctggtttcagaattaaaagaattcagagttaccttgtgagataaatgttctttgcttcatattcacagtttcacctccatttaaatttatggggaagaataaatgtttcctgactcagaaacaattttgcctccatatttcagtgcaaatatattttgaagttacttttaaatatttatttaaaacctctgtttctgtaactgtatgttaaacgtattcttctgtaatgagaatagactggaacatgtgagggaaaaatattaaaaaaaagatggcagtcatctagacatgtaaaatgccaagaatgtcttagaattgcacaatttagaatttatagagcctttaatcaccttgtctagcaccttgtattagtccattttcatgctgctgataaagacatacctgagattgggcaatttacaaaagaaagaggtttaatggacttacagttccacatgactaaggaggcctcacaatcatggtggaaggcaaagaggagcaagtcacatcttacatggatggcagcagacaaggagagagagcttgtgcagggaaactcccatttttaaaaccatcagatctcatgaggcttactatcacgagaacagcatgggaaagacctgcccccgtgattaaattatttcccaccaggcccctcccacaacatggaataatgggagatacaagatatttgggtggagacacagagccaaaccatatcacaccttaaggtcatggtcatatagctagttatcttgtaaaaccaatgtttcttagttcatacttacaactgcaatttcactttcatttagaaaagaataaatgtttcttaattgaacaactaaaaaaaaaaaaaaaaaaaaaaaaaaa

SEQ ID NO: 1117 - DNA, 4373 bp, Homo sapiens
ggcggctcacgcgggttcccaggagctgattgatggattttcaggaattctggaacccgagcgtcatgttagggtgaagcagaggacctcagtgctgaacatgctaaggaggttggacaaaatcaggttcagaggtcacaagagagatgacttcctcgatctagcggagtctccaaatgcctcggacaccgaatgcagcgacgaaatccccctgaaggtaccgcggacctcgccccgggacagcgaggagctgagggaccctgctggtccagggaccctcatcatggccacaggagtccaggactttaaccggacagagtttgatcgactgaatgagatcaaaggtcacctggaaattgccttattggaaaaacatttcttacaggaggagctccggaagctgcgagaagaaaccaacgcggagatgctgcggcaggagctggaccgcgagcggcagcggcggatggagctggagcagaaggtgcaggaggtgctgaaggccagaaccgaggagcagatggctcagcagcccccaaaagggcaggcccaggccagcaatggagcagagcgccggagccaggggctgtcctcgcgcctgcagaagtggttctacgagcggtttggggagtacgtggaggacttccggttccagcccgaggagaacactgtggagacagaggaacccctgagcgcccgcaggttaactgaaaatatgagacggctcaagcgcggtgccaagccggtcactaactttgtgaagaacctctctgccttatccgactggtactccgtctacacgtctgccattgccttcaccgtgtacatgaatgccgtgtggcatggctgggccatcccattgttcttatttctagcaattctgaggttatccctcaattacctcatcgccagggggtggcggatacagtggagcatcgtgcccgaagtgtctgagcccgtggaacctccaaaggaagacctgactgtgtctgagaagttccagctggtgctggacgtcgcccagaaagcccagaaccttttcgggaagatggctgacatcctggagaagatcaagaacttgttcatgtgggtccagccggagatcacacagaagctgtatgtggcgctctgggctgccttcctggcctcctgcttcttcccctaccgcctggtggggcttgccgtgggactctatgctggtatcaagttcttcctcattgatttcatctttaaacgctgcccgaggctgcgcgccaagtacgacacgccctatatcatctggaggagtctccccaccgacccgcagctcaaggagcgctccagcgccgcagtctcacgcaggctgcagacgacctcgtcacggagctacgtacccagcgcaccggccggcctgggtaaagaggaggacgccggtcgcttccacagcaccaagaagggcaatttccacgagatcttcaatctgacagaaaacgagcgtccgctggcggtgtgcgagaatggctggcgctgctgcctcatcaacagggaccggaagatgcccacggactacatcaggaacggggtgctctacgtcacggagaattacttgtgcttcgaaagctccaaatctgggtcctcaaagaggaacaaagtcatcaagctagtggacatcacggacatccagaagtacaaggtcctgtctgtcctcccaggctcaggcatggggattgccgtgtcgacgccatccacccagaaaccgctcgtgtttggtgccatggtgcacagggatgaggccttcgagaccattctcagccagtacatcaagatcacctcagcggcagcgtctggcggggacagctagtattgacttgcccaggacgttgctggaattttctttttctttttctttttctttttttttttttacgatttggtagtggaaacaattggacatcctcatgagcttttgcaataattctcctggacctgtggttctattgtgttgacctctgcgttttatcgaccaagaaggggccagggctcacagggacgggggtgcccctctcccacagggcacgtcaggtgcctctgagggccacccgcagactgggggagggggcagaggccctcgggggcccgtggagaagacacacaggacccctggccctgcccttctccgttccagcctggacagagaaacctctccagccaccccaagaggttctcgcaaccttgtgtcccgctctccagaggccagaagctcgtccaccaccaaagccatagctgaagagtgcggggcccttcctcctggggacagaaagatgtcgtcaaggagggacatgggggcctttcaccaaccaccgagaaacgggcctggcggccctccttcctcttacatgagaccctcctgtggcatttgcccttggtgccgggctggggccgggcgcagtgaccctgcctgcgctccacactcgctccacgggaacagagagggtgagaagggcccacccctcgcctgccctcagtgtctttggtggcaccttccttgctggcctccagggcgctcagcaccgcgtctgtaagggcctgcctgctgctctcggcctgacacgccggccaggaggtctgtagctggggaccagtaagggcacaggatggtgcaggtaaaagcacatctttctcacactttgctctttggaaggcccaggagaacatccgcgaaggctgttggaggtgctccgagcactgtggcatgtctggcacatggcccccaggctgcggttgcctgggttggttgggggaggaagtggggaggagtgttccgggaccatggtggcccaggctgcagccgcctttgggccatccgagaggctctggcagcccctgtgctttagggagcaaccgtgagccgagcccagaggcctgggcctgcactgcctgcagccgacatgcgacagcgttccctcccccgcgtgcctagccggtgccggtccgggcacagacccccccagcccccgccctgccccagggaagcctgggcttcccgggaacaaggtggcatttgtggagggagcgcccgcaggcctggtctgctggggccgcctgcgctgggctgaagggagggaaaggcggcttgggcctcctggaaggaggtggccaccccgcgggcctgcgtgtctgctggggcggatcccgcagctccctcagcttgtcctgagtcccttgggtgtcgttgagattgttgttttttgaagaaacagaagattctattttttacagcgagcaagctggttttcttatttttgtatcctttttcagatgtaatttttatctttgctccgatcctcatttgctggtgtgggtgagggatccggcggcatgggctggtttcacccccttcacgaggggccgcagagtcacacgctggtgccgggggtgctttggggggagctgcgccgatcaccagattaagcacatgtcctatcccaggcggtggagcggagcccccgtggctctggactgcgcggacgttggcgtcaggatgaccacacggcggcctttcccgaatggggacagaacccgctctgagccgtgggtctggctcctgtaggggactggctctcttggtgcaccaggggagggggacatatcccagtgaaccccaccttggcgcctgaggcaacacagggtgggcactgacccacccccaggggcggctgcagaggcagtgcccgcagacaatggccacacctctctccccagggcccggcagtgcccaaggatgggtccggggcctcggggccaatgagcgcctcttcctaggtgctgggattcagtccccaaacacagcgggaggggtccctggggcagatggggctttaccagcgtcgggtggtttagttcgagtcccttttgtggagaaagggagatgaaaactgaccacgtgccaggtgtggccgaagcccccagggagggccacattcggggagcggggggtcgggggagggccaccgactggctctgctgccagcacaggcccctccctggaagtcctcgggagcggagcgcggatcggcacgggctctgggctccccgtggagagaagctgtagtttttaccaaattgtgtacatctgggcagatgtttaatttctgtgactaatcactgaactagacgaatgttaaattttttatgtctgaagcctgagtctattttggatctgtaaataatcattgccagtgtgacttttgttcaacaaaaggattgtactgtattaagaaccgatgaaaaaaattctcctgtaacatttttttaagaaaactttgtttgtttaaagaaaaagtattgtataaattataatttttatttaaataaacctaaaatgctttgtgctaagg

SEQ ID NO: 1118 - DNA, 3206 bp, Homo sapiens
agttgcagcggccggggaagatggtggaggacggcgcggaggagctggaggatctggtgcacttctccgtgtctgagttgcctagtcgcggctacggcgtcatgggtgagatcctgcggcagggcaagctgtgcgacgtgaccctcaagattggggaccacaaattcagtgcccaccggattgtcttagcagcctcgatcccgtatttccatgctatgtttacaaatgacatgatggagtgcaagcaggatgagattgtaatgcaaggaatggacccaagtgccctggaggctctgatcaactttgcctacaacggcaaccttgccattgaccagcaaaatgtccagtcattgctgatgggggcgagcttcctgcagctgcagagcatcaaagacgcctgctgcacattccttcgagaacggcttcacccaaaaaaactgcctgggtgtgcgccagtttgctgagacaatgatgtgtgctgtgctgtacgacgctgccaacagcttcatccaccagcactttgtggaggtgtccatgtcagaagagttcctggccctgcccttggaagacgtgcttgagctggtgtctcgggatgagctgaatgtcaaatctgaggagcaggtctttgaagctgcattggcctgggtcagatacgaccgggagcagaggggtccctacctgcctgagctgctgtccaatatccgcctgcccctctgtcggccccagttcctttcagacagaatacagcaggatgacctggtgcgttgctgccacaaatgcagggacctggtagacgaagcaaaggactaccacctcatgccagagcgccggccccacctgccagctttcagaacccggccacgctgctgcacatccatcgctggacttatctacgctgtagggggcctcaactcagcaggtgattccctgaatgtggtggaagtgttcgaccccattgccaattgctgggagagatgccgtcccatgacaacagcccgcagccgcgttggcgtggccgtagtgaacgggcttctctatgccatcggaggatatgacggcaagctacggctgagcactgtggaggcctacaacccggagacagacacatggaccagagtggggagcatgaatagcaagagaaggtattctggaagccacgtgcagcccgaacatacacactgagcacctggggagcgccatgctagacgagcaggggcacacagtagagtaaaatacaagctttggcctgggagtttcctgcagccaggccagccactgccagtacctcctgggagcgagcccccatctgcttaaaagtaaaatatccaccttgtcctttggggaacttggggagaccaggcgtggacatgtggaagttgtgttgttattttaagtgccagataaggactggaaatgtgtattatggaagattcgaagagggagagaaactggactggaacttctggaagatttcagggaagaggtgggattaaagttgaaacttgaagaataaggaggatttacctttattagtgataaaaggaaatccaaggtgtttttctgtgtaccttccttccccaggactcccctcacacatgcacttccactacctggggagaatacgaaccaaagcaatgttcttttatttaggtcacacacattctcccagacaggagcacataggtatttgcaaggtgggccaagttgatatgtcactcagtacattctagctacctgctctctccacttctctgcttatattgtctgaataagaagtgggattagaagacatcccagtgcctttgtttagcccttcttactgctgaggtgacaggtggcatgtttcattatgtcagacacgtgatggagtcatcacatgtgtgggcagctgaaaagctggcgcagcccaaggaggggagaggaaagctgcccagggccccctggccgttacccaggacagctctgcactgattgcttttacacattgagcttccttgatatatgcctaatgttgttccacatccagcagcgtttgcatgtggatgtgagctgggagggatctgcctttgtactggtgagaccagttcacaaagcatcggagtaggttcctttgggaagaaaaaaatacgtaagatctgccctcccaagaacgcgttgagagtcctttcctcccaccatccccacttttgctccttggatactttgcagcttcctatgtttgagtgactcattgctccgtgtccccaaccatgagtagcttttttgctttgactgcagtcagctgtccttccttgtgtgtctgctctggaccacttccttgctttgatgttactgggtttagagggctgtcttggaggaaagttctctgggtattcctttccttcactgtggttaatatcctgttattagtgtgggcccggttccattacatcccttttaaattacaggctaccttaaaacgttcctagtcacttctcttctgacatcccacacagctgtctgttctgccagttagtgacatcctgccatctttccttcctatctcccccagtgttctacgccatcccatagacctttcttacactggactattccagtccatgctgatcagcattttctccttctcttcacactcgcctttaccacctagttgatagttaatctcatgcagttttggggcacctcttaattcattttcatattgttctacacctgttttgttatgtaatttttatgtttgttttgtgtccgtatccagaaggatagtgatcatgtctagtaaatttgtgatcttcccacaatacttgcctaaggcaagtccctctcctctttctggctggttcagggggtcagttatcatgtccctgaaagggacattctgtggatcagtttgattactatgtacatttaaaaggtagcagcaagccaggtatggtggctcacgcctataatcccagcactttgcgaggccaaggagggcggatcacctaaggtcaggagtttgagaccagcctggccaacatggtgaaaccctgtctttactaaaaatacaaaaattagccaggcatggtggcgggcgcctgttatcccagctacttgggaggctaaggcagggagaattgcttaaaccggggaggcgggggttgcaatgagctaagatcgtgccactgcattccagcctggttgacagagtgagactccgtctc

SEQ ID NO: 1119 - DNA, 4742 bp, Homo sapiens
aaaatcccacgtgactggctctcctctcaggccatcatggcgtctcccagtgggaagggagcccgggcgctggaggctcctggctgcgggccccggccgctcgcccgggacctggtggactccgtggacgatgcggaggggctgtacgtggctgtggagcgctgcccgctgtgcaacactacccgccggcggctgacctgcgccaaatgcgttcagagcggcgatttcgtctacttcgacggccgcgaccgggagaggtttatcgacaagaaggaaaggttaagccgacttaagagcaagcaagaagaatttcagaaagaagtgttaaaagctatggaaggaaaatggataacagatcagttgagatggaaaataatgtcctgcaagatgaggattgaacagttaaaacaaacaatatgtaaaggaaatgaagaaatggagaaaaattctgaaggccttctcaaaaccaaggaaaagaatcagaagctttacagtcgagcacaacggcaccaagagaaaaaggagaagattcagaggcataatcgcaaacttggtgacctggtagaaaaaaagaccattgacttaagaagtcattatgagcgtctggcaaatcttcgacgatcccatatattagagctcacctctgtcatttttccaatcgaggaagtaaagacgggtgtgagagaccccgcagatgtgtcttcagagagtgacagtgccatgacctccagcactgtgagcaagcttgctgaagcccggaggacaacttacctctcaggacgatgggtctgtgacgatcacaacggagacaccagcattagcattacagggccttggattagcctccctaacaatggggactactctgcctactacagctgggtggaggagaagaaaacaacccaggggcctgacatggagcagagtaaccctgcctacaccatcagtgctgcgctgtgctatgcaactcagctggtcaacattctgtctcatatacttgatgtaaatcttcccaaaaagctctgcaacagtgaattttgtggcgaaaatctaagcaagcagaaatttactcgagcagtgaagaaactgaatgcaaatattctttacctttgtttttctcagcatgtaaatttagatcaattacaaccactgcataccctcaggaatctaatgtacctggtcagtccaagctctgaacacctaggcaggtcagggccctttgaagtacgagcagaccttgaggagtccatggaatttgtggatcccggagttgctggagaatcagatgagagcggagatgagcgcgtcagcgatgaagaaaccgacctgggcacagactgggagaacttgcctagtccccggttttgtgatatcccttcccagtctgtggaagtctcccagagtcagagcacccaggcgtccccacccatcgcgagcagcagtgcaggtgggatgatctcctctgcagcagcctcggtgacctcctggtttaaagcttacactggacaccgttaacgagcatggaccaaaacataccaaatctgcatcaagaaagttcttctcccactacactctagtaaacattttctgtttaagttaagatagtgtctggaacaaagaggttaaagtgttgttttgttttgtctttttaagcagggagacaaacatttctatttgccaagtggcctgtgatggtgaccaacatgcttatgataattaagagaacaggggtcgaaggtctttctacccagaccagtgctggtggaaggaggacctgtgcgtgtggccagttctgccaaggaagcagttgatttgggttccctctgggcccgggccaccgggcccacagatatgggtcagtgtgctggtccttgcggtgctgagactgttcctgacactttaagttttagaggttggttgaatcacaagaggtgattcttgattattaggacatgaaagataaaagctctttaataagagtttttctgccattgttttttgtatgagaaccagcaggcaatttaaaatttctaatttggtcctttgattttgtttgggaggggtgagttacacgtactttattcatgccgctctgtcgtagtttgtcagacattcctgtttttctttcccccacacaccaaagaaaatgaaagtctttttctttaggacccacatccataaatggaagaaatcctggctgcaataatgtctagagagtttttaactattttcttgtattctgaggggaattaagcttattcttacctagttgaattcctgccatccacactatgagcattttgaaattgaacttatattttctgggtgaaaataagtcatgaaggtcattcccttatgtaagctcaatgcctgcctgggcacaggggaaaagccacttagttaagtggcctctggtcattcttgtggtgtccactttctttctatgggattgagtaggtggcaggtgttttcaggggaaaccatcctacttgtttccccgaactctttgttgctctgaggacacagctttgctcagaaatgcagcgcagatccttacggctgatgctactctgctctgttctggggaaagcacaatataaagaaagaatttcccagccgggcgcggtggctcacgcctgtagtcccggcactttggggggccgaggcaggcggatcgcttgaggtcaggagtttgagagcagcctggctaacatggtggaaccctgtttctgctaaaaatacagaaaattaccgggtgtggtggcgcacgcctgtaatcccagctactcgggaggctgcggcgggagaatcgcttgaaccgggaggcagaggttgcagtgagccgagattgtgccattgcactccagcctgggcaacaagagcgaaactccgtctcaagaaaaaaaagaatttccctcagcaggagatcattttcagctcacgtgtcttgtcattcttttagtgacaatcttacaagaaaactataatgagagaggcattatgtacaaatatgtaagtagtttatttttaataactgcaaaaaaatcctatgtaacaactaccaaaagaaatcctatgaaagagtcctaacaggcattattaccatatcttatgtgattggcatgatagcacctctgataaatcattcagaggtttgccatgccccagcttcttttctcatcataataattgtagttgatactttgcctccaagtccgaggtgctatatagcttttgctaatggtatatttggtgttttgtatagttttgggtagagttgcagaacggagtttgtttctatccggtagtcacaaattccttggctctatgaattttccatgaaaggaggaagtaggcttttctcgttgtgggtggtcttttttttttttggagacggagtctcgctcagctgcccaggctggagtgtagtggcgccatctccgctcactgcaaccaccatctcctgggttcaggcggttcttccgtctcggcctcccgggtggctgggattataggcacctgccatcatgcccggctaatttttgtattttggtagggacgggggttttcgccatgttggccgggctggtcttgaactcctgacttcgggtgatccgcttgccttggcctcctagggtgctgggattgcaggcctgagccaccgcgcccggccccttatgggttcttctacactgctgggatctctgttttaagtgctcagcttcatgattgattgctgggcttccattttcccatccagttctggagttcgtagagagtgaagatggtagacttgaacagataaataaacttaacgatcttgtaagagttgtctagctacttaaaaccctcagaagtaagagcttagtctcacgagttgtaagagtgggatttggagcttggtggtggagactgacttcagctgagagatgcacaacagtcatggttttcttaagcctcttatgaaaccatgaatgagagatgaagctaaagaatagaatccagagatcacaaactcatctagagtacttccacaaaatttacaaagatgtgggaactttatggataggatatattttgtttgttgttgttaatatcaactagaggcactttacatagggttaagtgatcgaacccttttgtggttttgaacaccaacatactggcttacactgctgaaatattttgggtttcattattttgcactggatccaccctgtaaatactcttaagtatacatttcaaccactgttttttctactctttttgctgctcattaaaatctttcatgtaggtgccagaaccatatgtaaacagctttttaaaaaattgaagctggtattttgtttaaacaaaaagccatagaacttggtcatgttttccattttaaaatgatttactgaaacaaagtaatactaataaaaacccacaggcaccaaacaggctgcttaaaatggtctgttaaagacattttttggttatggaatataagaaaagttttgcacatctgtaagggggaaaaacagtatatcaccattgggtagagtggacgggactcatgtaaggactcaatttggggaagagcattcagtggcatgctgttagaggactagtgtccgagaatctcctcacagtatcatgttgcaggaattccccattgctctgcaacttccaaaccagtttgagtcatacaaatgttttctaaacttttattgtattactgcaataaatcttttaacagt

SEQ ID NO: 1120 - DNA, 3342 bp, Homo sapiens
gagggaggcggtgtcgccgccgcggcgctgtcatggagctagcgcaggaagcgcgggaactgggttgctgggcggtcgaagagatgggggtgcccgtggcggcccgggccccggaatcgacgctgcgcaggctgtgtctgggccagggggctgacatctgggcctacatcttgcagcatgtgcacagtcagaggactgtcaagaagatccggggaaacctactctggtatggccaccaggacagtccacaggtgagaagcatatgctacaagattctctttcatccgaaaaatgacttgtagatcttctgctctaagcccaaccaggtgctgggtgatgctggggacaatgggtcacaagacagccttgatctccatcctcatagggcttaaagtccagtggaaacagcattagctcagccaggtccgtcggaagttagagctggaagctgctgtgacccgcctgcgggcagaaatccaggaactcgaccagagcctggagctgatggagcgagacactgaggctcaggacacggccatggagcaggcacgtcagcacactcaagacacccagcgtcgagctctcctcctccgggcccaagctggggccatgcgaagacagcagcatacgctccgagatcccatgcagcggctgcagaatcaactgaggcgcctgcaggacatggagaggaaagccaaagtagatgtgacctttggatccctcacgtcggcagctctgggcctggagcccgtggtcctgcgtgatgtccgaacagcctgcaccctccgggcccagttcctgcagaacctcctgcttccccaggccaagaggggcagcctcccaacccctcatgatgaccactttggcacttcgtaccagcagtggctgagctcagtggagacgctgctgacaaaccaccccccaggccacgtcctggctgccttggagcacctggctgcagagcgggaggcagagattcggtccctgtgcagtggggatgggcttggcgacacagagatatccagaccccaggccccggaccagtcagactccagccagaccctgccgtccatggttcatctcatccaggagggctggcggactgtgggtgtgctggtctcccagcggagcaccctcctgaaggagcggcaagtcttgacccagcgcctccagggcctggtggaggaggtggagagacgcgtcctgggatccagtgagaggcaggtgctgatactggggcttcggcgctgttgcctgtggacggagctcaaggccctgcacgatcagagccaggagctgcaggatgcagctgggcatcggcagctcctgctgagggagctacaggccaaacagcagcggatcctgcactggcgccagctggtggaggagacccaggaacaggtccgcctgctcatcaagggaaactcggccagcaagacccgcctgtgccggagcccgggggaggtgctagctctggtccagcgaaaggtggtccctacatttgaggcagtggcaccacagagccgggagctgctgcgctgtctggaggaggaagtccggcatttgccccacattctgttgggcacgctgctgcggcacaggccgggagagttgaagcccctgcccacggtcctcccatccatccaccagctgcaccccgcgtccccaaggggctccagcttcatagcgctgagccacaagctggggctgcctccagggaaggcctcggagctgctcctgccggcggctgcctctcttcgccaggaccttctgctcctgcaggaccagcggagcctctggtgctgggatctactccacatgaagaccagcctgccgccaggccttcccacccaggagctgctgcagatccaggcatcccaggaaaaacagcagaaagagaacctggggcaggctctgaagaggctggagaagctactgaaacaggcactggagcgaatccctgagctgcaggggatcgtgggggactggtgggagcagccaggccaggccgccctctctgaggagctctgccagggcctgtccctgccccagtggcggctgcgctgggttcaggcccagggggccctgcagaagctgtgcagctgaagagagggttcaaacggaagccgagaacttgacactgttcaccccaacacctcacctcccccaggacatttggaagaaagcagcgccaggattcctcggcagtcgtccccacccgcacctgcagtcccctcatgtgctgttctgctgccccactcagctcctggaccctgtcctttcatcccgctaaagcaccccctaaaaccccttcatcactttcattctcagcaaaaagtaattgagcacctcctctaggcgctggggagtccacactgaacaaaagaaacagaaaaccctgtcttccagcagttgagttctagggcagggagacagagtttacaagataaggaaaatatatatgtagtatgctgcaagttaactgctgtgtgggaaatccagcagggggtgggatgtgtgatttgaattgagggccacactgcccaggtcgtgctccgtcaaggggtgagcaggagcaacaggggtggctgagtaagggcttgcagctggaggcaacagcacatgcaaaggccctgagccaggatgtgctgcaataagggccactgagggggacagtgtaggttgggggtgaggaatgtattaaaagatgagattgccttctagtttgtatagtttctttttttacatgtaaatcagccatttggaatttatcctagcacatggatccaattttgtcttattttacatatatcctagtagcacttactgaaattcccagtcagagtggcagttgcctctgagggaaggtgggtggcagggatcaactgaggaggagacacagaaatgtcctagctgatgggaatgtgctgtgtcaagagcagcggcggtgacgcaggtgtagagatttgtcagagctcatgtagttgtagtcttaaggcctgtgcatttcactgcgtgggttactcaatttataaagcaaagcccttacacttttgagatgccacctttttatgcactaaatttccatgtttaattgggttatatctggcttctctccagacctgctttgtatttaactctccatgtgtcattcctacagtagcttaatagaaaggcttgtgacacattgtcatatctgttcttgttttcttttgttttttttttttttttttttgagatgcagtctcattctgttgcccaagttggagtgcagtggcatgatctcagctcactgcaacctccgcctcccaggttcaagccattctcatgcctcagcttccc

SEQ ID NO: 1121 - DNA, 5613 bp, Homo sapiens
agcaggtgctggcacaagagcagcggcttgggggagccggcagcagcagtaacagcagcagcagccgccgccgccgccgccagtaaacgcggacggtaccccaggggactacccagccggccggccctggaagccgcgctcgggtcccgccgcagtcggcggtgggggatgggcaggcagtggcggtcccgcctgccgagggttaacccccgccggtcccggtcctgagctggaccagagccctcctccagaaacccctgcgtccgccacggcccaggttaaatggaaaccacccttgggaactggatgcctgtgtagctgttctaccatatcagtgtattgcaatgagtgggggaggagagcagctggatatcctgagtgttggaatcctagtgaaagaaagatggaaagtgttgagaaagattgggggtgggggctttggagaaatttacgatgccttggacatgctcaccagggaaaatgttgcactgaaggtggaatcagctcaacaaccaaaacaagttctgaaaatggaagttgctgttttgaaaaagctgcaaggaaagaccatgtttgtagatttattggctgtgggaggaatgatcgattcaactatgtggtcatgcagttgcagggtcggaatctggcagatcttcgccgtagccagtcccgaggcacattcaccattagtaccactctccggctgggtagacagattttggagtctattgaaagcattcattctgtgggattcttgcatcgagacatcaaaccgtcgaacttcgctatgggtcgctttcctagtacatgtaggaaatgttacatgcttgattttggcttggctcgacaatttaccaattcctgtggtgacgtcagaccacctcgagctgtggcaggttttcgagggacagttcgttatgcatcaatcaacgcacatcggaacagggaaatgggaagacatgatgacctttggtccttattctacatgttggtggagtttgtggttggtcagctgccctggagaaaaataaaggacaaggagcaagtaggctctattaaggagagatatgaccacaggctcatgttgaaacatctccctccagaattcagcatctttctagaccatatctcttctttggattattttacaaaaccagactaccagatgtccatcagggtgacccggaagtcctacaaggtgtccacctctggcccccaggcctttaacagcctctcctacacgagtgggcctggtgcctgcatcagctcctcgagcttctcccgaatgggcagcagcagcttccggggtggcctgggtgcaggatatggtggggccagtggaggcatcaccaccatcactgtcaaccaaagcctgctgagccctcttaacctggaggtggaccccaacatccaggccgtgcgcacccaggaggagaagcagatcaagaccctcaacaacaagtttttctccttcatagacaaggtacggttcctggagcagcagaacaagatgcttgagaccaagtggagcctcgtgcagcagcagaagatggctcggagcaacatggacaacatgttcgagagctacatcaacaaccttaagtggcagctggagactctgggccaggagaagctgaagctggaggcggagcttggcaacatgcatgggctggtggaggacttcaggaacaagtatgaggttgagatcagtaaatgtacagagatggagaatgaatttgtgctcatcaaggagtatgtagatgaagcttacatgaacaagatggagctggagtcttccctgaaagagctgactgccaagatcagcttcctcaggcagctgtatgaagaggagatcgggagctgcagtcccagatctcggatacatctgtggtgctgttcatggacaacagccgcttcctggacatggacagcatcatccctgaggtcaaggccagagggcttccctggaggctgccacgcagataccgagcagcgtggggagctagccattaaggatgccaatgccaagctgtctgagctggaggccgccctgcagctagccagtcaagacatggcgcggcagctgcgtgagtaccaggagctgatgaacgtcaagctggccctggatatcaagatcgccacctacaggaagctgttggagggcgaggagagctggctggagtctgggatgcagaacatgagtatccatatgaagaccaccagcagctatgcaggtggtcagagcttggcctatgggggcctcacaagccctggcctcagctacggcctgggctccagctttggctctggcatgggctccagctccttcagccacaccagctcctccagggccgtggtcatgaagaagatcgaaacccgtgatgggaagctagtgtctgagtcctccaacgtcctgcccaatttgagaattactgccacacttcttacatccgtgtttgacaatagcatcaagacttttggagtaattgagagtgacccttttgactgggagaagactggaaatgatggctccctaacaaccaccactacttctaccacccctcagttgcacactcgcttgacccctgctgcaattggaattgccaatgctactcccatccctggagacttgcttcgagaaaatacagatgaggtatttccagatgaacagcttagcgatggagaaaatggcatccctgttggtgtgtcaccagataaattgcctggatctctgggacacccccgtccccaggagaaggatgtttgggaagagatggatgccaacaaaaacaagataaagcttggaatttgtaaggctgctactgaagaggagaacagccatggccaggcaaatggtcttctcaatgctccaagccttgggtcaccaattcgtgtccgctcagagattactcagccagacagagatattccactggtgcgaaagttacgttccattcacagctttgagctggaaaaacgtctgaccctggagccaaagccagacactgacaagttccttgagacctgcctggagaaaatgcagaaagataccagtgcaggaaaagaatctattctccctgctctgctgcataagccttgcgttcctgctgtgtcccgtactgaccacatctggcactatgatgaagaatatcttccagatgcctccaagcctgcttctgccaacacccctgagcaggcagatggtggtggcagcaatggatttatagctgttaacctgagctcttgcaagcaagaaattgattccaaagaatgggtgattgtggacaaggagcaggaccttcaggattttaggacaaatgaggctgtaggacataaaacaactggaagtccttctgatgaggagcctgaagtacttcaagtcctggaggcatcacctcaagatgaaaagctccagttaggtccttgggcagaaaatgatcatttaaagaaggaaacctcaggtgtggtcttagcactttctgcagagggtcctcctactgctgcttcagaacaatatacagataggctggaactccagcctggagctgctagtcagtttattgcagcgacgcccacaagtctaatggaggcgcaggcagaaggaccccttacagcgattacaattcctagaccttctgtggcatctacacagtcaacttcaggaagctttcactgtggtcagcagccagagaagaaagatcttcagcccatggagcccactgtggaactttactctccaagggaaaacttctctggcttggttgtgacagagggtgaacctcctagtggaggaagcagaacagatttggggcttcagatagatcacattggtcatgacatgttacccaacattagagaaagtaacaaatctcaagacctgggaccaaaagaacttcctgatcataatagactggttgtgagagaatttgaaaatctccctggggaaactgaagagaaaagcatccttttagagtcagataatgaagatgagaagttaagtagagggcagcattgtattgagatctcctctctcccaggagatttggtaattgtggaaaaggatcactcagctactactgaacctcttgatgtgacaaaaacacagacttttagtgtggtgccaaatcaagacaaaaataatgagataatgaagcttctgacagttggaacttcagaaatttcttccagagacattgacccacatgttgaaggtcagataggccaagtggcagaaatgcaaaaaaataagatatctaaggatgatgacatcatgagtgaagacttgccaggtcatcaaggagacctctctacttttttgcaccaagagggcaagagagagaaaatcacccctagaaatggagaactatttcattgtgtttcagagaatgaacatggtgccccaacccggaaggatatggttaggtcatcctttgtaactagacacagccgaatccctgttttagcacaagagatagactcaactttggaatcatcctctccagtttctgcaaaagaaaagctcctccaaaagaaagcctatcagccagacctagtcaagcttctggtggaaaaaagacaattcaagtccttccttggcgacctctcaagtgcctctgataaattgctagaggagaaactagctactgttcctgctcccttttgtgaggaggaagtgctcactcccttttcaagactgacagtagattctcacctgagtaggtcagctgaagatagctttctgtcacccatcatctcccagtctagaaagagcaaaattccaaggccagtttcatgggtcaacacagatcaggtcaatagctcaacttcgtctcagttctttcctcggccaccaccaggaaagccacccacgaggcctggagtagaagccaggctacgcagatataaagtcctagggagtagtaactccgactcagaccttttctcccgcctggcccaaattcttcaaaatggatctcagaaaccccggagcactactcagtgcaagagtccaggatctcctcacaatccaaaaacaccacccaagagtccagttgtccctcgcaggagtcccagtgcctctcctcgaagctcatccttgcctcgcacgtctagttcctcaccatctagggctggacggccccaccatgaccagaggagttcgtccccacatctggggagaagcaagtcacctcccagccactcaggatcttcctcctccaggaggtcctgccaacaggagcattgcaaacccagcaagaatggcctgaaaggatccggcagcctccaccaccactcagccagcactaaaaccccccaagggaagagtaagccagccagtaaactcagcagataggagccaggctgcatctctttgaaaggtgtgagatcttcctcctaaacctgatgcatgtgtgtccctgtactttctatgtaaaaaaatcagtgttgatcttctcttgcaaaagaaagtaacatgatcaattatttataagaagacataatacatgataaggaattacctaaggcaggcagcaagtagattaggaatcaatgtctttgtacaagaaggaaaaatagagcaaaaatccaagggggagaaactcattaaaatga

SEQ ID NO: 1122 - DNA, 6409 bp, Homo sapiens
agaggaacagggcaaacctctgacttccggcggcattttgaggcggtcctcctagcggcctgtagtacaaaatgtcaaaaattagaaggaaggtcacagtggaaaataccaagactatatctgatagcacatcccgaagacccagtgtatttgagaggcttggacccagcactggcagtacagcagagacacagtgccgtaactggctgaagactggcaactgcctctatggaaacacatgtagattcgtacatggcccttcacctcgtggtaaaggttatagcagcaattatagaaggtcaccagaaagacctacaggggatcttagagaaagaatgaagaacaagcgccaagacgtggacactgagccccagaaacgaaatacagaggagtcatcctcacctgttaggaaagaatcttcaagagggagacatagggaaaaggaagacataaaaatcactaaggaaagaactccagaaagtgaagaagaaaatgtagaatgggaaactaatagagatgattctgacaatggagatattaattatgattatgttcatgaattgtcattggaaatgaagcgtcagaagatacagagggaattaatgaagctggaacaagaaaacatggagaagagagaagaaattatcattaaaaaggaggtttcaccagaagtggttagatcaaaattgtccccgtcaccttctctaagaaagtctagcaaatctccgaagcgaaaatcaagcccgaagtcgtcttcagctagcaagaaagataggaagacatctgcagtatcttctcccctgttggaccagcagagaaattcaaaaaccaaccaaagtaaaaagaaaggaccacgtactcctagtccaccccctcctataccagaagatatcgctctggggaaaaaatacaaagaaaaatataaagtaaaagacaggatagaagaaaaaacaagagatggaaaggacagaggacgagattttgaacgacaaagagaaaagagagacaagccaaggtctacttccccagcaggacagcatcattctcctatatcttctagacatcactcatcttcctcacaatcaggatcatctattcaaagacattctccttctcctcgtcgaaaaagaactccttcaccatcttatcagcggacactaactccacctttacgacgctctgcctctccttatccttcacattctttgtcgtctccccagagaaagcagagtcctccaagacatcgctctccaatgcgagagaaagggagacatgatcatgaacgaacttcacagtctcatgatcgacgccatgaaaggagggaagatactaggggcaaacgagacagagaaaaggactcaagagaagaacgagaatatgaacaggatcagagctcttctagagaccacagagatgacagagaacctcgagatggtcgggatcggagagatgccagagatactagggaccgaagggaactaagagactccagagacatgcgggactcaagggagatgagagattatagcagagataccaaagagagccgtgatcccagagattctcggtccactcgtgatgcccatgactacagggaccgtgaaggtcgagatactcatcgaaaggaggatacatatccagaagaatcccggagttatggccgaaaccatttgagagaagaaagttctcgtacggaaataaggaatgagtccagaaatgagtctcgaagtgaaattagaaatgaccgaatgggccgaagtagggggagggttcctgagttacctgaaaagggaagtcgaggctcaagaggttctcaaattgatagtcacagtagtaatagcaactatcatgacagctgggaaactcgaagtagctatcctgaaagagatagatatcctgaaagagacaacagagatcaagcaagggattcttcctttgagagaagacatggagagcgagaccgtcgtgacaacagagagagagatcaaagaccaagctcaccaattcgacatcagggaaggaatgacgagcttgagcgtgatgaaagaagagaggaacgaagagtagacagagtggatgataggagagatgaaagggctagagagagagatcgggaacgagaacgagacagggagcgggagagagagagggaacgtgaacgggatcgggaaagagaaaaagagagagaactagaaagagagcgtgctagggaacgggagagagaaagagaaaaagagagagatcgtgaaagggatagagaccgagaccacgatcgagagcgggaaagagagagggaacgagacagggaaaaagaacgggaacgagaaagagaagagagagagagggagagagagcgagaacgggagagagagcgagagcgagaacgggaacgagaaagagcgagagaaagggataaagaacgagaacgccaaagggattgggaagacaaagacaaaggacgagatgaccgcagagaaaagcgagaagagatccgagaagataggaatccaagagatggacatgatgaaagaaaatcaaagaagcgctatagaaatgaagggagtcccagccctagacagtccccgaagcgccggcgtgaacattctccggacagtgatgcctacaacagtggagatgataaaaatgaaaaacacagactcttgagccaagttgtacgacctcaagaatctcgttctcttagtccctcgcacctcacagaagacagacagggtagatggaaagaggaggatcgtaaaccagaaaggaaagagagttcaaggcgctacgaagaacaggaactcaaggagaaagtttcttctgtagataaacagagagaacagacagaaatcctggaaagctcaagaatgcgtgcacaggacattataggacaccaccagtctgaagatcgagagacatctgatcgagctcatgatgaaaacaagaagaaagcaaaaattcaaaagaaaccaattaagaaaaagaaagaggatgatgttggaatagagaggggtaacatagagacaacatctgaagatggtcaagtattttcaccaaaaaaaggacagaaaaagaaaagcattgaaaaaaaacgtaaaaaatccaaaggtgattctgatatttctgatgaagaagcagcccagcaaagtaagaagaaaagaggcccacggactccccctataacaactaaagaggaattggttgaaatgtgcaatggtaagaatggtattctagaggactcccagaaaaaagaagatacagcattcagtgactggtctgatgaggatgtccctgaccgtacagaggtgacagaagcagagcatactgccaccgccacgactcctggtagtaccccttctcctctatcttctcttcttcctcctccaccgcctgtggctactgccactgctacaactgtgcctgcaactcttgctgccactactgctgctgccgccacctctttcagcacatctgccatcactatttccacctctgccacccccaccaataccaccaataatacttttgccaatgaagactcacacagaaaatgccacagaacacgagtagaaaaagtagagacgcctcacgtgactatagaagatgcacagcatcgcaagcctatggatcaaaagaggagcagcagcctcgggagcaatcggagtaaccgtagtcatacgtctggtcgtcttcgctccccatccaatgattcagcccatcgaagtggagatgaccaaagtggtcgaaagagagtactgcacagtggctcaagagatagagaaaaaacaaaaagcctggaaatcacaggagagagaaaatctaggattgatcagttaaagcgtggagaacccagtcgaagtacttcttcagatcgccaggattcaagaagccatagttcaagaagaagttctccagagtcagatcgacaggtccattcaagatctgggtcatttgatagcagagacaggcttcaagaacgagatcgatatgaacacgacagagagcgcgagagagagaggagagatacgaggcagagagaatgggaccgagatgctgataaagattggccacgcaacagggatcgagatagattgcgagaacgagaacgagagagagaacgagacaaaaggagagacttggatagggaaagagagagactaatttctgattctgttgaaagggacagggacagagacagagacagaacttttgagagttctcaaatagagtctgtgaaacgctgtgaagcaaaactggaaggtgaacatgaaagggatctagaaagcacttcccgagactctctagccttggataaagagagaatggataaagatctgggatctgtgcagggatttgaagaaacaaataaatccgagagaactgagagtctggaagcaggagatgacgagtccaagttagatgatgcacattcattaggctctggtgctggagaaggatacgagccaatcagtgatgacgaactagatgaaattctggcaggtgatgcagaaaagagggaggaccaacaggatgaggagaagatgccagatcccttagatgtgatagatgtggattggtctggtcttatgccaaagcatccaaaagaaccacgagagcctggggctgcactcttaaaattcacacctggagctgttatgctaagagttgggatttctaaaaagttggcaggttctgaactctttgccaaagtcaaagaaacatgtcagagacttttagaaaaacccaaaggtagtttcattttactttaactatataatgtctgttaaccatttaagatgccatctgaaggggattctgatctgttcttatgtagcacttaacactgtgtagaaactattttttgagaaatcattttataatcattatttaaccctcatggtcaaagtttctctttaaaatttattttgagaagaagagttatcccacagaaaagttgggaaaagagtacaatgacctttttgtatgaaaattacttattaacaggccaggcgtggtgttgcatgtctgtagtcacagctactcagggaggttgaggcagcaggattgctggagcccaggaaattgaggctgcagtgagccatgattgagccaccacactccaacctaggtgacagagcaagaccctgtctcaaaaaaaaaaaaacaaattaaccaataagttctaatatcaaagtgctcagtggtttgcccttggctaaatgaagcagagccaggaaaaacagactacatatttttcatgtctaaagaaattgggtattttggcagccctttcccctagacatctacccaaatgcaggtgtgtaggttgagtctttaacaaagtgattaagagcttggtctgtaaggccggatgatctggatttcagtaggcacaccacttactggctattacttaatctgtgtgttagtgtcatcatctgtaagtcaggaataatcataccaccaacttcctatggtaattaggagcaaatgagttattacaggcaaaacacttagaacagttcctggcatatagtaatacccaataaatattaactgctactttgaaaatatcctatcacgctgatttttgacctcactgcagcaattttcagttattccagattatctagcttatggattctggtggtaggggttgtttggttttggttttcactgtctctgtctcatctagtacctaccttagtttattttgcaacttactaatactttattaatggggagggacgagtagatggtaaaaagaaggaaaaggaggtaaaaggtgaaaggaacaacattaattaacaattttacgtcatgtccctggacataaaagtttagttagtattaaatttttcactaatacaaaataaaaaaatattgttttatgagttttatgaattcatgcccttcctttactctattagcataagcagtaaatttttttattttaatatagcccaataaacctagagtatacatgtacaaaatacatataattgttaacgtgtattaaccgaaaaatgacccaagacttagttcttgccctactgtatctgccttgtttggttggttctgtgaccttaagcaaataactcctgtgagcctcaattttatttgtaaagtgatggaataaaacccctaaaatcttacccacctctaaagatatttgtttctgtgaccttttgctagtagcatttcaagttaaaatctggtttgattttgctacccatgaaatacagttcggcccttacttattgatgacttaacctaaacagtgaaaatatgcactgtaaagggtggggtgatgtggcttaacaatcagacttcttctatttttgctgctatggtggttgtattagagaactgatgtattatcttgaataaagactttgtcttgtttactgcc

SEQ ID NO: 1123 - DNA, 4327 bp, Homo sapiens
agtttcctagcaaccggcggagcggctacgtcacggtggcaggttctaagcgctgctgggcaccgtaaggccgccgtgtgtaccttccagtagctacgggctggtggaagcgctgctcacagtcagtgtcggtacgtcttcgtccgcccttaccctccttatcctgctccaggtagcggagagccgcctcccgccgcgcccccgccaccgaggcccgggtcagaggctagaggccgcccgcccctgcgcggccctttcccctgagcccgcggagcccgccgccccgggcctcggggcgacgatgctggagtccattcgcgtgacggaaaagcttcactggcctgagcaagaacttgctaagaagtctattctaaatgcagaagattcattgatcattgacaacaaaagaagcatttcacatttgtcctcgggagtgctaaaagacattttcacaactggaaccagtagttacaatgtcctactacagagcaaggaggaaaaaaagtatcattcacaaaaacagtcttcctccacctactccaaaagatgtagaaaacccagcaaatctcctaacacttctcgtagcaaagatcctcgcaggatgaaagccctggtgcctgtgacaagcagtggtacttggtactgcctggagaggcggcctgctgtttttgtcactagttcagtgtcaagtcctgtaaagtttacacatgatatctctgttacagggaatggcatagtactgccacctaaacccaaaagcaaggtcaagtggtgccatttctccactcttccaaagccaaagcctcagctgtctagaagctttgaaaagggagatgacttttctgggaagaaattttgtatattgactgctataaaacccaccaacttagagaaagaaaaactgagattcttcaaatctgactatacctacaatcctcagtttgagtatgccaatcctgctctgccaagcgtattagctaagcatagccacgcatctgaccgatttcttaagcagattgtagttcatctcactgaggacctgctttcccgagcgtcaatgacagtagtaaatggatgtccgactctgactatcaatgtgtccactgcacgtgagcattggctggagggaatgctgaggcatgaaataggtacacattattttcgaggtattaacaacctccagcagccatggaacagttggactggacgtaaaaaacatgagctaaagccaaataatcccacagaggaaggactagcaagcattcacagtgttctgtttagaaaagacccttttttatggagggctgccctcctctactacactgtttatcaagccagccaaatgtctttttgtgaactctttaaagatattggcaggtttgtcaaggaccccaatacaagatgggattattgtgtacgggccaagaggggatggactgatacttcccaaccagggtgttttagtaaagaccaggtatacttggatggaattcttcaaatcctccgatacagagataccatagacttccatctgctgactgctctcgggaaggtttcttatgaagatgtggatcgcttaaaaggattggcagttaccgaaaacatgagggtccctcatttcctgcaggaccatggccgatatatggaacacttagagaagatcatggaagtgaatgaactgactgacagggaactgaaagatcttatatagtaattagcgttctggcaaacatagctaagctatgcctccatgtatattaccagttaggtgcagttagcaccagaagatttataaaagaagaaagactacttgtgttttctgaagaagggtcttcagtattcagcggaatttttaggttaagtacagatcttaaactatttccctaaaatgtttctataggttgcagggggaagttattcctattttctgaatctcgacagagtcagatgaaaatactactgctgagcatttttgaagactcttggtcaaattgcatgataaatttctgcctgagcagtaagcactggcctagtgcttctgcctaaatatggaggtcagctccaactggagactggctgaattccattgctgttcagactccaaagttatattttatttgataaataatggtaattattctcctttgaaaaattagttttgtgttgctccaaaaagctagctatatatctcagctttcttatttcttttatatgttgagggattttaaagggagaggaaaagcaatttgaaaatttttcattaagtgttttattttaacattattgtttcaccttatcagcttataggaactaaattagagaatcacctctttttgtccggttatctcttaactatgttttcatttgctgaaacatattgtacccttttaaattttttacagagttttaacgtcttttccactgcatcctttataaaaataagtacaaattccagagaggttttcctacacaaatacaaaataattggggaagggctactcaccttttttatgaaacagaatatgtaacaagcagaggacaaatagactgacctggttaaacgtaggttctggatgttgatgggtagcacctgcagtaaacttgaccatgctctgaaaaaagaaatttctgggtattgatggtttataaagccagctttgtgctattggttcagtatattttatcaaatctttgacttcatcaacccagtaatgacatagtttaaattttaaaatgagagttctgttttgctgtatttctcctgctagcctagctttgtattttatcatcagcttcagtatatacttgtatatatatacctggattcaaatggttcttcatacaacttaatgatcagaaagaatgctgctgtaaacaccccactcaagattgctgctggaatttctacccaaagctgtctgagagtttatctttacctcagtgcaggcttaaataatggtgctaatactggtagatatatactgtgaagcctggttcacattcatgctagaaaatgattttgggaaatcttttataggagaggttacatgatttttctctttcacatatctagaaggacttgcctcaaagaagaatgttgcagcaaacaggatatactctagctggtgcccaaaggttcttgcaaaaccatgaatcttgcttttagcagtaaagggccagacactttggagcattgaaaggccttagcccctgctccccaactacgtgccatgctgggtagtgtgtatcctgtacatctgtgtgccaggctggggcagactgtgccaatgctcaccgaacactagaatctgctcttacacctctagcatgtatctcgttgtagcagagttgtgcactttctcagcattgtgtagtgttttctaattgcatctaaaaacttatcaaaagtgattgtgaaaacagtgtcttagaagtataaacagaaatggcaatatttatgtcctgtgattcaagcccaaaggttataaattcaactttcacagggaatagcactgctaatcttactttatgatttaaatataaaggaaaatcacagcagccttaatttcctgttggtcggatcatttgcagcagttctagttcctgacttttaaaatggatgaaattttctctttgtctgatttggaaaaggaactgcttttttgccttactgctttggtataaggatgaaaaacatgagcactctgcagacaaaatgaccttaaatcacattgattaagatattttaaaagttagcagtgaaccaaaagtagtttcagattagcagaaataaagagctttaagttttaaaagttgagattgaatatttaatgaaagtttattaattctttttccaggaatagcagtaaggtcagtttttttccctaaaataaaaagttttaataaacagaaaattatagcaacagtacttaggagaatagttgaagattgtattaattttaattataatagttatttgtcataggctattgatgattagaatttcattagttttgtccactataattttaaaaatagttgtgtcaaatacaaattctggtaaactgttaggttttaacaccagacagtattcaaaggaaattaatgtttgcaaacataaatccatagtcttcatttctttatattgtcacctttgtaaaagtgtttaaaatttgtattgtttgttttgtatatctttgggcatcttgtgtctagctataataaaaagaaacggtgccaaggttctcagatgaagtgtgtggctatgtatgcatgtaacttggtttctttgaaaacccaattatatttgtattgtggtgttaaaaaa

SEQ ID NO: 1124 - DNA, 3122 bp, Homo sapiens
ggaaaacctcgtgggctcagcccgggagaaagggccagggaagttgggtggttctgtgcttggtctgtcaatggaggagatcaaagttttacgaagggtgaaggaggagaatgatcggcgaggtggatttattcgcatatttcctacatctgagacatgggaaatatatgggtcctacctcgagcataagacctcaatgaactatatgctggcaacacgcctcttccaggacaggggaaacccaagaagaagcttattgacaggaagaacacgaatgactgctgatggagcgccagaattgaagatagagagtctgaattcaaaggccaagctgcatgctgcactttacgagaggaagctcctgtctctggaggtgcgaaaacgtagacgacggagtagcagattgagggcaatgaggccaaaatacccagtgattacccaaccagctgaaatgaatgttaaaactgagacagagagtgaagaggaggaagaagtcgcattagataatgaagatgaagaacaggaggcttcccaggaggagtctgcaggatttcttagagaaaatcaagccaaatatacaccctcattgacagctttggtagaaaatacacccaaagaaaattccatgaaagttcgtgaatggaataataaaggtggacactgctgcaaacttgagactcaggagctagagcctaaatttaacctgatgcagattcttcaagataatggcaatcttagcaaaatgcaggcccgaatagcattctctgcctatctccagcatgttcaaattcgcctgatgaaagacagtggcggtcagacgttcagtgccagttgggctgccaaagaggatgaacagatggagctggttgttcgtttcctcaagcgagcatcaaataacctccagcattcactgaggatggtattacccagtcgacgattggcacttctggaacgcagaagaatcctggcccaccagctgggtgactttatcattgtatacaacaaggaaacagaacaaatggctgaaaagaaatcaaagaagaaagttgaggaagaagaggaagatggggtgaatatggaaaactttcaggagttcatcagacaagcaagtgaggctgaactggaggaggtgttgactttttatacccaaaagaacaagtctgctagtgtcttcctggggactcactctaaaatttctaagaacaacaacaattattctgatagtggggcaaaaggtgatcaccctgagactataatggaagaagtgaaaataaagccacctaaacagcaacagacgacagaaattcattctgataaattatctcgatttaccacttcagcagaaaaagaggcaaaattagtttatagcaattcctcctctggtcctactgctactctgcagaaaattcccaacacccatttgtcatctgttacaacctctgacctctctccagggccttgccaccattcttctttatctcaaattccttcagctatccccagcatgcctcaccagccaacaattttactgaacacagtctctgccagtgcttctccctgcctacatcccggggcacagaacatcccaagccctactggcctgccacgctgtcgatcaggaagtcacaccattggtcccttttcttccttccaaagtgctgcacacatctatagccagaaactgtctcgtccctcttcagcaaaggcaggatcgtgctatctaaacaagcatcattcaggaatagccaaaacacaaaaagagggagaagatgcttctttatatagcaaacggtacaaccaaagtatggttacagctgaacttcagcggctagctgagaagcaggcagcgagacagtattctccatccagccacatcaacctcctcacccaacaggtaacaaacctgaatttggcaactggcatcataaacagaagcagtgcttcagctcccccaaccctccgacccatcatcagtcctagtggcccgacatggtctacacagtcagacccccaagctcccgagaatcactccagctctcctggaagcaggagcctgcagacagggggatttgcctgggaaggagaagtagaaaacaacgtgtacagccaggctacaggggtggtcccccagcacaagtatcaccccacagcaggcagctatcagcttcaatttgccctgcagcaacttgaacaacaaaaacttcagtcccggcagctcctggaccagagtcgagcccggcaccaggcaatctttggcagccagacactacctaactccaatttatggacaatgaataatggtgcaggttgtagaatttccagtgccacagctagtggccagaagccaaccactctgccacaaaaagtggtaccacctccaagttcttgcgcctccctggttcccaaacccccacccaaccacgaacaagtgctcagaagggcaacatcccagaaagcttccaatacccgcttcagatcctcctttcaaaactatttgtggtatttcttccaagcagtcagctgaactgaggacgacagcctacaaacaactacatgcatctgaactgtctcttgtaaatgagcttttttcagagccagaatcatactctccaggaaatatggagaaagaaacctgaggagattgaagtttgccaggcacaagggcaaaactcagactgaatgaatttgaaagggtggggccaaagatgttgtaacctgggagacttctctgaagaaagaaaactgtttaagaaacacagactgaactgcagtacttttccttaaatagctgagatgaccttctttaccctgggcttaggtgattctcatcagggtgacctgagtggaagttggtggtaacgactgttctgtgtcagcacccaggacagtggtgtctgttaaggctgccagggattagcagggaggaaagccatcaggactgggtagcctggtagcaccaaatcccaattaatgttacctgaacatgtggtgaggtcagccgtatgatgaaagatgtttaagagattaatgtcagaagaatatgaaaataaacaccggcttaaaaaatgttaaaaaaaaaaaaaaaaaaaaaaaaaaaaaaaaaaaaaaaaaaaaaaaaaaaa

SEQ ID NO: 1125 - DNA, 8449 bp, Homo sapiens
gcgacctccggcgccattttgtagagaaacaagcggagttaaccgaagagggggtcgaggagagccggagtcggggacccaggagtttcctgtgtccagcgctgccggagccgcctgaggtgccatgtttcagaacagagtaagacccctggtaaagaagaactgaagatattatacagataccagatatagcctaattacaaagaaagcattaacctgcctctgaggtgactaaaggggaataatggtgattttgcgccgggctcggccgcctgcttccgccccaaccagcaatgaatcttgactcgctctcgctggccttgtctcaaatcagctacctggtggacaatttaaccaagaaaaattaccgagccagccagcaggaaatacagcatattgtgaatcggcacggtcctgaggcagacaggcatttattacgctgcctattttcgcatgtggatttcagtggcgatggtaaaagcagtggcaaagatttccatcagactcagtttctgattcaggagtgtgcgttgctgattacaaagccaaattttatctcgacgctgtcctatgccattgataatccattgcactatcagaagagtttaaagcctgcaccccacttatttgcccagctgagtaaagtgctcaaattaagcaaagtacaagaggtaatttttggccttgccctgttgaattcttccagctcagatcttagaggtttcgctgcccagtttatcaaacagaagcttccagatcttctgcgttcttacattgacgcagacgtcagtggaaatcaagaaggtggcttccaagatatagcaatagaggtcctacacctcctcctctcccatctcctctttgggcagaagggagcctttggagttggacaagaacagatagacgcttttcttaagacgctgcgcagagattttccccaagaacgctgtcccgtggtgctcgcaccacttttataccctgaaaaacgggacattctaatggacaggatcctgcctgattccggaggggtagctaaaaccatgatggagagctctttggctgatttcatgcaagaagtaggctatggcttttgtgcaagtattgaagaatgtcgcaatataatcgtgcagtttggtgttcgggaggtcacagctgcccaggttgcaagggttttgggaatgatggctcgaactcattcaggattaacagatggcattccattacagagtatttctgctccgggcagtgggatctggagtgatgggaaagataaaagtgatggagcacaggcacacacatggaatgtagaagtcttgattgacgttcttaaagaactgaatccaagtttgaatttcaaggaagtaacttatgaactggaccatcctggatttcaaattcgtgacagtaaaggacttcataatgtggtttatggcattcagaggggtttgggtatggaagtgttcccagtagacctcatatatagaccttggaaacatgctgaaggccagctctccttcattcaacattcccttataaatccagagatcttctgttttgctgactatccctgtcatactgttgccactgatattctgaaagcaccaccagaggatgacaatcgagaaattgccacatggaagagcttggatttgattgaatctctgctgaggcttgcagaggttgggcagtatgagcaagtcaaacagctcttcagcttccctatcaaacactgtccagacatgctggtattggccttactacaaattaacacctcttggcataccttgcgccatgaacttatctccactctgatgccaattttccttggaaaccatcctaactcagctattattttgcactatgcatggcatgggcagggacagtctccctcaattcgccaacttatcatgcatgcaatggcagaatggtacatgagaggggagcagtatgatcaggccaaattgtctcgaatacttgatgtggcccaggacttgaaggccttgtcaatgctgctaaatggtactccatttgcctttgttattgaccttgctgcacttgcttcacgtcgtgaatacctcaaacttgataagtggctcacagataaaattcgagagcatggggagccttttatccaggcgtgtatgacttttttaaagagacggtgtccttctattttgggcggacttgccccagaaaaagaccagcccaaaagtgctcaacttcctccagaaactttggcgacaatgttggcctgtctgcaagcttgtgcagggagtgtttctcaggagctatcagaaactatcctcaccatggtagccaattgcagtaatgttatgaataaggccagacaaccaccacctggagttatgccaaaaggacgtcctcctagtgctagcagcttagatgccatttctcctgttcagattgaccctcttgctggaatgacatctcttagtataggtggttcagctgcccctcacacccagagtatgcagggttttcctccaaatttgggttctgcattcagtacccctcagtcaccagcaaaagcatttccacccctttcaacccccaatcagaccactgcattcagtggtattggaggactttcatcacagcttccagtaggtggtcttggcacaggcagcctgactggtataggaactggtgctcttggactccctgcagtgaataacgacccttttgtacagaggaaactgggcacctctggactgaatcagcctacattccagcagagtaagatgaaaccttcggacttgtctcaggtgtggccagaggcaaaccagcactttagtaaagagatagatgatgaagcaaacagctatttccagcgaatatataatcatccaccacatccaaccatgtctgttgatgaggtattagaaatgctgcagagatttaaagactctactataaagagggaacgagaagtatttaactgtatgctaaggaacttgtttgaagaatatcgtttttttccccagtatcctgataaagagttacatataacagcctgcctatttggtggtataattgagaaaggactggtcacttacatggcactaggtctggctctacgatatgttcttgaagccttacgcaagccttttggatccaaaatgtattatttcgggattgctgcactagatagatttaaaaacagattgaaggactatccccagtattgtcagcatttggcttctatcagtcactttatgcaatttccacatcatttacaggagtatattgagtatggacagcagtctagagatcctcctgtgaaaatgcaaggctctatcacaacccctggaagtattgcactggctcaggcccaggctcaggcccaggttccagcaaaagctcctcttgctggtcaagttagcactatggtaaccacctcaacaactaccactgttgctaaaacggttacggtcaccaggccaactggagtcagctttaagaaagatgtgccaccttctattaatactacaaatatagatacgttgcttgtggccacagatcaaactgagagaattgtggagcccccagaaaatatccaggagaaaattgcttttattttcaataatctctcacagtcaaatatgacacaaaaggttgaagagctaaaggaaacggtgaaagaagaatttatgccttgggtttcacagtatctggttatgaagagagtcagtattgagccaaactttcatagcctgtattcaaacttccttgacacgctgaagaatcctgaatttaacaagatggttctgaatgagacctacagaaacattaaagtgctcctgacctctgataaagctgcagccaatttctcagatcgttctttgctgaagaacttgggacattggctaggaatgatcacattagctaaaaacaaacccatcttacacactgacttggatgtgaaatcattgctgctagaggcttatgttaaaggacaacaagaattgctctatgtagtgccctttgttgccaaagtcttagaatctagcattcgtagtgtggtttttaggccaccaaacccttggacaatggcaattatgaatgtattagctgagctacatcaggagcatgacttaaagttaaacttgaagtttgaaatcgaggttctctgcaagaaccttgcattagacatcaatgagctaaaacctggaaacctcctaaaggataaagatcgcctgaagaatttagatgagcaactctctgctccaaagaaagatgtcaagcagccagaagaactccctcccatcacaaccacaacaacttctactacaccagctaccaacaccacttgtacagccacggttccaccacagccacagtacagctaccacgacatcaatgtctattcccttgcgggcttggcaccacacattactctgaatccaacaattcccttgtttcaggcccatccacagttgaagcagtgtgtgcgtcaggcaattgaacgggctgtccaggagctggtccatcctgtggtggatcgatcaattaagattgccatgactacttgtgagcaaatagtcaggaaggattttgccctggattcggaggaatctcgaatgcgaatagcagctcatcacatgatgcgtaacttgacagctggaatggctatgattacatgcagggaacctttgctcatgagcatatctaccaacttaaaaaacagttttgcctcagcccttcgtactgcttccccacaacaaagagaaatgatggatcaggcagctgctcaattagctcaggacaattgtgagttggcttgctgttttattcagaagactgcagtagaaaaagcaggccctgagatggacaagagattagcaactgaatttgagctgagaaaacatgctaggcaagaaggacgcagatactgtgatcctgttgttttaacatatcaagctgaacggatgccagagcaaatcaggctgaaagttggtggtgtggacccaaagcagttggctgtttacgaagagtttgcacgcaatgttcctggcttcttacctacaaatgacttaagtcagcccacgggatttttagcccagcccatgaagcaagcttgggcaacagatgatgtagctcagatttatgataagtgtattacagaactggagcaacatctacatgccatcccaccaactttggccatgaaccctcaagctcaggctcttcgaagtctcttggaggttgtagttttatctcgaaactctcgggatgccatagctgctcttggattgctccaaaaggctgtagagggcttactagatgccacaagtggtgctgatgctgaccttctgctgcgctacagggaatgccacctcttggtcctaaaagctctgcaggatggccgggcatatgggtctccatggtgcaacaaacagatcacaaggtgcctaattgaatgtcgagatgaatataaatataatgtggaggctgtggagctgctaattcgcaatcatttggttaatatgcagcagtatgatcttcacctagcgcagtcaatggagaatggcttaaactacatggctgtggcatttgctatgcagttagtaaaaatcctgctggtggatgaaaggagtgttgctcatgttactgaggcagatctgttccacaccattgaaaccctcatgaggattaatgctcattccagaggcaatgctccagaaggattgccccagctgatggaagtagtgcgatccaactatgaagcaatgattgatcgtgctcatggaggcccaaactttatgatgcattctgggatctctcaagcctcagagtatgatgaccctccaggcctgagggagaaggcagagtatcttctgagggaatgggtgaatctctaccattcagcagcagctggccgcgacagtaccaaagctttctctgcatttgttggacagatgcaccagcaaggaatactgaagaccgatgatctcataacaaggttctttcgtctgtgtactgaaatgtgtgttgaaatcagttaccgtgctcaggctgagcagcagcacaatcctgctgccaatcccaccatgatccgagccaagtgctatcacaacctggatgcctttgttcgactcattgcactgctcgtgaaacactcaggggaggccaccaacactgtcacaaagattaatctgctgaacaaggtccttggtatagtagtgggagttctccttcaggatcatgatgttcgtcagagtgaatttcagcaacttccctaccatcgaatttttatcatgcttctcttggaactcaatgcacctgagcatgtgttggaaaccattaatttccagacacttacagctttctgcaatacattccacatcttgaggcctaccaaagctcctggctttgtatatgcctggcttgaactgatttcccatcggatatttattgcaagaatgctggcacatacgccacagcagaaggggtggcctatgtatgcacagctactgattgatttattcaaatatttagcgcctttccttagaaatgtggaactcaccaaacctatgcaaatcctctacaagggcactttaagagtgctgctggttcttttgcatgatttcccagagttcctttgtgattaccattatgggttctgtgatgtgatcccacctaattgtatccagttaagaaatttgatcctgagtgcctttccaagaaacatgaggctccccgacccattcactcctaatctaaaggtggacatgttgagtgaaattaacattgctccccggattctcaccaatttcactggagtaatgccacctcagttcaaaaaggatttggattcctatcttaaaactcgatcaccagtcactttcctgtctgatctgcgcagcaacctacaggtatccaatgaacctgggaatcgctacaacctccagctcatcaatgcactggtgctctatgtcgggactcaggccattgcgcacatccacaacaagggcagcacaccttcaatgagcaccatcactcactcagcacacatggatatcttccagaatttggctgtggacttggacactgagggtcgctatctctttttgaatgcaattgcaaatcagctccggtacccaaatagccacactcactacttcagttgcaccatgctgtacctttttgcagaggccaatacggaagccatccaagaacagatcacaagagttctcttggaacggttgattgtaaataggccacatccttggggtcttcttattaccttcattgagctgattaaaaacccagcgtttaagttctggaaccatgaatttgtacactgtgccccagaaatcgaaaagttattccagtcggtcgcacagtgctgcatgggacagaagcaggcccagcaagtaatggaagggacaggtgccagttagacgaaactgcatctctgttgtacgtgtcagtctagaggtctcactgcaccgagttcataaactgactgaagaatcctttcagctcttcctgactttcccagccctttggtttgtgggtatctgccccaactactgttgggatcagcctcctgtcttatgtgggcacgttccaaagtttaaatgcatttttttgactcttggccaaaatttagaagatgctgtgaatatcattttgaacttgtgtaaatacatgaaagagaaaacctttgtctggaacttcttggctttgtgcaagctgtgtccaaggcaagtacataaactggtaccttgtaatgaagaggcagctgatgccatgcacttgtctgagggcatagctccatgtcttctgacattcctggtgtcccaaagaatagcaaaaagccagtttgaatattatgtaacttatttttttaatgtggacaggggaccttgaaaatcactaagttattaaaaatgtggatgtgctagaattggatatgtccaggaacatgggaagggctcactattggaatcccatgagtttccattttgtctctacccaaacgtattccaaagctgactgcatttgtaccatcttatttcttttggggattatacacctcagccgcctgagatgggggtcagctctttatataaagggaaaccagaccaggcctaaagcccacccctaccctcacccccccaatcctctcctgaaacttaaaaacagtgggaatataggaaagggaaccaaatctcattaattaattgttctcccccattaccccactgaatgaatggccatacaggctaagctgaataatgacaaagttgaaaggaccaatacagccccttttataaggattttgaatgttttgcaaatgtattggtccctgtgttgtattttgtagccttttcctgggcttcagctcccctacttcttgtatgtgtatgcatactgtagctaaccattaaagtcatgacacacaaaaaaaaaaaaaaaaaaa

SEQ ID NO: 1126 - DNA, 3995 bp, Homo sapiens
cgctctctgctcgcgcttgggctcgcgatggggaagaagtcccgggcggtacccggccgtaggcccatcctgcaactctctccgccgggtcctcggggcagcacgccgggccgggacccggagccggaacccgacactgagccggactcaaccgcggcggtccccagccagcccgccccgtcggcggcgacgaccaccgcggtgactgccgccgcggcctcggacgactcgccttcagaagatgaacaggaagcggtgcaggaggttcctagagttgttcagaatcctccaaaaccagtcatgaccactagacccacagctgttaaagcaacaggcggtctatgcttgcttggtgcttatgctgacagtgatgacgatgacaatgatgtttccgaaaaactagcacaatccaaagagacaaatggaaaccagtcaactgatattgatagtacattggccaacttcctagcggagatcgatgccataacagctcctcagcctgcagctcctgtaggagcttctgctccacctccaactccacctcgaccagagccaaaggaagcagcaacatctaccctttcttcttctacttcaaatggaacagactccacccaaacatctggttggcaatatgatactcagtgttcactggcaggagtcggaattgagatgggcgattggcaggaagtctgggatgagaacacgggatgttattattattggaatacacaaacaaatgaagtgacttgggagttaccccaatatcttgccacacaggtacagggattacagcattaccagcccagttctgtgccaggtgctgaaactagttttgtggtaaatacagacatatattctaaggagaaaacgatttctgtttccagtagtaaaagtggaccagtcatagccaagcgagaagttaaaaaggaagtaaatgaaggaattcaggctctctcaaatagtgaggaggagaagaaaggggtggcagcatcgctgcttgctcctttattgcctgagggaataaaagaagaagaagagagatggagaagaaaagtaatttgtaaagaggagccagtttcagaagtaaaagaaacaagtacaacagtagaagaagcaacaacaatagtaaagccacaggaaattatgttggacaatatagaagacccttctcaggaggatctttgcagtgttgtccaatctggagaaagtgaggaggaagaggaacaagatacccttgaactggagctagttttggaaaggaaaaaagcagagttgcgagccttggaggaaggagatggtagtgtgtcagggtctagtccacgttctgatatcagccagccagcatctcaagatggaatgcgtaggcttatgtctaaaagaggaaaatggaagatgtttgttcgagctaccagtccagaatctaccagtaggagttctagtaaaactggacgagatactccagaaaatggagaaactgcaattggtgctgaaaattcagaaaaaatagatgagaattcagataaagagatggaagtagaagaatctccagagaaaataaaagtacagacaacaccaaaagtagaagaagaacaggatttgaaatttcagattggagaactggcaaataccctgacaagtaaattcgagtttctaggcattaatagacaatccatctccaactttcatgtgctgctcttacagactgagactcgaattgcagactggcgggaaggggctcttaatggaaactaccttaaacgaaaacttcaggatgcagcagaacaactaaaacagtatgaaataaacgccactcctaaaggctggtcctgccactgggacagggatcatagacggtatttctatgtaaacgaacagtcgggcgagtctcagtgggagtttccagatggtgaagaggaagaagaagaaagccaagcacaagaaaatagagatgagactcttgccaaacagaccttgaaagacaaaactggcactgattcaaattcaacagaatcctctgaaacttccacaggttctctttgtaaagaatccttttctggtcaagtttcttcttcatcactcatgccacttactccattctggaccctccttcagtcaaatgttcctgtgcttcaacctccattacccttggaaatgccaccacccccacctccacctccagaatcacctccaccccctcctccaccacctcctcctgcggaagatggtgagatccaggaggtagagatggaggatgagggaagtgaggagccccctgccccaggaacagaggaagatacccctttgaaaccttcagcacaaaccacagttgtaactagccagagttcagttgattccaccatctctagttcttcttccactaaaggaataaagaggaaagctacagaaattagcactgcagtggttcagaggtcagctaccattggcagttctccagttctctatagccagtcagctatagctacaggtcaccaggcagcagggattggaaaccaggcaacaggaattggacatcagacaataccagttagccttccagcagcaggaatgggtcatcaggccagaggaatgagcctgcagtcaaattaccttggactagcggcagcacctgcaattatgagttatgcagaatgttctgtcccaattggagtgactgctccctcattgcagccagttcaggcccgaggtgctgtgcctaccgctaccattatagaaccaccaccaccacctcctcctcctcctcctccaccaccaccagctcccaaaatgccaccacctgaaaagacaaaaaaaggaaggaaagacaaggcaaagaagagtaagaccaaaatgccatctttggtaaaaaagtggcagagtatccagcgtgagttagatgaagaggacaattctagttccagtgaagaggatcgggaatcaactgcacagaagcgaattgaagagtggaaacagcagcagctggttagtggcatggcagagagaaatgctaattttgaagcccttcctgaggattggagagcaaggctgaagagaaggaaaatggctccaaacacatagtttttaagtttttaaaacttttttgtattattgtttgttttgtgttcagttcaaagtcttaaccagttttattgtcaaataaactataaatgttatgggggagatcttataaatttcctgggcaagagtgtatgcatacaaagttttcacttttgtgaaatgtaatttttctgtttttgcaaagggatgaggtgattggaattgctttgaccatgctgcctttattctcaaactggcaaacttagcatgttaggtgtattaacctcatcagtcttgaagaacatgtggctcatgagtataacacttctgtagaggactccctgacaaaagtgaagaattaacttctcctccagaacaagtgcaattcagaaggcagctctgcattctaccttgcttgactggaattgtctgaagctttttctggcctcttttctctagtcggccacccctgaagtgctgaggtctaagtggtttacctcgtgctgatagatggccacactctttagagtagttctcataagttctagaactggtagctcggtcgtttcgcacactaggtggcatacaggcagcagcaggtgttcatatccttgattttgagaatttcccctcaagtatgtggcagtaaatacaacaagacactctatgtattaatgtctccattgtcttaaccctgttccaaaacaaaattcacctcctttctttatgtgaatgtattctccataaaattccagtatttaaaaagcagtttactgttctgtactttctgttgtatcacaatcaggtaaaagtcactttaaactgaggaaacggcaaattgtgttttaaagctctttgtatttctccagtttctgaccttgtaaatttgtatatatgcactaataaagctttttttataatcctgaaaaaaaaaaaaaaaa

SEQ ID NO: 1127 - DNA, 6807 bp, Homo sapiens
tttcccatccccaccttccttcctttgtccttgcattccgcagagccgcagcgagggtgatgtgtggggcaggtactgttgttgcagggcagcgatgtggctgatggcgtgtccttcatctttgtggtctcctttgcagcccctcccacctttacagaaacacccccccagtacatcgaggccaaggagggtggtagtatcaccatgacctgcacagcttttgggaaccccaagcccattgtcacctggctcaaggaggggacgctcctcggtgctagtgggaaataccaggtgagtgacggcagcctgacagtgacatcggtcagtcgggaggacagaggtgcctacacctgccgagcgtacagcattcagggggaggctgtccacacgactcacctgcttgtccaagggccccctttcatcgtctcccctcctgagaacatcaccgtcaacatctcccaggatgctctgctcacctgccgggcagaggcgtatccgggcaacctcacctacacctggtactggcaggacgagaacgtctactttcagaacgacctgaagctgagggtgcgcatcctaatcgatgggaccctgatcatcttccgggtgaagccggaggactcggggaagtacacctgtgtgcccagcaacagcctggggcgctccccctccgcctcggcgtacctgaccgtgcagtacccagcgcgtgtcctcaacatgccccctgtgatttacgtgcccgtggggatccatggctacatccgctgccctgtggacgcagaaccaccggccaccgtggtcaagtggaacaaggacggccgtcccctgcaggttgagaagaacctcggttggaccctgatggaggatggctccattcgaattgaggaggccacagaggaggctcttggcacttatacctgtgtgccttacaacactctggggaccatgggccagtctgcccctgcgaggcttgtcctgaaggaccccccctatttcacggtgctaccaggctgggagtacaggcaggaggccggccgggagctacttatcccctgtgctgccgcaggggacccctttcctgtcatcacttggagaaaggtagggaagcccagcagaagcaagcacagtgccctgcccagtgggagcctgcagttccgtgccctgagtaaggaggaccacggggagtgggaatgtgtcgccaccaacgtggtcacgagcatcactgccagcacccacctcaccgtcatcggcaccagcccccatgccccgggcagtgtccgggtccaggtctccatgacaactgccaacgtgtcctgggaaccaggctatgatggaggctacgagcagacattctcagtttggatgaagcgggcacagtttgggccccatgactggctgtccttgccagtgccgccaggacccagctggctgctggtggacaccctggagcctgagacagcgtaccagttcagcgtcctggcccagaacaagctgggaaccagcgccttcagtgaggtggtcactgtgaacactttagcattccctattacaactccagaacccctggtgctggtcaccccaccgaggtgcctcatagccaatcggactcagcagggtgtgctcctgtcctggcttccgcctgccaaccacagctttcccatcgaccgctacatcatggagttccgtgtcgcagagcgctgggagttgctcgacgatggcatccccggcaccgaaggagagttctttgccaaggatctgtcacaggacacgtggtatgagttccgggttctggccgtcatgcaggatctgatcagcgagcccagcaacatcgccggcgtctccagcacagacatcttcccgcagccggacctgaccgaggatgggctggcgcggcctgtgctggcgggaatcgtagctaccatctgcttcttggcagctgccatcctgttcagcaccctggctgcctgctttgtcaacaagcagcgcaagcgtaagctcaagcgcaaaaaagaccctccactctccatcacccactgcaggaagagcctggagtctcccttgtcctctggcaaggtgagccccgagagcatccgcacgctccgagcgccgtcagaatcctccgacgaccagggccagcccgcggccaagaggatgctgagccccacccgtgagaaggagctgtcgctgtacaagaagaccaagcgggccatcagcagcaagaagtacagcgtggccaaggcagaggccgaggcagaggccaccacgcccatcgagctcatcagcagaggccctgacggccgcttcgtgatggaccctgccgagatggagccctcgctgaagagcaggcgcatcgagggcttccccttcgccgaggagacggacatgtaccccgagttccgccagtcggacgaggagaacgaggacccactggtgcccacatctgtggccgccctgaagtcccagctcacccctctgtcatccagccaggagtcctacctgccaccaccagcatacagccctcggttccagccccgcgggctggagggccccggtggcctggaaggtcggcttcaggccacaggccaggcccggccccctgccccccggcccttccaccatggccagtattatgggtacctcagcagcagcagccctggggaggtggagccgcccccgttctacgtgccagaagtgggcagccccctgagctccgtcatgtcgtccccgcccctgcccaccgaggggccctttggccaccccaccatccccgaggagaatggagagaatgcatccaacagcacgctgcccttgactcagacacctacaggagggcgctcccctgagccctggggccggccagaattccccttcggggggctggagaccccagcgatgatgttcccccaccagctgccaccctgtgatgtgcccgagagtctgcagcccaaggccggcctcccccgaggactgccccccacctccctgcaggtgcccgcggcctacccgggcatcctgtctctggaggcaccgaagggttgggcaggcaagtcgcccggcaggggccctgtcccagcgccccccgccgccaagtggcaggacagacctatgcaacctctggtaagccaagggcagctgcgacatacaagccaaggcatgggcatacctgtgctgccttaccccgagccggctgagccgggggcgcacggcggccccagcacatttggcctggacacccggtggtatgagccccagccccggccccggcctagccctcggcaggccaggcgcgccgagcccagtttacatcaagtggtgctacagccctcccggctctcacctctgacccaaagccccctcagctcccgcaccggctcccctgagctcgccgcccgtgcccggcctcgcccgggcctcctgcagcaggcagagatgtcagagatcaccctgcagccgccggctgcagtcagcttttctcgaaagtctacgccgtccacaggctccccctcccagagcagccgcagtgggagtcccagctaccggcccgccatgggcttcaccactctggccaccggctacccttcccctccacccggccccgcccctgctgggcctggggacagcttggacgtgtttggacagacgccttcccctcgaaggacgggggaggaattgctccgaccggagaccccaccacccacgttacctacttcagggaagctgcagagagacagaccagctcccgcgaccagcccgcctgagagagcactctctaaactgtagcagctggtattccagctatctgggcagtgttgtcgagacaagcctctcctcagctcaataggtaagggagctcctcggctgggcgggcgggggcgggcaggcggacggggcttcggccgggccattgcttcctggacaggggatccaaaccatgtcccctcaccgccccgtggggtggccgctgccgctcctcgatccccacggcttctgggttccccacatcgagccacgctcggcaccgcctagctgcagcttctgccccccaccccccgtccccatgtccggcccctctagagccccctgcggctctcctcactcctcgccagcctcgccagcctgctgccagtacacccagggcctcccacagaagccctggggccctgcatgcaccccgaaggggcccagaacacccgagatctgctttgcatctctgcacccttggggacctctctggggcccctctggtatccaggaagagcccccccgcaccctattctcccagcagccccaggcatagcatcccttctcctggggtggctggcccctcaccagcttcttgagatcttcgtggtattaggctctctcgaggagtacaaggttgggatgagccccacttcttccttgacagtggggtcctctgcagggtcaggtccctgcagtcctatggggctttgtagcgaaatgtcatcactcccctgtgctccttgccttctgcagcctgaccttggtagtcacaggactgaaatgtgacctagcccttgggtccacattgctttcaaggtccctgttgtagccttgtcgtcctccctgggtcatgctgtagggaaagggtcttaggaggacctccccgaggggagggggcaggcttcccctgggcagacaggcattgagctggcaggaagtgaaacccccagggaccagcactgtgtccctccccctgcccccgcagtcagcctctccttgagtgtccttccaggtggaagctaaaggaacttgggcattcagggagcctctgagtccctcacagagactcagggccacccgaagctcgctccctctcacagtagcctgacaaggtgctgccgctcgccacggaccctctgccctgtgcctgggcacacacaggcatcgggcacctgcatgggagacggcgagcctcccgtccaggtgcttctggctttccaggcgagaaggagacaggtgccttccccccctagagatgtcaagggaggttcactttcctaaccagggctataaatctcattcattcctaagagtggcctccataaagaggactgccctgacatttctttaccatctgtagctataaaattgtcagcagcccagaggccctggaattgtgggtgaggctgtctggcatagggtgagtgtgagggctgtcaggcagcgtttatgagctcacctgctctggggccctcctgcgcccagagacccactggtcttccaccttccccagctccctccctgtcccagctgtgactcctccacagcccccggaggtgtgggagccctagactagctctcaccccagctcctggaaattcctagactctgctctcatgtgttattcctcaccccttcactcaactccattgaccctctcctttcccagtgtccccactgtgccagatccaagagaagcccgctctcctttcactgctgtggcaaacccagaaaccaggggcagcgatgagggaccatcgtttctctcccgggcctggccagcatccccagcctaggagaaggagaccctccccatcctgagtcagcccctcggtgctggcctctcctgcctgctgggagcctccccggtacggctgctgggtcctggggagatgcaggctctgttcagatgctgtctccatgctgcacctttgcatgtgtgccctcttggtcttgcttggagaagttgtgacagctcttgtccacgtgcgttctcactgtttcttttcccttcagttcctctcctgttcctttggtccatatgtagttgttgcccctgcctctcctcctttctctctccctttttttctcctcttcccaactcccttctcaacatggggagttgtattgcgtggacctgtcctttctgtggactgtggggaggccgagccaattcttagctcctgtctgagcctagtgatgccctgtcctcacctctgcttccactccctttcccattcaggctgactgtcaccgcagggaggcaggtgggtctggagcatggagtggcccctgtcctgggtcagctgtaggaaggggcccctttgtaaacaagcttctgccaggttctgaggcagagcactggtctgagtccggccccacagaagggttccatcttgtggtcagcggggtgggctcagacctgcagactcccgcagtgggcccaccctttcccttgctatggcccgtctatgagtggctttcccctgcctccatcggtgtataatcaggcaggtggtgtttgctcttaggtgattagaagaggaggaaaatgcccatcaagccactgcttcagcctgttggccagggaacacctgaacagggtcaaaatggtcagctcctgggcgctgagctaaggaaatatgcagggggttttgactttccctgtcctgaggcttgcctccactttgacctggctgcatctttcctcagctcttctgggtaagctgagagctaagcaaataagacctcctgggctacctggtcatgatttgggttttgtatggattttttgaaaagagagaaaaagagtgtgggctgggtgccgtggcccagagggcagatctcttgagtccaggagttcaaggccagcctgggcaacatagtgaagccccatctctgcaaaaaaatacaaaaaaatagctgggcatggtggcacatgcctatagtcccagctccttggggggctgaggtgggaagatcatctgagctggggaggtcgaggcagcagtgagccgagattgcgccacttcactccagcctgggtgacagagaccctgtctc

SEQ ID NO: 1128 - DNA, 5876 bp, Homo sapiens
caagggccccctgcgtggctaccgcagccgctggttcgtgttcgacgcgcgccgctgctacctttactatttcaagagtccgcaggacgcgctgcccctcggccacttggacatcgcggacgcctgcttcagctaccagggccccgacgaggcggcggagccgggcacggagccgcccgcgcacttccaggtgcacagcgcgggagccgtcacggtgctcaaggctcccaatcgtcaactcatgacttactggttacaggagcttcagcagaagagatgggaatattgtaacagtcttgacatggtcaagtgggacagcaggacctctccaactcccggggattttcctaagggtcttgtagccagagataacactgatttaatttacccacacccaaatgcttctgcagaaaaagccagaaatgtcctagctgtggagactgtgcctggagagctggtgggagaacaagctgcaaatcagcccgccccagggcatccaaattccattaatttttactctttgaaacagtggggcaatgagctcaagaattcgatgtcttctttccgtcctgggagaggacataatgatagtcggaggactgtgttttataccaatgaagagtgggaacttttagacccaacccctaaggacctagaggagtccatagtacaggaagaaaagaagaagctgacccctgaaggaaacaaaggagtaactggctcaggattcccctttgattttggacgtaacccctacaaaggaaagcgccctttgaaagacataattgggtcgtacaaaaatcgtcacagcagtggtgacccttcaagtgaaggcacatcaggcagtggcagcgtcagcatcaggaagccggcctccgaaatgcaactgcaggtccagagccagcaggaagagctggaacagttaaagaaagacctgtccagtcagaaggagcttgttcgactgctccagcagacagtccggtcatcccagtatgacaagtatttcacaagcagccggctctgtgagggggtcccaaaggacacgctcgagcttctgcaccaaaaggatgatcagattctgggccttaccagccagctggagaggttcagcttggagaaggagagtcttcagcaggaagtaaggacgctgaagagcaaagtgggcgagctcaacgagcagctgggaatgctcatggagaccatccaagccaaggacgaggtcatcatcaagctcagcgagggcgagggcaacgggcctcctcccaccgtggcgcccagctccccttcggttgtgcctgttgccagggaccagctggaactggacaggctgaaagataatctacaggggtacaaaacccaaaacaaatttctaaataaggagattttggaactctcagctctacgaagaaatgcagaaaggagagagagggatctgatggcaaagtattctagcctggaagccaagctctgccagatagaaagtaaatacctgatattgctccaagaaatgaagacaccagtgtgctcagaagaccaggggcccacccgggaggtcatagcccagttgctggaggatgctctgcaggttgagagccaagagcagccggagcaagcatttgttaaacctcatcttgtcagtgaatatgatatttatgggttcaggactgtacctgaggatgatgaggaagagaaattggttgccaaggtccgcgcgttggatctgaagactctctacctcacagaaaaccaggaagtctccactggggtcaagtgggaaaactattttgcaagtacagtgaacagggagatgatgtgctctccagagttaaaaaacctcatccgtgcgggcattccccacgagcaccgttccaaggtgtggaagtggtgtgtggaccgtcacaccaggaagttcaaggacaacactgagcctggccacttccagaccttgctgcagaaggcgctggagaaacagaacccagcctccaagcagattgagctggacttgctgcgaactctgcccaacaacaaacattactcctgccccacctcagaaggcatacagaagttacgcaatgtcctcctcgccttctcctggcggaatccagatatcggctactgtcaaggcctaaacaggttggtggcagtggccctcctgtacctggaacaagaagatgctttctggtgtctcgttaccatagtggaagttttcatgcctcgagactattatacaaagactcttttaggatcccaggtggaccagcgggtgttcagagaccttatgagtgagaagctgcctcggttgcatggccactttgaacagtacaaagtcgactacactctcatcactttcaactggtttctggtggtatttgtggatagtgtcgttagtgacatcctctttaaaatatgggactctttcctttatgaaggaccaaaggttattttccgttttgctctggcactttttaagtacaaggaagaggagattttgaaattgcaagattcgatgtctatatttaagtatctccgctacttcactcgcactatccttgatgctagatccggaaccgacgcgcctaccacttggagaaagtccggctggagctgaccgagctggaggccatccgtgaggacttcctgcgtgagcgggacaccagccctgacaagggtgagctggtcagtgacgaggaggaggatacctgagtgggctcgggatgctgctcttccttccttcacaaccaaagtgtgcccaaagggtgaaagtgcacttaaaagccagaatgtaacgtgtgtgtcctctggggatctgctgggcagatgtcccaagccaggctgcccttcctcatttcccactgtgcggggggcaggggtgggaggtctaatctgtttacaaccatttccgtgccatgcttttggttacacgtatctcagtcacgctttctgcctggttggtggatcctcaggcttaccagtggctatttgcaagagcctgtttccagcctccgtcagcctgtcggtgctctgaccctctgaaaccttgctttgctgggcatctccccatattctctctcctgtacatagtgggcagtggtgtgtggttttgaatggcagtgctataaaggatgccagctgtgctttaggcacctgtaggccagagggttgctgcctcaggcataaggttggtatgaaaaggggctgccttagaaaagcaggcacatcccttgttcagaaatggccactgtaggaaagcctgtgaacctcccaccagtggctttaagctgccagccatgccccatttctagaatagcctttgctcttccacacgcaacccttccatcagtgtcttccagcctgcatggggagggcctggctgcccagacacccaccctcacttctcatggccagcctgtgtttgcagatcactgggctgctctgtccccagcttgccccgtgccaggcatggctctgtgagattctgtggaatgcccttcttgacttgtggaaatcattcaccaagtacgatgggatgggattccaagtaaacagtggaccgtcatattgcaaagcaggcccacgcctgggctggccttggttgaggggatggaggaatgttttcgggggtgctttgcagggcagtggtgcagccgcagcgtgaacgctcttggacagctgaaaaccatggcctccttggggatggccagtgctcctggtgtctccacctgcctgggttgtgcaggaggccggctgccagtgcctggggctgggaaacttttttgcttggggcaggcttgggtgagctctcccagatgtgtgcccaccccaccactgcctggaacatccttgttctctgccaggatgcaggggcactgttgcctctgacacagcagtttctgggaactcagaggactgcctttctgaaggctggggagaggctttgagcaaggagcttgtttttgcttaatcgctctagaccatccctgatgcgtagatgtgagaggatgttttctggcacagtgttatgaaaatacaagataaatgatctcagtggaatgtttcatattacccgaaaaaaactggaaatcatcctttgttgtgaacacactgagactaagaattgaagcaatgcagttttaagaagtatttttcctattttttgctgtcaactttttggcaatgccacggcaaagttggtgtttcagcacatgctagagtgagctccggcttcgtgtctttaaccaactccactaatgtttcactgggtagacggagctggcctctatatttagccagaagcctttgcctcttttcaggcatcaaaaatgggttttgtcattgtctttgtctttgagagcagcagtttgaggtctgactccttcagttgtcctgtgagctgggcgttgcagtctgctcgaatcaagtgttggaaaccccccacccctcagcccatcgtgaaacgacagctgtcagcctggggggcggctgctgaggaggtgcagcaggaatggggctgggccctgaggttttactttccgagccaatggcccctggaacatgccagcacacactgccatgtcctggggctaagagctgcctttagggacaggctcgtgttgtccagtttgccctgagagatgcacctgaccaggggcccgtcgtggctgcaacccacggtggtatgttagtgtttccaggcagttgtcagcagctgccgggtagtgtgtgtgtgcgacagcaggagagttcctggaggaaagggactggggacactttctcagaggttctcctgcctggaatcaagtgatgcgtgtccagaaggcaagagagggcggctccgcctggttaaagtttgggaacgggacggagccaactcctccttccaggactgtgggccccactcttttgcgctaacacttcccctccctcgggtcactgaggaaagagctgctctgtcccctccagtgccctgaaggtccctggcctccactggctgccatggcagggggcccttctgacaggggctgccccaagctgctgttcctcctctgaaccttcaccccaacacccagcccgtggcccctgcaagggggaccctgccagctgggaaacccaaaggcctgtccaaacgtgcgcaccaggaccgaggggagctccctcccaacacctgctaggaattgccaacttttaaatggatggggttttttatgggttgaacctctgttaatacttttgtacactctcactacagtttatatttttataggctattttctcaaggtgtttctagattccacatatctattttatataacaagttattatgttatgtgtgtgactcccttgtgtgtatctgtgccagcctcagcctccgagttgcttttccctctggccctgactctcactgactcaccgatgtgatgtgcaggcccacttcttaccccagatagcctcgggcgctgcctgtagtcatgctgacagctgtacagtagccgccaagactgctgacagctggagacggttctggtttcaactacggtatattgatatcggaagtattctagacagatcctcggttgggttttctagctacatgtttgtattgcacagatccccacctgccatcctatagtgttgtcttcctgtgtgttccggggcttctgggcagctgggcctgcccggggaagtccttgcaggtgggaggccatacagagacccactgtgtgccactgagcgtcccactgctgctgggcaactggaggactgcagggggcgccaggtgactctctccttttatatcacagcagctcctgtgctgaccttcaagttacgttttggaactgtaatactaaaggaagaaataaactactaatttgtataat

SEQ ID NO: 1129 - DNA, 4932 bp, Homo sapiens
caaagcccgtggggcagctgggtctggggaaaacagcccggggccgcgggggccgaacgagcacggaccggaagttccgcagccgcgccgtccggcggagccgttggctgcggacgccggaagtggccagtcggcaggtctgaggcggcgctgtgtgtgtgaagcgtacctagggcgggaggcgacatggagacaggggcggccgagctgtatgaccaggcccttttgggcatcctgcagcacgtgggcaacgtccaggatttcctgcgcgttctctttggcttcctctaccgcaagacagacttctatcgcttgctgcgccacccatcggaccgcatgggcttcccgcccggggccgcgcaggccttggtgctgcaggtattcaaaacctttgaccacatggcccgtcaggatgatgagaagagaaggcaggaacttgaagagaaaatcagaagaaaggaagaggaagaggccaagactgtgtcagctgctgcagctgagaaggagccagtcccagttccagtccaggaaatagagattgactccaccacagaattggatgggcatcaggaagtagagaaagtgcagcctccaggccctgtgaaggaaatggcccatggttcacaggaggcagaagctccaggagcagttgctggtgctgctgaagtccctagggaaccaccaattcttcccaggattcaggagcagttccagaaaaatcccgacagttacaatggtgctgtccgagagaactacacctggtcacaggactatactgacctggaggtcagggtgccagtacccaagcacgtggtgaagggaaagcaggtctcagtggcccttagcagcagctccattcgtgtggccatgctggaggaaaatggggagcgcgtcctcatggaagggaagctcacccacaagatcaacactgagagttctctctggagtctcgagcccgggaagtgcgttttggtgaacctgagcaaggtgggcgagtattggtggaacgccatcctggagggagaagagcccatcgacattgacaagatcaacaaggagcgctccatggccaccgtggatgaggaggaacaggcggtgttggacaggcttacctttgactaccaccagaagctgcagggcaagccacagagccatgagctgaaagtccatgagatgctgaagaaggggtgggatgctgaaggttctcccttccgaggccagcgattcgaccctgccatgttcaacatctccccgggggctgtgcagttttaatgaccagaaggaaaggaaaccctcgccggtggggaggcagagccttatcctcggctgcccttcttggctccctgcattccagggacttgctcgtcttgtttacccctagccatcctttctttcaagggtgaaccaggccttccaccctgaccttgcatctccagactgttccagagaaggtgcggggccagctgctatgtggtggccgctgtggctgacactgagtgaaggtgtttgaaatgcaggagaggatatcccagcaaattgggatcacatgcttttgtctccacagcaaccagccactgcaggcagcatgtctttcctcccctgctctctgcttgctgttgttttgacgctattctgcttgcatgtcttctggttgggatgtggagttgttgctggactctcaggcgaagctgaagtcattgaagtgtgtgaagctctgtgcttgcatgagggcaagcaaggaatggctgtgcctgaggctgctctgggaaactccttgccccttgacctcttttgagagcattcacgtggtcttcttgctcatccccttataaatgtgctttgcctgcctcagcctcatggtcagagcagtggagactggagccctgtttgcacgttctagttgttcggagaaagcctaggttctgggctcaggtccagatgcagcggggattctgttctctgactgtggcgaccttgctttggttcttgttgaagtgaaccaagcccggccaccacgcatggcatgctgtgcttggctccccataagacgtcctctttgggtgcacggtgtcaaagtgtgggcaggagtggagagctggtgccctcaggaggagaccacagcatgtccatcagctcagcagagctcgacagccacaagtcctgagaagctttgaccttgaagggcttctgggagaggaggaatttctgcatggggcgtgaaggcacactgtcccaccacaactgaaccagaagagagtgaagactcccctcttcccatcctctgtgccaggtgccagactgtgctccttggaacttatggcccaatcttacctgttctccagggactggtcactgcctcaggacccccaagcctatgccctgagccatggctgctgactgactccagccaaggtgcaaagacgagattatgagacaggtcctcaggcctgtgttccaagtactcacaggggctctgggtgcccatcgccgggagtatggttcagctgccaccggcactgtccatttgcctgtctgtcaagctcagagcatggataagccacacagcagggcagtgcaccctggcaccatgcacggccagcaagaatcaaggcccgcagatgctaagagggcctattgtcaggggaaggtccccgctcctgcacactctctatggatacttgggttgtgggggctctcttggagagtaagtttgtggtttgtttctggtttacagtggtggctgacaccccttgtaagaaagcattcctgggaagtcttctgtgggtccaaacatgttgctccgatcatcacaggagagcaaaaggccctagataccccctttggaatgtgagagtcttgttgtctgatatttgccactgagctggtgaagcccctctaaagagatctcgaccctggggagcagaattcttgtcatctatgaggggtcctgagaaagacttgtcattttttttcctggagttcttcccattgaggtcctaggatttgcacaccactgtcccacaagagctttcctgcctaatgaaaggaggtcttgtggtgtgtgtctcctctcttctctatagttcccgagttggcccccattgcagcccccaccctgtgggtagtcttccagaagtgatgcagtggtgtgagatgccctacaccttgttatttgggagactttgagagtcattcacttccatggtgactagtgtttgttttgcctgattttatattctgtgttgcatttctccccactccctgccctgctttaataaacagcaaaccaatatctaggaagaatgactgagggatagtattgggtattggccccatggcaggaacagccacttgcatctggtcccggtgccacactgcggtgcttggtgtggttgtggagcctgtccctgcgcgccttgctcccgttgagccacgctgtctggtgggtgattctctgccctgagccaccaccctggactggcccagtctccagagctggcacaccctgcctgttttctctttttagacacaacagccgcagtttggccagccactaagtcccaccagctgaggtccgaggaaagcggggtgactcatttcccttgtccagggcccgaggagagtgaggtgtccagcctgcaaagctattccagctccttggtgttggtttgcaataaattggtatttaagcagttctgggtctgcgtgtgacatttgctgctgagacagttctgtctgtgcatggtcattattgttgcattctagccttgaggtcccaggccaacgtacacagcaaacaccagcatggggaattcttaggggttgtttcccatctggtctgaatgcactgggcaagatctcaatacagctttagaaatcctgtaagattttgaccagtggggagaaaaagaatgtagctatagatcttacatcctttcaaacaggttctggaattctgtagttactggaaagcttagggtgagtgcagagttgggaatgattccactgaagggccacctttgcccaccaggctccaaggccctccttggtctccaggtgcatacctgctgttaactttgctgagccctcgcaatgggcttcctccaggacataacgccgtgtctgacacagaagtctcccaggtggctggccacctgcttcttcctcagtcagatctttgactctccttctctgtgcccaccccatctccagcctcctctgaccctgctcacccctggggacaggacctaggggtgtgagaagtacttggctgaataaagactgtttcaaaggcaatccttagaattgcctagcatactcccagggccagaaataacccgccagaaaggagaggcgtatttgcccctgaagagtgcaggagggagaacagttgagaagtgttttgtgtggaaatgtgtccaagaggcgtcagctgctgcacagagaactcactgcccagaacactgcgcttggggaacagacctcacccccacctcaaatctgctctccactgggcctgttggcagccagctcagctggggaagggacagcatgactcgctttgtcgatgaaaagcacgaagttgtcagcacagaacctggccagtccttgagaaactccctccttggtggtcagaggtcaagcagcccatgtggcccacggtcctgaagaactgggctatgtccctgaggctcctctctaccgtctgactgtggggtctggggaacaggcatttaaaccaggctgctgccctggggagtgcccactggacgccagggtgccccatagggacagggtcacaaagccctggggcttcccctgccagtcctggtgaggacagtgtggtcactatctcagagagacgaaaaatgaatattctgtcatttcagactaaactactcacccagctcacactaaaaaaaaaaaaaaaaa

SEQ ID NO: 1130 - DNA, 4833 bp, Homo sapiens
tgagtttgagtcaagctccgagtcctcgccctcatcctcggaggatgaggaggaggtagtggccagggaagaggaggaagaagaggaggaggaggagatggtggccgaggaaagcatggcttctgcaggccctgaggactttgagcaggacggggaggaagcggctctggccccgggggcacctgcagtggactcgttgggcatggaagaggaggtggacatcgagactgaggctgtggcccctgaggagcggccctccatgctggacgagccccccttgcctgtgggtgttgaagagccagcggactccagggagccgcctgaggaaccaggcctgagccaggaaggggccatgttgctgtctccagagccccctgccaaggaggtggaggctcgacccccattgtcccctgagcgagctccagaacatgacctggaagtggagccggagccccctatgatgctccccttgccgctgcaaccaccattgccgcccccacgaccaccccggccacccagcccaccgccggagcctgagaccacagatgcctcacacccatctgtccctccggagccccttgccgaggaccaccccccgcatactccaggcctctgtggcagcctggccaagtcgcagagcacagagacggtgccagccacaccaggcggggagcccccgctatcagggggcagcagtggcctgtccctgagctctccgcaagtgcccggcagccccttctcctacccagccccgtcccctagcttgagcagtgggggcctccctcggacacctggccgggacttcagcttcacacccaccttctccgagcccagcgggcccttgctcctgcccgtctgcccactccccactggccgacgcgatgaacgctccgggcccctggcctccccggtgctcctggagacgggcctgcccctccctctgccccttcccctgcccttgcccttggcattgcccgccgtcttgcgggcccaggctcgtgcgcccaccccgctgccacccctgctgcccgcccccctggcctcttgccctcccccaatgaagaggaagccgggccggccccggcgatccccaccatctatgctctccttggatgggcccttggtccgaccaccagcaggggccgcccttggaagggaactcctgctcctgccgggccagccacagacccccgtcttccccagcacccatgacccccggacggtgaccctggacttccggaacgcggggatcccagcccctccaccaccccttcccccccagccacccccacccccacctcccccacctgtagagcccaccaagctgccctttaaggagctagacaaccagtggccctccgaggccattcctccgggcccccgtgggcgcgatgaggtcactgaggaatacatggagttggccaagagccgggggccgtggcgccggccacctaagaagcgccatgaggacctggtgccacctgcaggctcgcccgaactctcgccaccccagcccctcttccggccccgctcggagtttgaggagatgaccatcctgtatgacatctggaacggtggcatcgatgaggaggacatccgcttcctgtgtgtcacctacgagcgactgctacagcaggacaatggcatggactggcttaacgacacgctctgggtctaccatccctccaccagcctctcttcagctaagaagaagaaacgggacgatggcatccgcgagcacgtgacgggctgtgcccgcagtgagggcttctacaccatcgacaagaaggacaagctcagatacctcaacagcagccgtgccagcaccgatgagccccccgcagacacccagggcatgagcatcccagcacagccccacgcctccacccgggcaggctcggagcggcgttcggagcagcgccgcctgctgtcctccttcactggcagctgtgacagtgacctgctcaagttcaaccagctcaagttccggaagaaaaagctcaagttctgcaagagccacattcacgactggggcttgttcgccatggagcccatcgcggctgacgagatggtcatcgagtacgtgggccagaatatccgtcaggtgatcgcagacatgcgggagaagcgttatgaggacgagggcatcgggagcagctacatgttccgggtggaccatgacaccatcatcgacgccaccaagtgcggcaacttcgcgcgcttcatcaaccacagctgcaaccccaactgctatgccaaggtgatcacggtggagtcacagaagaagatagtcatctactcgaagcagcacattaacgtcaatgaggagattacctatgactataagttccccatcgaggacgtcaagatcccctgcctctgtggctccgagaactgccgggggaccctcaactaggccccggcaccagactcaaaggatgtcagccgtagccctgggactcccgagcgtggagcccctggccccggggcccggccccccgcgcccgcccccatttcaggtgctgtcctctacccagcggccattcagggcctggcgccccacactaccccctggagcccctggctccggcccctccgcgggaaagggcttctctgtcgttcagcccacgtctctctcattttaacaaacgcccctttcaggatttctgtttaactccagcatcagcttctctctctccgtctctcctcccctctctctcttctctgtctcttctctctcccaccatcaccctcggcctcttcctgtgaatgctgctacgttgttttgtcttctctatttttttcctcgttgtgagaaaagacatttaaccgttgaaatgtgaaggtggaatcagagaggggccccgcgggggtctgcagaggcctcagtgtggctgtgcgtggcccgtgtcctggaagccacccggacctggacgcagggccaggtgctgtgggaaggatggaggcccccacggccttgacctcagaacactacgccctgaaagcgcccctcactgcccgtgggcacagtgaggagaccccacacctttccccacccgagctgcagcctgttccttccccagaggcctggggcaccactgacccggtggaccctgatggagctaagctgtcccaggcaggggtctccgctctgggctttccctgccacctcacaccccagcaccccctaaaccttgggttcaatgtttactttctcattcggatgccagcaacgcgggagcctctcggaggccccagtgcaggtgaggggcgctgagaacgcgggcagccactctcttctgcccttgccttcgccctgggtgggacagggctcccaagggcaggcgggtcccccagtcccgccattacgggttgtcagaccgtctgcgtgtggcattttttggcttataagcttcacccactcacccccaacccacaccccacatccccctaccggcagcccctcaacctaagaaggccagagcatatttattttcggagggagcagattacttctcccagagaaaggaaaatcttggaaaagatttaaaaacacaaatctaagccttgacggtttttttttcccttttgacccccttcccatctcttcagaatttattcccatggcttttttttttcttgtgcgtgtataaaatcaaaaggaaggggaaaaaggtttttgaagttcagaaccaacttctgtatatagaggctgccgcaaaggactttctcttgggaacattgtttcttgtagaaacatgcgggaagacattttttgctcatttctttgtacttccaaaaaaaaaggaaaaaaaagacaaaagcaagtccccccgtaccccagaaagcagaggaggcgtgtaaataatttctggaaagtgactgttgtgacccggagtcctcatcaagatgagcgcgctccatgagggagctgctcccaccctgcggacgcaggcggccggagcctctggtatctcagcttgtgtcaagcttgttatcatgtaaattctgtacaaagaattgttatttttctcttttttgttgttggtggttttgttgtgtgttttttgttgtttttttttttattcctttcccccaggccctctctatttgagactgtgcccgccggtttcaagatcaaggaaattggtggcaacaagacacagatggggtacctgggcacagcggcgaacttctcttccgtttgcggttttctgcctaattgtgcaactgaggaaataatttatttttcacatgaggaaatgcgtagcttgtagagacggctgattcaagttacatgtacagcctccaaagggctgtctccattctgtccccttcccataaaagaagtgggggtgttcgagaagaccagggaagggacccttgcctcacccctccccctggcctcaccttgctcccagccatcgtgcccagtgttaacctcggctggccttcactaaggggactagacctccctctccccaggagccccagccccagagtggtttgcaataaccaagatatgtgtcgagtcatttttctttcaactccctcatttttcattgaacaaatctctgcttttcaagagttgggggtttctgctattttttgctttctctccctccccctgcaaagatgagaaccaatgagttttagggatgtttgtgcgggtagactccatcatccatatgtaacttgttttgaagagaagtgtttccgttgtgtgtcttgatgtaaatatttgttcatatttttgtgaattcaatactatgtaccattgtattatagtaacttttataaagcaaaccataaatatactgacttttcttacag

SEQ ID NO: 1131 - DNA, 15575 bp, Homo sapiens
gaaatcttttaggcctttagatgttgttctggaaaaactttagtaatggatcaaaggaagaatgagagtattgttcctagtataactcaattagaagattttcttacagaacacaattccaatgttgtttggctccttgttgctaccattttgtcctgtggatggattatttacctcacatattataattcccggaatgttggtcttattttaacactagttcttaacagattatacaagcatggctatatccatattggttccttctctttctctgttctttctggaaaagtcatggttcgtgaaatctattacattacagaagacatgtctattaggattcaagatggattcatcatttttcggtggtggaaaatgtataacccaaaacagaagcaacatgatccaaaggcagaaaccaggttatacatcacagtcaatgactttgaatttcatgtctataatcgctcggatctttatggacgccttcaagagttgtttggtttggagccaacaataattccacctaagaaagatgatgataaaacacgggaaattggaagaacaagaacccaatcgaaaattgaaagagttaaagtaaaaacagaatcccaagaccccacatcttcatggagatcacttattccagtcataaaggtcaatgtgagcacaggacgtttggcctttggaaatcactaccagccgcaaactctgtgcatcaactttgatgatgctttcttaacttatactacaaaaccaccttcaagtcatcttgaccaattcatgcatattgtgaaaggaaagcttgaaaatgttcgagtcatgcttgttcctagtccaagatatgttggtcttcaaaatgatgaaccaccgagattaatgggagaaggttttgtggtgatgcagtcaaatgatgttgacatctactactacatggatgagccaggacttgttccggaagaaacagaagaaaatattgaaggagaaatgagcagtgaggattgcaaattacaagacttgcctccatgttggggactggatatagtttgtggtaaaggaacagattttaattatggaccatgggccgataggcagagagattgtttgtggaagtttttctttccacctgactatcaagttctgaaagtttctgaaattgcacagcctgggagaccaagacagatccttgcttttgaattacgaatgaatattattgcagatgctacaattgatttgctgtttaccaaaaatagggaaacaaatgctgtacatgtaaatgtaggagctggctcatatttagaaattaatattccaatgacagttgaagaaaatggttacactcctgctattaagggacaactcttacatgtggatgccactaccagcatgcaatatcggacccttttagaagcagaaatgttagcattccacatcaatgccagctacccccgaatatggaacatgccgcagacatggcagtgtgaattagaggtttataaagccacttaccacttcatctttgcacagaaaaacttctttacagatttaattcaagactggtctagtgacagtcctccagacattttttcatttgttccatatacgtggaattttaaaatcatgtttcatcagtttgaaatgatttgggctgctaatcaacacaattggatcgactgttctactaaacaacaggaaaatgtgtatctggcagcctgtggagaaacactaaacattgatttttctttgccttttacggactttgttccagctacatgtaataccaagttctctttaagaggagaagatgttgatcttcatttgtttctaccagactgccaccctagtaaatattctttatttatgctggtaaaaaattgccatccaaataagatgattcatgatactggtattcctgctgagtgtcaaagtggccagaaaacagttaaaccaaaatggcgcaacgttactcaggaaaagtctggttgggttgaatgctggactgtcccaagtgtcatgcttacaattgattatacatggcatccaatttatccacaaaaagcagatgaacagctgaaacaatcattatcagaaatggaagagacaatgctatctgtattaaggccatcccagaagacatcagacagagttgtttcttctccctctacttcttcacgcccacctattgatccctcagaacttccacctgataaacttcatgtagaaatggaactttctccagattctcagataactctctatggacctctactaaatgcctttttgtgtataaaggaaaactactttggggaagatgacatgtatatggattttgaagaggttatctcaagtcctgttttgtcactgtcaacatcatccagctctgggtggactgctgttggaatggaaaatgacaaaaaggaaaatgaaggttcagccaagtcaattcatccacttgccttgcgtccttgggatattactgtacttgttaatttgtacaaagttcatgggcgtcttcctgttcatggaactactgatggtcctgaatgccctacagctttcttggaaagactatgttttgaaatgaaaaaaggatttagggagaccatgctgcaacttatcctgtcacccctgaatgtgtttgtcagtgataactatcagcagcgaccccctgtggatgaagtactcagggaaggtcacatcaatttgtcaggtctccagctgagagcacacgctatgttctcagcagaaggtcttcctttgggaagcgattccttagaatacgcatggttaattgatgtgcaggctggaagtcttacagctaaggtcacagcaccacagctggcatgcctcttggagtggggacagacatttgtttttcatgtggtatgtcgggagtatgaactggaaagaccgaaatcagttataatatgtcagcatggaattgatcgtcggttctgtgaatccaagttgagttgtattcctgggccttgtccaacttcagatgatttgaaatatactatgattcgtttagcagtagatggagccgatatttacattgttgagcatggttgtgctacaaatataaagatgggtgcaattcgagttgcaaactgtaatctccacaatcaatcggttggggaaggaatcagtgctgcaattcaggattttcaagtgagacagtacattgagcaattaaataattgcagaattggacttcagcctgcagtgctacggagggcctattggcttgaagctgggtcagccaatttaggacttattactgttgatattgctttagctgctgaccatcattctaaacatgaggcacaaagacatttcttagaaactcatgatgccagaactaagaggttgtggtttttatggccagatgatatcctgaagaataagaggtgtagaaacaaatgtggttgtctcggtggctgcagattctttggtggcacagtaactggcctagatttcttcaaacttgaagagttgacaccttccagtagctctgcattttcaagcacaagtgcagagtctgatatgtattatggacagtctctgctacagcctggagaatggataattactaaagaaattcccaaaattatagatggtaatgtgaatggcatgaagaggaaagaatgggaaaacaaatcagtgggaatagaagtagagagaaaaactcagcaccttagtcttcaagtaccattacgatctcatagttcatcctcttcctcagaagagaacagtagttctagtgctgcacagcctttgttggctggtgaaaaggaaagtccttcatctgttgctgatgaccatttggttcaaaaagagttcttgcatgggacaaaaagagatgatggccaagcaagtatccctacagaaatttcaggaaacagccctgtgtctcctaatactcaggataagtcagtaggtcaatctcctcttagatctcccttgaaacgacaagcctctgtctgttccacccgtcttggaagtactaagagtcttactgctgctttctatggggacaagcagcctgtaacagttggagtccagtttagtagtgatgtctctcgaagtgatgagaatgtactagactcaccaaagcagaggagaagttttggttcattcccatatacaccatcagcagactctaattcatttcatcagtatcgatcaatggattccagcatgtcaatggctgatagtgaagcctacttttctgctgctgaggaatttgagcccattagcagtgatgaaggccctggaacttatccgggtagaaaaaagaagaaaaagcaaacccagcagattgactacagtaggggttccatatatcacagtgtagaagggccacttactggacatggagaaagcattcaggattccagaactctgccattcaaaactcatccttctcaggcttcatttgtttctgcgttaggtggagaagatgatgttatagaacatctatatattgtagaaggtgagaaaacagtggagagtgaacagattactccgcaacaacccgtgatgaattgttatcagacttaccttactcagttccaggtaattaattggtcagttaagcacccaaccaacaaaagaacctctaaatcctcattgcatcgtccccttgatctggatacaccaaccagtgaagaaagttcatcgtcatttgaacagctttctgttccaacttttaaggttatcaagcaggggctcacagctaattctttgctagacagaggcatgcaactttcaggatcaacttcaaatacgccgtatactccattggaaaaaaaactcgctgataacacagatgatgaaacattaacagaagagtggaccctggatcaaccagtgtcccagaccaggacaacagccatagttgaagtaaaaggaactgttgatattgttttgactcccctggtggctgaagctttagacagatatattgaagcaatggttcattgtgctagtacccgacatccagctgcaattgtagatgatcttcatgctaaagtcctcagggaagctgtccaaaatagcaagactaccttttcagaaaatttatcttccaaacaagacattagaggaacaaaaactgagcagtctacaataggaacgactaaccaaggacaagcacagacaaatcttacaatgaagcaagataatgtaacaattaaaggtcttcagactaatgttagcataccaaaggtaaacttatgtttgttacaagcctcagtggaagaatctccaactacggctcctagtaggagtgtgactcatgtttccctagtggcattgtgttttgacagaattgctacacaggttcgcatgaacagaggtgtggttgaagagacttcaaacaatgcagaacctggtagaacatcaaattttgataggtatgttcatgccacaaagatgcagcctcagtcatctggatctctcagatcaaatgctggagcagaaaaaggcaaagaaattgcagctaagttaaacattcatcgagttcatgggcaacttaggggtcttgatacaacagacattgggacctgtgcaatcactgctattccttttgagaagtccaaagttttatttactcttgaagagttggatgaatttacttttgtggatgaaactgatcagcaagctgttccagatgtaactcgaataggtcccagccaagaaaaatggggatggataatgtttgaatgtggacttgaaaatttaaccataaaaggaggaagacagtctggtgctgttttatataacagttttggaattatgggtaaagctagtgacacagaaaggggtggagtgctgacatccaataattcttctgattctccaaccggcagtggctataatactgatgtctctgatgataatcttccatgtgaccggacaagcccttcctcagacttaaatggaaattctgtttcagatgaacaggatgaaggagtcgaatctgatgatttgaaaaaagatctacctctgatgcctcctcctccagattcatgtagcatgaagttgaccattaaagaaatttggtttagttttgcagctcccaccaatgtgagatctcacacacatgcattttctaggcagctgaaccttttaagcactgcaacaccagctgttggtgcatggcttgttcccattgaccaactcaagtcatctttaaacaaattggaaactgagggaaccttgagaatttgtgctgttatgggatgcataatgacagaagcattagagaataaaagtgtacattttcccctaagaagtaaatacaacaggcttacaaaagttgctcgctttctccaagaaaatccttcatgtttactatgtaatatactacaccactatctgcaccaggcaaattactccatcattgatgatgctacaatgagcgatggacttcctgctttggtaactttgaagaaaggtttagttgcactggcaaggcagtggatgaagtttattgtggtgacaccagcctttaaaggagttagcttacatagaccagctcagcctctgaaacctcaaatagctatggaccatgaacatgaagatggacttggattggacaatgggggtggtcttcaaagtgataccagtgctgatggagcagaatttgagttcgatgcagccacagtcagtgaacacacaatgctattagaaggaacagctaaccggcctccacctggtagctctggacctgtaactggagctgagataatgaggaaactttctaaaactcatacccatagtgactctgcattaaaaataaagggcattcacccatatcattctctgagctataccagtggagacactgccactgattctccagtgcatgttggacgtgctgggatgccagtaaaggacagtccaaggaaggagagcctactcagctacctgactggaagcttcccaagcctgcacaacctcctggaaggtactcctcagagaagcagtgctgctgtgaaaagtagctccctaacgagaacaggaaatacagtagccactgatatgttatctgaacatcccttgctatctgagccatcatctgtgagtttctataattggatgtcaaatgctgtgggtaatcgaggaagtgtgttacaagaatctcctgttacaaaatcaggacacaatagtcttcccacaggtgttgcacccaatcttccaacaataccctcagcctcagatttcaacactgtcttgtctagtgaccaaaatactttggatgggacacattctcagcatagcaccagtcaggatgatgtggcaggtgtagaagaagcaaaccaagggtttcctgctgttcagcttgctgatgcacaggttgttttcaagcctcttctgagtcatacagggatccagtcacaggatacaatgccattctgctaccgaatgtactttggagaacacctttcattttcagggactttggactgcctcagagcagatattgtggattcagacacagccaaagagagaaaaggcaaaagagcaagaaggcaaggccatgtgaatcttcctccacttgagttcaaaccagcattaatgttgggaacctttagcatcagtgctgttgtaatggaaaagtccgtgtgcacccctcagaactctaccagtgccctttcttttcatgatctcagcaagcggtattataacacctttcactgcaactttactatttcctgtcagtcaataagccagcatgtagatatggctttggttcgtcttattcatcagtttagcacaatgatagatgacatcaaagcaactcagactgatattaaacttagcagatatacagccggatctgcttccccaacacctaccttcaaaaccagaaaacatcgggactttcgttcatctgactttagccgcagttctagaggaagtcttaatggtggcaatagagtaaataatgcaaagaacaaacggaccaacaatgagaataacaaaaaggaatctcgaaacaagaattcattaggaagatctgaaagaagaacatcaaaagtgtctaggaaaggttcaaaagatgtggtggatcacatgactattcatatggatgactctgattcaattacagtgtcagaacaaagtgagccttcagctgagtgctggcagaatatgtataaattgcttaacttctattcacttatctccgatccaacaggaatattggaaaagtcttcagaaacatttggaccagcaggagttcggagccctacagagccaacatgtaaagttgtgtttgagaatgaacaagacaacagcagtttgactaagactcagaggaaacgtagcttggtaacttctgaacctcagcatgttactctaatagtgtttgggattggcatggtgaaccgcacacacctagaggcagatattggtggactaacaatggaatcagaactgaagaggatccatggcagttttactcttaaggaaaaaatgaaagatgttttacatcaaaagatgactgagacttgtgctactgctcatattggtggggttaatattgtgctgcttgaagggattacaccaaatatacaactggaggattttcctacatctcctacaagtacagccaaacaagagtttctaactgtagtgaaatgtagtattgccaagtcccaagccctctacagtgcccaaagagggctgaagacaaacaatgctgctgtgttcaaagtaggagctatcagtatcaacattcctcagcaccctgccaccttacatagcatgatggttcgaagttctcaccaactatctaaacaaatctcagacctaatcagacagccttctacagccccacagcctgtaaaagaagatattgcaaccccactaccttctgaaaaaaccccaacaagtgttaatcaaactcctgttgaaacaaatgaatttcctcagctaccagaaggcttagaaaagaagcctattgttcttaaattcagtgccatgttagatggtatagccattggagcagcacttttaccatctctgaaagcagaatacaagatgggaagaatgagaagtcatggaatgacaggtgcacagacaagatttacatttgagctgccaaatcacagattgcgttttacttcaaaagtttctgccacagatatgtcaaccattcctccttctgccagtcttaaccttccccctgttaccatgtcagggaaatatataatggaagaacatgatagttattcggatcaggtgtggagtatagatgaactgccttctaaacaaggttactatttacagggaaattatctgcgttgtgtggcagaagttggttcctttgaacataatcttacaactgatcttctaaaccacttggtatttgtacagaaagtgttcatgaaggaagttaatgaagtaatacaaaaagtttctggtggggagcagcctattcctctctggaacgaacatgatggaacagcagatggagataaacctaaaattctcctctattccctaaacttgcagttcaagggtattcaagtaacggccactactccatcaatgagagctgtaagatttgaaactggattgattgaactggaactttctaaccgacttcaaaccaaagcttcaccaggaagtagcagctatctgaaactgtttggcaaatgccaggtggatttaaatctggcattaggacaaattgtcaaacatcaggtttatgaggaagctggttctgattttcatcaagttgcctattttaaaaccagaattggattaagaaatgccctccgagaagaaatcagtggttcttcagatagggaagctgtgcttattactttgaatagaccaattgtttatgcacagcctgtggcctttgatagagctgtgctgttttggctgaattataaggccgcctatgacaactggaatgaacaacgaatggctttacataaggatattcatatggctacaaaggaagtagtagatatgctacctggtatccagcaaacatcagcccaggcctttgggactctttttctccagctcactgtcaatgatctgggaatttgcctacctatcacaaatactgcacagtctaatcatactggagaccttgacactggttctgctttggtattaaccattgaaagtactctcatcactgcatgctcttcagagtctctggttagcaaagggcatttcaaaaacttttgtatccgttttgctgatggatttgagacatcatgggatgactggaaaccagaaattcatggggatttagtgatgaatgcctgtgtagttccagatggcacctatgaagtatgttcaagaactacaggacaagcagcagctgaaagcagtagtgctggaacctggacactcaacgtattgtggaaaatgtgtgggattgatgttcacatggatcctaacattggcaaaaggcttaatgctctgggcaatactcttacaacactgacaggagaggaagacatagatgacattgctgacttaaattcagtgaacatagctgacctgtcagatgaggatgaagttgatactatgtctcccactatccatactgaagccacagattatcgaagacaggcagcatctgctagccagccgggagaacttagaggaagaaaaattatgaagcgtatagtggatatcagagaactgaatgaacaggccaaagtaatagatgatctgaaaaaattaggtgcaagtgaaggaaccataaaccaggaaattcaacgttaccaacagttagaatctgtggctgtgaatgacattagaagagatgttcgtaaaaaattacggaggtccagtatgcgggctgcttccctaaaggataagtggggtttgagttacaaaccaagttacagccgatcaaaaagcatttctgcttctggaagaccacctcttaagcgaatggaaagggcaagttctcgagtaggagaaactgaagagctcccagaaatccgtgtggatgcagcatctcctggacctagagtaacttttaatatccaggatacatttccagaggagacagaactggaccttttgtcagtaaccattgaaggtccatcccattattcatcaaatagtgaaggatcatgttctgtgttcagttctcccaaaactccaggaggcttttcaccaggcattcctttccaaactgaagagggccgacgggatgacagtttgtcttctaccagtgaagattccgagaaggatgaaaaagatgaagaccatgagagggaaaggttttatatttacaggaaaccctcacatacgtctcgtaaaaaagcaacaggctttgctgctgttcatcagctatttacagaacgctggccaacaacaccagtcaatagaagtcttagtggcacagctacagagagaaatattgactttgaacttgatatacgggttgaaattgatagtggaaaatgtgtactccacccaaccacccttctacaagaacatgatgatataagtttgagaaggagttatgatcgaagttccaggagcttagatcaagattcaccttcaaaaaagaagaagtttcaaactaattatgcttctaccacccatttaatgaccggcaagaaagtgccatcatctctacagacaaagcctagtgacttagaaacaacagtattttacattcccggagttgatgtaaagttgcattacaattccaagacgctaaagactgaatcacctaatgcctccaggggatcttccttgccaagaacactgtccaaagagtccaagctgtatggtatgaaagatagtgcaacatctcctccttctcctcctttaccttccactgtccagagcaagactaacaccttacttcctccccagcccccacctattcctgcagccaaaggaaaaggaagtggaggagtaaaaacagccaagttatatgcctgggtagcacttcagtcattgccagaagaaatggttattagtccctgcctattagactttctggaaaaagctctggaaactatcccaattacaccagttgaaaggaattatacagctgtcagctcacaagatgaagatatgggacattttgaaataccagatcctatggaagaatcaacaacatcactagtgtcgtcttcaacatctgcttactcttccttccctgtagatgttgtggtttatgtacgagttcagccctcacagatcaaatttagctgtttaccagtatcaagagtagaatgcatgttaaagctgccatccctggatttggtgttttcttcaaaccgaggagaactggagactttagggactacatatcctgcagagactttatcccctggaggtaatgctactcagagtggaacaaagacttctgctagcaaaactggaataccaggttcatcgggattaggcagccctcttggccgaagtcgacatagtagtagtcagtcagacctgaccagttccagcagtagttcatctggcttgagcttcactgcatgcatgtctgacttttccctttatgtatttcatccatatggagcagggaaacaaaaaactgctgtttctggcctcacacctggatcaggaggattagggaatgtggatgaggagcccacttcagtcactggtcgaaaagattcactcagtataaaccttgagtttgtaaaagtgagtttgtcacggatcaggcgttcaggaggtgcctcattttttgaaagtcagtctgtaagcaagtctgcaagcaaaatggatactacgttaataaatatatctgctgtttgtgatatagggtctgcctcctttaaatatgatatgcgccgactcagtgaaattctggcatttccaagagcatggtatagaagaagtattgcaagacgtctattccttggagaccaaactataaatttgccaacatctggcccagggacacctgattccattgaaggggtaagccaacacctttcccctgaatcatcaagaaaagcttactgcaagacctgggagcagccaagtcagtcagcctccttcacccacatgcctcagtcacctaatgtgttcaatgagcatatgacaaacagcaccatgtcaccagggacagtaggacagagcctaaaatccccagcttccataagatcaaggagtgtatctgattcttcagttcctcgaagagattcactttcaaaaacatcaactccttttaacaaatcaaacaaagcagcaagccaacaagggaccccatgggaaacacttgtcgtgtttgctatcaacttgaagcaattaaacgttcaaatgaatatgagtaatgtaatgggaaatacaacttggacaactagtggtttgaagagccagggccgtctgtcagtaggaagtaatcgtgatcgagagatcagcatgtctgttggtctgggaagatcacaattagattctaaaggaggagtagttggagggaccatagatgtcaatgctttggagatggttgctcatatttctgaacatccaaatcagcaacccagtcacaaaattcagattactatgggttctactgaagctcgtgttgattacatgggctcaagtatcctcatgggcatcttcagtaatgctgatcttaagcttcaggatgaatggaaagtaaacttgtataatacattggattcaagcataactgataaaagtgagattttcgtccatggagatttgaagtgggatattttccaagtaatgatatcaaggtcaaccacaccagatctgataaaaataggaatgaagctccaggaatttttcacacaacaatttgataccagcaaacgagctctgtctacctggggaccagttccttaccttccgccaaagacaatgactagcaacctagaaaaaagttcacaagaacaattacttgatgcagcacatcatcgacactggcctggagtattgaaggtggtatcaggatgccacatatccttatttcagattccattaccagaagatggaatgcaatttggaggatcaatgagcttacatggaaatcatatgacactggcatgttttcatggtccaaattttcgttcaaaatcttgggccctttttcatttagaagaaccaaatattgctttttggactgaagctcagaaaatctgggaagatggctccagtgatcattctacatatattgtacaaacactagattttcacctgggtcataatactatggttaccaaaccatgtggtgctttggaaagtcctatggcaacaataaccaagataacaaggcgtcgccatgaaaatccaccccatggagtagcaagtgtgaaagaatggttcaattatgttacagctacaaggaatgaagagctaaatctgcttcgtaatgttgatgctaacaacactgagaatagcactactgtgaagaattctagtttgttgagtggattcagaggaggttctagctacaaccatgaaacagagactatctttgcattaccaaggatgcagcttgactttaaatccattcatgttcaagaaccacaggagccttcattacaggatgccagcctgaagccaaaagtagaatgtagtgtggtgacagagttcactgaccacatttgtgtgactatggatgctgagctcatcatgtttcttcatgatttagtatcagcttatcttaaagaaaaagaaaaagccatctttccacctcggattttatctactcgaccaggacaaaaaagtccaattattatacatgacgacaattcctctgataaagatagagaagatagcatcacttatactactgtggactggagagattttatgtgcaatacatggcatctagaacctactcttagattaatttcttggactggaagaaagattgatccagtaggtgttgattatattcttcaaaaattgggctttcatcatgctaggactactattcctaaatggcttcaaagaggagtcatggatccactggacaaggttctgtcagttcttatcaaaaagctcggtactgcactacaggatgaaaaggaaaagaaaggcaaagacaaagaagaacactaaaaaagtaatttgatctgtgaacaaattatgattgtgtctgttttattacactggagtgtttttttagtataataatttgaaatataactttaaaataattctaaatttgtggctataattaaaagtttgtaagttaacctgttctagttccatcattctgtgtacagtgaagtattgcatgataatgtaaattttgtgaaaaactagattaaaatatataactgcttgttatggtttataattatataatgtgcaatacaattcctgcatctttaaaatgtctgcagaataactgtgaatttttttgttattggattggccgtaacttttagaaaaaaatcttgttgatgataatgtgattttggggaggtcattaattgctttttcttttttaaatgtagacttatataaatacctgtttgtatatagcttgagtaattgtgatatgattgtataccactaaaatattgttaactattataataaagtcacagtaatggtttaagtctgta

SEQ ID NO: 1132 - DNA, 2829 bp, Homo sapiens
atggctgcgaagggcgcgcacggctcctacctgaaggtggagagcgagctggagcgctgccgcgccgagggccactgggaccgcatgccggagctggtccggcagctgcagacgctgagcatgcccggcggcggaggtaacaggcgaggcagcccgagcgcagcgttcacctttccggacaccgatgactttgggaaattgctgctggctgaggccctcctggagcagtgtttgaaggagaaccatgccaaaataaaagactccatgcctttgctggagaagaatgagccgaagatgagcgaagccaaaaattatctaagcagtatccttaaccatgggaggctctcgccacagtacatgtgtgaggccatgctgatcctgggcaaactgcattacgtggagggctcataccgagatgccatcagcatgtacgcacgggccgggattgatgacatgtccatggagaacaagcccctgtatcagatgcggctgctgtcggaggcttttgtcatcaaaggcctctctctggaacgcctacccaactccatcgcctcccgcttccgcctgacagagagggaggaggaagtgatcacctgttttgagagggcctcctggatcgctcaggtgttcctgcaggaattggagaagaccacaaataacagcacgtcgaggcatctgaaaggctgtcacccgcttgactatgagctcacctacttcctggaagctgccctccagagcgcctatgtgaaaaacctgaagaaggggaacatcgtgaagggcatgagagagctccgggaggtgctgcggactgtggagaccaaagcaactcagaacttcaaagtgatggcggccaagcacctggcgggggtcctgctgcactccctgagtgaggagtgctactggagccccctgtcccaccctctgcctgagttcatgggcaaggaggagagttctttcgccactcaggccctgcggaaacctcacctctatgaaggagacaacctctactgccccaaggacaacatcgaggaagccctcctgctcctcctcatcagcgaatccatggctgactccagagctcagccttgccgggatttccgggcatcccggcaccctctcctgggccatctaagtccatgggggcatgggcagcactcaccaactgtggcaacagggcagccatcagaacccctggccaccagtctctcagtgactgagctgtcccccagggcaactcgagatgtggtgctgagccgggtgccggagcaggaggaggaccggacagtgagcttgcagaatgccgcagccatctatgacctcctgagcatcacgttgggcagaaggggacagtacgtcatgctctcggagtgcctggagcgagccatgaagtttgcgtttggagaatttcacctttggtaccaggtggccctctccatggtggcttgtgggaagtcagcctacgctgtgtccctgctgcgggagtgtgtgaagttgcggccctcggaccccaccgtgcccctgatggccgcgaaggtctgcatcgggtcccttcgctggctagaggaagcagagcactttgccatgatggtgatcagcctcggagaggaagccggggagttcctccccaagggctacctggctctgggtctcacctatagcctgcaggccaccgacgccaccctgaagtccaagcaagatgaattgcaccggaaggcactgcagacgctggagagggctcagcagctggcgcccagtgacccccaggtcatcctctatgtctcgctgcagctggccctcgtccgacagatctccagtgccatggagcagctgcaggaggccctgaaggtacgcaaggatgatgcccacgccctccacctgctggcactgctcttctctgcccagaagcaccaccagcatgccctggatgttgtcaacatggccatcaccgagcaccctgagaacttcaaacgacagcacatagttctgcttgtggcctttgccagcgtgccgagcactgctgttgatggcttccttctccccaaagctaaagaaagcctgatgttcaccaaggtgaagctggagcaggtgctgaaaggcccagaggaagccctcgtgacctgcagacaagtgctgaggctgtggcagaccctgtacagcttctcccagctgggaggcctagaaaaggatggcagcttcggtgagggcctcaccatgaagaagcagagtggcatgcacctgactttgcctgatgcccatgatgcagactctggctcccggcgggcttcgtccatcgccgcctcccggctggaggaggccatgtcagagctgactatgccctcttcggtcctgaagcagggccccatgcagctgtggaccacgctggaacagatctggctgcaggctgctgagctgttcatggagcagcagcacctcaaggaagcaggtttctgcatccaggaggcggcgggcctcttccccacttctcactcagtactctatatgcggggccggctggctgaggtgaagggcaacctggaggaggccaagcagctgtacaaggaggcgctcacggtgaacccagatggcgtgcgcatcatgcatagcctgggtctgatgctgagtcggctgggccacaagagcttggcccagaaggtgcttcgtgatgccgtggagaggcagagtacgtgccacgaggcgtggcagggcctgggcgaggtgctgcaggcccagggccagaacgaggctgccgttgactgcttcctcaccgcccttgagctggaggccagcagccctgtactgcccttctccatcatccccagagagctctga

SEQ ID NO: 1133 - DNA, 4858 bp, Homo sapiens
agtcggaagttgcctgagcagatcccagccggctggctcgagtggccttcgtcgtcccttggcgccctgggagagtcgctgacgggtggactgacggaccgcctgaggacggccggccagggcggtgaaagcgccagccctatggcgcgggtcgcgtgaggcggaaggccgaggacggccggcggcggcgcccgccccggcgatgcgggccccgcccgtcgcctcaggtgccatttggattgtactttagtggcacgatgtactctgagtggaggtcactgcatttggtgattcagaatgatcaaggccataccagtgtgctgcacagctatccagagagcgttggacgagaggtggcaaatgctgtagtccgtcctcttgggcaggtgttaggtaccccttcagtggctggtagtgagaatttgttaaaaactgacaaagaagtaaaatggaccatggaagtaatttgctatggactgacccttccattggatggagagactgtaaaatattgcgttgatgtatatacagactggattatggctttagtgttgccaaaagattctattccattgccagttattaaagagcctaatcaatatgttcaaactatactaaaacacctacagaatctttttgtaccaagacaggaacagggttccagtcagattcgactatgcttacaggtcctgagagccattcagaaactggcccgtgagtcatctctcatggcccgagaaacttgggaagtcttactgttgtttcttctgcagattaacgacatacttctggccccaccaactgttcaaggtggcattgctgagaatctagcagagaagttgattggtgttctctttgaggtgtggttactagcttgtactcggtgcttcccaacacctccttattggaaaacagccaaggagatggtggctaactggaggcatcacccagcagtggtggagcagtggagcaaggtcatttgtgcactcacttccagattgctacgctttacatatggtccttcatttcctgcatttaaagttcccgatgaagatgccagtctgatccctccagaaatggataatgagtgtgttgcacagacgtggtttcgctttttacacatgttaagtaatcctgtggatttgagtaacccagctattataagctctactcccaaatttcaggaacagttcttgaatgtgagcggaatgccgcaagaattgaatcagtatccctgccttaaacatctgcctcaaatattttttcgtgccatgcgtggaatcagctgtctggtggatgcattcttaggtatttctagaccccgatcagacagtgctcccccaacacccgtgaatagattaagtatgcctcaaagtgctgctgtcagtaccacccccccacataaccggaggcaccgggctgttactgtgaataaggccaccatgaagacaagcacagttagtactgctcatgcctctaaagttcagcaccagacgtcctccacctctcctctgtcaagtccaaatcagactagttcagaaccccggccactgcctgcccctcggagaccaaaggttaacagcatcttgaatctctttggatcatggttatttgatgcagcatttgttcactgtaaacttcataatgggataaacagagacagcagcatgactgccattacaacacaagctagcatggagtttcgacggaaagggtcacaaatgtccacagacaccatggtttccaatcctatgtttgatgcaagtgaatttcctgataactatgaagcaggaagagctgaggcttgtgggacactgtgtaggattttttgtagcaagaagactggagaagagattctgccagcttatttatccagattttacatgcttttaattcaaggtttgcagataaatgattatgtgtgccatcctgtcttggccagcgttattctaaactctcctcctttgttctgctgtgacttgaaagggattgatgttgtggttccttactttatttcagctcttgaaaccattttgcctgacagagaactctcaaaattcaaaagctatgtaaatccaacagaattgcgaagatcctccattaatatcctgctttctttgttgcccctccctcatcattttggcacagtcaaatctgaggtggtcctggaaggaaagtttagtaacgatgacagctcttcttatgataaaccaataacttttctgtccctgaagttgagacttgtgaatatattaataggtgccttgcaaactgaaacggaccccaacaacacccaaatgatattaggggcaatgttaaatattgttcaagattcagcacttttggaagccattggttgccagatggagatgggtggtggagaaaataacctgaagagtcatagtcgcaccaatagtggtattagttcagcaagtggtggaagcacggagcccacgactcccgatagtgagagacctgctcaagctctcttaagagattatgctcttaatacagattcagctgctgggctcctgattcgcagcattcatctcgtcacccaaagactcaactcccagtggcgccaagacatgagcatatcactggcagctctggagctcctctctggccttgcaaaggtaaaagtgatggttgactcaggagaccggaagcgagccatcagttctgtgtgcacctacattgtttatcagtgtagtcggccagctcctttacactccagggatctgcactccatgatagtggcagcttttcagtgtctctgtgtctggctgacagagcaccctgatatgcttgatgaaaaggactgccttaaggaagtactggagattgtggaactgggtatctcaggaagtaagtccaagaacaatgagcaagaggtcaagtacaaaggagataaggagccaaaccctgcatctatgagggtaaaggatgctgctgaagccaccctaacatgcattatgcagttgctcggcgcatttccttcacctagtggtcctgcctctccttgtagtcttgtgaatgagaccactttgattaaatactccaggctgccaaccataaacaagcatagtttccggtactttgtcttggataacagtgtcatcctggcaatgctggaacaacctcttggaaatgagcagaatgattttttcccctctgtcactgtgctggtccggggaatgtctggaagacttgcttgggcacaacagctttgtcttttacccagaggagcaaaagcaaatcagaagctttttgtacctgaacctcgcccagttcctaaaaatgacgttggatttaaatattctgtgaaacatcggccatttcctgaagaggtggacaagattccttttgtgaaagcagatctcagcattccagatttgcatgaaatagtcactgaagaattagaagagagacacgaaaaattaaggagtggcatggcccagcagattgcttatgaaatacaccttgagcaacagagtgaggaggaattgcagaagagaagttttcctgacccagttacggattgcaagcccccgcctcctgcccaggaattccaaacagcccgcctttttctctcacactttggatttttgtccttagaagcactgaaggaacctgcaaatagtcgtctacctcctcaccttattgcacttgattccacgatacctggattttttgatgacattgggtatctggatctcttgccatgtcgtccttttgacacagtttttattttctatatgaagccaggtcagaaaacgaaccaagagattttaaagaatgtggagtcttccagaactgttcagccacatttcctagaatttttgctttcccttggctggtcagtagatgtgggcagacaccctggttggactgggcatgtttctaccagttggtctattaattgttgtgatgatggtgaaggatctcaacaagaagtgatttcctctgaagatattggagctagcattttcaatggacagaagaaggtgctgtattatgctgatgcccttacagaaattgcttttgtggttccttctcctgtggagtccttaactgattcattggaaagtaacatctcggaccaagatagtgattcaaatatggatcttatgccaggaattctgaaacagccatccctgacacttgagcttttccccaatcatacagacaatcttaattcctcacagaggctcagtcccagttccagaatgaggaagctgcctcagggtcgccctgttcctccccttggacctgagacaagagtttctgtagtctgggtggaacgctatgatgatatagaaaactttcccctctcagagctgatgacagagatcagtactggtgtggaaactactgcaaatagtagcacttcactgagatctacaactcttgaaaaagaagttcctgtcatcttcatccaccctttaaacactggattattccggataaaaattcaaggagccactggaaaatttaatatggtcatccctcttgtggatgggatgattgtcagcaggcgagctcttggctttctggtgaggcagactgtaattaacatttgtagaagaaagagactggaaagtgactcctacagtcccccccatgtccgccggaaacagaaaatcaccgacattgtcaacaagtaccggaacaagcagctggagccagagttttatacttcacttttccaggaggttggactcaagaactgcagttcttagaccactgaatttctaagactgttgaactccagtttgggaactataacacagcagaacagtttgataggtgatcactgtaaaaataaaaacaaatcactccaaaaaaaaaaaaaaaa

SEQ ID NO: 1134 - DNA, 8847 bp, Homo sapiens
atggaagaaatcctgaggaagctgcagaaggaggcgtccgggagcaagtacaaagccatcaaggagagctgcacctgggccctggaaactctaggtggtctggataccattgtcaagatccctccacatgtactgagggagaaatgcctgctgcctctccagttggctttggaatccaagaatgtgaagctggcccaacatgctttggcagggatgcagaagcttctgtcggaagagaggtttgtatccatggaaacagattctgatgagaagcagctgctcaatcagatactgaatgccgtgaaagtgacgccttcgctcaacgaggacctgcaggtggaagtgatgaaggttttactatgcatcacctacacgccaacatttgatctgaatgggagtgccgtgctgaagatcgcggaggtgtgcattgagacgtacataagcagctgtcaccagcgtagcataaacactgctgtgcgggcaactctcagtcaaatgctgagtgacttgactttacagttacgacagaggcaggagaatacgataattgaaaacccagatgtcccacaggatttcgggaatcaagggtcaacagtagagtccctctgtgatgatgttgtctctgtactcaccgtcctgtgtgagaagctgcaagccgccataaatgacagccagcagctgcagcttctctacctggagtgcatcctgtctgtgctcagcagctcctcctcctccatgcacctgcacaggcgcttcacggacctgatctggaaaaacctctgccctgctctcatcgtgatcttggggaatccaattcatgacaaaaccatcacctctgctcacaccagcagcaccagtaccagcctggagtcggactctgcgtctccgggagtgtctgaccacggccgaggatcaggctgctcctgcactgcgccggccctgagcggacctgtggctcggactatctattacatcgcagccgagctggtccggctggtggggtctgtggactccatgaagcccgtgctccagtccctctaccaccgagtgctgctctaccccccaccccagcaccgggtggaagccatcaaaataatgaaagagatacttgggagcccacagcgtctctgtgacttggcaggacccagctccactgaatcagagtccagaaaaagatcaatttcaaaaagaaagtctcatctggatctcctcaaactcatcatggatggcatgaccgaagcatgcatcaagggtggcatcgaagcttgctatgcagccgtgtcctgtgtctgcaccttgctgggtgccctggatgagctcagccaggggaagggcttgagcgaaggtcaggtgcaactgctgcttctgcgccttgaggagctgaaggatggggctgagtggagccgagattccatggagatcaatgaggctgacttccgctggcagcggcgagtgctgtcctcagaacacacgccgtgggagtcagggaacgagaggagccttgacatcagcatcagtgtcaccacagacacaggccagaccactctcgagggagagttgggtcagactacacccgaggaccattcgggaaaccacaagaacagtctcaagtcgccagccatcccagagggtaaggagacgctgagcaaagtattggaaacagaggcggtagaccagccagatgtcgtgcagagaagccacacggtcccttaccctgacataactaacttcctgtcagtagactgcaggacaaggtcctatggatctaggtatagtgagagcaattttagcgttgatgaccaagacctttctaggacagagtttgattcctgtgatcagtactctatggcagcagaaaaggactcgggcaggtccgacgtgtcagacattgggtcggacaactgttcactagccgatgaagagcagacaccccgggactgcctaggccaccggtccctgcgaactgccgccctgtctctaaaactgctgaagaaccaggaggcggatcagcacagcgccaggctgttcatacagtccctggaaggcctcctccctcggctcctgtctctctccaatgtagaggaggtggacaccgctctgcagaactttgcctctactttctgctcaggcatgatgcactctcctggctttgacgggaatagcagcctcagcttccagatgctgatgaacgcagacagcctctacacagctgcacactgcgccctgctcctcaacctgaagctctcccacggtgactactacaggaagcggccgaccctggcgccaggcgtgatgaaggacttcatgaagcaggtgcagaccagcggcgtgctgatggtcttctctcaggcctggattgaggagctctaccatcaggtgctcgacaggaacatgcttggagaggctggctattggggcagcccagaagataacagccttcccctcatcacaatgctgaccgatattgacggcttagagagcagtgccattggtggccagctgatggcctcggctgctacagagtctcctttcgcccagagcaggagaattgatgactccacagtggcaggcgtggcatttgctcgctatattctggtgggctgctggaagaacttgatcgatactttatcaaccccactgactggtcgaatggcggggagctccaaagggctggccttcattctgggagctgaaggcatcaaagagcagaaccagaaggagcgggacgccatctgcatgagcctcgacgggctgcggaaagccgcacggctgagctgcgctctaggcgttgctgctaactgcgcctcagcccttgcccagatggcagctgcctcctgtgtccaagaagaaaaagaagagagggaggcccaagaacccagtgatgccatcacacaagtgaaactaaaagtggagcagaaactggagcagattgggaaggtgcagggggtgtggctgcacactgcccacgtcttgtgcatggaggccatcctcagcgtaggcctggagatgggaagccacaacccggactgctggccacacgtgttcagggtgtgtgaatacgtgggcaccctggagcacaaccacttcagcgatggtgcctcgcagccccctctgaccatcagccagccccagaaggccactggaagcgctggcctccttggggaccccgagtgtgagggctcgccccccgagcacagcccggagcaggggcgctccctgagcacggcccctgtcgtccagcccctgtccatccaggacctcgtccgggaaggcagccggggtcgggcctccgacttccgcggcgggagcctcatgagcgggagcagcgcggccaaggtggtgctcaccctctccacgcaagccgacaggctctttgaagatgctacggataagttgaacctcatggccttgggaggttttctttaccagctgaagaaagcatcgcagtctcagcttttccattctgttacagatacagttgattactctctggcaatgccaggagaagttaaatccactcaagaccgaaaaagcgccctccacctgttccgcctggggaatgccatgctgaggattgtgcggagcaaagcacggcccctgctccacgtgatgcgctgctggagccttgtggccccacacctggtggaggctgcttgccataaggaaagacatgtgtctcagaaggctgtttccttcatccatgacatactgacagaagtcctcactgactggaatgagccacctcattttcacttcaatgaagcactcttccgacctttcgagcgcattatgcagctggaattgtgtgatgaggacgtccaagaccaggttgtcacatccattggtgagctggttgaagtgtgttccacgcagatccagtcgggatggagacccttgttcagtgccctggaaacagtgcatggcgggaacaagtcagagatgaaggagtacctggttggtgactactccatgggaaaaggccaagctccagtgtttgatgtatttgaagcttttctcaatactgacaacatccaggtctttgctaatgcagccactagctacatcatgtgccttatgaagtttgtcaaaggactgggggaggtggactgtaaagagattggagactgtgccccagcacccggagccccgtccacagacctgtgcctcccggccctggattacctcaggcgctgctctcagttattggccaaaatctacaaaatgcccttgaagccaatattccttagtgggagacttgccggcttgcctcgaagacttcaggaacagtcagccagcagtgaggatggaattgaatcagtcctgtctgattttgatgatgacaccggtctgatagaagtctggataatcctgctggagcagctgacagcggctgtgtccaattgtccacggcagcaccaaccaccaactctggatttactctttgagctgttgagagatgtgacgaaaacaccaggaccagggtttggtatctatgcagtggttcacctcctccttcctgtgatgtccgtttggctccgccggagccataaagaccattcctactgggatatggcctctgccaatttcaagcacgctattggtctgtcctgtgagctggtggtggagcacattcaaagctttctacattcagatatcaggtacgagagcatgatcaataccatgctgaaggacctctttgagttgctggtcgcctgtgtggccaagcccactgaaaccatctccagagtgggctgctcctgtattagatacgtccttgtgacagcgggccctgtgttcactgaggagatgtggaggcttgcctgctgtgccctgcaagatgcgttctctgccacactcaagccagtgaaggacctgctgggctgcttccacagcggcacggagagcttcagcggggaaggctgccaggtgcgagtggcggccccgtcctcctccccaagtgccgaggccgagtactggcgcatccgagccatggcccagcaggtgtttatgctggacacccagtgctcaccaaagacaccaaacaactttgaccacgctcagtcctgccagctcattattgagctgcctcctgatgaaaaaccaaatggacacaccaagaaaagcgtgtctttcagggaaattgtggtgagcctgctgtctcatcaggtgttactccagaacttatatgacatcttgttagaagagtttgtcaaaggcccctctcctggagaggaaaagacgatacaagtgccagaagccaagctggctggcttcctcagatacatctctatgcagaacttggcagtcatattcgacctgctgctggactcttataggactgccagggagtttgacaccagccccgggctgaagtgcctgctgaagaaagtgtctggcatcgggggcgccgccaacctctaccgccagtctgcgatgagctttaacatttatttccacgccctggtgtgtgctgttctcaccaatcaagaaaccatcacggccgagcaagtgaagaaggtcctttttgaggacgacgagagaagcacggattcttcccagcagtgttcatctgaggatgaagacatctttgaggaaaccgcccaggtcagccccccgagaggcaaggagaagagacagtggcgggcacggatgcccttgctcagcgtccagcctgtcagcaacgcagattgggtgtggctggtcaagaggctgcacaagctgtgcatggaactgtgcaacaactacatccagatgcacttggacctggagaactgtatggaggagcctcccatcttcaagggcgacccgttcttcatcctgccctccttccagtccgagtcatccaccccatccaccgggggcttctctgggaaagaaaccccttccgaggatgacagaagccagtcccgggagcacatgggcgagtccctgagcctgaaggccggtggtggggacctgctgctgccccccagccccaaagtggagaagaaggatcccagccggaagaaggagtggtgggagaatgcggggaacaaaatctacaccatggcagccgacaagaccatttcaaagttgatgaccgaatacaaaaagaggaaacagcagcacaacctgtccgcgttccccaaagaggtcaaagtggagaagaaaggagagccactgggtcccaggggccaggactccccgctgcttcagcgtccccagcacttgatggaccaagggcaaatgcggcattccttcagcgcaggccccgagctgctgcgacaggacaagaggccccgctcaggctccaccgggagctccctcagtgtctcggtgagagacgcagaagcacagatccaggcatggaccaacatggtgctaacagttctcaatcagattcagattctcccagaccagaccttcacggccctccagcccgcagtgttcccgtgcatcagtcagctgacctgtcacgtgaccgacatcagagttcgccaggctgtgagggagtggctgggcagggtgggccgtgtctatgacatcattgtgtagccgactcctgttctactctcccaccaaataacagtagtgagggttagagtcctgccaatacagctgttgcattttccccaccactagccccacttaaactactactactgtctcagagaacagtgtttcctaatgtaaaaagcctttccaaccactgatcagcattggggccatactaaggtttgtatctagatgacacaaacgatattctgattttgcacattattatagaagaatctataatccttgatatgtttctaactcttgaagtatatttcccagtgcttttgcttacagtgttgtccccaaatgggtcattttcaaggattactcatttgaaaacactatattgatccatttgatccatcatttaaaaaataaatacaattcctaaggcaatatctgctggtaagtcaagctgataaacactcagacatctagtaccagggattattaattggaggaagatttatggttatgggtctggctgggaagaagacaactataaatacatattcttgggtgtcataatcaagaaagaggtgacttctgttgtaaaataatccagaacacttcaaaattattcctaaatcattaagattttcaggtattcaccaatttccccatgtaaggtactgtgttgtacctttatttctgtatttctaaaagaagaaagttctttcctagcagggtttgaagtctgtggcttatcagcctgtgacacagagtacccagtgaaagtggctggtacgtagattgtcaagagacataagaccgaccagccaccctggctgttcttgtggtgtttgtttccatccccaaggcaaacaaggaaaggaaaggaaagaagaaaaggtgccttagtcctttgttgcacttccatttccatgccccacaattgtctgaacataaggtatagcatttggtttttaagaaaacaaaacattaagacgcaactcattttatatcaacacgcttggaggaaagggactcagggaagggagcagggagtgtggggtggggatggattatgatgaaatcattttcaatcttaaaatataatacaacaatcttgcaaaattatggtgtcagttacacaagctctagtctcaaaatgaaagtaatggagaaagacactgaaatttagaaaattttgtcgatttaaaatatttctcctatctaccaagtaaagttaccctatgtttgatgtctttgcattcagaccaatatttcaggtggatatttctaagtattactagaaaatacgtttgaaagctttatcttattatttacagtatttttatatttcttacattatcctaatgattgaaaactcctcaatcaagcttacttacacacattctacagagttatttaaggcatacattataatctcccagccccattcataatgaataagtcaccctttaaatataagacacaaattctacagtattgaaataaggatttaaaggggtatttgtaaactttgccctccttgagaaatatggaactaccttagaggttaagaggaaggcagtgttctgacttctttaggtgatctgaaaaaaacacccttatcatccagtgtaccatctagagatcaccacagaatccatttttttcccagttccacaaaacactctgtttgccttcagtttttactcactagacaataattcaagtttagaaacaggtaatcagctatttgatcttaaaaggcaatgaattgttgggatatcagtgaactatgttgtatacttttgaatttttacattttataaatggaattgaaagttggataactgctttttttaaattttccaacagaagtaacaccacagttgctttgtttctttttatagcttacctgaggttcagttcttctttgtgaacctgtgagtactccacagtttactgggggaaaaggcttcagtaaagcagaggctagaattacagtatttatacatagcaacttttcataaagtagaaaaattcaaaggaagctgtctcaatttgagaataccagctgggcacggtggctcacgcctgtaatcccagcacttactttgggaggccaaggtgggcagataacctgcggtcaggagtttgagaccaggctggacaacatggtgaaacctcgtctctactaaaaatacaaaaattagccaggtgtggtaggatgcacctgtaatcccagctacttaggaggccgagacaggagaatcgctcgaacccaggaggcggacgttgcagtgagccaagattgcaccattgcactccagactgggtgacaagagtgaaactccatct

SEQ ID NO: 1135 - DNA, 3249 bp, Homo sapiens
gcctggctccctctcgctgagacacacatacactcacacatacacaacccggcaggctcgtctgaacttgaagacaccccacattccaagatgcccgaggttcctgggaatgcctggggttcttcgatccggaaaatcctaccggcatcctcctagggagggattattattattatttttctttaatctggaagagaagagaacaagttgtgcttttccccccttcttcttgctaaatgccatggatataactgaataagcggctcagggctttccccgcgtggacgtccgaggccaccatctgcctgcattcgccggagccgccggagggtttagctcgagtctgtctcgggcggggaaggatgcgtggccgagccggggagcccgggcgccccgcggagccggcctcggtgccacccagccgggggtagatgctgcctcgcccagcatcctggagaggtgatggaagaggggaggattatcctctcttggttacagatggagaaactgagtcaggaatcatgacatcgatgacctacccaaggccccacagcgctgagtgaccagaccatggagaccctgcttggtggcctgctagcgtttggcatggcgtttgccgtggtcgacgcctgccccaagtactgtgtctgccagaatctgtctgagtcactggggaccctgtgcccctccaaggggctgctctttgtaccccctgatattgaccggcggacagtggagctgcgcctgggcggcaacttcatcatccacatcagccgccaggactttgccaacatgacggggctggtggacctgaccctgtccaggaacaccatcagccacatccagcccttttcctttctggacctcgagagcctccgctccctgcatcttgacagcaatcggctgccaagccttggggaggacaccctccggggcctggtcaacctgcagcaccttatcgtgaacaacaaccagctgggcggcatcgcagatgaggcttttgaggacttcctgctgacattggaggatctggacctctcctacaacaacctccatggcctgccgtgggactccgtgcgacgcatggtcaacctccaccagctgagcctggaccacaacctgctggatcacatcgccgagggcacctttgcagacctgcagaaactggcccgcctggatctcacctccaatcggctgcagaagctgccccctgatcccatctttgcccgctcccaggcttcggctttgacagccacaccctttgccccacccttgtcctttagttttgggggtaacccacttcactgcaattgtgagcttctctggctgcggaggctcgagcgggacgatgacctggaaacctgtggctccccagggggcctcaagggtcgctacttctggcatgtgcgtgaggaggagtttgtgtgcgagccgcctctcatcacccagcacacacacaagttgctggttctggagggccaggcggccacactcaagtgcaaagccattggggaccccagcccccttatccactgggtagcccccgatgaccgcctggtagggaactcctcaaggaccgctgtctatgacaatggcaccctggacatcttcatcaccacatctcaggacagtggtgccttcacctgcattgctgccaatgctgccggagaggccacggccatggtggaggtctccatcgtccagctgccacacctcagcaacagcaccagccgcactgcaccccccaagtcccgcctctcagacatcactggctccagcaagaccagccggggaggtggaggcagtgggggcggagagcctcccaaaagccccccggaacgggctgtgcttgtgtctgaagtgaccaccacctcggccctggtcaagtggtctgtcagcaagtcagcaccccgggtgaagatgtaccagctgcagtacaactgctctgacgatgaggtactgatttacaggatgatcccagcctccaacaaggccttcgtggtcaacaacctggtgtcagggactggctacgacttgtgtgtgctggccatgtgggatgacacagccacgacactcacggccaccaacatcgtgggctgcgcccagttcttcaccaaggctgactacccgcagtgccagtccatgcacagccagattctgggcggcaccatgatcctggtcatcgggggcatcatcgtggccacgctgctggtcttcatcgtcatcctcatggtgcgctacaaggtctgcaaccacgaggcccccagcaagatggcagcggccgtgagcaatgtgtactcgcagaccaacggcgcccagccaccgcctccaagcagcgcaccagccggggccccgccgcagggcccgccgaaggtggtggtgcgcaacgagctcctggacttcaccgccagcctggcccgcgccagtgactcctcttcctccagctccctgggcagtggggaggctgcggggctgggacgggccccctggaggatcccaccctccgccccgcgccccaagcccagccttgaccgcctgatgggggccttcgcctccctggacctcaagagtcagagaaaggaggagctgctggactccaggactccagccgggagaggggctgggacgtcggcccggggccaccactcggaccgagagccactgctggggccccctgcggcccgggccaggagcctgctccccttgccgttggagggcaaggccaaacgcagccactccttcgacatgggggactttgctgctgcggcggcgggaggggtcgtgccgggcggctacagtcctcctcggaaggtctcgaacatctggacgaagcgcagcctctctgtcaacggcatgctcttgccctttgaggagagtgacctggtgggggcccgggggacttttggcagctccgaatgggtgatggagagcacggtctaggtgggggtgggcatgctccctttcctgtgcgcagggtgggagaaggggaaagaatctcactggcaagtgtttgtggagtttccatggtgatgtttacatccagggacagtttcgtctccctgtcaatggcctcgtgtccccccctaccccgcaacacccacatcacctccccaccacccggccggggtgtgctcagggaatgtggactcgctcaaatgccggactgagccctgagtgtttggaaaggcgagactccgcctttctaatcacaaatgtagcctacaagcaagcggctttggattgcttatg

SEQ ID NO: 1136 - DNA, 4548 bp, Homo sapiens; identical to SEQ ID NO: 757

SEQ ID NO: 1137 - DNA, 6592 bp, Homo sapiens
actgtctcccgcccacctcagccttcgggctaggttgagtgagggctcttgggttagttcctgttaggccccggccgggggagtaggttgaagtctcctaagatgcccggtgggctggggcaccgggagctgtgaagggaacgtgagggggcggcgtagtggagacccacggcaggcctgaagaagagcggcggccgagcccgccttccctgcaccatgctcatagaggatgtggatgccctcaagtcctggctggccaagttactggagccgatatgtgatgctgatccttcagccttagccaactatgttgtagcactggtcaagaaggacaaacctgagaaagaattaaaagccttttgtgctgatcaacttgatgtctttttacaaaaagaaacttcaggttttgtggacaaactatttgaaagtctctatactaagaactaccttccacttttggaaccagtaaagcctgagccaaaaccactagtccaagaaaaagaagaaattaaagaagaggtatttcaggagccagcagaggaagaacgagatggcagaaaaaagaaatatcctagtccccagaagactcgttcagaatctagtgaacgaaggacacgtgagaaaaaaagagaagacgggaaatggagagactatgaccggtactatgagcggaatgaattgtaccgtgagaagtatgactggagaagaggcaggagtaagagtcggagtaagagtcgaggcctgagtcgcagtagaagccgaagtagggggcgcagcaaagaccgggatccaaataggaatgttgagcacagggaaagatcgaagtttaagagtgaaaggaatgacctggagagttcctatgtgcctgtgtctgcaccacctccaaactcttctgagcagtattcctctggggcacagtctattcccagcactgttactgtgatcgcacctgctcaccactctgaaaacacaactgagagttggtctaattactataacaatcatagctcttccaattcttttggtcgaaacctaccaccaaagaggcgatgcagagattatgatgaaagaggattttgtgtacttggtgacctttgtcagtttgatcatggaaatgatcccctagttgttgatgaagttgctctgccaagtatgattcctttcccaccccctcctcctgggcttcctcctccaccacctcctggaatgttaatgcctccaatgccaggtccaggcccaggcccgggcccaggtccaggcccaggcccgggcccaggtccaggtcctggccatagtatgagacttcctgttccccaaggacatggtcagcctccaccatccgttgtgcttcccataccaagaccacctataacacaatcaagcttgataaacagccgtgaccagcctgggacaagtgcagtgcccaatcttgcatcagtgggaacaagactacctcctcctttaccccagaacctcctttacacagtatcagaacgacagcccatgtactctcgtgaacatggtgctgctgcatctgagcgacttcagttggggacaccgcctcctctgttggcagctcgtttggtgccacctcgaaacctcatgggatcctccattggataccatacctcagtctccagccctacccctctggttccagatacatatgaaccagatggttacaacccagaagctcctagtattactagttctggtagatctcagtacagacagttcttttcaagaactcagacacagcgtcccaatctgattggcctaacatctggagatatggatgtaaatccaagagctgctaacattgtgatccagactgaaccaccagttcctgtttcgattaatagcaacataaccagagtagttcttgaaccagatagtcgaaaaagagctatgagtggtttggaagggccactcacaaagaaaccttggctgggaaagcaaggaaataacaatcaaaataaaccagggttcttacgaaagaatcagtatacaaacaccaaattagaagtcaagaaaatccctcaggaattgaacaacattaccaagctcaatgaacacttcagcaaatttggaactattgttaatatccaggttgcttttaagggtgacccagaagcagccctaatccaatatcttaccaatgaggaggccaggaaagccatttctagcacagaagcagttctaaacaaccgattcattcgagtcttgtggcatagggaaaataatgagcaaccgacactacagtcctcagcacagctgctcctgcaacaacagcaaacacttagtcacctctcacagcagcaccatcacctgccacagcatctacatcagcagcaggtgctagtggcccagtctgctccttcaacagtgcacggaggtatccagaagatgatgagcaaaccacagacatcaggtgcatatgttcttaacaaagttcctgttaaacatcgtcttggacatgcaggtggtaaccagagtgatgcatcacatttgttgaatcagtctggtggtgctggagaagattgccagatattttcaactccaggccatccaaaaatgatttacagctcctcaaacttaaagacaccttcaaagctctgttcagggtctaaatctcatgatgttcaagaagtgcttaaaaaaaaacaggaagcaatgaagttacaacaagatatgaggaaaaaaagacaggaagtgttagaaaagcaaatagaatgccaaaagatgttaatatccaagttagaaaaaaacaaaaacatgaaaccagaagaaagagcaaatataatgaagactttgaaagagcttggagagaagatctcacaattaaaagatgaattaaaaacatcttctgcagtctccacaccatctaaagtgaagacaaaaacggaggcccagaaggagttattagatactgaactggacctccacaagaggctgtcctcaggagaagacaccacagaattacggaaaaaactcagtcagttacaggttgaggctgcacggttaggtattttacctgtgggtcgaggaaagaccatgtcctctcaaggtcgaggaagaggccgagggcgtggaggaagaggaaggggctcactaaatcacatggtggtggaccatcgtcccaaagcactaacagttggaggattcattgaggaagaaaaagaagacttgcttcagcatttctcaaccgcaaaccaagggccaaaatttaaagaccgtcggctacagatatcatggcacaagcccaaggtaccatctatatccactgagactgaagaagaagaagtcaaggaggaggaaacagaaacctcagatttgtttttgcctgatgatgacgatgaagatgaagatgaatatgagtctcgctcatggcgaagatgaaatctgatgctagctgtataatttttaggaatattgtttagaagaacaacttttaaaaattatttaaaagaagtcaatgagccaaaaaaaatttttttatttttcttttcaacacagtaggttcaagaacagcaagtttgctatttaaacacatctcataactgtacatgatattaaagcaccaaaggcctagtgacttttacacagttgtgaagatccacagcaatgacatggataatctctagagccttattttccacaccaccttttttttgttgctgttggtgttggattatgatgtaaatgacagggtgttcagaaattttattttggattataatctactgataaaatttaattaaatgtcaaaatcacctgtaatcttttaactctcagttgttatggatgggtcatcagacagtaggaaatatttgtaattaaaatacccttttgctttcaagagtggtcttggaagaaaaatatgtttattttaattttaatttttttttttttttactttggaggagcccaatttgtattcagtctaaatttgtttttcatggtttttatgtgtggtagtactagttcagtgaaaatcacaacaaactgtgtgttcttaaatgctacagcaatggtagctagctctatagtatttccattctcttgtcatatgaactcctggacttttcctgctactgattcttagtttgctttgatatttagtgagcgctggttcggctggtctttttaaaaatttttataactcagaatgtaaaaggctttcacctattgcccctttctcgtcccccttttcttcctcttgcctttctattaataggcctgacttagtcatcattgatataagtggttcatttgggcaaccgcaggcagtctccaataaaaggttcaaaccagcacctggataaataagtgatgttttgatgagaatgatggaaggattttggggagaagagaatcaccagctttattttttccctcttttgaagcttcagttcagtatagttacacagaagggtttaaaaatgtctgaaattcttttcctaaatttaaaccatgatggtgaggtgactggggggtggggggtggaggtgggagggggttgagggctgagtatgctagtaataaatgggagtcatatatgactttgttcagatgaccttattttttcataattttgtagcttgttgctatccatgaacatacgcatccctcagtagacagtttcctttactgtgtgcatttttactgtacactgtatagagtagagtatctgttaagtaaaatatatatgtaaatttatgtcttcgtgttctgaatgttagatggaaaagcagaggagcaacactacactgtactgacccctgggaaaataaaatgattaatgtacctaggctgtcactttttcaaggatatacacatctgtgtttttatatatgtgtggtatgaaaatttgaaacctcctgttgtctccaaaagggtcttggtgaccactatatcaaggattttgtttgctgaggtaaagacaatttctcaatatagaaactattcactaagaacttaaaaccatcaggattctagatttacttagctataagaagttaaatcccacgttctgataatctttattcttctacatgttttcctggaatgatgtgtcaaaccagggtcatttttaagttcatataattttctttcataataatgaggacttcctttttctaggttattgttatatttctagtaacactgaaggtaaaataagcttataaaagaaggaaaacatcagaatggtgtatctagaatacacaatcttgctccttactcctccatcatctctaatgaaatttttcttgatgtctgtggctcagtcagtatatattttgaaagattcattgtggtgaatattttgagtcctgacagtttaaacgtgatagagggaacaaaggatttatatattttttgtacaaagttttttcttaaactgtataattttgtaaataatttgtttgggttttttttttgtgtactaaaactaccagcgtatagatttcaataagaattgttgtatttttgtatttggaaactgaaaattacagtaaataaatggaactctaagaaaaatttcagtagacagttcaacagaatgagattccttttcatatgatttttttgacctcaaaatggacatcttatttcactctcagtaaaaagttgaaaatttgactttttagtattgggggcagaagatagaagtgtgttaaagtgaaaaacagttttttcagtaaggtttgaggccctttctataagttttcagtacaccttaaacaggactaaaaatactttaaaagtgtgctttcaaagaattttaaaacatgtttgactcaaagatgaatttgaagtgagttaattataatactggaaaacttcaggttagcataaaatagtttatatatatcccctgccccctttgggatttacttccaccatcaaatcttcaactgttagaatttcacttaaaagtgaataactgccatacatgttttcttggcatcttcatttacagaaataacatacagcatctaaagcaagttctgtccctcttaatgtgtatgacatctttttaagtagctgatcagcaataatagccaccagttgactaggtcagcctgatatactagtggatcactgtccaagataaaaaggtaaccccaagtattgcaaaatttccctcaatttctttatgtaacattgaagaaatgttgttaccagctaagatgataaattggaaaacagtcttgttaaggtgaaaggggtccttggtgatggatcattatttcaaaaaagaaaaaaatcatgtgaaaaggaatagtggttcctcttgatgtatagtatgcctgtattatagtttttacaaaattgtgaacttgtgtaatagtataataggagatattgttgaatttctaactgtttatacatttaaattcatatatgtaatgtttgttttatcaattacaatctgaatttctaagaagcatgttgacttttgcaataaagatgcaatatggaatggttcacaattggaaaaaaaaaagaaaaaagatgaaagtattacaaatttaaaagaatttggaaaatttatgaaccattccaaaaattataacaatcaccaaaa

SEQ ID NO: 1138 - DNA, 1540 bp, Homo sapiens
gcagcttcccagggaggagcccaggggcatctccaacactcagcctttccctccggacccttttaaaagattcaacagcaccgtctctctccacttccatcctagaatgcagaatctgcaaagtgccttttgtaaagtttcttaagggacccatcccagccaaaatgaatcccagggaagaaaaagtaaaaataattacagaggagttcattgaaaatgatgaggatgcagacatgggaagacagaataagaactcaaaggttcgaagacagccaagaaagaaacagccaccaactgctgtccccaaggaaatggtgtccgaaaaatcccaccttggcaacccccaggagcctgtgcaggaggagcccaagacccgcctcctgagtatgacagtccggagaggcccacggagagagctggttgttaaaaagagcctgggcaggccaggcacggtgactcacgtctgtaatcccagcactttggaaggccgaggcgggtaaatcacctgaggttgggagttcaagaccagcctgaccaacatggagaaaccccatctctactaaaaatacaaaaaaattagccaggcgtggtggcgcatgcctgtaatcccagctacttgggaggctgaggcatgagaattgcttgaacctgggaggtggaggttgcagtgagccgagatcggagcactgcactccagcctaggcaacagagcaagactccatctcagaaaacaaacaaacaaaaaagagcctggaacctcctcccctctctcttgctccctctctcaccatgcgacacacctgtttccccttccccttctgacataagtgaaagcttcctaaggcctcaccagaggcagatgctggcaccatgcttattgcacagtctgcagaacagtgagccaaaataaacctcttttctttataaattacccagtctcagatattcctttatagcaatgcaaaatggactaacaatacataagttagggagtgttaattagaatggaaattaaatatgcagaaactcaaaggaagatgaaattgttagggaagacatatgtgttaacctagtgaggcttgaatcagatgtttggaagaaatgagggaggtttctgaggctcctggtgaccttgccattgaggacacatatacttctccccctacacacgccttttcttcttccccagtacaatgaacattaggaattacctgctcattgtagggaaaatgaccacccttcaggcattgcttttcatgaaaagtggattagacaagaggagaagtggttacactttttaattgttacataattgttagactgttttccctatggcaaagttgggaaataagtaactgttggaaactagaggcctttggaagcaagtagactcttagattggaaaaatgtggttctaatctaaaagcaatgatacaatgagagctgttatgaattaataaaaacagaaccaaaaaaaaaaaaaaaaaaaaaaaaaaaaaaaaaaaaaaaaaaaaaaaaaaaaaaaaaaaaaaaaaaaaaa

SEQ ID NO: 1139 - DNA, 2454 bp, Homo sapiens
atgtcggatacgcggcggcgagtgaaggtctataccctgaacgaagaccggcaatgggacgaccgaggcaccgggcacgtctcctccacttacgtggaggagctcaaggggatgtcgctgctggttcgggcagagtccgacggatcactactcttggaatcaaagataaatccaaatactgcatatcagaaacaacaggatacattaattgtttggtcagaagcagagaactatgatttggctctgagttttcaggagaaagctggctgtgatgagatctgggaaaaaatttgtcaggttcaaggtaaagacccatcagtggaagtcacacaggacctcattgatgaatctgaagaagaacgatttgaagaaatgcctgaaactagtcatctgattgacctgcccacatgtgaactcaataaacttgaagagattgctgacttagttacctcagtgctctcctcacctatccgtagggaaaagctggctctcgccttggaaaatgaaggctatattaaaaaactattgcagctgttccaagcttgcgagaacctagaaaacactgaaggcttacaccatttgtatgaaattattagaggaatcttattcctaaataaggcaactctttttgaggtaatgttttctgatgagtgtatcatggatgtcgtgggatgccttgaatatgaccctgctttggctcagccaaaaagacatagagaattcttgaccaaaactgcaaagttcaaggaagttataccaataacagactctgaactaaggcaaaaaatacatcagacttacagggtacagtacattcaggacatcattttgcccacaccatctgtttttgaagagaattttctttctactcttacgtcttttattttcttcaacaaagttgagatagtcagcatgttgcaggaagatgagaagtttttgtctgaagtttttgcacaattaacagatgaggctacagatgatgataaacggcgtgaattggttaattttttcaaggagttttgtgcattttctcagacattacaacctcaaaacagggatgcatttttcaaaacattggcaaaattgggaattcttcctgctcttgaaattgtaatgggcatggatgatttgcaagtcagatcagctgctacagatatattttcttatctagtagaatttagtccatctatggtccgagagtttgtaatgcaagaagctcagcagagtgatgacgatattcttcttattaatgtggtaattgaacaaatgatctgtgatactgatcctgagctaggaggcgctgttcagttaatgggacttcttcgtactctaattgatccagagaacatgctggctacaactaataaaaccgaaaaaagtgaatttctaaattttttctacaaccattgtatgcatgttctcacagcaccacttttgaccaatacttcagaagacaaatgtgaaaaggataatatagttggatcaaacaaaaacaacacaatttgtcccgataattatcaaacagcacagctacttgccttaattttagagttactcacattttgtgtggaacatcacacatatcacataaaaaactatattatgaacaaggacttgctaagaagagtcttggtcttgatgaattcaaagcacacttttctggccttgtgtgcccttcgctttatgaggcggataattggacttaaagatgaattttataatcgttacatcaccaagggaaatctttttgagccagttataaatgcacttctggataatggaactcggtataatctgttgaattcagctgttattgagttgtttgaatttataagagtggaagatatcaagtctcttactgcccatatagttgaaaacttttataaagcacttgaatcgattgaatatgttcagacattcaaaggattgaagactaaatatgagcaagaaaaagacagacaaaatcagaaactgaacagtgtaccatctatattgcgtagtaacagatttcgcagagatgcaaaagccttggaagaggatgaagaaatgtggtttaatgaagatgaagaagaggaaggaaaagcagttgtggcaccagtggaaaaacctaagccagaagatgattttccagataattatgaaaagtttatggagactaaaaaagcaaaagaaagtgaagacaaggaaaaccttcccaaaaggacatctcctggtggcttcaaatttactttctcccactctgccagtgctgctaatggaacaaacagtaaatctgtagtggctcagataccaccagcaacttctaatggatcctcttccaaaaccacaaacttgcctacgtcagtaacagccaccaagggaagtttggttggcttagtggattatccagatgatgaagaggaagatgaagaagaagaatcgtcccccaggaaaagacctcgtcttggctcataa

SEQ ID NO: 1140 - DNA, 2550 bp, Homo sapiens
atgtcggatacgcggcggcgagtgaaggtctataccctgaacgaagaccggcaatgggacgaccgaggcaccgggcacgtctcctccacttacgtggaggagctcaaggggatgtcgctgctggttcgggcagagtccgacggatcactactcttggaatcaaagataaatccaaatactgcatatcagaaacaacaggatacattaattgtttggtcagaagcagagaactatgatttggctctgagttttcaggagaaagctggctgtgatgagatctgggaaaaaatttgtcaggttcaaggtaaagacccatcagtggaagtcacacaggacctcattgatgaatctgaagaagaacgatttgaagaaatgcctgaaactagtcatctgattgacctgcccacatgtgaactcaataaacttgaagagattgctgacttagttacctcagtgctctcctcacctatccgtagggaaaagctggctctcgccttggaaaatgaaggctatattaaaaaactattgcagctgttccaagcttgcgagaacctagaaaacactgaaggcttacaccatttgtatgaaattattagaggaatcttattcctaaataaggcaactctttttgaggtaatgttttctgatgagtgtatcatggatgtcgtgggatgccttgaatatgaccctgctttggctcagccaaaaagacatagagaattcttgaccaaaactgcaaagttcaaggaagttataccaataacagactctgaactaaggcaaaaaatacatcagacttacagggtacagtacattcaggacatcattttgcccacaccatctgtttttgaagagaattttctttctactcttacgtcttttattttcttcaacaaagttgagatagtcagcatgttgcaggaagatgagaagtttttgtctgaagtttttgcacaattaacagatgaggctacagatgatgataaacggcgtgaattggttaattttttcaaggagttttgtgcattttctcagacattacaacctcaaaacagggatgcatttttcaaaacattggcaaaattgggaattcttcctgctcttgaaattgtaatgggcatggatgatttgcaagtcagatcagctgctacagatatattttcttatctagtagaatttagtccatctatggtccgagagtttgtaatgcaagaagctcagcagagtgatgacgatattcttcttattaatgtggtaattgaacaaatgatctgtgatactgatcctgagctaggaggcgctgttcagttaatgggacttcttcgtactctaattgatccagagaacatgctggctacaactaataaaaccgaaaaaagtgaatttctaaattttttctacaaccattgtatgcatgttctcacagcaccacttttgaccaatacttcagaagacaaatgtgaaaaggatttttttttaaaacattacagatatagttggagtttcgtatgtaccccttcacattcccattcccattctaccccctcttcctccatctctcaagataatatagttggatcaaacaaaaacaacacaatttgtcccgataattatcaaacagcacagctacttgccttaattttagagttactcacattttgtgtggaacatcacacatatcacataaaaaactatattatgaacaaggacttgctaagaagagtcttggtcttgatgaattcaaagcacacttttctggccttgtgtgcccttcgctttatgaggcggataattggacttaaagatgaattttataatcgttacatcaccaagggaaatctttttgagccagttataaatgcacttctggataatggaactcggtataatctgttgaattcagctgttattgagttgtttgaatttataagagtggaagatatcaagtctcttactgcccatatagttgaaaacttttataaagcacttgaatcgattgaatatgttcagacattcaaaggattgaagactaaatatgagcaagaaaaagacagacaaaatcagaaactgaacagtgtaccatctatattgcgtagtaacagatttcgcagagatgcaaaagccttggaagaggatgaagaaatgtggtttaatgaagatgaagaagaggaaggaaaagcagttgtggcaccagtggaaaaacctaagccagaagatgattttccagataattatgaaaagtttatggagactaaaaaagcaaaagaaagtgaagacaaggaaaaccttcccaaaaggacatctcctggtggcttcaaatttactttctcccactctgccagtgctgctaatggaacaaacagtaaatctgtagtggctcagataccaccagcaacttctaatggatcctcttccaaaaccacaaacttgcctacgtcagtaacagccaccaagggaagtttggttggcttagtggattatccagatgatgaagaggaagatgaagaagaagaatcgtcccccaggaaaagacctcgtcttggctcataa

SEQ ID NO: 1141 - DNA, 8715 bp, Homo sapiens
acgtgacctttgctcatggcggcggcggcggcggcggcggtgctggtggtgctcggcggccggagccggatcctgtagccgggtgtgggcccgtgtctgtccgtccctccttcggccccctctcttgtcttccggagtgtggctggcggagctgggatggcggaacgaggcctggagccgtcgccggccgcggtggcggcgctgccgcctgaagtgcgggcgcagctggcggagctggagctggagctctcggagggggacatcacccagaagggctatgaaaagaaaaggtccaaactcctatctccttacagcccgcagacacaagaaactgattcagcagtacagaaagaacttagaaaccagacacctgctccatctgcagctcaaacttctgctccctctaagtaccaccgaactcgatctgggggagccagggatgaacgatatcgatcagatatccacacagaagcagttcaggctgcactggcaaagcataaagaacagaagatggctttgcccatgccaaccaaaaggcgatccacatttgttcagtctcctgcagatgcctgcacacctcctgacacatcttcggcctctgaggatgagggctctctgagacgccaagctgcgctctctgctgccttgcaacagagcttacagaatgctgagtcctggatcaaccgttcaattcagggatcgtccacttcttcatccgcatcttctacgctgtcccacggagaggtcaaaggaaccagtgggtctctagctgatgtatttgccaatactcgaatagagaatttctctgctcctcctgatgtcactacaactacctcttcctcctcatcatcttcctcaattcgcccagcaaacattgacctgcccccctcggggatagttaaaggcatgcacaaaggatccaacaggtccagccttatggatacagctgatggtgttcctgtcagtagcagagtatctacaaaaatccagcagcttctgaacactctgaaacgacccaaaaggcctcccttaaaggaattttttgtggatgactctgaagaaattgtggaagtacctcagccagaccccaaccagcccaagccggagggacggcagatgacccctgtgaaaggagagcctttaggagtcatctgtaactggcctcctgctcttgaatctgccctgcagcgctggggtaccactcaagcaaaatgctcctgtctgactgcactggacatgacagggaaaccagtttacactcttacatatggaaagttgtggagcagaagtttaaagttggcctacacacttcttaataaactggggaccaaaaatgaacctgtgttaaaacctggagacagggtagccctggtttaccccaacaatgatccagtcatgtttatggtggctttctatggatgcctcctggcagaagtgattccagtgcctatagaggtacctcttaccagaaaggatgctggaggtcagcagattggcttcttgctaggaagctgtggtattgccttagctcttaccagtgaagtttgtctaaaaggactgccaaaaacccagaatggagaaattgtacagtttaaaggttggccccggctcaaatgggttgtaacagattccaagtacctttcaaagccaccgaaagactggcagccacacatctcacctgctgggacagaaccggcatacattgagtataaaacaagcaaagaagggagtgtaatgggagttacagtatcccggcttgcaatgttgtctcactgccaagctctgtcgcaggcctgcaattattctgaaggggaaacaatagtaaatgtcttagactttaagaaggatgctgggctgtggcacggcatgtttgcgaatgtaatgaataagatgcacacaatcagcgtaccctactctgttatgaaaacctgtcctctctcttgggtccaaagagtacatgctcacaaagccaaggtagctttagtaaaatgtcgggacttgcactgggctatgatggcacatcgggaccaaagagacgtgagcttgagttccctccgaatgttaattgtgactgatggagctaacccctggtccgtgtcatcctgtgatgccttcctgagtctgttccaaagtcatggactgaagcctgaggccatctgtccgtgcgccacgtctgctgaagccatgactgtagcaatccgcaggcctggagttccaggagcccctttgccaggaagagccattctctcaatgaatggattgagctatggggtaatacgggtcaatactgaagataaaaattcagcactgacggtccaggatgtagggcatgtaatgcctggtgggatgatgtgcattgtgaaaccagatggacctccccagctctgcaaaacagatgaaattggagaaatctgtgttagctccagaactggaggcatgatgtactttgggcttgctggtgtgacaaaaaatacatttgaggtaattccagtgaattctgcaggctctcctgttggggatgtgccattcatccgatcaggattgctggggtttgtagggccgggtagtttggtgttcgtggttgggaaaatggatggcttactgatggttagtggtcgaagacataatgctgatgacattgttgctactggattggctgtagaatcaataaagactgtttatagaggaagaattgctgtgttttctgtgtctgtattttatgatgagcgcattgtggtggttgcggaacaaagacctgatgcttctgaggaagatagtttccagtggatgagccgcgtgctgcaggcgatcgatagcattcatcaagtgggggtttattgtcttgctctggtgccagccaatacattgccaaaaactccactaggaggaatccatatatctcagacgaaacaactctttctggagggatcactgcatccttgcaacatcctcatgtgcccccatacatgtgtgacaaacttgccaaagccccggcaaaaacaaccaggtgtaggccctgcttccgtgatggttgggaatctggttgctggaaaacgtatagcacaagctgctggaagggatctgggacaaatagaagagaatgatttggtgaggaagcaccagtttctggcagagatcctacagtggcgagcccaggcgactcctgaccatgtactcttcatgctgttaaatgccaagggaaccactgtatgcacagccagctgccttcagcttcataagcgagcagagaggattgcatctgttcttggtgataagggacatctaaatgcaggagataatgtggtgttgctctatccacctggcattgagttaatcgccgccttctatggctgcctgtatgcgggctgtatacctgtgaccgtcagacctccacatgctcagaacctcacggccacgctgcccactgtccgaatgattgttgatgtcagcaaagcagcctgtattctcaccagtcagaccctaatgaggctactgaggtcccgagaggcagcagcagctgtggatgtgaaaacctggccaaccatcattgacacagatgatttacccaggaaaaggttacctcagctgtataaaccgcccactcctgagatgttggcatatcttgattttagtgtctccacaactggcatgcttacaggagtgaagatgtcccactctgcagtgaacgctctgtgtcgagccatcaagctccagtgtgagttgtactcttctcggcagatcgccatctgccttgacccttactgtggacttggcttcgcgctctggtgtctctgcagtgtctattcaggccaccagtctgtcttaattcctcctatggagttagagaacaaccttttcctctggctctccacagtcaaccagtacaaaataagggacactttctgctcctattcagtgatggagctctgcaccaaaggtcttgggaaccaagtggaagtgctaaagaccagagggatcaacctctcctgcgtccggacctgtgtggtggtggcggaggagaggccccgcgttgcactccagcagtccttctctaagctcttcaaagacatcgggctgtccccgcgggctgtcagcaccacttttggatcaagagtcaatgtagcaatatgtttacagggaacctcagggcctgatccgactactgtgtatgtggatctgaaatcactaagacatgacagggttcgtctcgtggaacgtggcgcccctcagagtttgcttctctcagagtctggaaagattttacctggagtgaaagtggttattgttaatcctgagaccaaagggccggttggagactctcaccttggagagatttgggtgaacagtccccatacagccagcggctactacaccatctatgatagcgagactcttcaagctgatcatttcaacactcgcctcagctttggagatgcagctcagacactctgggctcggacaggataccttggttttgtccgccggaccgagctcacagcggccactggagagcgtcatgatgcattgtatgtggtgggagcgctggatgaaacactggagctgagaggattacgataccacccaattgatattgagacctcggtgtcccggatccacagaagcattgctgaatgtgccgtgttcacatggaccaacttgcttgtggtggttgtggaactgtgcggctctgaacaggaagccctagatctggtcccattagtgaccaacgtggtcctggaagagcattacctcatcgttggcgtcgtggttgtggtggacccaggtgtcatcccgatcaactccagaggagagaagcagaggatgcacctccgtgatagcttcctagctgaccagttagaccccatctacgtggcttataacatgtaaccagccttgtggggactgcagtgggccattctgaagaatcacaaagacagaagacctctggctaagagcaggcttcaaacgatgtgaaataagctgagatggctacatgatattcttcatctcatcctgtgggattctgcaatcataaaacacaggaaaggggaattctgtgatggcaaatgaaaaaaatgttaacatttggtagacatgtgctttgacatagcgtgagcagcacattactaaagcaattacatgcatgttgcatttttttcatctgttgtacatagttgtatttttatctaatgccattttagaattttctaagggaatttaatgaattcacatgaaaggggtagtctgagtgacacagttccccactccgtactgtattttgccattctgccgtagctagatgttctgtggggtttgttaacatggaactactcagctttctttcagtcaacccataagcaaatcagataacccactgactatgagaattactttatatagataattcttgactgtaaaacattttgaccagtgttttacaacatgtacataagaatacacataattcaactagagatttgaagaattggcttgtatagttataacaaccacagtagaaacatttctactttgagagaatttcaatattctcttaatgttgtgtaattgattaggtaactaaaaagcgcaaattgttggcaggttttgctgcacattgttctatgtctttgttggctggtgtattttataaactaaagctgcctatgtttctttttaaagctcgcattcccagaatcagcttaggcttctatgaattcagcctgtttctaaaagctgaaaatctcagtttaaaaatcaaaatgttaacacaaagctaagattcatcagagcccaccctattctaaggaaccacaataacttactctggccccagtgttaaaacgatctttcagatttagagtgactatgtaagaatttaggatttcctcttttccaggcacattgtaaactgtgtctacagtttatccatataacttctcttctgaaaactgaggagtgtcctctgttcttccagttcacgagggcagggggtttaaaacaagaatgataggccaggaaggcagtggggatccaccatcacatggaactgtaaggccatataactacacaaaactgaccaatctgggttgccaaagcagccaggcttatgctgaaaccggggaagtctgacatatgcaggaaactcttttgaaataactttggtgcccaggccaagtagaatgagatgagactgagtttggcctctggctcggtttcctttctttggtctgatacttcatgtatttgaatatagttaaatcgtattatttttttcttaacagaaatatttttaaaaatgaaaaagtactcaaaagtgagaagagttaacttgtcaaagcagaatggttctctttgacccactctggtctattgtgtaaatatttatttagactattttaataatacatattatttaccccactgtaacatcatgtaaactaagtatgtttttaaacaatttttaagacttgtaattaccctgaaaataaggtttataatgcaaagaccagctcctttgcggtggcagtgctctagggctgccattacacggtcttgtgatgtgactaaaagccactttgtgactcccttcatgtaatcctcttttcctccccactcctccacagagggcagagctcaggacatttgccagttccagatctctttttcagcattttcatggaattaatttacacgtaatgagggaagtcctaggatggatagaaaaaaagcacttacattggggcacacaggaaatcccagtgtctagcaatggtttggtttgcagagaacacagcctgatacttaattttcttaaaactatttttaatgatccactaaacaaagcaggggatcctgaagctgatataaataagtctagctctataatccccaagttctaaaagttatggttagatgctattctgtgggttgctttgataattcttactaacacagattagggtataggcatctagagatgcactgtccactgtaaatactataatgagagccacatctgtaatttaaatgtttctagtaaccacatttttttaaaagtaaaaagaaacccatggtattgatttaaatatattttatttaacccaatagctcaaaaacactatcatttcaacataggatcaatataaaaattattaatgagttattttactttttttcatattaggcctttgaaattcagtgtgtattaaacacatctcaattcaaaccatcaccatatttcaagtctttgtagccaaatgtgactagtggctaccatattagacagtgcagatctatactcattccttcaaatacattactctgttaatctcaaagtgtggccaactcccatttacttagaggctgattatctagttttgtagttcctcaggcctctaatttattttttgctttctgctttattgatcttttgcatgtcccccaaagccagaatctgctcatggaggaaggaaggctaagaactgtccttgaggaacttcatcagtaactctggtaaagcatcctgtggagggagaggagagcccagtcatttgcttagatggtgtttgtgggatcacctgcagatttaaagcctactctgccacagactcgagtaagaaaatgttctcttgatgacacagtgctcctactctatccacattaagtagcacttttgtggtagaactgattcttaaggcaggcctgaaaggccattactaatagaaacacagcctttccaatcctctggaacatattctgtctgggtttttaatgtctgtggaaaaaaactaaacaagtctctgtctcagttaagagaaatctattggtctgaaggtttctgaacctctttctggttctcagcagaagtaactgaagtagatcaggaaggggctgcctcaggaaaattcctagatcctaggaattcagtgagaccctgggaaggaccagcatgctaatcagtgtcagtgaatccacagtctttacttcctgcctcataaagggccaggtctccccagtaccaagtcctttcctcatgaagttgtgttgcctcaggctgtttagggaccattgcctgtcttggtcacatgagtctgtctccttactttagtccctgggcaatccttgcttaatgcttttgttgactcaacaagggcccgaggccttaggttttctattaaggtctctgccccaggcatggtgctctatatcttggccaaataaattactttccttgaatatccaggaatcttttagtctaaagcaatgaggagttatcacctcatcctcaaactccaacaagatctatgccttagtgttgtttttgttgtctgctttgatgtaaaagcaagagtatttggagcaagaagctgcaatgcgccaaatacacaataggccttttctttatcattcatacgacatttctggtttaggtgtatgtagttgggccatgttacttgtccagaggaagagactaaagatataagaataattttttagtcctaaatgctgttttgtttactttctgtcaagatatttacccgtgtcaaattcaaactacagtactgtgtaattatgtataaagtttttttatttatttgaagttagactagatatacgtttttaaatttaacatctggctggacagtgttctattaactcattgaatgtgtttcctttgtcttgtgttaataaatattgatgcctgattctgtttaa

SEQ ID NO: 1142 - DNA, 5459 bp, Homo sapiens
agagccgggctgctggtgcagcagaggctgaggcatcaggtgcagctgcatccggatctcctgccttggagcgtactccttgtctctaagtcgggaggcaggacgtggtcaggccggggctgtggaggtgcgctgtgtcccctgaggcctagaggattcgggctgcggcccgtcggaaccagtcagggaggcgcccacactcctgacaggataagatggcggcgatggcgcctggaggtagtggcagtggtggcggcgtgaatccatttctcagtgattcggatgaggacgatgacgaggtagctgcaacagaggaacggcgggcagtacttcggctgggcgccggaagtggcctagatcctggctctgcgggctcgctgtcgccacaggatcccgtggccttaggaagcagtgcgcggccagggctccctggggaggcgtcggcggctgcagtggccctggggggcaccggggagaccccggcccgattatcaattgatgcgatcgctgctcagctgttgcgcgatcaatacttgctgaccgccctggagctgcataccgagctgttagagagtggccgggagctgcctcggctgcgcgactacttctccaatccaggcaacttcgagaggcaaagtggaaccccgccggggatgggggcgccaggggtccctggagcagccggcgttgggggcgctggaggtcgggaaccgagtacagcgtcgggcgggggacagctcaatcgagctgggagcattagtacccttgattctttagactttgcaagatattcagatgatggtaacagggaaacagatgaaaaagtggcagtcctggagtttgaactacggaaagccaaggagaccattcaggccctccgagccaacctgacaaaggccgcagaacatgaagttcctttacaggaacgaaaaaattacaaatcaagtcctgaaattcaggagccaatcaaacctcttgaaaagagagctctaaacttcttagtcaatgaatttttattgaagaataactataagcttacatcaataaccttttcagatgaaaacgatgatcaggattttgaattatgggatgatgtaggattaaacattccaaaacctccagacttattgcaactctaccgggattttggaaatcatcaagtaactggaaaagatcttgtagatgtggccagtggagtagaagaagatgaattagaggcccttacaccaattataagcaaccttcctccaactcttgaaactccccagcctgcagagaactccatgttagtacagaaattagaagataaaattagtttgttaaatagtgagaaatggtcattgatggagcaaatcagaagacttaaaagtgaaatggacttcctcaaaaatgaacactttgccatcccagcagtttgtgactctgttcagcctcctttggatcagttgccccacaaagactctgaggacagtggacagcatccagatgtaaatagttcagacaagggaaaaaacacagacatccatctttcaatatcagatgaagctgattccactattcctaaagagaattccccaaattcattccccaggagagaaagagaaggaatgccaccttcttctctatcaagtaaaaagacagttcattttgataaacctaataggaaattgtctcctgcattccatcaagcactactctctttttgtcgaatgtcagcagatagtcgtttaggatacgaggtgtctcgtattgcagacagtgaaaaaagcgttatgttaatgctgggacgctgcctgccacacattgttcccaatgtgctattggcaaagagagaggagttgatccccctcatattgtgtacagcatgtctacatcctgagcctaaagagcgagatcagcttctccacatacttttcaatttgatcaagaggccagatgatgagcaaaggcaaatgatactgacaggttgtgtggcatttgcgcgtcatgttggaccaacacgtgtagaagctgaacttttaccacagtgttgggaacagattaatcacaaatacccagaaagacgactgcttgtggcagaatcctgtggagcactggcaccttaccttcctaaagaaatccgtagctccttggttctttcaatgttgcaacaaatgttaatggaagataaggcagatttggtaagagaagctgttatcaaaagccttggtatcattatgggatacattgatgatccagacaaatatcatcagggttttgaattgttgctgtcagccttgggtgatccctcagaaagagtagttagtgctacacatcaagtatttttaccagcttacgctgcgtggactacagaacttggaaatttacagtctcatcttatacttacactactgaacaagattgaaaaacttctcagggaaggagaacatggactggatgaacacaaactccacatgtatctttctgccttgcagtccttgatcccatctctctttgcattagtgctacagaatgcacctttctccagcaaagccaagcttcatggtgaagtgccacagatagaagtgactaggtttcctcggcctatgtcgcctcttcaagatgtgtccactattatcggaagtcgtgagcaattggcagtgctgctgcaactttatgactaccagctagaacaagagggtacaacaggctgggagagtttactgtgggttgtcaatcaattgttgccacaacttatagaaatagttggcaaaattaatgttacttcaactgcctgtgtccatgaattctccagatttttctggcgcctttgccggacatttggcaaaatttttacaaacactaaggtaaaacctcagttccaggagattttaagactatctgaagaaaacattgattcctcagcaggaaatggggtcctcactaaagctacagtccccatttatgcaacaggagtccttacgtgttatattcaggaagaagaccgaaaactgttagttggattcttagaagatgtaatgacgctgctttcattatctcatgctcctcttgatagcctgaaggcttcttttgtggaattgggtgcaaacccagcctaccatgagttactattaactgttttgtggtatggtgttgtccatacttcagcactcgtgaggtgtactgctgctagaatgtttgagctgactcttcgaggcatgagtgaagcgttagttgacaagcgggttgctccggcccttgttaccttgtccagtgatcctgaattctctgtcaggattgccacaattccagcctttggcactattatggaaacagtaattcaaagagagttgctggaaagagtgaaaatgcagttggcttctttcctggaagatcctcagtatcaagaccaacattctttgcatacagagatcataaaaacatttggtagagttggccctaacgcagaacccaggttccgagatgagtttgttataccacatttgcataagttagccttggtgaacaacttacagattgtggattctaaaagactggacattgctacgcatctttttgaagcctacagtgcactttcctgttgtttcatttcagaggatttaatggttaatcactttttacctggtctcagatgtttacggactgacatggaacatctctctccagagcatgaggttattttaagttccatgataaaagaatgtgaacaaaaagttgaaaacaagaccgtccaagagcctcaaggctcaatgtcaattgctgcaagcttagtgagtgaagatacaaagaccaagtttttgaacaaaatgggccagttgacaacatcaggtgccatgttggccaatgtatttcagagaaagaagtagaagcaggaaagaagcccccagtaaacactaagatggacctcaagccgactggttccttgtacttgaagtacttgccttttttgtttcctcagttttatgttcttgcattataattttatcctaacctccaaagatatttgcactgcttttaattactgctgtatatttgttgattttggagttacaactgtggtgatagaaaattgagttgatggtctgtaccaagtcccttgtctatgttcttgtctttcagaataatttttatataaatatatatatagtgaagaagttttttttaatttttggatgggatattcgcaaatatctgtattatacactaagctattacaatggtacttaaaataatgtaaatttgaagtcattgttataaaataataaagtggagattacttaagtatttaaattatgaaagaataatgcagactttttattgtttcttaactgactagaaagagccaccagcattactctgtgccttttggacatcagtttgtgtgttctgtaggaattgtgtgcattccattcacacagtatttctttaggatgctgtgatgatttgaattacaaatcctacagtcaatagctaaagacgaaaccttcatttcagaactctcatgaatattctttaagtgctatttaaacctccccagcacttagatgcatataatggacttacctgaggaaagacagcacataggcatggggagaggtaaccaaggtgaattttacaaactggtgtatagtagatttaaatgctcaaaaataaatgtaactgagaagagttaataattgtgagatttttcccaaattgagatacagaagaaaatatagtttgaatctgaaatttaacacttatttatgtaaaacactttatttaagatattttctaatgattttaattttagagagtaccttttcattctgtgtgttacagagaagtactgaaaagttaaggacacttgggggctacttttttccctctaaactaaaaaagacattggctgaattataactagttagttatcacctcgtcccttaaagtcagtgacctcctgtgtttgatgtatattacatagagtcttaagtcagtgtacagttccactggaatttgacagttgtctctacagtcatgcaactcgaagtagaaaagagtgctggacataggaagggggtgcttggtttgaggggttaatgtgaggcctttttgaaaaatgaatattttgataaaaagaattcttgttttagcacagttgatgcacataagtgattctcatatttgttgtataaactggtttaatacatttggaacatagttggattacattcatttcctgggaaagctagcttaccatacattcaagtttataaaacaatttgccataggcaaagccatttaaaaagttcattctgaaattatttcatttacctacagtgaaataattgtgaactaagtagtctttctgaaaactgttgggttctaggcattcctgagaaattgaaagtggctacctttcatgtcaaaaatgttgatctattataaataaaatgtttttgcatatgtttttgaaaaaa

SEQ ID NO: 1143 - DNA, 4299 bp, Homo sapiens
gtgacgcgaggtcacgtgacgggttgggcagcctgtgccgccgccgccgctttgtaagaggcacattggcagattttctattttgtacatacattattttgtatatactgtatatgatgacttcagtgagcagtgaccattgtcgaggtgctcgggaaaaaccacagatttcagcagcacaatcaacgcaaccacagaaacaagtggtacaggcaacagctgaacagatgcgtctcgctcaagtgatctttgataagaatgattcagattttgaagctaaagttaagcagcttatggaagtgacagggaaaaatcaggatgaatgcatagtggccctacatgattgtaatggagatgtgaacaaagctatcaatatattgctggaagggaattcagacacaacttcatgggagactgtagggtgtaagaaaaagaattttgcaaaagaaaattcagaaaacaaagagaatagagagaagaaaagcgagaaagaatcgagtcgtggacgtggaaacaacaaccggaaaggaagaggcggcaatcgtggcagagaatttagaggtgaagaaaatggaattgattgcaatcaagtggacaaaccttcagatcgtggcaagcgagcccggggtagaggatttggacgtggcagagggagaggggcaggaaggttctcaacccaaggcatggggacatttaatcctgcagactattcagattctacatctacagatgtgtgtgggacaaagctagtagtttgggaagctgctcagaatggtgcagatgagggaactgaactggcatcaaatactcacaacatagctcaggatctgtcaaacaaaagttcttatggactcaaaggggcttggaagaattctgtggaagagtggacaacagaagactggactgaagatctttctgaaacaaaggtcttcactgcctcatctgctccagcagagaatcacatcttacctgggcaaagcattgatctggtagccttgctccagaagcctgttcctcacagtcaagcctcagaagccaactcctttgaaacttcccaacagcagggctttggccaagcccttgtcttcacaaattcgcaacacaacaatcagatggcaccagggactggcagctccactgccgtcaactcctgttctcctcagagcctgtcatccgtccttggctcaggatttggagagcttgcaccaccaaaaatggcaaacatcaccagctcccagattttggaccagttgaaagctccgagtttgggccagtttaccaccaccccaagtacacagcagaatagtacaagtcaccctacaactactacttcttgggacctcaagcccccaacatcccagtcctcagtcctcagtcatcttgacttcaaatctcaacctgagccatccccagttcttagccagttgagccagcgacaacagcaccagagccaggcagtcactgttcctcctcctggtttggagtcctttccttcccaggcaaaacttcgagaatcaacacctggagacagtccctccactgtgaacaagcttttgcagcttcccagcacgaccattgaaaatatctctgtgtctgtccaccagccacagcccaaacacatcaaacttgctaagcggcggatacccccagcttctaagatcccagcttctgcagtggaaatgcctggttcagcagatgtcacaggattaaatgtgcagtttggggctctggaatttgggtcagaaccttctctctctgaatttggatcagctccaagcagtgaaaatagtaatcagattcccatcagcttgtattcgaagtctttaagtgagcctttgaatacatctttatcaatgaccagtgcagtacagaactccacatatacaacttccgtcattacctcctgcagtctgacaagctcatcactgaattctgctagtccagtagcaatgtcttcctcttatgaccagagttctgtgcataacaggatcccataccaaagccctgtgagttcatcagagtcagctccaggaaccatcatgaatggacatggtggtggtcgaagtcagcagacactagacactccaaagacaacaggccctccctctgccctcccgtctgtgagctccctgcccagcaccacctcctgcactgcacttctgccgtccacatcccagcacactggcgacctgactagcagccctctctctcagcttagcagttcgctctccagccaccagagcagcctctctgcacatgcagccctctcctcgagcacgtcacacacacatgccagtgtggagagcgcctcttcccaccagtcctcagccaccttctccacggcagcgacctccgtctcaagttccgcatcctcaggcgccagcctgtccagtagcatgaacaccgcgaacagcctctgtctgggtgggacccccgcgagtgcatccagcagcagtagcagggccgcgcccttggtgacctcaggcaaagcacccccaaacttacctcagggggtgcctcccctgctgcacaaccagtacctcgtaggtcccggaggactgcttcctgcctacccgatctatggctatgacgagctccagatgctgcagtcacggctgccagtggactactatggaattccctttgctgcacccacagcgcttgccagccgagatgggagcctagctaataatccatatccaggtgatgtcacaaagtttggccgtggggactctgcatcccctgcacccgctaccacaccagctcagccacagcagagccaatcacagacccaccacacagcccagcagcccttcgtgaatcctgcactgccacctggctatagctacactggtcttccctactacacaggcatgcccagtgccttccagtatggccccaccatgtttgtccctccagcctcagccaagcaacatggggtgaacctcagcactcccacacctcccttccagcaggccagtggttatggccagcacggctacagtacaggttatgacgacctgacccaggggacagcagcaggagactactccaaaggtggctatgctggatcatcgcaggcaccaaacaagtctgcaggttctgggcctggcaaaggagtatcagtgtcttcaagcaccactggtctacctgatatgactggttctgtctacaataagacacagacttttgacaagcagggatttcatgcagggacgcctccacctttcagcctgccctcggtcttgggctccactgggcccctggcctcgggagcggcccctggctatgcacccccaccattcctacacatcttgccagcccaccagcagccccactcacagctgctgcaccaccaccttccgcaggatgcacagagtggctcgggtcagcgcagccagcccagctccctgcagcccaagtctcaagcctccaaacctgcctacggcaactctccatactggacaaactaaacccagaagagaggggtgggctggggcaaggcttatcctgggcaggagagaacacacgagcacgtatttgggagcccagtgccctttcctagaattcccgacatgtgtcagccatgcctctgtggggagtctgcctcccagactggctactgtatgtaatgtatttatgtatgtatttgtaaatgtgatagaagtctgggggggagttgggggatggcggcagatgttagccaggtctgccctccccattcaagccccttctccactgtagcaaaataagcacccccaccccatctgccttcaggtcttcttcacagcctgcactgcccagtgggccactaggggcagtctctggaagggctggttcaaggctgtttgggtataggggtcaggtaccaatgaagaatcacgacttgtctcactcctttggaaattgttttctttcctgtgtaattacttcatacctctgtttttgagaaactgttccgtttgtcatctgtcatggtctccttccaccaaatcttcatctgggaatagcagcggtatccctccacccaagtatggccacctgtttgtcttcatatagaacaggggcttctggtctggtcatgtccctagagacttactagagactggctgaccatgaaaaaaaaaaaaataatctgagttattcagccagtcagctcccctttaaaaatctaaggtatctccaagcaacacatctccattctagttgtcttgaaccacgtgggcaactgtttcaggggttttctcttgcccaatccccacctaataaagttctgagagcatgaaaaaaaaaaaaaaa

SEQ ID NO: 1144 - DNA, 4140 bp, Homo sapiens
gtgacgcgaggtcacgtgacgggttgggcagcctgtgccgccgccgccgctttgtaagaggcacattggcagattttctattttgtacatacattattttgtatatactgtatatgatgacttcagtgagcagtgaccattgtcgaggtgctcgggaaaaaccacagatttcagcagcacaatcaacgcaaccacagaaacaagtggtacaggcaacagctgaacagatgcgtctcgctcaagtgatctttgataagaatgattcagattttgaagctaaagttaagcagcttatggaagtgacagggaaaaatcaggatgaatgcatagtggccctacatgattgtaatggagatgtgaacaaagctatcaatatattgctggaagggaattcagacacaacttcatgggagactgtagggtgtaagaaaaagaattttgcaaaagaaaattcagaaaacaaagagaatagagagaagaaaagcgagaaagaatcgagtcgtggacgtggaaacaacaaccggaaaggaagaggcggcaatcgtggcagagaatttagaggtgaagaaaatggaattgattgcaatcaagtggacaaaccttcagatcgtggcaagcgagcccggggtagagaactggcatcaaatactcacaacatagctcaggatctgtcaaacaaaagttcttatggactcaaaggggcttggaagaattctgtggaagagtggacaacagaagactggactgaagatctttctgaaacaaaggtcttcactgcctcatctgctccagcagagaatcacatcttacctgggcaaagcattgatctggtagccttgctccagaagcctgttcctcacagtcaagcctcagaagccaactcctttgaaacttcccaacagcagggctttggccaagcccttgtcttcacaaattcgcaacacaacaatcagatggcaccagggactggcagctccactgccgtcaactcctgttctcctcagagcctgtcatccgtccttggctcaggatttggagagcttgcaccaccaaaaatggcaaacatcaccagctcccagattttggaccagttgaaagctccgagtttgggccagtttaccaccaccccaagtacacagcagaatagtacaagtcaccctacaactactacttcttgggacctcaagcccccaacatcccagtcctcagtcctcagtcatcttgacttcaaatctcaacctgagccatccccagttcttagccagttgagccagcgacaacagcaccagagccaggcagtcactgttcctcctcctggtttggagtcctttccttcccaggcaaaacttcgagaatcaacacctggagacagtccctccactgtgaacaagcttttgcagcttcccagcacgaccattgaaaatatctctgtgtctgtccaccagccacagcccaaacacatcaaacttgctaagcggcggatacccccagcttctaagatcccagcttctgcagtggaaatgcctggttcagcagatgtcacaggattaaatgtgcagtttggggctctggaatttgggtcagaaccttctctctctgaatttggatcagctccaagcagtgaaaatagtaatcagattcccatcagcttgtattcgaagtctttaagtgagcctttgaatacatctttatcaatgaccagtgcagtacagaactccacatatacaacttccgtcattacctcctgcagtctgacaagctcatcactgaattctgctagtccagtagcaatgtcttcctcttatgaccagagttctgtgcataacaggatcccataccaaagccctgtgagttcatcagagtcagctccaggaaccatcatgaatggacatggtggtggtcgaagtcagcagacactagacactccaaagacaacaggccctccctctgccctcccgtctgtgagctccctgcccagcaccacctcctgcactgcacttctgccgtccacatcccagcacactggcgacctgactagcagccctctctctcagcttagcagttcgctctccagccaccagagcagcctctctgcacatgcagccctctcctcgagcacgtcacacacacatgccagtgtggagagcgcctcttcccaccagtcctcagccaccttctccacggcagcgacctccgtctcaagttccgcatcctcaggcgccagcctgtccagtagcatgaacaccgcgaacagcctctgtctgggtgggacccccgcgagtgcatccagcagcagtagcagggccgcgcccttggtgacctcaggcaaagcacccccaaacttacctcagggggtgcctcccctgctgcacaaccagtacctcgtaggtcccggaggactgcttcctgcctacccgatctatggctatgacgagctccagatgctgcagtcacggctgccagtggactactatggaattccctttgctgcacccacagcgcttgccagccgagatgggagcctagctaataatccatatccaggtgatgtcacaaagtttggccgtggggactctgcatcccctgcacccgctaccacaccagctcagccacagcagagccaatcacagacccaccacacagcccagcagcccttcgtgaatcctgcactgccacctggctatagctacactggtcttccctactacacaggcatgcccagtgccttccagtatggccccaccatgtttgtccctccagcctcagccaagcaacatggggtgaacctcagcactcccacacctcccttccagcaggccagtggttatggccagcacggctacagtacaggttatgacgacctgacccaggggacagcagcaggagactactccaaaggtggctatgctggatcatcgcaggcaccaaacaagtctgcaggttctgggcctggcaaaggagtatcagtgtcttcaagcaccactggtctacctgatatgactggttctgtctacaataagacacagacttttgacaagcagggatttcatgcagggacgcctccacctttcagcctgccctcggtcttgggctccactgggcccctggcctcgggagcggcccctggctatgcacccccaccattcctacacatcttgccagcccaccagcagccccactcacagctgctgcaccaccaccttccgcaggatgcacagagtggctcgggtcagcgcagccagcccagctccctgcagcccaagtctcaagcctccaaacctgcctacggcaactctccatactggacaaactaaacccagaagagaggggtgggctggggcaaggcttatcctgggcaggagagaacacacgagcacgtatttgggagcccagtgccctttcctagaattcccgacatgtgtcagccatgcctctgtggggagtctgcctcccagactggctactgtatgtaatgtatttatgtatgtatttgtaaatgtgatagaagtctgggggggagttgggggatggcggcagatgttagccaggtctgccctccccattcaagccccttctccactgtagcaaaataagcacccccaccccatctgccttcaggtcttcttcacagcctgcactgcccagtgggccactaggggcagtctctggaagggctggttcaaggctgtttgggtataggggtcaggtaccaatgaagaatcacgacttgtctcactcctttggaaattgttttctttcctgtgtaattacttcatacctctgtttttgagaaactgttccgtttgtcatctgtcatggtctccttccaccaaatcttcatctgggaatagcagcggtatccctccacccaagtatggccacctgtttgtcttcatatagaacaggggcttctggtctggtcatgtccctagagacttactagagactggctgaccatgaaaaaaaaaaaaataatctgagttattcagccagtcagctcccctttaaaaatctaaggtatctccaagcaacacatctccattctagttgtcttgaaccacgtgggcaactgtttcaggggttttctcttgcccaatccccacctaataaagttctgagagcatgaaaaaaaaaaaaaaa

SEQ ID NO: 1145 - DNA, 4231 bp, Homo sapiens
gtgacgcgaggtcacgtgacgggttgggcagcctgtgccgccgccgccgctttgtaagaggcacattggcagattttctattttgtacatacattattttgtatatactgtatatgatgacttcagtgagcagtgaccattgtcgaggtgctcgggaaaaaccacagatttcagcagcacaatcaacgcaaccacagaaacaagtggtacaggcaacagctgaacagatgcgtctcgctcaagtgatctttgataagaatgattcagattttgaagctaaagttaagcagcttatggaagtgacagggaaaaatcaggatgaatgcatagtggccctacatgattgtaatggagatgtgaacaaagctatcaatatattgctggaagggaattcagacacaacttcatgggagactgtagggtgtaagaaaaagaattttgcaaaagaaaattcagaaaacaaagagaatagagagaagaaaagcgagaaagaatcgagtcgtggacgtggaaacaacaaccggaaaggaagaggcggcaatcgtggcagagaatttagaggtgaagaaaatggaattgattgcaatcaagtggacaaaccttcagatcgtggcaagcgagcccggggtagaggatttggacgtggcagagggagaggggcaggaaggttctcaacccaaggcatggggacatttaatcctgcagactattcagattctacatctacagatgtgtgtgggacaaagctagtagtttgggaagctgctcagaatggtgcagatgagggaactgaactggcatcaaatactcacaacatagctcaggatctgtcaaacaaaagttcttatggactcaaaggggcttggaagaattctgtggaagagtggacaacagaagactggactgaagatcattgatctggtagccttgctccagaagcctgttcctcacagtcaagcctcagaagccaactcctttgaaacttcccaacagcagggctttggccaagcccttgtcttcacaaattcgcaacacaacaatcagatggcaccagggactggcagctccactgccgtcaactcctgttctcctcagagcctgtcatccgtccttggctcaggatttggagagcttgcaccaccaaaaatggcaaacatcaccagctcccagattttggaccagttgaaagctccgagtttgggccagtttaccaccaccccaagtacacagcagaatagtacaagtcaccctacaactactacttcttgggacctcaagcccccaacatcccagtcctcagtcctcagtcatcttgacttcaaatctcaacctgagccatccccagttcttagccagttgagccagcgacaacagcaccagagccaggcagtcactgttcctcctcctggtttggagtcctttccttcccaggcaaaacttcgagaatcaacacctggagacagtccctccactgtgaacaagcttttgcagcttcccagcacgaccattgaaaatatctctgtgtctgtccaccagccacagcccaaacacatcaaacttgctaagcggcggatacccccagcttctaagatcccagcttctgcagtggaaatgcctggttcagcagatgtcacaggattaaatgtgcagtttggggctctggaatttgggtcagaaccttctctctctgaatttggatcagctccaagcagtgaaaatagtaatcagattcccatcagcttgtattcgaagtctttaagtgagcctttgaatacatctttatcaatgaccagtgcagtacagaactccacatatacaacttccgtcattacctcctgcagtctgacaagctcatcactgaattctgctagtccagtagcaatgtcttcctcttatgaccagagttctgtgcataacaggatcccataccaaagccctgtgagttcatcagagtcagctccaggaaccatcatgaatggacatggtggtggtcgaagtcagcagacactagacactccaaagacaacaggccctccctctgccctcccgtctgtgagctccctgcccagcaccacctcctgcactgcacttctgccgtccacatcccagcacactggcgacctgactagcagccctctctctcagcttagcagttcgctctccagccaccagagcagcctctctgcacatgcagccctctcctcgagcacgtcacacacacatgccagtgtggagagcgcctcttcccaccagtcctcagccaccttctccacggcagcgacctccgtctcaagttccgcatcctcaggcgccagcctgtccagtagcatgaacaccgcgaacagcctctgtctgggtgggacccccgcgagtgcatccagcagcagtagcagggccgcgcccttggtgacctcaggcaaagcacccccaaacttacctcagggggtgcctcccctgctgcacaaccagtacctcgtaggtcccggaggactgcttcctgcctacccgatctatggctatgacgagctccagatgctgcagtcacggctgccagtggactactatggaattccctttgctgcacccacagcgcttgccagccgagatgggagcctagctaataatccatatccaggtgatgtcacaaagtttggccgtggggactctgcatcccctgcacccgctaccacaccagctcagccacagcagagccaatcacagacccaccacacagcccagcagcccttcgtgaatcctgcactgccacctggctatagctacactggtcttccctactacacaggcatgcccagtgccttccagtatggccccaccatgtttgtccctccagcctcagccaagcaacatggggtgaacctcagcactcccacacctcccttccagcaggccagtggttatggccagcacggctacagtacaggttatgacgacctgacccaggggacagcagcaggagactactccaaaggtggctatgctggatcatcgcaggcaccaaacaagtctgcaggttctgggcctggcaaaggagtatcagtgtcttcaagcaccactggtctacctgatatgactggttctgtctacaataagacacagacttttgacaagcagggatttcatgcagggacgcctccacctttcagcctgccctcggtcttgggctccactgggcccctggcctcgggagcggcccctggctatgcacccccaccattcctacacatcttgccagcccaccagcagccccactcacagctgctgcaccaccaccttccgcaggatgcacagagtggctcgggtcagcgcagccagcccagctccctgcagcccaagtctcaagcctccaaacctgcctacggcaactctccatactggacaaactaaacccagaagagaggggtgggctggggcaaggcttatcctgggcaggagagaacacacgagcacgtatttgggagcccagtgccctttcctagaattcccgacatgtgtcagccatgcctctgtggggagtctgcctcccagactggctactgtatgtaatgtatttatgtatgtatttgtaaatgtgatagaagtctgggggggagttgggggatggcggcagatgttagccaggtctgccctccccattcaagccccttctccactgtagcaaaataagcacccccaccccatctgccttcaggtcttcttcacagcctgcactgcccagtgggccactaggggcagtctctggaagggctggttcaaggctgtttgggtataggggtcaggtaccaatgaagaatcacgacttgtctcactcctttggaaattgttttctttcctgtgtaattacttcatacctctgtttttgagaaactgttccgtttgtcatctgtcatggtctccttccaccaaatcttcatctgggaatagcagcggtatccctccacccaagtatggccacctgtttgtcttcatatagaacaggggcttctggtctggtcatgtccctagagacttactagagactggctgaccatgaaaaaaaaaaaaataatctgagttattcagccagtcagctcccctttaaaaatctaaggtatctccaagcaacacatctccattctagttgtcttgaaccacgtgggcaactgtttcaggggttttctcttgcccaatccccacctaataaagttctgagagcatgaaaaaaaaaaaaaaa

SEQ ID NO: 1146 - DNA, 5521 bp, Homo sapiens
gagcgcacggcggcggcagaggcggcggcggccgggcctaggagcgactctcggtcgtgcagcggcggcgagcgctcgcgagcggctgcgggacgcgaggtttccggagctgagctcaatgtgcagcaatggatgacgacagcctggatgagcttgtggcccggagcccagggccggatggacacccacaggtcggccctgcggacccggcaggtgactttgaagaaagcagcgtgggcagcagtggggactctggggacgacagtgacagcgagcatggagatggcacagacggagaagacgagggggcgtctgaggaggaagacctggaagacagatctggttccgaggattctgaagacgacggggagacattgctggaggtagcgggtactcaggggaaactggaagccgctggctctttcaattctgatgatgatgcagagagctgcccaatctgtctcaacgcattcagagaccaggccgtggggacgccggagaactgtgcccattacttctgcctggactgcattgtcgaatggtccaagaatgccaattcctgtccagttgatcgaactctatttaagtgcatttgtattcgagctcaatttggtggtaaaatcttaagaaagatcccagtggagaacaccaaagcgagcgaggaggaggaggacccgaccttctgtgaggtgtgcggcaggagcgaccgtgaggacaggcttttgctctgcgacggctgcgatgcggggtaccacatggaatgcttggacccccctctccaggaggtgccggtggacgagtggttctgcccggaatgtgctgcgcctggtgttgtccttgccgctgatgcgggtcccgtgagtgaggaggaggtctccctgctcttggctgatgtggtgcccaccaccagcaggcttcggcctcgagcaggtaggacccgggcgatagccaggacacggcagagtgagagagtgagagcaaccgtgaaccggaaccggatctccacggccaggagggtccagcacacaccagggcgcctcgggtcttccctgctggatgaagccatcgaggctgtggcgactggcctgagcactgccgtgtatcagcgccccctgacgccgcgcactcccgcccgacggaagaggaagacaagaagacggaagaaagtgccgggaagaaagaaaaccccgtccggaccatccgcaaaaagtaagagctcagcgacaagatctaagaaacgccaacatcgagtgaagaagagaagagggaagaaggtaaagagtgaagccaccactcgctctcgaatcgcgcggacgctgggcctgcgcaggcctgttcacagcagctgcatcccgtcagtgttgaagccagtggagccctctttggggctgctgagagcggatattggagctgcctctctgtctctgtttggagatccttatgagctggatcccttcgacagcagtgaagagctttctgcaaaccctctttcccctctgagtgccaagagacgggctctgtcccggtcagccctgcagtcccaccagcccgtggccaggcccgtctccgtggggctttccaggaggcgcctccctgccgcggtgccagagccagacttggaggaggagccagtgcctgacctgctgggcagcatcctgtcgggccagagcctcctgatgctgggcagcagtgatgtcatcatccaccgcgacggctccctcagcgccaagagggcggctccagtttcttttcagcgaaactcaggcagtctgtccagaggggaagaaggattcaagggctgcctgcagccccgagcactgccctccgggagcccggcccaaggcccgtcaggaaacaggccacagagcacagggctcagctgtcaaggcaggtcccgcacccccgcccgcaccgcgggggcgcctgtgaggctggacttgccagcagcccctggggcggttcaggctcggaacttgtcaaatgggagtgtgcctggcttcagacagagccacagcccctggttcaacggcaccaacaagcacaccttgccccttgcctctgccgcgtctaagatctcaagcagagattctaagcccccatgtcgcagtgtggtgccggggcctcccctgaagccagcgcccagaagaacagacatctctgagctacccaggataccaaagatcaggagagatgacggtggtggcagacgggatgcggccccggcccacgggcagagcattgagatccccagtgcctgcatcagccgactgactggcagggagggcaccgggcagccagggcgaggcacacgggcagagagcgaggccagcagcagggtgccccgggagcccggggtgcacacgggcagctcccggcccccagcccccagctcccatggcagtttggccccactgggaccatcaagagggaaaggggtcgggtcgacctttgagagcttccggatcaatattcctggaaacatggcacattccagccagctctccagccctggcttctgtaacacgttccggcctgtggacgataaggagcagaggaaggagaacccctcacccctcttctccatcaagaagacgaagcagctgcggagcgaggtctacgacccatccgaccccaccggctccgactccagcgcccctggcagcagccccgagaggtctggccccggcctcctgccctctgagatcacacgaaccatctccatcaacagcccgaaggcccagacggtgcaggctgtgcgctgcgtcacctcctacacggtggagagcatctttggtacagagcccgaaccccctctcggaccgtcctccgccatgtccaagctccggggtgcagtggctgccgagggggcctctgacacggagcgagaggagcccacagagagccagggcctggctgcccggctgcggaggccatcccccccagagccctgggatgaggaggatggggcgtcttgcagcaccttctttggctctgaggagcggacggtgacctgtgtgactgtcgtggagccggaagccccacccagcccggacgtgctgcaggctgccacccacagagtcgtggagctcaggcccccttcccggtcccgctccacatccagctcccgcagcaggaagaaggccaagaggaagagggtgtccagggagcacggacggacgcgctctgggacgcgctctgaatccagggacaggagctcgaggtcagcgtcaccatcagtgggtgaggagcgccccaggaggcagcggtccaaggccaagagccggcggtcctccagtgaccgctccagcagccgagagcgagctaagaggaagaaagccaaggacaagagcagggagcacaggcggggcccctggggccacagccggaggacgtcccggtcgcggtcggggagccctggcagctcttcctatgagcactatgagagtaggaagaagaagaaaaggagatcagcgtccagacctcggggaagggagtgctcccccaccagcagcctggagaggctctgcaggcacaagcatcagcgggaacgcagccacgagcggccagacaggaaggagagtgtggcgtggccccgagaccggaggaagcggaggtcccggtccccaagctcggagcacagggcacgggagcacaggcggcctcggtcccgtgagaagtggccgcagacccggtcccattccccagagaggaagggggctgtgagggaggcttccccagcgccccttgcacagggggagccagggcgggaagacctccccaccaggttgccagccttgggggaagcacatgtctcgccggaggtggctacggccgacaaggcccccctgcaggctccccctgtcctggaggtggcagctgagtgtgagccggacgacctggacctggattatggcgactccgtggaggccggacacgtctttgatgatttctcaagcgacgccgttttcatccagctcgatgacatgagctcgccaccttctcccgaaagcacagactcttccccggagcgagacttcccactgaagcctgcgttgcccccagccagcctggccgtggccgccatccagagggaggtgtcattgatgcacgatgaagacccttcgcagcccccacccctgccagagggcacccaggagccacatttgctcaggccggacgcggctgagaaggctgaggcacccagttccccggatgtggcgcctgcggggaaggaagacagcccctctgcgagtgggagggtacaggaggcagcccggcctgaggaggtggtttcgcagacccccctgctgcggtccagagccctggtgaagcgggtcacctggaacctgcaggagtcggagagcagcgcccccgccgaggacagagccccccgggcaccacttcacaggccacagaagccccgagaaggagcctgggacatggaggatgtggcccccacaggggtcaggcaggcgttctccgagctgccctttcccagtcacgtgcttccggaacccgggttcccagacacagacccctctcaggtttacagccccggcctgccgcctgccccggcccagccctcaagcatcccaccctgcgcactggtcagccagcccacggtccagttcatccttcaggggagcctgccgctagtgggctgtggggcagcacagaccctggccccagtgcccgctgccctgaccccagcctcagagccagccagtcaagccactgcagccagcaactcggaggagaagaccccggcccccaggctagctgcggagaaaaccaagaaggaggagtacatgaagaagctgcacatgcaggagcgtgctgtggaggaggtgaagctggccatcaagcccttctaccagaagagggaggtgaccaaggaggagtacaaggacatcctgcgcaaggccgtgcagaagatctgccacagcaagagtggagagatcaaccccgtgaaggtggccaacctggtgaaggcgtacgtggacaagtacaggcacatgcgcaggcacaagaaaccagaggccggggaggagccgcccacgcagggggccgagggctgaggccaggcaatcacgggctatgcccggggagctgtcgggagtggcgggaatcggggccatgcccggggagctgtcgggagtggcgggaatcggggccatgcccggggagctgtcgggagtggcgggaaatggggggcatcaccatgcctgccgtcgggttcctgcgctgacacctggtctgtgcacctgtgttgctcacagttgaaaactggacacttttgtatgtatattatagagacactgtttccattctaatttatcaaaaatggattatctttagaaacctcttgattgacttactacttggaagataaagcacttggtgatcaagaggggctcctggtggggtggcgcgtccttgataaatctctaggtggcctcccgccaacagctgctgtgtacctttggctctgaattaggaatatctttactttctcttttcc

SEQ ID NO: 1147 - DNA, 4107 bp, Homo sapiens
aagaaagaggggcagaggagggaaggcgactgcagtccgaaaggagcttttggaagctaggaccctaagcgtcaggacgtggcattggtcgagagaaagcctgggctggcaagagctgccgccggtgctgggagagcatttatttgggagaaaaagaggggagagagcagagggagggggaggaagagagttcaaaccgaagtggatggaaggggactggggtttctgccgcgcagggagccgtgagccagggcgatggcgctaagggcggcgcggagcagctgcgctcccgagaacgcgtctcctcgcagaggactagcagacatcgggaaggtctgcgccaacgggaaccaacttgtggctccaaaatgtacccaacgcagctggaaatgagatcaaagctgcagttgcatttgagaaggatgagaagagccagcgattagggaattttttttttacccgttttcttcctttttctttttttcttctttttctttttttctttcttttttcgtgtgtgttttttttaatttgcctaccaccctgtctgtcccctcacttcgccctccccatttgaaataaaagccccagtctcaacttccatcacctcggcgctcccggagccactaccggctgatggaggagaaggggacccgggggctggcaggggccaccggcgagggaccgcatcctgcgtctcccccgtgatcccggccccgaccgcggagttctgcaacacctggaggatctggaccgggtgctgggggtgggggcggggacagaggaaggaaaggcaccccgagccttaaaaagaaaaaaaaaaagtagcggggggaggaatgggtttcttcttgacagctgacggagccttgaaattttcctccactacctccgcccccgcccccgcccccgccccccgcactccatttaacgtgagattatgaaattgcagaggcggtggagggaaggagacaggatataaccggagtttggaggggagaggggaaggtggctggccgggtggctgaaatcaaaaattcaattgcgcactgggttgtgatgagaaatctaatcagatctttggcgaaggggccggccggaaggatggagagtgggggggaagttgctccccaaattcttcgaaggggaggctggggagaggaattgaccatgtaaaaggagacttttttttttggtggtggtggctgttgggtgccttgcaaaaatgaaggatgcaggacgcagctttctcctggaaccgaacgcaatggataaactgattgtgcaagagagaaggaagaacgaagctttttcttgtgagccctggatcttaacacaaatgtgtatatgtgcacacagggagcattcaagaatgaaataaaccagagttagacccgcgggggttggtgtgttctgacataaataaataatcttaaagcagctgttcccctccccccccccaaaaaaaaggatgattggaaatgaagaaccgaggattcacaaagaaaaaagtatgttcatttttctctataaaggagaaagtgagccaaggagatatttttggaatgaaaagtttggggcttttttagtaaagtaaagaactggtgtggtggtgttttcttttctttttgaatttcccacaagaggagaggaaattaataatacatctgcaaagaaatttcagagaagaaaagttgaccgcggcagattgaggcattgattgggggagagaaaccagcagagcacagttggatttgtgcctatgttgactaaaattgacggataattgcagttggatttttcttcatcaacctcctttttttttaatttttattccttttggtatcaagatcatgcgttttctcttgttcttaaccacctggatttccatctggatgttgctgtgatcagtctgaaatacaattggcaaacgcactgcctacttacagcatagagacccccagtggagagctagactgtttgaattccagaaggaccaacaccagataaattatgaatgttgaacaagatgaccttacatccacagcagataatgataggtcctaggtttaacagggccctatttgaccccctgcttgtggtgctgctggctcttcaacttcttgtggtggctggtctggtgcgggctcagacctgcccttctgtgtgctcctgcagcaaccagttcagcaaggtgatttgtgttcggaaaaacctgcgtgaggttccggatggcatctccaccaacacacggctgctgaacctccatgagaaccaaatccagatcatcaaagtgaacagcttcaagcacttgagacacttggaaatcctacagttgagtaggaaccatatcagaaccattgaaattggggctttcaatggtctggcgaacctcaacactctggaactctttgacaatcgtcttactaccatcccgaatggagcttttgtatacttgtctaaactgaaggagctctggttgcgaaacaaccccattgaaagcatcccttcttatgcttttaacagaattccttctttgcgccgactagacttaggggaattgaaaagactttcatacatctcagaaggtgcctttgaaggtctgtccaacttgaggtatttgaaccttgccatgtgcaaccttcgggaaatccctaacctcacaccgctcataaaactagatgagctggatctttctgggaatcatttatctgccatcaggcctggctctttccagggtttgatgcaccttcaaaaactgtggatgatacagtcccagattcaagtgattgaacggaatgcctttgacaaccttcagtcactagtggagatcaacctggcacacaataatctaacattactgcctcatgacctcttcactcccttgcatcatctagagcggatacatttacatcacaacccttggaactgtaactgtgacatactgtggctcagctggtggataaaagacatggccccctcgaacacagcttgttgtgcccggtgtaacactcctcccaatctaaaggggaggtacattggagagctcgaccagaattacttcacatgctatgctccggtgattgtggagccccctgcagacctcaatgtcactgaaggcatggcagctgagctgaaatgtcgggcctccacatccctgacatctgtatcttggattactccaaatggaacagtcatgacacatggggcgtacaaagtgcggatagctgtgctcagtgatggtacgttaaatttcacaaatgtaactgtgcaagatacaggcatgtacacatgtatggtgagtaattccgttgggaatactactgcttcagccaccctgaatgttactgcagcaaccactactcctttctcttacttttcaaccgtcacagtagagactatggaaccgtctcaggatgaggcacggaccacagataacaatgtgggtcccactccagtggtcgactgggagaccaccaatgtgaccacctctctcacaccacagagcacaaggtcgacagagaaaaccttcaccatcccagtgactgatataaacagtgggatcccaggaattgatgaggtcatgaagactaccaaaatcatcattgggtgttttgtggccatcacactcatggctgcagtgatgctggtcattttctacaagatgaggaagcagcaccatcggcaaaaccatcacgccccaacaaggactgttgaaattattaatgtggatgatgagattacgggagacacacccatggaaagccacctgcccatgcctgctatcgagcatgagcacctaaatcactataactcatacaaatctcccttcaaccacacaacaacagttaacacaataaattcaatacacagttcagtgcatgaaccgttattgatccgaatgaactctaaagacaatgtacaagagactcaaatctaaaacatttacagagttacaaaaaacaaacaatcaaaaaaaaagacagtttattaaaaatgacacaaatgactgggctaaatctactgtttcaaaaaagtgtctttacaaaaaaacaaaaaagaaaagaaatttatttattaaaaattctattgtgatctaaagcagac

SEQ ID NO: 1148 - DNA, 3279 bp, Homo sapiens
gtggagtccccgcaggcagagacgcggagtgggggtggcgggtcgccggatcgggtgggaagtaaaagacccccaggagtgggtgcgggctcactgatacggctgtgagcggcattggagtgtgcgtgggtcttctcgctacgctcgggcccgcaagaggggtgtgagagcggctaggtccaagcaggtgatgtttgcagacagaaaaagtaaactgtcaaggaattcagagcattgggtacttgttatttggaccagtttgaagcatctttgatttattggaccaactggcaacagaaaatgaaaagtagtgtggcacagataaaaccttcttctggtcatgacagaagggaaaaccttaattcatatcagaggaactcctctccagaagacagatatgaagaacaagaacgatccccccgggatagagattactttgattacagcagatcagactatgagcattcaagaagaggacgttcttatgatagtagcatggagtcacgaaacagggaccgagaaaaacgcagagaaagagaaagagatacggatcggaaaaggtctcggaaatccccatctcctgggaggagaaacccagaaacatcagtaactcagagttcctctgctcaggatgaacctgctacaaagaaaaagaaagatgagctggatcctcttcttactcgcactggtggagcatatattccccctgcaaagctcaggatgatgcaggaacagattacagataaaaacagcttagcataccagaggatgagttgggaggccctgaagaagtcaattaatggccttatcaacaaagtcaacatttccaacataagtattattattcaagagcttcttcaagaaaatatagttagaggaagaggactgctgtccaggtctgttttgcaagcacagagtgcttctccaatcttcacccatgtttatgcagcattagtggcaattatcaactcaaaatttccacaaattggagaattaatcctcaaaaggttaattcttaattttcgaaaaggctatcgaagaaatgacaagcaactttgcctgactgcttcaaaatttgtggcgcatcttattaaccaaaatgtggcacacgaagtattatgcttagagatgctcactttgctcctggaaagaccaacagatgatagcgttgaagtagctattggttttcttaaggaatgtggcctcaaattaacacaagtgtcaccaagaggaatcaatgctatatttgaacgccttcgaaacattctgcatgagtctgaaattgacaaaagagttcaatatatgattgaagtgatgtttgctgtacggaaagatggattcaaggaccaccccattatcctagaaggtcttgatttggtggaagaagatgatcaattcactcatatgctccctctggaggatgactataatccagaagatgttcttaatgttttcaagatggatcctaattttatggagaatgaagagaagtacaaagctattaagaaagaaattcttgatgagggagatactgactcgaacacagaccaggatgctgggagtagtgaagaggacgaggaagaagaagaggaagagggagaagaagatgaagaaggacaaaaagtaactattcatgacaaaacagaaattaacctggtctcatttcgtcgtacaatttatcttgctattcagtcaagtttagattttgaagaatgtgctcacaaattgctgaaaatggagtttcctgaaagccaaacaaaagaactctgcaacatgatacttgattgctgtgcccaacagaggacatacgaaaaattttttggcttattagctgggcgattttgcatgctaaagaaagagtacatggaatcctttgaaggtatattcaaagaacagtatgataccatccatcgcttggaaacaaacaagttgcgaaatgttgctaagatgtttgctcaccttttatacactgattcacttccatggagtgttcttgaatgtataaaactgagtgaagaaaccactacatcatccagtagaatttttgtcaaaatatttttccaggaactgtgtgaatacatgggtcttcctaaacttaatgcaagattaaaggatgaaactctgcagccattctttgaaggattattaccccgagataatccaagaaacactcggtttgccatcaacttctttacttctataggtcttggaggtttaacggatgaactgcgggagcatctcaaaaatacaccaaaggtcattgtggcgcagaaaccagatgttgagcaaaataaatcctccccatcctcttcctcttcagcgtcctcctcttcagagtctgactcatccgactctgattctgacagcagtgatagcagttcagagtcttccagtgaagagagcgactcttcatccatcagtagtcatagctctgcctcagctaatgatgtaagaaagaagggacatgggaagaccagaagtaaagaggtagataaattgatcagaaaccagcaaacaaatgataggaaacaaaaagaaagaagacaagaacacgggcaccaggaaacaaggactgagagagaaagaaggtcagaaaaacacagagatcaaaattcaagtggttcaaattggagagatcctataacaaagtacacatcagacaaagatgttccttctgaacgaaataactacagtagagttgcgaatgacagagaccaagaaatgcatatagatttggaaaataagcatggtgatcccaaaaagaagagaggagagagaagaaattctttttctgaaaatgagaagcatacacaccgaattaaagacagtgaaaatttcagaagaaaagatagatcaaagtcaaaggaaatgaatagaaagcactcaggctcaagaagtgatgaagatagatatcaaaatggtgccgagagacgatgggaaaaatctagcagatactctgaacaatccagagaatcaaagaaaaatcaggaccggcgaagagaaaagtctccagcaaaacaaaaataattctacaaaatgacataaactggacatgccttatattcagttgaaacaaattattttttactttgacgaactttatagagaattcttgtataaagtattggtttgtatttgtaaatttaaaaaatgttttcattttaacatgttttataattgatacatctcaaggccctacccataaaattatttgaaaactttcaccagaaagggatgtaagtctcgcttatattttgtgaataaaatgatcaaaagctc

SEQ ID NO: 1149 - DNA, 5330 bp, Homo sapiens
cagcgcgcggcaggcggcgagctcgggggccgcagaaaatgaaactgaagccgtggtcacgtgacaggacatgtagtatatagcaggctgccagcgactcctgctcttgcttctggatctgcagggcagtcccagcaggacccatggagtgtccttcgtgccagcatgtctccaaggaggaaacccccaagttctgcagccagtgcggagagaggctgcctcctgcagcccccatagcagattctgagaacaataactccacaatggcgtcggcctcggagggtgaaatggagtgtgggcaggagctgaaggaggaagggggcccgtgcttgttcccgggctcagacagttggcaagaaaaccccgaggagccctgttccaaagcctcctggaccgtccaagaaagcaaaaagaagaaaaggaagaagaaaaagaaggggaacaagtccgcttcctcagagctggcttccttgcccctttctcctgccagcccctgtcacctgactttgctttcaaacccgtggcctcaggacacagccctgccccacagccaagcccagcagagtggccccactggccagccgagccagcccccaggcacagccaccacgccactggagggtgacggcctctccgcgcccaccgaggttggcgacagccccctgcaggcccaggctttgggagaggcaggagtggccacaggaagtgaggctcagagcagcccgcaattccaggaccacacggaaggggaggaccaggacgcttccatcccctctgggggcagaggcctgtcccaggaggggaccggtccccccacctctgctggtgaaggccattctaggactgaagatgctgcccaggagctcctgttgcctgagtcaaaaggaggcagctctgagcccgggacagaactgcagaccaccgagcaacaggcaggggcctcagcctctatggcagttgatgctgtagctgagccagccaatgcagttaaaggggccgggaaggaaatgaaagagaagacccagagaatgaaacagccaccagcaaccactcctcctttcaaaacacactgccaggaagctgagaccaagaccaaggacgagatggctgctgctgaagaaaaagtcggtaagaatgaacaaggggagcctgaagacctcaagaagccagaggggaagaacagaagtgcagctgctgtgaaaaacgagaaggagcaaaaaaaccaggaagcagatgtccaggaagtgaaggcaagcacgctgagcccgggtggaggagtcaccgtgttcttccacgccatcatctctcttcatttcccattcaatcctgacctccataaagtcttcatcagaggaggagaagaatttggggagtcaaaatgggacagcaatatctgtgagctgcactacaccagagacttgggtcatgaccgcgttcttgttgaaggcattgtctgcatttccaagaagcacctagataaatacattccttacaagtacgtcatttataatggggaatcttttgagtatgagttcatttacaagcaccagcagaagaagggcgagtacgtcaaccgctgtctgttcataaaatcttcacttctgggctcaggagactggcatcagtactatgacatagtttatatgaagcctcatgggagactccagaaagtcatgaaccacatcacagacgggccgaggaaggacctggtgaaggggaagcagattgccgctgcgctcatgctggacagcaccttcagcatcctgcagacctgggacaccatcaacctgaacagcttcttcacccagttcgagcagttttgctttgtcctgcaacagcctatgatttatgaaggacaggcacagctgtggaccgatttgcagtacagggagaaagaggtgaagagatacctgtggcaacatctgaaaaaacacgtggtaccattgccggacggaaaaagcacggactttttgcctgtggactgcccagtgaggagtaaactgaaaacaggcctgattgtcctttttgtagtggaaaaaattgagcttttattagaaggcagcctggactggttgtgtcacctcctaacctcagatgccagctcaccagatgagtttcaccgtgacctaagccacatccttgggatacctcagagctggcggctgtacctggtgaacctgtgccaaagatgcatggacacaaggacgtacacctggctgggcgccctgcctgtcctgcactgctgtatggagctggccccgcggcacaaggatgcctggagacagcctgaggacacctgggccgctctggagggactctccttctcaccgttccgggaacaaatgctagatacgagttccctacttcagtttatgagagagaagcagcatttgctgagcatagacgagcctctcttccggtcctggtttagtctgctacctctgagtcacctggttatgtatatggaaaacttcattgagcacctgggtcgttttcctgctcatatcctggactgtctttcagggatttactaccggcttccgggacttgagcaagtcttgaatacgcaggatgttcaggatgttcagaacgttcagaacattttagaaatgctgttgcgactcctggacacttaccgggacaagattcccgaggaggccttgtcaccatcctacctgactgtgtgtctgaaactgcatgaagccatctgcagcagcacaaagctacttaagttttacgagctgccagccttatctgccgagattgtctgcagaatgattagacttctatctctggtggattctgcaggacagagagatgaaactggaaataattcagtccaaacagtcttccaagggacccttgctgctacgaaaaggtggctccgagaagtttttacaaagaacatgctcacatcttcaggtgcctcattcacatacgtcaaggaaattgaggtctggaggcggctggtggaaatccaattccccgcggagcatggctggaaggagtcgttgctgggagacatggaatggaggctcacaaaggaggaacccctctcccagatcactgcctactgcaatagttgctgggacaccaaaggcttagaggacagtgtggccaagaccttcgagaaatgcatcattgaagccgtgagctcagcctgccaggtgaacaatctctcctcctgggaaacggattcgggctcacagctgtgttctgccatgacccagctaagggctatgaagcacccgctgggtctcagctcctccgctaactcagagattgggaagtgggcaccctcctccctcgccaagggcaatggcgctgaaatctagttctctccggattcctcagtgtgctgcacagtccctgctgctcgcaccatcctgcatgtgttccatatggaatcacggccgtgcgcgtgtggcacaagtcacacgggcttgcaggccgttcctcagatggccctgtcatcactgtggctgctggtttgattgattgttaacacttgctcagtaggtgtgcgggaagagactccaaaggttgacagaacatttatggaagcaaaatatgtgaaatggaaaattgtatcaatttatttagctcttttcggcaaaggggaagagattgtgcccccctgtctcccaggaacagtctcgcaggcaatgccacatgaggaagctccctgctggccacggctgccctgctcacatttcctaattggacacttaacccctgtacaagcacagccttgcggccacaggggaagtccagaaacattgaggtcattgaattccggggaccaaggggttctaattttttaagtgactgatacctttgataaggttttcctttccctttttcgttaactctttgttgagatattgttcgtatgccatacggtacatctgtcaaaagttccagttcagcaggttttggggtagtcacagatatgtacagtcatcaccacagttaatgacagagcattttcatcacttcaaagagaaacccggcccctttagccatcatcctcctcccctctagtcacccactcccctctgcaggcataaacaattgctgaacataaacaactgcttctgtggctttctctgttctgactgtcatatgaatggaatcatatcatatgtggccttttgggtatggcttatttcactgagcataatgtttttttgttgttggtggtggtggttgtttgttgtttttgagacagagtttcactctttttgcccaggctggagtgcaatggtgcgatcctggctcaccgcaaccgctgcctcccgggttcaagtgattctcctgcctcagcctcccaagtgctggaattacagctactttttgtttaaagagtcttttaattgtttaaagaacaatgtgccgccacactcggttccttttgtatttttagaagagacagggtttctccatgttggtcaggctggtctcgaactcccgacctcaggtgatccacccaccttggcctcccgaagtgccgagattacaggtgtgagccaccgcgcccggccgagcataatgttttgaaagaccgctcaggctggacacggttgctcacgcctgtaatcacggcactttgggagcccaggagttcaagacaagcctgggtaacagagtaagaccctgtctctataaaaactaaaaaataaacaaaaaaaattagccaggcatggccgggcacacctgtggtcccagctacttgggaggctgaggtgggaggctcccttgggcccagaaggtcaaggcagcagtgagccatgatcacaccactgcacttcaacctgggggacagagcaagaccctgtctcaaaaagcaataacaacaaaagtccatccatattgtagcttgtgtccgtttacgttaagtattccttacccaaaatgcttgagaccagaagtgttttggatttcagatgttttcaaattttggaatatttgcatttacataatgagatgtcttccagatgggacccagagtctaaccacaaaattcacttgtttcatatacatcttatacacatagcctgaaggtaattttatacaatatttttaacaattttgtgcatgagacaaagtttgtattaagtatttgtatgttgaatttttcacttgtggcatcattatactcaaaaagtttggattttgtagtattttggatttggggattaggaatgctcaacctatatttcatttttttccatggccaaatattccccgtttatccatgtgtccattgacggccatctatgttgcttcttcggctattataaatctgctgatacaaaaaaaaaaaaaaa

SEQ ID NO: 1150 - DNA, 3300 bp, Homo sapiens
atgcgccgcctgcgctccgccgctcgcgcctcgggctcggctcgggctccgggatgtccgcgctgtgcgaccctcccggggccccagggccacctgggcctgccccggccacccacggtcccgcgcctctcagtgctcaggagctgtcccaggaaatcaaggcttttctgactggcgtagaccccattctgggccaccaactctcagcccgggaacatgctcgctgtggtcttctcctgctccgttctttgccacctgctcgggctgctgtgcttgaccacttgagaggtgtctttgatgagagtgtccgggcccacctggctgccctggatgaaacccctgtggctggtccacctcacctccgtccacctccaccctctcatgtccctgctggtggacctggtctagaggatgtggttcaggaagtgcagcaggtgctgtctgagtttatccgggccaacccaaaggcctgggcacctgtgattagtgcatggtccattgacctcatggggcaactgagcagcacgtactcaggccagcaccagcgtgttccccacgctactggcgctcttaatgaactgctacagctgtggatgggttgtagggccacgcgtacattaatggacatctatgtgcagtgcctctcggctctcattggtagctgcccagatgcgtgtgtggatgccttgctggatacctctgttcagcattctccacactttgactgggttgtggcacatattggctcctcttttcctggcaccatcatttcccgggttctctcctgtggccttaaggacttttgtgtccatggtggggctggaggtggagctggcagtagtggtggaagctcttctcagaccccctctacagaccccttccctggatctcctgccattcctgcggagaaacgggtgcccaagattgcctcagttgtaggcatcctaggtcacctggcctcccgccacggagatagcatccgacgggagctcctgcgaatgttccatgatagcctggcagggggatctggaggccgcagtggggacccctcccttcaggccacggttccgttcctactgcagctggcagtcatgtcaccagctttgctgggcactgtctctggagagcttgtggattgcctcaagcccccagctgtgctgagccagctgcagcaacaccttcaaggattcccccgagaggagctggacaacatgttgaacctggctgtgcacctggtgagccaggcctctggggcaggtgcctaccgcttgctgcagttcctggtggacacagctatgcctgcttcggtcattaccacccagggcctggctgtgccagacaccgtgcgtgaggcttgtgaccggctaatccagctgctgctgctgcacctgcaaaaactggttcatcaccggggagggtctcctggggaaggggtgctaggcccgcccccacctccccgcttggtgccctttttagatgcgctcaaaaaccatgttggagagctgtgtggagagacgttacgattggaacggaagcgcttcctctggcagcaccagctcttgggcctgctgtctgtctatacccggcctagctgtggacctgaggccttgggccatctgctgagccgagcccgaagccctgaagagttgagtttggccacccagttatatgcagggctagtggtcagcctctctggcctcctgcccctggctttccgaagctgtctggctcgggtgcatgcagggacattacagcctcccttcacggcccggttcctgcgcaacttggcactgctagtagggtgggaacagcagggtggcgagggccctgcagccctaggggcgcactttggggaatctgcctcagcccatctgtctgacctggctcctctcctgctacatcctgaggaggaagtagctgaagctgctgcctctctcctggccatttgtccctttccttctgaagccttatccccctcccagctcctgggactggtaagggctggggtgcaccgcttctttgcctctctgaggctgcatggacccccaggtgtggcctcagcctgtcagcttctcacccgcctgtctcagacatccccagctgggctcaaggctgtcctgcagctgctggttgaaggagccttacatcgaggcaacacagaactgtttggtgggcaagtagatggggacaatgagactctctcagttgtttcagcttctttggcttctgcctccctgttggacactaaccggaggcacactgcagctgtgccaggtcctggagggatttggtcagttttccatgctggagtcatcggccgtggcttaaagccacccaagtttgtccagtcacgaaatcagcaggaagtgatctataacacccagagcctcctcagcctcctggttcactgctgcagtgccccagggggcactgaatgtggggaatgctggggggcacccatcttgagtccagaggcagccaaagcagtggcagtgaccttggtggagagtgtgtgtcccgatgcagctggtgcagagctggcctggccccccgaggaacacgcccgggccaccgtggagcgggatctccgcattggccggcgcttccgcgaacagcccctgctctttgagctgttaaagctggtagcagctgcacccccagccctgtgctactgttccgtgctgcttcgggggctgctggccgccctcttgggccattgggaagcctctcgccaccctgacacgacccactccccctggcacctggaggcatcctgcaccttagtggctgtcatggctgagggaagcctcctgcctccggccctgggtaatatgcatgaagtatttagccaactggcacctttcgaggtgcgtctgctgctgctcagtgtctggggttttctccgggagcatgggcccttgcctcagaagttcatcttccaatcagagcggggtcgcttcattcgggacttctccagggagggtggaggtgagggtggaccccatctggctgtgctgcacagtgtcctccaccgcaacatcgaccgcctaggtcttttctctggccgtttccaggcaccttcaccgtccactctccttcgacaggggacgtagccttttcttgctctggaagcccagggaggttgagcagtgagagagggaagggactaacgtgctccggaagggtggaggtttctcttctaagtccttggtctaaagagcgctgtcacttttttctctcccacttttttttttctaaataaaatttgccaacttgagaaaaccaaaaaaaaaaaaaaaa

SEQ ID NO: 1151 - DNA, 9178 bp, Homo sapiens
aaagatggccggagcggcggcggcggtggccgcgggagcagcagctggagccgccgcggcagccgtgtcggtggcggctcccggccgggcctcggcgcctccgccgcccccgcccgtgtactgtgtgtgccggcagccgtacgacgtgaaccgcttcatgatcgagtgcgatatctgcaaggactggttccacggcagctgtgttggagtagaagaacatcatgctgttgacattgacctgtatcactgtcccaactgtgcagttttacatggttcctccttgatgaaaaaaaggaggaactggcacagacatgactacacagaaattgatgatggttccaaaccagtgcaagctggaactagaactttcattaaggaattacgctctcgagtcttcccaagtgccgatgaaataattataaagatgcatggcagccagctgacacaaagatatctggagaaacatggatttgatgtccctattatggtcccaaaattagatgatctaggactcaggctcccttcacctacattttctgtgatggatgtggaacgttatgtaggtggtgacaaagtgatagatgtcattgatgtggcgaggcaggcagacagcaaaatgacacttcacaattatgttaaatacttcatgaatcctaacagaccaaaagtgttaaatgtgatcagccttgaattttcagatacaaagatgtctgaattggtggaggtccctgatatagccaaaaaactttcctgggtggaaaattattggccagatgattcagtctttcccaagccatttgttcagaaatattgcttaatgggagttcaagacagctatacagatttccacattgacttcggtggaacttcagtctggtaccatgtcctctggggtgagaagattttttatttaataaagccaacagatgaaaatttggcacgttatgaatcttggagttcatctgtgacccagagtgaggtgttctttggagataaggtggataaatgctacaaatgtgtggtaaagcagggacataccttatttgttcctacagggtggatccatgctgtgctcacttctcaggactgtatggcttttggggggaacttcctgcacaaccttaacattggcatgcagctcaggtgttatgagatggagaaaaggctaaaaacaccagatcttttcaaattccctttctttgaagccatatgttggtttgtagccaaaaacttgctggaaaccctgaaagaactgagagaagatggtttccagcctcaaacttacctagtacagggagtgaaagcactgcatactgctttaaaattatggatgaaaaaagaacttgtatctgaacatgcctttgaaattccagacaatgttagacctggacaccttattaaagaactttctaaagtaattcgagcaatagaggaggaaaacggcaaaccagttaaatctcagggaattcctattgtgtgtccagtttcacgatcctcaaatgaagcaacttccccataccattcccgaagaaagatgaggaaacttcgagatcataatgtccgaactccttctaacctagacatcctagagctccacacaagggaggtcctcaaaagattagagatgtgtccatgggaagaggacatcttgagctctaaactgaatggaaaattcaacaaacatctccaaccatcctccacagtacctgaatggagagcgaaagataatgatctacgattactgctgacaaatggaagaataattaaagatgaaaggcagccctttgcagatcaaagtctttatacagcagatagtgaaaatgaagaggataaaagaaggacaaaaaaggcaaaaatgaagatagaagagagttcaggagtagagggagtggaacatgaagaatctcaaaaaccactgaatgggttttttacacgtgtgaaatcagaactcaggagtagatcatcaggatattctgatatttctgagtcagaagactccggacccgagtgcactgcactgaaaagtatctttaccactgaagagtctgaaagttcaggtgatgaaaagaaacaagaaataacatccaactttaaggaggaatctaatgtgatgaggaacttccttcaaaagagccagaagccatctagaagtgaaattccaattaaaagggaatgtcctacctcgacgagcacagaggaagaagctattcagggcatgctgtctatggcagggttgcactattccacgtgtttacaaaggcaaatacaaagcacagactgcagtggtgaaagaaactctctccaggatcccagcagctgccatggcagtaaccatgaggttaggcagttgtatcgctatgataaaccagtggaatgtggataccatgtcaagactgaagatccagacttgaggacttcctcctggattaaacagtttgatacttccagatttcatcctcaggatctaagtagaagccagaaatgcatcagaaaggaaggttcatcagaaattagtcagagggtacaaagtaggaattatgtggacagcagcggctcaagccttcagaatggaaagtatatgcagaattcaaacctgacttcgggggcgtgccagataagtaatggcagtctaagcccagaaaggccagttggtgaaacttccttctcggtgccccttcaccccaccaagagaccggcatcaaatccaccacctatcagcaaccaggcaacaaaaggtaaacgtccaaaaaaaggaatggcaacagccaaacaacgtcttgggaagatccttaagttgaacagaaatggccatgcacgtttctttgtgtgacagagctgctgttgcagccattcttccctttggagaccagtctaggggtgcaggagcctggagcttccgctgtccccctgcctggagcagtttgtgtgtatagtaagaacactgcccgaagaacagaatgaacctgatgctgcattttcactgtgccacacccactcagcaataaccattttggacctggtgggggagaggaagaaggagggtagaaccttaaaaagagaccttgaactggaaagggtctcttgtcagggcttgaattttattttgttgttggtagtgtcttgatgtattttcagtggtagggtaaagaattatcaataatttatttaacagatttttttttaaagttaacagcttttaaattctttttttaaagctatttatttggaagatttctggagaaatatctcactaatttagatgtaagaatgtgaaggtttttaaattatttttgatagtgtgtgtgttacatgtggggaagggccacagtaacagtaactagtctggactcttaaatttgatattcaggttaaagtcttaaacagggatttgatgcattaattattttaaattaagatgtatatgaaaatcattttattttatatatttcatgtgttttttataagctattagcttcgcttttgctaacatccaaggtgcatactgttatccaggttgattaccttatatcccaccttccctctgcactccccatcattttgtgatgacccagtaagactcttctctttgcagggaaacactttcgtagccaatgtgtaagaactccatgaaagatccctcatttctcatttcgtttgacattgtgattttcttctcaacattaaaaaaaataggcttttgcattttcatttctgctgatgatatctgggtcccaaagagagcagctttaatatatttttcctacttgtgggaaaagtattataagtttggttaaattgtcatgtttatagtttttccaagtacatttgtaactacagcaggccttcttcgtactgctgctgttggacaacaggactggcacctgctgcagaggttataccttatgatacttttatgctccatacctgatttgttgggaaatgttatttaggatattcaaatctgcatcataagccgtaatataataggattaatactacattaagttgtatagaagcaagcatgttggaatagatcttttgtgtgtatttactttttttatttcttaattttctaaagaattacttaagatatggatttggagtaaaatgggtgcttttggcagtttcttccatctatcctaacctgaccagtacatattgaggttaagtatctggttaaactttaaggtattcatttatctcctttatgtatgatttttactaaatgccagttttcatttgcttatagtagcttctattttcccttttttccatccatggcataaaaataagtgatttctgggggtggggcagaaatgttcccaagtctgacaatagagcattttacaaattcctacaaagaaaatataggcaaatagataaaatttatttttatggagaagaaatatggccatattatggatttgtcttttttttactcagcaagatagcaggacttacccttctctattaagtatcacttgaattgctaagaagaaaaaagtctgtaccatcatctttcatggttgcattcaaatgtatattttcaaagagaaatacttcttgtgtccccattccaaaatgtcatgggataaatatgaaatagtttatgaagtagcctttctggttcagagtgactggaccaaagtctgaatcttatctgggtatcaggaaaaagaatttttatggaaatccttagtgtctataaacaacccgtgtaaaccctgtctacactatgccaaaaccagtggaaagatgggtagagtcatcttatctcaggatgtcaaaaatctgggtttgactgattcccctaccttcccacacagtatattcttgtgatttttgcttttctgtagatcctgagtcggtgttacaatagtcatgtttttattttgggttaagaaatacgaggtgtaagagctataatttccttttcgtgttatatcatgatctgggttttcttttttcctttacgtttttcacagctcttgagtattttctatttttttctttagtcacaaaaattaaaattaaactttatttttatgaattaaaatgaaatttaatttatttttatgaattaaaattgtggccagtatccactgtgtccttaggctgagaagtactaatttggagtagcccgtgtgtggaattctaaagtgaaggtactgtggattcatttttagtagttttagccccttaataagtggctaagttagaaaactttcagcgaggtaatagaaccacttgaatagaatccatgtgtctttttctgaattggtgaaaattcggccactgatccagtgactcctggtcaaacgtcttataacattactggccataatgcatccctttatctcatggaaatggctgaactttgtggtagctgctgcgagtacctgggcttaacagtaatagagaacctcatttataccatacagacacagcaacttaggaagacagcactgatagcatttagctagttgtaaccaaatacaaatatgtaaaattgagaattatgattaacatatgcaactttagtaataggaatagatgataattttcctgtattgtttcaaataagtgactgttcagctgggatccattggattataatttacaatgtcacataatattatgcttttcaatattgatgagtgatgtaaacaatataaagttggcagtttgtagtagttcagtatcctagaaatacattgaacttcataagtatcagttcatttttaagcatacagaattgaagattctgactgaaatcataaactcagaggaaacaagcccatctttatcactaattacttagcttgaatacttttctatttttaaataatcctaattattgccttttcaattatagtctactgtatttatttatatgggatcaacaggtatttatcaaacatctactgtgtgcccagcactacctagtactgttggggaacatcaatttgcagttgtggtctctgcccttgaaggtatcttctccaggaaattagcagtattattttcacttctaagcaaacatgagcaaaagaggacctgttcattaaaaaacatgctgacttttttagtttcaactgagatatgccactgtagaagtgaaagtaatttcacaattaaagaaatgcttcaacttggtaattaatatggtcatacagggacttggtgtagcatgcaaggaagcagaagacctgggcttttgtcgaagttctgccatttaggtatcagctgtgtaaccttgaataagtcacttaactctttctcttagttttctcatttgtaaatttggattaaagtgtttattatgataatcaattaagaaaatctcttaacacttcatacatacagagaacttatcattaagttaaaactggcaattaatgcacctttatatatatttttaaatgaaaactaatactattcatgatgtttattttatatcaaatatatgcccagggcatgctactttaaaaatccgaggaatctccaacaaggtgctggattaaaatcagatttcgtgcttgaagtggaagaaaaatgaagttgtttatggataagagagtgagaatgtgtatcctcaagtacgttaagatgatttaactgaaagatggctttaggtttttcttgaagaattaggaaagtaccatccccacagattcagcatactcttcaggtactagataaaggtgaaggaagtcatggaattaaaatgacttagcaactccccagggaacttgtggggagaatgaggtggttagaaaggtgagaatgcacaaagacagctctgggttgggtaccaacagtttgcttggtagaaagaaaccagtgtaggaaaggagacgccaccagacatcttcaacagacaagattctttctgcctttttcaaaagatgctctctgcagcagtaagactatagatagagttgattggaatatcatgtgacccagtatgctactgctaggcataattatcaaaaattcatttttctcattaaatattgttaattgctcgccacataaagagaagctagagctcaccagtcttggtggtgtcctagaccttcctctaaagcagtcttgggaagctggatcatcagatctttagcctagacagagtgtcgctggtaaataaaggagacacaggtaacccagagtggacagtgatttgcgtggggagacacagtggatctggggcctctgatactttgcttcctaaaacagcccccagttttcggcttgccctatgagatgatgttcatgtgcttccttgaaaccaggtggaaagaaaggggaagaattaattttctcattctgttgctgttgaacgtaatgtaatcttaatactgtagccttcctagaagcccttccctctttttcatgctgtaaagtcaaatatttgatatccttaacataaattttaaaaattaaggtcattaggaagcaaatgtctatttccaaagcaatgagcttgttgtgactgtgattttattcttctatagtatttttttcctcattttaactgagaggagaaaataatactcttttgcaatatccttaggttctccccttccccctggtgccccttctagtgtcttaagactttgtcttaacaagtataacattacattttgttgttaaaacctttcgaaactgtattcagtgattcttccaagtttatctgctctgcactatttcactaataaaccctggctaccacgtagcccttgatctccaagtagtttacctatgcaagacctgtgacactctgaattcacttctctttctttcagaaagtagtcataaatggagcttaattataaaggtaaaacttgtctccaaccagtttcattttggccatttctttttcaaaatgtcagctgttttcctccaagatttttcaccaaaacaatgatcataagtgctggaatatataatactttgcaggcataaaataacccagacatactctcatatttctttggtgtattttggttggtaaaacttaccagcattaaatgtaaaatataatgaggagttaattccttacctagaactatttcttccttttaagattcataagtaaccttttatttttacagagctacgtataacttccacattacagtcagggacctgaggtgtaacttactaagtgaaccccaaggttattttatcttgcaaaagaaacctaaaccaaactaagggccttacagtttatggttagactgaatcaaaagctataacctcaatttttccaaaaacagcttctgactgcaaaagcaagtcatacagttgttaggtatgaaatagcactgatcaggaaatgcatcttcgcagatggtatttccttcagaaaagacttttctacttttaatataaattaagccataacagtttcatgctgtggaaagagggtgaaaaggttcattttaagagattatataatatgaactttcacatttactgtgaaatgtctaactttgccagtgcttcagcaagtttttttggggggtgatggggaggggtagtattggttttagaggtttcaaatctgtgaactttggagaggggacagttgttggctctggtatttactagttttgtagtaacgttttgctagcctgactgacttttcttactggtttttatgcccacggtccgaggggactgttcttcttgttgggggtgtctgcggaatagcgtctcgtcttgtttgtataggcagtcaatgtgtgtgacatgtgtgtcctttcagtccggaagcccactgtgtgacaatggcgtggggtgtggctgggaggtggggtgctgaagcttgaagagcatttctttgctgattcataacagtatttcccatcttttgcctgcaggcagggaaagtgtacagtatttattttgtttctgttttactttaaatttgtaagtctttaagtagcttacattgattattataggggaggacaagtgacttgtttaaagttgtatttagtattctttccaatttctgtattttaaaatattgaaattaaaattgtattacttctgttttgatttttttagcacttagtgtattttttgctcattttgtttgaaagtataaatgttgaaaattgtataaaatgcgtccttgaaagaaaaagaatctgaattctatatccaa

SEQ ID NO: 1152 - DNA, 6480 bp, Homo sapiens
agtgctacacaagtttgatgtttgtgtcttcttctccaaggccaagaaattatctccataggaggcaacagtactatgcatgttatgaattgtgtctccttggtcagtgataaagaaaatgggaatattgccacagcacctggattcatgattgggcagacacctcctccagcacctcctccacctcctcctccaccccctccatctccaccatgttcatgttcaagggaagagtgtccttcctcccctcctccacccccaccacctccacttcctggggagcctcccatcccacctcccccaccaggcctacccccaactactcacatgaacggctacagccaccttggtaagaaaaagcggatgagaagctttttttggaaaactattccggaggagcaagttcgaggcaaaaccaacatctggaccttggcagccaggcaggaacatcactaccaaattgatacaaagaccattgaggagctctttgggcagcaggaagacaccaccaagtcttcccttcctaggagaggaagaactttaaattcatccttcagagaagctcgagaagagattactattttggatgcaaaacggagcatgaacattgggatatttcttaagcaatttaagaagtctcctcggtccattgtagaagatattcatcaaggaaaaagtgagcattatggatcagagaccttgcgagaatttcttaagtttttgccagagtcagaagaggtaaagaagttaaaagcgtttagtggcgacgtgtcgaagctgtctctggcagattcctttctgtatggcttaattcaggtgccaaactattcacttcggattgaagccatggtgctaaagaaggaatttctaccttcttgctcttctctatatacagatataacagttttaagaactgctataaaagaactgatgtcatgtgaagagctacattcaatattacacttggtgctccaggctgggaatatcatgaatgcaggagggtatgccggcaatgcagtaggatttaaactgtcttctttgctcaaattggcagacacaaaagcaaacaaacctgggatgaatctcctgcactttgttgcacaggaagcccaaaagaaagataccattcttctaaacttttcagaaaaattgcatcatgttcagaagactgctagattatctctggagaacacggaggcagaactgcacttgctgtttgtcaggacaaaatcactaaaagaaaacatccagcgggatggtgaactttgtcagcagatggaagattttcttcagtttgccatagaaaagctgagggaactggaatgctggaaacaagagctccaggatgaggcctacacccttatagattttttctgtgaagacaaaaaaaccatgaaactggatgaatgctttcagatatttagagatttctgtaccaaattcaacaaagcagttaaggacaaccacgaccgggaggcgcaggagctgaggcagctgcagaggctgaaggagcaggagcagaagcagcgctcctgggcaactggggagctgggggcatttggccggagcagcagtgagaatgatgtggagctgctgaccaagaagggtgcagagggcctgctccctttcctgcaccccaggcccatcagcccctccagcccctcctaccggcccccgaacacccgccgctcccgcctctccctgggtccctctgctgaccgggagctgctgaccttcttggagagctccaccggcagccctgaggagcccaataagttccacagcctgccccggagcagcccccggcaggcccggcccacgatagcctgcctggagcctgcagaagtgaggcaccaggactccagctttgcacacaaacctcaggcctcggggggccaggaggaggcccccaacccaccctcagcacaggcgcaccagcttgcagccgcccagcctgagaaccatgcctctgccttccccagagctcggcgccagggcgtcagtgtcctccgaaagaggtacagtgagccggtgagcctgggctcagcacagtcccctcctctctcgccattggctctgggaattaaggagcatgagctggtgacagggctggcccagttcaacctccagggttcccagggcatggaggagacctcccagctgactctgagtgacttcagcccgatggagctagagtctgtggggcataggggcccgcagtccctcagtgccagcagcagcagcctgacacccatgggcagagatgccctggggagtctcagcccagcgctggaggatggcaaggctgcccccgatgagcctggaagtgcagctttgggatctgtgggtagcagcgaccctgagaacaaagatcctagacctctgttctgcatctcggacaccaccgactgctcactgaccctggactgctcagagggaaccgactccagacccagaggcggggacccggaggaaggcggggaaggggatggctccatgtcctctggggttggagaaatgggggacagccaagtctcctccaaccctacatccagcccccctggggaggctcctgcccccgtctctgtggatagtgagcccagctgcaagggcggcctgcccagggacaaacccaccaaaaggaaagatgttgtagcaccaaagagaggctccctgaaagaggcgtctcccggggcctccaagcccgggagcgcccggcggagccagggggcagtggccaagtctgtgcggaccctgaccgcctcagagaacgagagcatgcgcaaggtcatgcccatcaccaagtccagcagaggcgccggctggaggcgaccagagctgtcatcccgggggccctcccagaatccccccagcagcacagatactgtgtggtcacgccagaactccgtgcggagggcctccacaggcgccgaagagcagaggctgccgcgggggagcagcggctccagcagcacccgtccggggagggacgttcccctgcagcccaggggttctttcaagaagcccagtgccaaaccactcaggaacctccccagacagaagcctgaggaaaataagacctgccgcgcccactccgagggccctgagagtcccaaagaagagcccaagaccccgtcagtgcccagcgtcccccacgaactaccccgtgtcccgagctttgcccggaacacagtggcctcctcctctcgaagcatgagaacagatcttcctcccgtggccaaagcccccggcatcactcggacagtgtcgcagcggcagctgagggtgaaaggggaccccgaggatgccgctcccaaggacagcagcactttgaggcgagccagcagtgcccgggcccccaagaagcgcccagagtctgcggagggtcccagtgccaacacggaggcccctctgaaggccagaggggctggggaaagggcctccctccgtcggaaggactccagtcggaccacgctggggagaatcctcaatcccttacggaagtgatgggtgcctgtcctctcctgcctcctgggattcagacggtgaagactgacttctgggacgaggatggggaaagaggcagcatgtctttgttacagataaagcagccactggtgccactgctagtgacgctgttgggatggcacagtccaggaggcctgtggactgcagcctgctgtgctgagccctgctgcagtccagcgtccagatggatgcacgttcactactgtgacggccgcacctcccccatgcaccccaccctcccccaaagcccggatcccgagaaagatttagtaggagtgtaaagtgacattcttatgaaacaagtcaaaaaagtttttttcaggccagtttttatatatcaaagactttctttttaatataaaaattagctaggtgcagtggttcatgcctgtaatccagcactttgggaggctaagatgagtggattgcttgagcctaggagttcgagaccagcctaggcaacatggagaaaccccgtctctatcagaaatacaaaatttagccgagtgtggtggcacatgcctgtggccccagccactctgaacgctgagatgggaaggtcacttgagcccaggaccccaccactgcactccagcctggatgacagagtgagaccttgtctcaaacaaaacaaaacaaaaatgaaatgttctagttttggttccttttgcagagtgaaatgcctcccaggaaaaaaatacatatgtatttttttgcgacagggtcgtgctcttgtctcccagactggactgcagtggcacaatcatagctcactgcagctttgacctcccagacccaagtgatcctcccacctcagcctccctcagagctgggactacaggcgtgcaccaccacgcctggttaattgtttttttttaatttatcttttgtagagatgggatctcactatgttgctcaggctgatctcgagctcctgggctcaagtgatcctcccacctcagcctcccaaagtgctgggattacaggtgtgagccaccacacttggccagtatatcctcagtatgaagatatttttatcttcctgtgttctctggcttcagagtttcacctgcccacacagggtccgttgctggcaactggacttccccataagccttgggtatcctgtgatgggctgtgtctccctgaagattgtctggcttgcccacttctccgtgcatgactctgggtgtgagtctgtctaggaacaggagggaaagttggactcagacagaaatcagatgcttccatgtattcagggcgcgcattgtgagcagtggagtatgagccttgagggcctcatggttgcagggcaggcttccctgcagatgggtggcagcccctggtagaatgctggatttctctggaatctagaagtgccatattttagtggaaaggcatcagggctgtttgacagtgtgcgtctttccaatcccatgttcctccattcgtgtgtctgttataaaactgagtgaaggctgctatgacctgtgttcactctggttacagggaggtgcaaaccattctgtctcccagcctttcttctctctttgtgtgctcccagcacttccttcttttctaacatggcctggagagagtctctctctccttgtctctgtctcttaataatagtttttaacgtggacatctcttccttggtacagtggtttttaaatactgagaagaaccaagtcaggttttttaaagcagactaaaagcatgaaattgctttcagaagaatgtatatcatcgggaaaagttcgggggcagagtgggggaatcaggctttattcaaaagaaacagttgaaaacatgggactttttctacccaatgcccatttcacgactcctctgagactaattgggaaacggggaaattcttggaattttttttttaagaaacttttttgtgttttttttaattttaggtcacttattagtgaaacctcattttagatctgacattggtagatagatggatttaggcaaatatgatgcgtttgtggggaatccacgtggttgacgttagaacctcccttctgcagactgttgcctgtcatctaagcgaattggaaatgctgagcttccataagtcagctgagttttaaaggtaaacgttatggctgaagtagtaaagcacctgaccacaaaacctcttgtaaaaacagccctgagtaggtatttccagggctccacaaagttgcttatgggaatcctgagctgcttttcaccatctcaagaagcctaagaagttatatatttaatcaggtagacaaaacagttcaaagcataaggtccatggtggtggaaaatggatgcaagtgattctaagtttgtggatttgtggatagcagagggatcgggacctcttggaggaaccctgggtaccaagctcccaggcccttcctctatcatggatgctgggtgactttgggaagtcaccacctcttcccaagcctgtttcccatatcacagatgtggggccatggcctcgatgatggtctccacaggtctttccacctctgtgagtccaagtcaggtcaatcagcaaggacccatctctgccctgggtcagctcctcagaaccaacccccagcatctctaaagcaaaagcctcacctcaagggctgctcagaagagagcaccttcagcatgagttgttgctggaagatctaataagctgtgtttcctgggaagtggtgctttacttagccctgtggacaacttctctatgcatctgtgtgagcagatgatcattgtattaccttttatcggtagtaagcttggaaaaataatttaagaatacaatggagaaatgtaaataagtatctatgtaaatttgtttaaaataaactgaatgtatttaatggtccatttatatgttcttttatgtaacatgtagtttaataaagttcctgtttatgagagtcatgtttcatctcagcttcttcc

SEQ ID NO: 1153 - DNA, 3977 bp, Homo sapiens
atgcgaccggactgcaattcccagaagccgtcgcaggccctcagcatccgggacactagcagcaaggatccctgggtattgtggtcctgtgctttgccagcaaccctctgccgacgactgaataataaaaggggagcggcgaagaggcaggaagacaagaccatgtcgaagggccccgggcccggcggctccgcagcttcctcggcgcccccggccgctaccgctcaggtgctgcaggcacagcccgagaaaccgcagcactacacgtacctgaaagaattccgcacagagcagtgcccactctttgtgcaacacaaatgcacgcagcatcggccctacacctgcttccactggcacttcgtgaaccagcggcgccgccggtccatccgccgtcgggacggcaccttcaattacagccctgacgtctactgcaccaagtacgacgaggctacaggcctctgcccggagggcgacgagtgcccattcctgcacagaaccacaggggacactgagcgcaggtaccaccttcgttactacaaaactggaatctgcatccacgagacagactcgaaaggcaactgcaccaaaaacggcctgcactgcgcttttgcccacgggccccatgacctccgctcccctgtctacgacatcagggagcttcaggccatggaggccttgcagaatggccagaccacggtagaggggagcatagagggccagtcggctggggctgcgagccatgccatgatagaaaagatcctcagcgaggagcctcggtggcaagagactgcttatgtgctggggaactataagacggagccttgcaagaagcccccgcggctgtgccgccaaggctatgcctgtccctactaccacaacagcaaggaccggcggcggagcccccggaagcacaaatacaggtcgtctccatgtccaaacgtcaagcacggggatgagtggggagaccctggcaagtgtgagaacggagacgcctgccagtactgccacacccgcaccgagcagcagttccaccccgagatctacaagtccaccaagtgcaacgacatgcagcagtcgggcagctgtccccgaggacccttctgcgcctttgcccacgtagaacagccacccctgagtgacgacctgcagccttcctcagctgtgtccagccccacccagccaggtcctgtcctgtacatgccatctgccgccggagactcggtgcctgtgagcccctccagcccgcatgcccctgacctcagtgccctcctctgtagaaacagcagcctaggcagcccgtctaacctctgcggctccccaccgggctccatcaggaagcccccaaacctggagggcatcgtcttccctggggagtctggcctggcccctggcagctataagaaggctcccggcttcgagagggaagaccaggtgggagccgagtacctgaaaaatttcaaatgccaggccaaattaaaaccccactcattagagcccaggagtcaagagcagcctctgcttcagcccaaacaggacatgctgggcatcctccccgcaggcagccccctgacctcaagcatctcttctagtatcacctccagcctggcagctaccccccctagcccagtgggcaccagcagcgtccccggcatgaatgcaaacgctctgcccttctaccccaccagcgacacggtagagtcagtcatagagtctgctttggatgacctggacctgaatgagtttggcgtggccgccctggagaagactttcgataacagcacagtgccccacccaggaagcatcaccatcggcggcagcttgctgcagagctctgcacccgtgaacatccccggctccttgggcagctctgcctccttccactcagcatccccgtcccctcccgtcagcctctcctcgcatttcctgcagcagccccagggccacctgagtcagtcggaaaacacatttttgggaacctcagcatcacatggatctttgggtctgaacgggatgaacagcagcatctgggagcattttgcctctggaagcttctccccgggcacttcccccgctttcctatcagggccaggggctgccgagctggcccgacttcggcaagagctggatgaagccaacagcaccatcaagcagtgggaggagtcctggaagcaggccaagcaggcttgtgatgcctggaagaaagaggcggaggaggctggtgagcgggccagtgcggcgggcgccgagtgcgagctggcccgggagcagcgggatgcactggaggtgcaggtgaagaagctccaggaggagctggagcggctacacgcggggcctgagccccaggccctgcccgccttctccgacctggaggcgctctcactctccaccctctactccctccagaaacaactgcgggcccacctggaacaagtggacaaggccgtgttccacatgcagtcggtgaaatgccttaagtgtcaggaacagaagcgggcagtgctgccgtgccaacacgctgcgctgtgtgagctctgcgctgagggcagcgagtgccccatctgccagcctggccgggcccacaccctccagtcgtgaccctgcaggcctggcccagcctggcccagatcttctcacctaggactttttaaagtatatatatatatatgaatatatatatatatgtgtatgtatgtatgtatatgtatatgattatgtatatgtatacatttccgtatgtatgtatatgtatacatttccgtatgtgtgcaggtatgcgtggtggtgtggacagtgtctgtgtgtatatctgtacatagatatagacacacactttaaaagacttaccaagcactttttaaaagaagaaactattttgcagtcctcccctacccactccctgcccttcccactgcagagatgacatcccctcttctcccactggccttttggcagagaatctggttctgtctcttttttaatgtaggaactaactatttttaacttcttcctggggcctgagcagggaagggtgggactggaaggcactaaggggaagggagaagccctcagggcaggccctgctccccctacctccttgccagggcaagggtggagtgtggaagacgtgggtcccccagagcaggcctggcccccagctgtgagggcctcagggaggcccgagggggagtgctgggggtctcagctggcttagctcctaagtttaccaaatgttaatttagtcttggggagaacagcaagggctggaggccagtgctgcagggccagccccactcctgacacctgggcccttgaagctccttgaggggcaaggcccaggagttccagccctcaggttcctgagggtccaccctcagtccttccccccgccgcccctccccggactccccacaagagcctccctggccccagggccgcctaccaggctggtactcattctatgaccaccgcccccaaccagctgcccccagctctccctgccccctcccctctctggcagctagcagggcaattggcggggaggagtgcggactgaggactgaggaccaagggggcccaggccctgccctcctacccggaggggctccgtttgcattccttggtgctctctgagtgcagctggtgtcccgccctgttctgggcggacgcctgtgtgcgtgtgtgtgtgcctgtccagtgtatattgtgtcttagcttccattttaaaaattgttctgtacagagagagatgcagcaggggcgggagggcagagtgggcggaggggagcagccgcacccccagcaccgggtgtctgcggtaggaacaagagggctgagagggtctggtcctggcccaggctcccccttgggctcagcacgaaagggctttcaatgaattaagtgaaaactttttccttttttacaaaaatgcaaaaatcaacaaagctccaaacctattggaaataaaatatgaacttgca

SEQ ID NO: 1154 - DNA, 4949 bp, Homo sapiens
cagccgccggcggcgctagcacctcggagtcgggcggccggagcagcggagcgcagcgcggcgcagggaacggcactgggggtggggagaccagcccggccgagccgagggccaccccctggtcctctgccctcgcgccccgctagggccaggtgcacaaaaagctttaaacaagttaaaatctaggcaacagactccctgaagtgttgactgcccaacttaatcatgactgtgattcaaaaatgttaataaataaaccaaggtgtagatcatggggaattcatatgctgggcaactgaaatctgctcgatttgaggaagctctccacaactccatagaagcctccctcagatgtagtagtgtggtaccacggccaattttttcccagctatacctggaccctgaccagcatcctttctcatctgcagatgtcaaacccaaggtggaggatctggacaaagatttggtaaaccgctacactcaaaatggaagtctggatttttctaacaatctaacagttaatgaaatggaagatgatgaagacgatgaagaaatgtctgattcaaacagcccaccaattccctattcacaaaaacctgccccagaaggatcttgcactacagatggtttttgtcaagcaggaaaggatttgcgtttggtatcactgtgtatggaacaaattgacatcccagcaggattcctcctggtgggggccaagtctcccaatctgcctgaacacatcctagtttgtgctgtggacaagcgatttctaccagatgatcatggaaaaaatgcacttttagggttttctggaaattgtatcggctgtggagaaagaggatttcgatatttcacggaattttccaaccacattaacttgaagctcaccactcagccaaagaagcagaagcacttaaagtactacctagtcagaagctcccagggtgtactgtctaaaggacctcttatctgctggaaagaatgtagaagccgacaatcctctgcttcttgccactctattaagccaagctcttcagtgtcgtcaactgtgaccccagaaaatgggacaactaatggatacaaatcaggattcactcagacagatgctgctaatggaaacagtagccatggagggaagggcagtgcatccagctccactccagcccacacagggaattactctttgtcaccacgacctagctatgcatcaggagatcaagctaccatgttcatttctgggccaccaaagaaacgacaccggggatggtatcctgggtcacctctcccccaacctggcttagttgtacctgtccctacagttcgccctctttcaagaacggagccccttttatctgccccagttccacagaccccactaactggaattttacaacccaggcccattcctgcaggggaaactgtaattgttcctgaaaacctgctgagtaactcaggagttagaccagtaattctgataggctatggcactttaccctatttctatggaaatgttggtgacattgttgtgagtcctctgctggtgaattgctacaagattccacagttggaaaacaaagatttggaaaaattagggttgaccggcagccaatttctgagcgtggaaaacatgattcttctgacgatacagtatcttgtgcggctgggtcctgatcaggtacctctcagggaagaatttgagcaaattatgctgaaagctatgcaagaatttactctgagagaaagagccctgcagataggtgctcagtgtgtccctgtgtcaccaggacaactcccctggcttgctagattaattgccagcgtatctcaagacttggttcatgtggttgtgacccagaactctttggcggagggcatttcagagaccttaaggactctcagtgaaatgagacactatcaaaggctgccagattatgtggtggtaatttgtgcatcgaaaatcagaggaaatgaattttgtgtggtagtgttaggtcagcaccagtcccgagctctggcagagagcatgctcaccacaagtgagtttttgaaagaaattagttatgagcttatcacaggaaaggtcagtttcctggcatcacatttcaaaaccacatcattaggcgatgacctagacaagctgctggaaaaaatgcaacaaagaagaggagacagtgtggttacccctttcgatggagaccttaatgaatgtgtgtcaccccaggaggctgctgctatgattcccacacaaaacctggatttagataatgaaaccttccacatttatcaaccgcagctaacagttgccagaaaactcttatcccaggtgtgtgctatagcggacagtggcagccagagcctggacctcggtcacttcagcaaagtagacttcatcatcattgttcccagatcggaggtgttggttcagcaaactcttcagcggattcgacaatcagtgtcatttcaggctctttgtcacatagcgaacccagtcatgggctagctgatagagtcattaattgcagagaagttctggaagctttcaacctcctggtgctccaggtcagctccttcccatacactctgcagacccaacagtcccgcattagctctagcaatgaggttcactggatacagctggatactggggaggacgtgggctgcgaggagaagctgtactttggcttgagtgagtacagcaagtctctgcagtgggggatcacgagcccacttctgagatgtgacgagacttttgaaaaaatggtgaacacactcttggagaggtaccccaggctgcacagcatggtcgtccgctgctatcttctcatccagcagtactctgaggccctgatggctctcaccaccatggcgtcactccgcgaccacagcacaccagaaacactcagcattatggatgacctcatcagctccccaggcaaaaacaaaagtgggaggggacacatgctcattatcagggtgccctcggtgcagctggcgatgttagccaaggagcggctacaggaggtgcgcgacaaactgggtctgcagtatcggtttgagatcatccttgggaacccggccaccgaactcagtgttgcaactcactttgtggcgcgattaaagagttggagaggaaatgaaccagaagagtggatccctcggacataccaagatttagacggtctaccttgtattgtgatattaactggcaaagatcctcttggagaaacctttcccaggtctttgaagtactgtgacctccggttaattgactcaagctatttaactcgcacggccttggagcaggaggtgggtctggcatgctgctatgtctcaaaagaggtcatccggggacccactgttgccctggacctcagcgggaaggagcaggagagagctgctgtcagtgagaatgactccgatgagctgctcatcgacctggagcggccccagagcaacagcagcgctgtcacagggacctcgggttccatcatggagaatggagtgagctcttccagcacagctgacaagtcccagaagcagtccctgacccccagctttcagagcccagccaccagcttggggctggatgaaggggtctccgccagctcagctggagccggagccggggagactctgaagcaggagtgtgactccctgggcccccagatggcgagcagcaccacctccaagccgtcatcatcatcctcaggacccaggaccctcccatggccgggacagcccatcagaggctgccggggcccacaggcagccctgccaccagtggtgatcctatccaaagcggcctacagtctcctgggctcccagaagagtggcaagctgccatcctcctcctccctgctgccccacgccgacgtggcctgggtgagctccctgcggccactcctgaacaaggacatgagcagtgaggagcagtccctctactacaggcagtggaccttggcccggcagcaccacgctgactatagcaaccagctggacccggcctctggcacccgaaacttccacccccgacggctcctgctgacagggcccccacaggtgggaaagacgggctcctatttacagttcctcaggatcctcttccgcatgctcatcaggctcctggaggtggacgtgtatgatgaggaggagatcaacaccgatcacaatgaaagcagtgaagtgagccagtcagagggagagccctggcctgacatcgagagcttcagtaaaatgccttttgatgtcagtgtgcatgaccccaagtacagtttgatgagcctggtgtatactgagaagctggcaggggtcaaacaagaagtgataaaggaatccaaagttgaagagcccaggaaacgggaaactgtatccataatgctgaccaaatatgcagcctataacacctttcaccactgtgaacagtgccgccagtacatggacttcacctctgcctcccagatgtctgactccacccttcatgccttcacattctcttcttctatgctgggagaagaggttcagctctatttcatcattcccaaatccaaagagagtcattttgtcttcagcaagcagggcaagcacctggagagcatgcggctgcccctggtttcagacaagaatttgaatgcagtcaagagccctattttcactccttccagtggtcgacatgagcacggactcctaaaccttttccacgccatggagggcatcagccaccttcacctcctggtggtcaaagagtatgagatgcctctgtaccgcaagtactggcccaaccacatcatgctggtgcttcccggcatgttcaataatgcaggcgtgggtaaggggcccccctgggatggggagaagggcttcgaagataaactgagctccattcccctggcatgaaactttcagattcccctgcctctagaaattgtcctgccctcctcaccactcttcgg

SEQ ID NO: 1155 - DNA, 5809 bp, Homo sapiens
cagggcctgggcacgaccatggtgggacgtcgcccgcggcttcggggaccgctgcggcagcagaggcggctggccaggaacgcgggccgaggctggaccctttgggcagctagcccgtgatctctgccgtcaccgatcgcgattcctaccccctcgccttcccccggcgccgacggccacaccgccggacgatgcgcgcccgcggccgcccgggaggctgagcccagcttcccgctccgccttccccgcgcagctgcccccatggctttgcggggcgccgcgggagcgaccgacaccccggtgtcctcggccgggggagcccccggcggctcagcgtcctcgtcgtccacctcctcgggcggctcggcctcggcgggcgcggggctgtgggccgcgctctatgactacgaggctcgcggcgaggacgagctgagcctgcggcgcggccagctggtggaggtgctgtcgcaggacgccgccgtgtcgggcgacgagggctggtgggcaggccaggtgcagcggcgcctcggcatcttccccgccaactacgtggctccctgccgcccggccgccagccccgcgccgccgccctcgcggcccagctccccggtacacgtcgccttcgagcggctggagctgaaggagctcatcggcgctgggggcttcgggcaggtgtaccgcgccacctggcagggccaggaggtggccgtgaaggcggcgcgccaggacccggagcaggacgcggcggcggctgccgagagcgtgcggcgcgaggctcggctcttcgccatgctgcggcaccccaacatcatcgagctgcgcggcgtgtgcctgcagcagccgcacctctgcctggtgctggagttcgcccgcggcggagcgctcaaccgagcgctggccgctgccaacgccgccccggacccgcgcgcgcccggcccccgccgcgcgcgccgcatccctccgcacgtgctggtcaactgggccgtgcagatagcgcggggcatgctctacctgcatgaggaggccttcgtgcccatcctgcaccgggacctcaagtccagcaacattttgctacttgagaagatagaacatgatgacatctgcaataaaactttgaagattacagattttgggttggcgagggaatggcacaggaccaccaaaatgagcacagcaggcacctatgcctggatggcccccgaagtgatcaagtcttccttgttttctaagggaagcgacatctggagctatggagtgctgctgtgggaactgctcaccggagaagtcccctatcggggcattgatggcctcgccgtggcttatggggtagcagtcaataaactcactttgcccattccatccacctgccctgagccgtttgccaagctcatgaaagaatgctggcaacaagaccctcatattcgtccatcgtttgccttaattctcgaacagttgactgctattgaaggggcagtgatgactgagatgcctcaagaatcttttcattccatgcaagatgactggaaactagaaattcaacaaatgtttgatgagttgagaacaaaggaaaaggagctgcgatcccgggaagaggagctgactcgggcggctctgcagcagaagtctcaggaggagctgctaaagcggcgtgagcagcagctggcagagcgcgagatcgacgtgctggagcgggaacttaacattctgatattccagctaaaccaggagaagcccaaggtaaagaagaggaagggcaagtttaagagaagtcgtttaaagctcaaagatggacatcgaatcagtttaccttcagatttccagcacaagataaccgtgcaggcctctcccaacttggacaaacggcggagcctgaacagcagcagttccagtcccccgagcagccccacaatgatgccccgactccgagccatacagttgacttcagatgaaagcaataaaacttggggaaggaacacagtctttcgacaagaagaatttgaggatgtaaaaaggaattttaagaaaaaaggttgtacctggggaccaaattccattcaaatgaaagatagaacagattgcaaagaaaggataagacctctctccgatggcaacagtccttggtcaactatcttaataaaaaatcagaaaaccatgcccttggcttcattgtttgtggaccagccagggtcctgtgaagagccaaaactttcccctgatggattagaacacagaaaaccaaaacaaataaaattgcctagtcaggcctacattgatctacctcttgggaaagatgctcagagagagaatcctgcagaagctgaaagctgggaggaggcagcctctgcgaatgctgccacagtctccattgagatgactcctacgaatagtctgagtagatccccccagagaaagaaaacggagtcagctctgtatgggtgcaccgtccttctggcatcggtggctctgggactggacctcagagagcttcataaagcacaggctgctgaagaaccgttgcccaaggaagagaagaagaaacgagagggaatcttccagcgggcttccaagtcccgcagaagcgccagtcctcccacaagcctgccatccacctgtggggaggccagcagcccaccctccctgccactgtcaagtgccctgggcatcctctccacaccttctttctccacaaagtgcctgctgcagatggacagtgaagatccactggtggacagtgcacctgtcacttgtgactctgagatgctcactccggatttttgtcccactgccccaggaagtggtcgtgagccagccctcatgccaagacttgacactgattgtagtgtatcaagaaacttgccgtcttccttcctacagcagacatgtgggaatgtaccttactgtgcttcttcaaaacatagaccgtcacatcacagacggaccatgtctgatggaaatccgaccccaactggtgcaactattatctcagccactggagcctctgcactgccactctgcccctcacctgctcctcacagtcatctgccaagggaggtctcacccaagaagcacagcactgtccacatcgtgcctcagcgtcgccctgcctccctgagaagccgctcagatctgcctcaggcttacccacagacagcagtgtctcagctggcacagactgcctgtgtagtgggtcgcccaggaccacatcccacccaattcctcgctgccaaggagagaactaaatcccatgtgccttcattactggatgctgacgtggaaggtcagagcagggactacactgtgccactgtgcagaatgaggagcaaaaccagccggccatctatatatgaactggagaaagaattcctgtcttaaactaagtgccttactgttgtttaagcatttttttaaggtgaacaaatgaacacaatgtatctacctttgaactgtttcatgctgctgtgttttcaaaagctgtggccatgttcctaaattagtaagatatatccagcttctcaaaaaatgtatatgattgctgttagccatgtctattgtttttcctctggattcttttcttataacttggaatacacaaaagtgtaaaacaagagatgtgcaccaatgaaaactatgctgggtcgaattaccttcagcacaatgttaatgtttttgttctcatttatgcctttgtccatttgcacacaacagaaattgtaatgagcttcactatttttgtttctttccttccttttttttcttttttcctttctttcctttttcttgtcttgtttcttgtttttttttcttgtagtttcttttcttaattgtcatttttgcaacaaaaagccaagaaagagctttagtttcttggcaagaataatgtgatattagtaagtaaaggtcttaaaagtctgacgactggaatagatataaagtcctgtttaaactacctaaccttggctgtgggccgataatgcatatgtccagttctcacttaaattatgcaatgatatttctctctgaggaaattatacggaatgtaacttataaaagctttactgaatataagttataagcattttattcattagaactccaaaatagatgttcaaagttcagtccttgccatttgactgagaccacatggtgtgccccttgagtgaggctaatctttaggtttttcctatagaaaacattcttcctccatcagtagccctttatttgatattcagaagtggaaagctttttcattctccagtagaacttttaaaaattgttacagatacctagctcttcacagatatcatgtactgtaaacagtcatgtgtcttaattttattttctctatttgagtgcataattatcctaataatcccaaagacactgacaactcaaggaacagcagtacagtactattagaagttaagtatgttgttgttatttcacatttcatttaattgtggataaatgttagacatctgttgaaataagctcatatggtggaaacgacaactatattatgaattattttcagaaatggatctttgaatagcagatcaggatttaaataataaaattatctatgaatcacttttatggtcatacatatatgatacaaatccagagttattggtgcagaaatggctacccgagagcttggtaaatttgccttggtttcttatgttaaatgtattgtgcttcccttctgtctctagaatgtggctcttcagaagacagacaatcgacatttaaatttttccaaacaatgaaaaactaaattaaaaacattgcttgatatttcatttaaaattgcaccttgcttaaggtttactgaataactgaaatgtcagcaatttaaaataaattcaattgtgtgataaaatatctcacctataatagaagaaaaggaaaatcatattatttggcaattttgcagcattgtggttgcctaacaggtatatccagcagatgagaaacagtatgaaaggattgtattaacatggtaagttttgccctaaggaaaacgatcttgcattctggattcttgcagcaaagtctcagatacttaatacgttttcttgttttatcatctgttctatgattcggcttcactttgtgtggttattgaattatgtaacagagatttggttttcccaaaatgttatcacatttgaaactatgattgctttgtgttcagtccttttggaacacgtagcttccagcttaagggtagagaaatatatacctaaaatcatcaatacatgaaagaaaaaggatggaaactatgtcctcagttttacttctaccaaaacatccctgtatgtgtgtgcatgtatgttggcgtgtgtgtgtgtgcatgcatattagtaaatgtgtgtttgcatgtgtgtgttggggagtgtatgtgatctgggtgtttgtttatctctgttattattcccctttagctttattttagtcaactctacattatgatgaatttcaaaatgaagctgtattaaaataattgtaatataacaattcaatctcacatgttactgcagatagttaacttttgctgcaatctattgtacatttgcaattttctgtgttagtaaacttagcagaatctggttatttatttttgtgtaggcttaatgttcactgaaagataagtcaattactgttagtaaaaaattaaggtactctcactgcagagatttaaggcctgggcctaatgtgctgtattatgaagccttgtgactgaaaaatatgtttacatatgttgtctatttttttaataaacttttatagctggtctatttgctcagta

SEQ ID NO: 1156 - DNA, 3416 bp, Homo sapiens
gtgcgcaaggagcgggcgcggagccggcgggcgggcggaggatagcgcgggcgcggcacctgcgggcccgagggtctggctgtcgcagcgccgggccgccccgactccgagcggctgctgagatgagtgcagtgtcgcagccccaggctgctcccagcccgctggagaagtcgcccagcacggcgatcctgtgcaacacgtgtgggaatgtgtgcaagggcgaggtgctgcgggtgcaggacaagtacttccacatcaagtgcttcgtctgtaaagcatgtggctgcgacctggccgagggcggcttcttcgtgcggcagggcgagtacatctgcacgctggactaccagaggctctacggcacccgctgcttcagctgcgaccagttcattgagggtgaggtggtgtcggcgctgggcaagacctaccaccccgactgcttcgtgtgtgccgtctgccggctgcccttcccccccggggaccgagtgaccttcaacgggaaggaatgcatgtgccagaagtgttccctgcccgtatcggtgggcagcagcgcgcacctgtcccagggcctccgaagttgtgggggctgcggcacagaaatcaagaatggccaggccctggtagccttggacaagcactggcacttgggctgttttaagtgcaagagctgtgggaagctcctgaatgccgagtacatcagcaaggatgggctgccctactgcgaagctgactatcacgccaagttcggcatccgctgtgacagctgtgagaaatacatcacggggcgcgtgctggaggccggagagaagcactaccacccttcctgcgcgctatgtgtcaggtgcggccagatgtttgcagaaggcgaagagatgtatcttcaaggttcctccatctggcatccggcgtgtcgacaagcagccagaactgaagacagaaacaaggaaaccagaacttcctcagagagcatcatttctgtccctgcttccagcacctcagggtctccgagccgtgtgatttatgccaagcttggtggtgagatcctggactacagggacttggcagcccttcctaaaagtaaggccatctatgacatcgaccgccccgacatgatctcctactcaccctacatcagccactctgcaggggacaggcagagctacggcgagtcccctcagttgctctcgccaacgccgaccgagggggatcaggatgaccggtcctacaagcagtgtcggacctccagcccaagctccactgggtcggttagcctcgggcgctacactccgacctcacggtcaccacagcactacagccgtccagctgccaggcgatcggatggggaggatggaagcttggaccaggataacaggaagcagaagagcagctggctgatgctcaagggggatgcagacacaaggaccaattctccagacctggacacccagtccttgtcccacagcagcgggaccgacagagaccctctccaaaggatggcaggggacagctttcactcacagatctatccgtatgactccctcatcgtcacaaaccgaattcgcgtgaaactgcccaaagacgtggaccggacgagactggagagacacttgtcgcccgaggagttccaggaagtgtttgggatgagcatcgaggagtttgaccgcctggccctctggaagaggaatgaccttaagaagaaagcccttttgttctgacggctgccagcctgccccactggtgtgtgccgggcgccgaggccaggggcccctggcgagaaccgcacacacccctcccacacaccttgctctggcttctctgtgtccatggggtgggcgggagggggtcccccagcaggtgcggcccctgcacctgccggcgacactcctgccggtagtttagggccgagacggctagcttcacgccacccttccccgctgtggcttggtgtcagggagaggctgtagagtggctgtgtcgggcatcagatggagcacacaggtggctgcagcccagcccaccttcccagcgttctcgaggtgccctggccccggtgctgggcacgtgggggacagaggtggccgggacgtgagctgtgaggcttgttgatgatggttgctgacaccatcatcgggggtgggcacacggcccttcggagcctgggcagcctggcctcacaggcagactcgcagacggggcagtgagcgtctgggacagtgccaagagtggggtgtgtgatttttgcaggcgtctgtgatgggtctctttagggacaaatgtcaacaagggacaagacagggcaccttccgccagcgcccctccatgcgctgcgttcctcctccagatcgacccctagatgcctacacaatatctttaaagtaacacagaagtttttattttattaaaaagtatagcctacttaaacgcgagatgacatatatagagtttaattttacggtccctccgcaggggagcggcctccagccttattctccaccgctcggatctgtgtggtttcagtctgttcttggtgtggtcctcatacacagagctccctgtctagtttcttttctttttcttttttctttttctcgtcacacaggtaaccttaaagacagacccctctaaagaacgctttgtaaatacatgtgaggtatagccaccactgttttccttgctgttatttttccaagtcttggggagaaaacatcctcctctgatggccaaagccctggaatcaagggtttccacgtaccctgcctaatacccgacgtagctcttgatgcaccgtccttgtgctgtggctggcggtgtctcagcctgaaacataaaccccacatgccccaggagcgatgtgctccctgaaacagacaaccacacgctgttggggagagaaggatggagataggatggagataggatggagatgtggctcttctcatctttgaagccagcagggcatcccggagcaggaggctggccgggctccccaagcgaaggcgttggtgtctgtcattaggtgtgtgttagggtgcagcaccggccgtcacaggatgctgataagcgcgctgagaggtggatgaaacaccaaagtctgtttccccgtccgcagtgggtgttgcctctttgtgtgtgtcccgatgttcctgcctgtgagtcggccttactccgtttccttagcgcccatgacacgccaagtcccgtttcgcactcggcttctcacccgcccagctcggctagggagggggagtttttagcacctaatatgcttcctgccattgcgcaatctgagcctgagcaactggaaacccccatttctcattagtgcaatgtcatatctgatcccaggaagcctggaaaataaaagacgatgcattataacttgcggaagtacaaaaaaaaaaaaaaaaaaaaaaaaa

SEQ ID NO: 1157 - DNA, 4970 bp, Homo sapiens
atgaggcaagtgctgtggttgtgtaatgtctgcgtaaccgcacgggaaacccgccaccacctccacctccctgccatcctcgacaagatgcctgcccccggcgccctcatcctccttgcggccgtctccgcctccggctgcctggcgtccccggcccaccccgatggattcgccctgggccgggctcctctggctcctccctacgctgtggtcctcatttcctgctccggcctgctggccttcatcttcctcctcctcacctgtctgtgctgcaaacggggcgatgtcggcttcaaggaatttgagaaccctgaaggggaggactgctccggggagtacactccccctgcggaggagacctcctcctcacagtcgctgcctgatgtctacattctcccgctggctgaggtctccctgccaatgcctgccccgcagccttcacactcagacatgaccacccccctgggccttagccggcagcacctgagctacctgcaggagattgggagtggctggtttgggaaggtgatcctgggagagattttctccgactacacccccgcccaggtggtggtgaaggagctccgagccagcgcggggcccctggagcaacgcaagttcatctcggaagcacagccgtacaggagcctgcagcaccccaatgtcctccagtgcctgggtctgtgcgtggagacgctgccgtttctgctgattatggagttctgtcaactgggggacctgaagcgttacctccgagcccagcggccccccgagggcctgtcccctgagctaccccctcgagacctgcggacgctgcagaggatgggcctggagatcgcccgcgggctggcgcacctgcattcccacaactacgtgcacagcgacctggccctgcgcaactgcctgctgacctctgacctgaccgtgcgcatcggagactacgggctggcccacagcaactacaaggaggactactacctgaccccagagcgcctgtggatcccactgcgctgggcggcgcccgagctcctcggggagctccacgggaccttcatggtggtggaccagagccgcgagagcaacatctggtccctgggggtgaccctgtgggagctgtttgagtttggggcccagccctaccgccacctgtcagacgaggaggtcctcgccttcgtggtccgccagcagcatgtgaagctggcccggccgaggctcaagctgccttacgcggactactggtatgacattcttcagtcctgctggcggccacctgcccagcgcccttcagcctctgatctccaattgcagctcacctacttgctctccgagcggcctccccggcccccaccgccgccacccccaccccgagacggtcccttcccctggccctggccccctgcacacagtgcgccccgcccggggaccctctcctcaccgttccccctactggatggcttccctggagccgaccccgacgatgtgctcacggtcaccgagagtagccgcggcctcaacctcgagtgcctgtgggagaaggcccggcgtggggccggccggggtgggggggcacctgcctggcagccggcgtcggcccccccggccccccacgccaacccctccaaccctttctacgaggcgctgtccacgcccagcgtgctgcctgtcatcagcgcccgcagcccctccgtgagcagcgagtactacatccgcttggaggagcacggctcccctcctgagcccctcttccccaacgactgggaccccctggacccaggagtgcccgcccctcaggccccccaggccccctccgaggtcccccagctggtgtccgagacctgggcctcccccctcttccctgcgccccggcccttcccagcccagtcctcagcgtcaggcagcttcctgctgagcggctgggaccccgagggccggggcgccggggagaccctggcgggagaccctgccgaggtcttgggggagcgggggaccgccccgtgggtggaagaagaagaggaggaggaggagggcagctccccaggggaagacagcagcagccttggaggtggcccaagccgccggggtcccctaccctgtcccctgtgcagccgcgagggggcctgctcctgcctgccactggagcggggggacgccgtagcaggctggggaggccaccctgctcttggctgcccccacccccccgaggacgactcctcgctgcgggcagagcggggctccctggccgacttgcccatggccccccccgcctcggccccccccgagtttctggaccccctcatgggggcggcggcgccccagtaccccgggcgggggccacctcccgctcccccccccccgccgccacctcctcgggcccccgcggacccggccgcgtcccccgaccccccttcggccgtggccagtcccggttcaggcctctcgtcgccgggccccaagccgggggacagcggctacgagaccgagacccctttttccccagagggagccttcccaggtgggggggcggccgaggaggaaggggtccctcggccgcgggctccccccgagccacccgacccaggagcgccccggccacctccagacccgggtccgctcccactcccggggccccgggagaagccgaccttcgtggttcaagtgagcacggaacagctgctgatgtccctgcgggaggatgtgacaaggaacctcctgggggagaagggggcgacagcccgggagacaggacccaggaaggcggggagaggccccgggaacagagagaaagtcccgggcctgaacagggacccgacagtcctgggcaacgggaaacaagccccaagcctgagcctcccagtgaacggggtgacagtgctggagaacggggaccagagagccccaggcatcgaggagaaggcggcggagaatggggccctggggtcccccgagagagaagagaaagtgctggagaatggggagctgacacccccaaggagggaggagaaagcgctggagaatggggagctgaggtccccagaggccggggagaaggtgctggtgaatgggggcctgacacccccaaagagcgaggacaaggtgtcagagaatgggggcctgagattccccaggaacacggagaggccaccagagactgggccttggagagccccagggccctgggagaagacgcccgagagttggggtccagcccccacgatcggggagccagccccagagacctctctggagagagcccctgcacccagcgcagtggtctcctcccggaacggcggggagacagcccctggcccccttggcccagcccccaagaacgggacgctggaacccgggaccgagaggagagcccccgagactgggggggcgccgagagccccaggggctgggaggctggacctcgggagtgggggccgagccccagtgggcacggggacggcccccggcggcggccccggaagcggcgtggacgcaaaggccggatgggtagacaacacgaggccgcagccaccgccgccaccgctgccaccgccaccggaggcacagccgaggaggctggagccagcgcccccgagagccaggccggaggtggcccccgagggagagcccggggccccagacagcagggccggcggagacacggcactcagcggagacggggacccccccaagcccgagaggaagggccccgagatgccacgactattcttggacttgggaccccctcaggggaacagcgagcagatcaaagccaggctctcccggctctcgctggcgctgccgccgctcacgctcacgccattcccggggccgggcccgcggcggcccccgtgggagggcgcggacgccggggcggctggcggggaggccggcggggcgggagcgccggggccggcggaggaggacggggaggacgaggacgaggacgaggaggaggacgaggaggcggcggcgccgggcgcggcggcggggccgcggggccccgggagggcgcgagcagccccggtgcccgtcgtggtgagcagcgccgacgcggacgcggcccgcccgctgcgggggctgctcaagtctccgcgcggggccgacgagccagaggacagcgagctggagaggaagcgcaagatggtctccttccacggggacgtgaccgtctacctcttcgaccaggagacgccaaccaacgagctgagcgtccaggccccccccgagggggacacggacccgtcaacgcctccagcgcccccgacacctccccaccccgccacccccggagatgggtttcccagcaacgacagcggctttggaggcagtttcgagtgggcggaggatttccccctcctcccccctccaggccccccgctgtgcttctcccgcttctccgtctcgcctgcgctggagaccccggggccacccgcccgggcccccgacgcccggcccgcaggccccgtggagaattgattccccgaagacccgaccccgctgcaccctcagaagaggggttgagaatggaatcctctgtggatgacggcgccactgccaccaccgcagacgccgcctctggggaggcccccgaggctgggccctccccctcccactcccctaccatgtgccaaacgggaggccccgggcccccgccccccagccccccagatggctcccctgacccccctgaccccctcggagccaaatgaggcaggaatccccccgcccctccatagagagccgcctttctcggaactgaactgaactcttttgggcctggagcccctcgacacagcggaggtccctcctcacccactcctggcccaagacaggggccgcaggcttcggggacccggaccccccatttcgcgtctcccctttccctccccagcccggcccctggaggggcctctggttcaaaccttcgcgtggcattttcacattatttaaaaaagacaaaaacaactttttggagg

SEQ ID NO: 1158 - DNA, 3807 bp, Homo sapiens
ggcgtctgaacccgccccgggggtgccaaggtgcgtctccagtctgacgcgaccgcctggggcggagtcagcgggacgtgccacctgcagtgctggctagggctttttatttactagggagcagtttccccgcgcgacagttcgggagcgcgcaggcagtcgcgcgcacacacgcacgcaggcacacacacacacacacacacacacacacacacactttcgcacacacaaacacgctaggacgctcgtcttcgctactgcatccccgaaccagcagagcgaagctactgcgggttctgttaacctcagcatcgtggggcgaagcagagccattgtgcatcaaggagaggccggtgcctgcgctgccgtctctggcacctaacccagcagaccgctcaccccatcggctggaatgcttgctgattcctctgcacacttctaaggctgagaacctgaggaacccagctggaaaatgccgtctgaacgctgcctcagtattcaagaaatgctgacaggccagaggctctgccactccgaatctcacaatgacagtgtcctggcagcgctgaatcagcagaggagtgatggcatcctctgcgacatcaccctgattgctgaggaacagaaattccatgctcacaaggcagtcctagcagcatgcagtgactatttccgggcaatgttcagtctttgtatggtggaaagtggagctgatgaggttaatttgcacggtgtgaccagccttggcttaaagcaggctctggagtttgcatacacaggacagattttgctggagccaggtgtgatccaggatgtgctagcagcgggcagtcacctacagctgttggagcttctcaatttatgctcccactatctcatccaggaattaaatagctttaattacttggatctgtacagacttgctgacctctttaacctcactttgttggagaaggcagtgatcgatttcttagtgaaacatctctctgaactcctgaagagccgcccagaagaagttctaacgcttccctattgcctgcttcaggaggtgctgaagagcgaccgcctgacctccctgagtgaagagcagatctggcagctagctgtgaggtggttggaacacaactgccactaccagtacatggacgagctcctgcaatacatccgctttggcctaatggatgtggatactctccatacagttgccctgtcccacccccttgtccaagcaagtgagactgcaacagcccttgtcaacgaggccctggaataccaccagagcatctatgcacagcctgtctggcagactcgcaggaccaaaccacgattccagtcagacactctgtatatcattggtgggaaaaagcgcgaggtctgcaaggtcaaggaacttcggtacttcaatcctgttgatcaggagaatgctctcatagctgccattgccaactggagtgagctggctcccatgcctgtgggaaggagccaccattgtgtggcagtcatgggggacttcctgtttgtggcaggaggggaagttgagcatgccagtggccggacgtgtgctgtgaggactgcctgtcgctatgacccccgcagtaattcctgggcagagatagcacccatgaaaaactgccgggagcattttgtgctgggtgccatggaggaatacctctatgcagttgggggcagaaatgaactgcgccaggttctgcctacagttgagcgatattgccccaagaagaacaaatggacttttgttcagtcctttgacagatccctttcatgccatgctggatatgtggctgatggtcttctttggatatcaggtggagtaactaatacggcacaatatcagaacaggctaatggtgtatgaacctaaccagaataagtggataagccgtagccccatgctgcagagaagggtctaccattccatggctgctgtacaaaggaagctttatgttcttggaggcaatgacctagactacaataatgaccggatccttgtgcgccatatagattcttacaacatagacactgaccagtggacacgttgtaatttcaacctgctgactggccaaaatgaatctggagttgctgtccataatgggagaatatatttagttggtggatattcaatttggacaaatgagcctctggcttgtatccaggtactggatgtaagcagagaaggcaaagaagaagtattctatgggcctacactcccttttgcttccaatggaatagcagcatgcttccttccagctccatattttacatgccctaaccttcaaactcttcaagtgcctcatcacaggattggcaccatctgaaaagccaagccatcatgaacaggaggaaaacatagctctgactgttggatactgggcatgaaaagactcagtgctccatgcttccttgtcttgctttataggtcttatattcggataaatttaagcaaaaaatgaacaattttctaaaatacgttattgaaaactcgtcacccttctcagtgtatgtcaacattcaatatgtatgacttttattgtggtatagcttagtgccaatttaaggtatattgtgttccatgggtctttagagcattctttgtacactttttctaatcagcactgtcttaagacaacataacactgttagtaaggcaatttattggacacaatggcatcgatgatcttaaaaatatatatattctgtacttaatccctttattatttaaagccgggcttgtaatttttctttttaaaatttaacattatgcagccctgctcagtagagactcactcagcattatgacatcataaatttttaaatgccatattttattcaaggtgatacgaataataatagacatacactggaacagcagttgttgaaatacccagatttttcaccttggttactctgaccttgggtcagaacctaactttacagtgcttcagttttcccaccttttaaggaggataattactgatttccacgttaatttaaaagaacattatgaggattaggcgaacactttgtaatactttgcccaagaaaaagaaaaatgttgttactgaaattataaggtattttattgtctttagaaccttgtaattgaacagggagattatttttgaagtttaaaaattactagatagaatttggaaacatgttgtggaataaatgattctaaaaagcatgtgaaagagacacacaatgaggaaatagggagtttctcaaaatctaaacttgtacaggtatctaaacttgcctcaagtaactctcagatgtcttatttaaaatcatttagtgaaaaatgacatttaaagctaaaaaataatttagttgtactaattatggtaccataaagtgctttgacataaatttgaacctagaattggcagttctaataaaagtttttccactttgttaaaggttatgtcaatcttgagtgcttgtggaattcttcaccaccaatacatattttattactatctcttttaataatgcataggaattcttttttagactagtttttgggtttgctttgtctataacaaaaaataaatacaacaacttaataatcacatttgaaaacaaatttaacaagtataatgtgagtttttcttttttcctaacttcctcaggacctaggtcacctttattaaaaggaagaattcactcttttttccttggcagtttaatcattcaggaatccctctcttaaaggaaattgttattttattcatgtaacctttttttgtaatcaaaagtgaataaaaacgatctttttgtcttacag

SEQ ID NO: 1159 - DNA, 5499 bp, Homo sapiens
aatggcggaagtggcaccgttgccaggcagccgttgcctggcgtcgcggggcgtactctgcgctgggcgcgcggaggcctaggcgggaagctcgagcggcggcgccatggcccgaggtagcgcgcggctggcgggggtcccgaggatcccgggttccggggttccggggtccagggtcggcggccggagcgctcagggcccccgcctaggccctgaggccagagtccccgctcaggcagggtcccgtctgccgggcgcccaccctcgggctcccggagcttggcttccctcgggcgcccggcctcgtcccgccagcctagctggcgttggcgtcgccggggaaggcgcggagagccccggctcctgcctggtccccgaggcccggcccagccccgcagtggccccggctcgcgtggccgagtcccctgacgcccggcgcccgctccccgcagcgtggcagcacccgttcctcaacgtcttcagacacttccgggtggacgagtggaagcgctccgccaagcagggggacgtggccgtggtcacggacaagaccctgaagggcgccgtgtatcgcattcggggctcagtctctgccgccaactacatccagctccctaagagcagcacccagtctctggggctgacgggacgatacctgtatgtgctctttcggcccctgcccagcaagcacttcgtcatccacctcgatgtgtcctccaaggacaaccaagtcatccgtgtgtctttctccaacctcttcaaggagtttaagtctacggccacgtggctccagtttcccttggtcctggaggccaggacacctcagagagatctggtgggtttggccccctccggagcccgctggacctgcctgcagctcgatctgcaggacgttctcctggtctacctgaaccggtgctacggccatctcaagagcatcaggctgtgcgccagcctgctggtcaggaacctgtacaccagtgacctgtgctttgagcctgccatctctggggcccagtgggcaaagctgcccgtgactcctatgcctcgggaaatggcattccctgtgcccaagggagagagctggcatgaccgctacatccacgtccggtttccaagtgagagcttgaaagtgccttccaagccgattgagaagagctgttcccctcctgaggcagtcctcctggggccggggccacagcctctcccttgcccggtggcctccagcaaacctgtgcggttcagtgtgtctccagtggtccagacgcccagccccacagcccagtccggccgggccgccttggcacccaggcccttcccggaggtcagcctgtcccaagagcgctcagacgcctccaacgcggatggccccggtttccatagccttgagccctgggcccagctggaggcctctgacatccacacggctgctgccggcacccacgtgttgactcacgagtcggctgaggtgcccgtggcccgcaccggctcctgcgaaggcttcctcccagacccagtcctgaggctcaagggcgtcatcggctttgggggccacggcaccagacaggccctgtggaccccagacggggcggctgtcgtgtacccctgccatgcggtcatcgtcgtcctgctcgtggacacgggggagcagcgcttcttccttggccacacagacaaggtctccgccctggcgctggatggcagcagctcactattggcctcggcccaggcaagggcccctagtgtgatgcggctctgggacttccagaccgggcggtgcttgtgcctgttccggagcccaatgcacgttgtctgctctctcagcttctctgacagcggggcccttctctgcggggttggcaaggaccaccacgggaggacggtaacagggccctggctgcgggttggggtggggctgtcctgatgcacgcagacagctggaagggtcttggttttctgaaactccagcttcatgtgaccctgggtccctgctctgtgtcctccctgtggtggggctccctgcactctggtgttcatgccgcccccgtgccctgcacaaaaaccaccaccagcagctcacatttcacgtctcggcttttcggccatcggagtcggtttaagccagcgtttacacacctcgcctcgttctctctgctggtgatgcggttgtaagattttcacgtggcagagcccctgcagctgacccacgcttgggcatcaatggcacctccacacagccgaagcacccggcatcttggtgggggcacctttttaaacattttttttttgagagagagccttgttctgtcacctaggctggaatgcagtggtgcaatcatagctcactgcagccttgaccccctccctgacctccccgccagctggactccagccatcctcctgcctcagcttcccagatagctgggccacaggcgtgtgccaccacacctggctaactttttttttttttttttttttgagatggcatcttgctctgtcgcccaggatggagtgcagtggcgcgatcttagctcactgcaagctccgcctcccaggttcacaccattctcctgcctcagcctccccagtagctgggactacaggcgcctgccaacatgcctggctaattttttttttttgtatttttagtagagataggctttcaccttgttagccaggatggtctcacgttttgtttttttaactttttgtagagatagggtttcattacattgctcaggctggtctcaaactccagggctcaagcagtcctcccacctcagcctcccaaagtgctgggatcacaggcatgagccactgtgcccagccacgagctgctttttatccaccttccggcttgcgggggggtttgtacttctctgcgaatgggttgcagtgctcagcattgcgggtctctgtagaagtcccaaagcttcaggatgagaagatggaggggctggtttccttccactctccacggccgcacgctcagaggctggtctccgcatgagagaaaagccacctccgggtggggctcggctgggccttgcagaatcgaggtggccccgactggccctgccgtgcgggctcagcctgggcttgttgcagatggtggtggcctggggcaccggccaggtgggcctcggtggcgaggtggtcgttctggcaaaggcgcacactgactttgacgtccaggccttccgggtcaccttttttgatgaaaccaggatggcgtcgtgcgggcagggcagtgtgcggctctggcggctgcgtggcggggtgctgcgttcctgccccgtggacttaggggagcaccacgcgctgcagttcaccgacctggccttcaagcaggcccgggacggctgcccggagccctcggctgccatgctcttcgtgtgcagccgcagtggccacatcttggagattgactgtcagcgcatggtcgtgcggcatgcccgccgcctgctccccacacggactccaggcggtccccacccacagaagcagaccttcagctcaggccccggcattgccatcagcagcctcagcgtctccccggccatgtgtgctgtgggctctgaggacggcttcttgcggctctggcccctggacttctcctcggtgctcctggaggcaggtgatgctgtgggcacgctctcccaactccgggagagcctcgcctggatgctggggcggggaaggcccagtccccggggctctgctgtcagccgccctggctcctggctgcacagggtgccacggggccaagtggcatatccagagccctggggcggctgatgccagggcggcccgcggggcagcctcacggaagggcccggtgggacgtgggtagtgtgtgaagcccctcagcctgggtcccgcctagcctaagagtggtggcctcgagggagctgcatcttgcagccgtgtggagcctgggactttgagcagcagggagtgcatttgctggggtgtcggggacccgaagcctgagcatgcggctcaccccggggtggccctggaggcccctgaccccaccccacccacagagcacgagggccccgtcagctcagtctgtgtcagccccgatggcctccgtgtgctgtctgccacctcctcgggccacctgggcttcctggacacgctgtcccgggtgtaccacatgctggctcgctcccacaccgccccggtgttggccctcgccatggagcagaggcggggacagctggccaccgtgtcccaggaccgtaccgtccgcatctgggacctggccaccctgcagcagctatacgacttcacatcatcagaggacgccccgtgcgctgtcaccttccaccccacaaggccaacctttttctgtggctttagcagtggggccgtgcgctccttcagcctggaggccgctgaggtcctggtggaacacacgtgccaccgaggagctgtcaccggcctgaccgccacccctgacggccgcctgctcttcagctcctgctcccagggctccctggcccagtacagctgtgcggacccccagtggcatgtcctccgagtggcagcggacatggtatgcccggatgcccccgcgagccccagcgccctggcagtcagcagggatggccgcctgctggcctttgtgggaccctccaggtgcacagtgacagtcatgggctcggcctcccttgatgagctgctgcgagttgacatcggcactctggacctggccagcagccgcctggactcagccatggctgtgtgctttggccctgcagctctgggccacctgctggtgtccacctcgtccaacagagtcgtggtgctggatgctgtgtcgggccgcatcatccgggagctgcccggtgtccaccctgagccctgcccctccttgacgctcagtgaggacgcccgcttcctgctgattgccgccggccggaccatcaaggtgtgggactacgccacacaggccagcccaggcccccaggtgtacatcggccactcggaacccgtgcaggctgtggccttctctcctgaccagcagcaggtcctcagcgcaggggacgccgtcttcctctgggatgtcctggcccctactgagagcgaccaaagcttccccggggcccccccagcctgcaagacaggcccgggcgcaggaccgctggaggacgcagcgtccagggccagcgagctcccccggcagcaggtccccaagccatgtcaggcatctccaccacggctgggcgtctgtgccaggcctcccgaaggtggcgatggcgccagggacaccaggaattcgggggccccacgcaccacctacctggcttcctgcaaggccttcacgcctgccagggtcagctgcagcccccactctgccaagggcacttgcccgcctcccgccagcggtgggtggctgcgtctgaaggctgtcgtcggttacagcgggaatgggcgggccaacatggtctggaggccggacacaggcttctttgcctacacgtgcggccg

SEQ ID NO: 1160 - DNA, 4415 bp, Homo sapiens
gctgtgacctgcggcagcacagccgcctgcgttgagcgcccacggtgggctggactttgcactaggtgctgacaggaccggcagaggtggccactgccctcgtccccagcctgcactcctgggcgaaggctgacgctgaacagggtgctgtgggcccagaagcgcccatgcctgagagcgtccaggaccaggcagagctgggccttaagggcccttggaccagtgtctgtctgcagggagcccccggtagccactcggatcagcccgagggaagattctggacgagaccggggccgtcccccgggtggcccatggacagcagcaggggctcccaggagtggccaggccctgcccgcccaccatgctgcagtgtagacccgcacaggagttcagcttcgggccccgggccttgaaggacgctctggtctccactgacgcagccctgcagcagctgtatgtgtccgccttctcccctgccgagcggctcttcctggccgaggcctacaacccgcagaggacgctcttctgcaccctgctcatccgcacgggcttcgactggctcctgagccgacccgaggctcccgaggacttccagaccttccacgcctccctgcagcaccggaagccccgcctggctcggaagcacatctacctacagccgatagacctgagcgaggagccggtgggaagctccctgctgcaccagctgtgcagctgcacagaggccttcttcctgggcctgcgcgtcaagtgcctgccgtcggtggcagccgcgtccatccgctgctcctcgcggcccagccgggactctgacaggctccagctccacacagacggcatcctgtccttcttgaagaacaacaagccaggggacgcgctgtgtgtgctgggcctcacactgtctgacctgtacccccatgaggcctggagcttcaccttcagcaagttccttccagggcacgaagtgggcgtctgcagcttcgcccggttctcaggggaattcccgaagtcggggcccagcgcccctgatctggccctggtagaggcagcagcagacggccccgaggcccccctgcaggacaggggctgggccctgtgcttcagtgccctggggatggttcagtgctgcaaggtcacgtgccacgagctctgccaccttctgggcctggggaactgccgctggctccgctgcctcatgcagggtgcgctcagcctggacgaggccctgcggcggcccctggacctctgtcccatctgcctgaggaagctgcagcatgtcctgggtttcaggctcatcgagaggtaccagagactctacacctggactcaggcggtggtggggacgtggcccagccaggaggcgggggagccgtcagtgtgggaggacaccccgcctgccagcgccgactcgggcatgtgctgtgagagtgactcggagcccggcaccagtgtgtcggagcccctcacccctgatgccgggagtcacaccttcgcctcagggccagaggaagggctgagctacctggcagcctcagaggctccgctgccacctgggggccctgcggaggccatcaaggagcatgaacggtggctggccatgtgcatccaggccctgcagcgggaagtggcagaggaggacctggtgcaggtggacagagccgtggacgccctcgaccgctgggagatgttcacgggccagctcccggccaccaggcaggacccacccagcagcagggacagcgtggggctgcgcaaggtgctgggggacaagttctcctccctgaggaggaagctgagtgcccgaaaactcgccagagcagagtcggccccccgtccctgggatggggaagagagttagtacagcaggggctgccctacgtctccttccctaaggatgctggccagcactgtccagtagctgaggccactactgacctgccagggataaagaggaagggtctgcctgggtggtggctcaggcctgtcatcccatcactttgagaggccaggagtttgagaccagactgggcaacatggtgagactctgcctctacaaaagaaaaattaaaaaattagctggatgaagtggttcatgcctgtgttcccagctattcaggaggctgaggtgggaggattgcttgagcctaggaggtcgaggctgcagtgggatgtgatcataccactgtactgcagtctgggccacacagaaagactgtctccagaaaaaaaaaagttctttggagaagccacagaccacctgtcttcaggcgcctccttcaactcctgagtcccagccagccgctcccaggggcctgcacacatggagaggcctccctgatcctgggtgcttctcgtggagtacaagccggactgtgctgaggttgggacagagccccctcccctgcagaggcagaaggaagcagcgtgcgtcctgtctccttccaggctgtgggcctgcccttcagttatttatagctggagctggagaggctggctcagatgaggagtgaccccgggggcacacaggctccacactgccacccagcttccaaggctgagtctcctccctaacggggaagtgacggggttttgtctctatcatctcaggcgtcaaccacatgcacacacacactgtcacgttctgtggcgctaacagcatcctgatcctgacggacttcaccggggctctccaggcatctcttctgacaaacactgcaggaggtgagggtgtctgacgtgcactgagggcagaggcccccttattcctgaggcggctacagctcaccgtggggaagatcaactgtggtgatgtttttgggacagtttcttggcaaaggtggccgcgctgtcagtaccaagtagctggaggtggtgatcagatgatctgtctttcctttttttttcggtctagttctgtcagttgctgagagaggggtattattgccatggctgggcgtttgatctgtctccctttagttttgccggattttgcttcctgcactttgaagctcctttacgtccctgcacatttgattgttgtgtcttcctgaggaattgacccttttattgtcacacgtaccccctcagcctgtggtggagggtctctgggagagagacttccggttctgacagcggaatcccttcggagtgacgagggcggggtcacagctcgcgcaccctcatctggagagaggcgagaacagggcagcttggaccttttgtgggtgggtggctcacacggttatggagggcttctaagaaaaacaaaatacaaaactaaaactagaagggctatgcaggtgaggtgggctgaggcttccttgtgaatctgacattggtggaggccgactgaaggctcccggtcctggtcccactccgtgttgacttcagagaagcaaagatgcagctcagaagtagcattaggatcttcgtcccgttctcttttgcgtagcttcaaaaaggcgtaacagtgacctgggaggggagatgaagagctaggcctttcagaaagtgaccaatggaaggtgccggcagagcaccctgcagtaacagaaggtgaaagccggagcctggtggctgttgctgcaaacaaccacccaaaacttagtggcttaaaatcaccacagtctagctcatgaatctgtaacttgggcagagctcggtggagacggtttgcccctgtggctcgactggagtgttcgttcacacggctgccaagtggaatttggctgggaatctcaggccttggttcctgcccacgtgagactctccatggaggaggggcatcttcttaggaaggcagctgccataccgtgaggaaacccgacaaacagggcagccagagccagacagcaggctcctggtcccagtcccggaaaatgcaaagggacaagtatgtgttgatttcagagaagctcagatgtagcattaggaccttcatccatacccttctcttttgcatggcttctaaagggcatgacagtgacctgggaggtaactgtgccagaataaagaggggagacgaaaaaaagagggtcactttcagaaagggacctgggcttcctcacaatatggcggttgccctcctaaggtggacatcgggagggtcagatggaagctctgtggcctttcctaactcggcctcacgtcacagagcgtcacctttcctgcactccacggcggcagtgacaaggaccccaccccaggttcacggggaggggacgtggcagggaatgtgagacaacacaatattgctgtggccattcatgaacagtcagtcagccccactcggcgttcactgtggggatttggctggtgcacctgcgaggtggcctgacctgttttccgatttccttcatcttctgcaaaaggttaaccgctggagtgatgcgagattaaacagaggtgataaaaat

SEQ ID NO: 1161 - DNA, 4415 bp, Homo sapiens
gctgtgacctgcggcagcacagccgcctgcgttgagcgcccacggtgggctggactttgcactaggtgctgacaggaccggcagaggtggccactgccctcgtccccagcctgcactcctgggcgaaggctgacgctgaacagggtgctgtgggcccagaagcgcccatgcctgagagcgtccaggaccaggcagagctgggccttaagggcccttggaccagtgtctgtctgcagggagcccccggtagccactcggatcagcccgagggaagattctggacgagaccgtggccgtcccccgggtggcccatggacagcagcaggggctcccaggagtggccaggccctgcccgcccaccatgctgcagtgtagacccgcacaggagttcagcttcgggccccgggccttgaaggacgctctggtctccactgacgcagccctgcagcagctgtatgtgtccgccttctcccctgccgagcggctcttcctggccgaggcctacaacccgcagaggacgctcttctgcaccctgctcatccgcacgggcttcgactggctcctgagccgacccgaggctcccgaggacttccagaccttccacgcctccctgcagcaccggaagccccgcctggctcggaagcacatctacctacagccgatagacctgagcgaggagccggtgggaagctccctgctgcaccagctgtgcagctgcacagaggccttcttcctgggcctgcgcgtcaagtgcctgccgtcggtggcagccgcgtccatccgctgctcctcgcggcccagccgggactctgacaggctccagctccacacagacggcatcctgtccttcttgaagaacaacaagccaggggacgcgctgtgtgtgctgggcctcacactgtctgacctgtacccccatgaggcctggagcttcaccttcagcaagttccttccagggcacgaagtgggcgtctgcagcttcgcccggttctcaggggaattcccgaagtcggggcccagcgcccctgatctggccctggtagaggcagcagcagacggccccgaggcccccctgcaggacaggggctgggccctgtgcttcagtgccctggggatggttcagtgctgcaaggtcacgtgccacgagctctgccaccttctgggcctggggaactgccgctggctccgctgcctcatgcagggtgcgctcagcctggacgaggccctgcggcggcccctggacctctgtcccatctgcctgaggaagctgcagcatgtcctgggtttcaggctcatcgagaggtaccagagactctacacctggactcaggcggtggtggggacgtggcccagccaggaggcgggggagccgtcagtgtgggaggacaccccgcctgccagcgccgactcgggcatgtgctgtgagagtgactcggagcccggcaccagtgtgtcggagcccctcacccctgatgccgggagtcacaccttcgcctcggggccagaggaagggctgagctacctggcagcctcagaggctccgctgccacctgggggccctgcggaggccatcaaggagcatgaacggtggctggccatgtgcatccaggccctgcagcgggaagtggcagaggaggacctggtgcaggtggacagagccgtggacgccctcgaccgctgggagatgttcacgggccagctcccggccaccaggcaggacccacccagcagcagggacagcgtggggctgcgcaaggtgctgggggacaagttctcctccctgaggaggaagctgagtgcccgaaaactcgccagagcagagtcggccccccgtccctgggatggggaagagagttagtacagcaggggctgccctacgtctccttccctaaggatgctggccagcactgtccagtagctgaggccactactgacctgccagggataaagaggaagggtctgcctgggtggtggctcaggcctgtcatcccatcactttgagaggccaggagtttgagaccagactgggcaacatggtgagactctgcctctacaaaagaaaaattaaaaaattagctggatgaagtggttcatgcctgtgttcccagctattcaggaggctgaggtgggaggattgcttgagcctaggaggtcgaggctgcagtgggatgtgatcataccactgtactgcagtctgggccacacagaaagactgtctccagaaaaaaaaaagttctttggagaagccacagaccacctgtcttcaggcgcctccttcaactcctgagtcccagccagccgctcccaggggcctgcacacatggagaggcctccctgatcctgggtgcttctcgtggagtacaagccggactgtgctgaggttgggacagagccccctcccctgcagaggcagaaggaagcagcgtgcgtcctgtctccttccaggctgtgggcctgcccttcagttatttatagctggagctggagaggctggctcagatgaggagtgaccccgggggcacacaggctccacactgccacccagcttccaaggctgagtctcctccctaacggggaagtgacggggttttgtctctatcatctcaggcgtcaaccacatgcacacacacactgtcacgttctgtggcgctaacagcatcctgatcctgacggacttcaccggggctctccaggcatctcttctgacaaacactgcaggaggtgagggtgtctgacgtgcactgagggcagaggcccccttattcctgaggcggctacagctcaccgtggggaagatcaactgtggtgatgtttttgggacagtttcttggcaaaggtggccgcgctgtcagtaccaagtagctggaggtggtgatcagatgatctgtctttcctttttttttcggtctagttctgtcagttgctgagagaggggtattattgccatggctgggcgtttgatctgtctccctttagttttgccggattttgcttcctgcactttgaagctcctttacgtccctgcacatttgattgttgtgtcttcctgaggaattgacccttttattgtcacacgtaccccctcagcctgtggtggagggtctctgggagagagacttccggttctgacagcggaatcccttcggagtgacgagggcggggtcacagctcgcgcaccctcatctggagagaggcaagaacagggcagcttggaccttttgtgggtgggtggctcacacggttatggagggcttctaagaaaaacaaaatacaaaactaaaactagaagggctatgcaggtgaggtgggctgaggcttccttgtgaatctgacattggtggaggccgactgaaggctcccggtcctggtcccactccgtgttgacttcagagaagcaaagatgcagctcagaagtagcattaggatcttcgtcccgttctcttttgcgtagcttcaaaaaggcgtaacagtgacctgggaggggagatgaagagctaggcctttcagaaagtgaccaatggaaggtgccggcagagcaccctgcagtaacagaaggtgaaagccggagcctggtggctgttgctgcaaacaaccacccaaaacttagtggcttaaaatcaccacagtctagctcatgaatctgtaacttgggcagagctcggtggagacggtttgcccctgtggctcgactggagtgttcgttcacacggctgccaagtggaatttggctgggaatctcaggccttggttcctgcccacgtgagactctccatggaggaggggcatcttcttaggaaggcagctgccataccgtgaggaaacccgacaaacagggcagccagagccagacagcaggctcctggtcccagtcccggaaaatgcaaagggacaagtatgtgttgatttcagagaagctcagatgtagcattaggaccttcatccatacccttctcttttgcatggcttctaaagggcatgacagtgacctgggaggtaactgtgccagaataaagaggggagacgaaaaaaagagggtcactttcagaaagggacctgggcttcctcacaatatggcggttgccctcctaaggtggacatcgggagggtcagatggaagctctgtggcctttcctaactcggcctcacgtcacagagcgtcacctttcctgcactccacggcggcagtgacaaggaccccaccccaggttcacggggaggggacgtggcagggaatgtgagacaacacaatattgctgtggccattcatgaacagtcagtcagccccactcggcgttcactgtggggatttggctggtgcacctgcgaggtggcctgacctgttttccgatttccttcatcttctgcaaaaggttaaccgctggagtgatgcgagattaaacagaggtgataaaaat

SEQ ID NO: 1162 - DNA, 4908 bp, Homo sapiens
acctgcgtgcagtcggtcctccaggccacgcagcgcccgagagtaccagggagactccggcccctgtcggcgccaagcccctccgcccctcacagcgcccaggtccgcggccgggccttgattttttggcggggaccgtcatggcgtcgcagccaaattcgtctgcgaagaagaaagaggagaaggggaagaacatccaggtggtggtgagatgcagaccatttaatttggcagagcggaaagctagcgcccattcaatagtagaatgtgatcctgtacgaaaagaagttagtgtacgaactggaggattggctgacaagagctcaaggaaaacatacacttttgatatggtgtttggagcatctactaaacagattgatgtttaccgaagtgttgtttgtccaattctggatgaagttattatgggctataattgcactatctttgcgtatggccaaactggcactggaaaaacttttacaatggaaggtgaaaggtcacctaatgaagagtatacctgggaagaggatcccttggctggtataattccacgtacccttcatcaaatttttgagaaacttactgataatggtactgaattttcagtcaaagtgtctctgttggagatctataatgaagagctttttgatcttcttaatccatcatctgatgtttctgagagactacagatgtttgatgatccccgtaacaagagaggagtgataattaaaggtttagaagaaattacagtacacaacaaggatgaagtctatcaaattttagaaaagggggcagcaaaaaggacaactgcagctactctgatgaatgcatactctagtcgttcccactcagttttctctgttacaatacatatgaaagaaactacgattgatggagaagagcttgttaaaatcggaaagttgaacttggttgatcttgcaggaagtgaaaacattggccgttctggagctgttgataagagagctcgggaagctggaaatataaatcaatccctgttgactttgggaagggtcattactgcccttgtagaaagaacacctcatgttccttatcgagaatctaaactaactagaatcctccaggattctcttggagggcgtacaagaacatctataattgcaacaatttctcctgcatctctcaatcttgaggaaactctgagtacattggaatatgctcatagagcaaagaacatattgaataagcctgaagtgaatcagaaactcaccaaaaaagctcttattaaggagtatacggaggagatagaacgtttaaaacgagatcttgctgcagcccgtgagaaaaatggagtgtatatttctgaagaaaattttagagtcatgagtggaaaattaactgttcaagaagagcagattgtagaattgattgaaaaaattggtgctgttgaggaggagctgaatagggttacagagttgtttatggataataaaaatgaacttgaccagtgtaaatctgacctgcaaaataaaacacaagaacttgaaaccactcaaaaacatttgcaagaaactaaattacaacttgttaaagaagaatatatcacatcagctttggaaagtactgaggagaaacttcatgatgctgccagcaagctgcttaacacagttgaagaaactacaaaagatgtatctggtctccattccaaactggatcgtaagaaggcagttgaccaacacaatgcagaagctcaggatatttttggcaaaaacctgaatagtctgtttaataatatggaagaattaattaaggatggcagctcaaagcaaaaggccatgctagaagtacataagaccttatttggtaatctgctgtcttccagtgtctctgcattagataccattactacagtagcacttggatctctcacatctattccagaaaatgtgtctactcatgtttctcagatttttaatatgatactaaaagaacaatcattagcagcagaaagtaaaactgtactacaggaattgattaatgtactcaagactgatcttctaagttcactggaaatgattttatccccaactgtggtgtctatactgaaaatcaatagtcaactaaagcatattttcaagacttcattgacagtggccgataagatagaagatcaaaaaaaggaactagatggctttctcagtatactgtgtaacaatctacatgaactacaagaaaataccatttgttccttggttgagtcacaaaagcaatgtggaaacctaactgaagacctgaagacaataaagcagacccattcccaggaactttgcaagttaatgaatctttggacagagagattctgtgctttggaggaaaagtgtgaaaatatacagaaaccacttagtagtgtccaggaaaatatacagcagaaatctaaggatatagtcaacaaaatgacttttcacagtcaaaaattttgtgctgattctgatggcttctcacaggaactcagaaattttaaccaagaaggtacaaaattggttgaagaatctgtgaaacactctgataaactcaatggcaacctggaaaaaatatctcaagagactgaacagagatgtgaatctctgaacacaagaacagtttatttttctgaacagtgggtatcttccttaaatgaaagggaacaggaacttcacaacttattggaggttgtaagccaatgttgtgaggcttcaagttcagacatcactgagaaatcagatggacgtaaggcagctcatgagaaacagcataacatttttcttgatcagatgactattgatgaagataaattgatagcacaaaatctagaacttaatgaaaccataaaaattggtttgactaagcttaattgctttctggaacaggatctgaaactggatatcccaacaggtacgacaccacagaggaaaagttatttatacccatcaacactggtaagaactgaaccacgtgaacatctccttgatcagctgaaaaggaaacagcctgagctgttaatgatgctaaactgttcagaaaacaacaaagaagagacaattccggatgtggatgtagaagaggcagttctggggcagtatactgaagaacctctaagtcaagagccatctgtagatgctggtgtggattgttcatcaattggcggggttccatttttccagcataaaaaatcacatggaaaagacaaagaaaacagaggcattaacacactggagaggtctaaagtggaagaaactacagagcacttggttacaaagagcagattacctctgcgagcccagatcaacctttaattcacttgggggttggcaattttatttttaaagaaaacttaaaaataaaacctgaaaccccagaacttgagccttgtgtatagattttaaaagaatatatatatcagccgggcgcggtggctcatgcctgtaatcccagcactttgggaggctgaggcgggtggattgcttgagcccaggagtttgagaccagcctggccaacgtggcaaaacctcgtctctgttaaaaattagccgggcgtggtggcacactcctgtaatcccagctactggggaggctgaggcacgagaatcacttgaacccaggaagcggggttgcagtgagccaaaggtacaccactacactccagcctgggcaacagagcaagactcggtctcaaaaacaaaatttaaaaaagatataaggcagtactgtaaattcagttgaattttgatatctacccatttttctgtcatccctatagttcactttgtattaaattgggtttcatttgggatttgcaatgtaaatacgtatttctagttttcatataaagtagttcttttataacaaatgaaaagtatttttcttgtatattattaagtaatgaatatataagaactgtactcttctcagcttgagcttaacataggtaaatatcaccaacatctgtccttagaaaggaccatctcatgttttttttcttgctatgacttgtgtattttcttgcatcctccctagacttccctatttcgctttctcctcggctcactttctccctttttatttttcaccaaaccatttgtagagctacaaaacctatcctttcttattttcagtagtcagaattttatctagaaatcttttaacacctttttagtggttatttctaaaatcactgtcaacaataaatctaaccctagttgtatccctcctttaagtatttaaaacttgttgccccaaatgtgaaagcatttaattcctttaagaggcctaactcattcaccctgacagagttcacaaaaagcccactttagagtatacattgctattatgggagaccacccagacatctgactaatggctctgtgccacactccaagacctgtgccttttagagaagctcacaatgatttaaggactgtttgaaacttccaattatgtctataatttatattcttttgtttacatgatgaaactttttgttgttgcttgtttgtatataatacaatgtgtacatgtatctttttctcgattcaaatcttaacccttaggactctggtatttttgatctggcaaccatatttctggaagttgagatgtttcagcttgaagaaccaaaacagaaggaatatgtacaaagaataaattttctgctcacgatgagtttagtgtgtaaagtttagagacatctgactttgatagctaaattaaaccaaaccctattgaagaattgaatatatgctacttcaagaaactaaattgatctcgtagaattatcttaataaaataatggctataatttctctgcaaaatcagatgtcagcataagcgatggataatacctaataaactgccctcagtaaatccatggttaataaatgtggtttctacatt

SEQ ID NO: 1163 - DNA, 6586 bp, Homo sapiens
ctggggagccggcgctggaggtggtgagtggcgtggggactgtgtcgagggggtccccaaggtgccggaccctgcggaggggcgaagtttcggcactggggagggcgtgcggacgctttccctacaggcgaccactgctctgcgggcgggtggtcttagctccagtcccccattcagttcctcagcattccaggtcggcggcgaaggggtccccgaacgaagggcgcaaggcagcgtctctgctgggaccgggaagccggacttcagggcctctcggcccgtgggcttctccccgagtctccccgagtcggttggcattaagagtttagcagatactttcagaaatggatacataagaaatggctggaaatcaaatgaatgtccaaagaagagcttagggtcttagtaacattcttttttaaaataactgtctgccaaaatgtcattacacagtactcataatagaaataacagcggtgatattcttgatattccttcttcccaaaatagttcatcactgaatgccctcacccacagtagccgacttaagctgcatttgaagtcggatatgtcagaatgtgaaaatgatgatccattattgagatctgcaggtaaagtcagagacataaatagaacttatgttatttctgccagtagaaaaacagcagacatgccccttacccctaatcctgtaggtagattggcacttcagaggagaactacaaggaacaaagaatcatctttgcttgttagtgagttggaagacacaactgaaaaaacagcagaaacacgtcttacattacaacgtcgtgctaaaacagattctgcagaaaagtggaaaacagctgaaatagattctgtcaaaatgacactgaatgtgggaggtgaaacagaaaataatggtgtttctaaggaaagtagaacaaatgtaaggattgtaaataatgctaaaaactcttttgttgcctcttctgtacctttagatgaagatccacaggtcattgaaatgatggctgataagaaatacaaagaaacattttctgcccccagtagagcaaatgaaaatgttgcacttaagtactcaagtaatagaccacccattgcttccctgagtcagactgaagttgttagatcaggacacttgacaacgaaacctactcagagcaagttggatatcaaagtgttgggaacaggaaacttgtatcatagaagtattgggaaggaaattgcaaaaacttcaaataaatttgggagcttagaaaaaagaacacctacaaaatgtacaacagaacacaaactgacaacaaagtgcagcctgcctcagcttaagagcccagctccatcaatactgaagaatagaatgtctaaccttcaagttaaacaaagaccaaaaagttcctttcttgcaaataaacaggaaagatccgcagaaaatacaattcttcccgaagaagaaactgtagttcagaacacctctgcaggaaaagaccccttaaaagtagagaatagtcaagtgacagtggcagtacgcgtaagacctttcaccaagagagagaagattgaaaaagcatcccaggtagtcttcatgagtgggaaagaaataactgtggaacaccctgacacgaaacaagtttataattttatttatgatgtttcattctggtcttttgatgaatgtcatcctcactacgctagccagacaactgtctatgagaagctagcagcaccactcctagaaagagccttcgaaggcttcaatacctgtctttttgcttatggtcagactggctctggaaaatcatatacgatgatgggatttagtgaagaaccaggaataattccaagattttgtgaagatcttttttctcaagtagccagaaaacaaacccaagaggtcagctatcacattgaaatgagcttctttgaagtatataatgaaaaaattcacgaccttctggtttgtaaagatgaaaatgggcagagaaagcaaccactgagagtgagggaacatcctgtttatggaccatatgttgaagcactgtcaatgaacattgtcagttcttacgctgatatccagagttggctagaattgggaaataaacaaagagctactgctgctactggtatgaatgataaaagttcccgatctcattcagttttcaccctggtgatgacccagaccaagacagaatttgtggaaggggaagaacacgatcacagaataacaagtcgaattaacctaatagatctggcaggcagtgagcgctgctctacggctcacactaatggagatcgactaaaggaaggtgtgagtattaataagtccttgctaactttgggaaaagttatatctgcactttcggaacaagcaaaccaaaggagtgtttttattccttatcgtgaatctgttcttacatggctgttaaaagaaagtctgggtggaaattcaaaaactgcaatgattgctacgattagtcccgctgccagcaacatagaagaaacattaagcacacttagatatgctaaccaagcccgtttaatagtcaacattgctaaagtaaatgaagatatgaacgctaagttaattagagaattgaaggcagaaattgcaaagctaaaagctgctcagagaaacagtcggaatattgaccctgaacgatacaggctctgtcggcaagaaataacatccttaagaatgaaactgcatcaacaggagagagacatggcagaaatgcaaagagtgtggaaagaaaagtttgaacaagctgaaaaaagaaaacttcaagaaacaaaagagttacagaaagcaggaattatgtttcaaatggacaatcatttaccaaaccttgttaatctgaatgaagatccacaactatctgagatgctgctatatatgataaaagaaggaacaactacagttggaaagtataaaccaaactcaagccatgatattcagttatctggggtgctgattgctgatgatcattgtactatcaaaaattttggtgggacagtgagtattatcccagttggggaagcaaagacatatgtaaatggaaaacatattttggaaatcacagtattacgtcatggtgatcgagtgattcttggtggagatcattattttagatttaatcatccagtagaagtccagaaaggaaaaaggccatctggaagagatactcctataagtgagggtccaaaagactttgaatttgcaaaaaatgagttgctcatggcacagagatcacaacttgaagcagaaataaaagaggctcagttgaaggcaaaggaagaaatgatgcaaggaatccagattgcaaaagaaatggctcagcaagagctttcttctcaaaaagctgcatatgaaagcaaaataaaagcactggaagcagaactgagagaagagtctcaaaggaaaaaaatgcaggaaataaataaccagaaggctaatcacaaaattgaggaattagaaaaggcaaagcagcatcttgaacaggaaatatatgtcaacaaaaagcgattagaaatggagacattggctacaaaacaggctttagaagaccatagcatccgccatgcaagaattctggaagctttagaaactgaaaagcaaaaaattgctaaagaagtacaaattctacagcagaatcggaataatagggataaaacttttacagtgcagacaacttggagctctatgaaactctcaatgatgattcaggaagccaatgctatcagcagcaaattgaaaacatactatgtttttggcagacatgatatatcagataaaagtagttctgacacttctattcgggttcgtaacctgaaactaggaatctcaacattctggagtctggaaaagtttgaatctaaacttgcagcaatgaaagaactttatgagagtaatggtagtaacaggggtgaagatgccttttgtgatcctgaagatgaatgggaacccgacattacagatgcaccagtttcttcactttctagaaggaggagtaggagtttgatgaagaacagaagaatttctggttgtttacatgacatacaagtccatccaattaagaatttgcattcttcacattcatcaggtttaatggacaaatcaagcactatttactcaaattcagcagagtcctttcttcctggaatttgcaaagaattgattggttcttcgttagatttttttggacagagttatgatgaagaaagaactatagcagacagcctaattaatagttttcttaaaatttataatgggctatttgccatttccaaggctcatgaagaacaagatgaagaaagtcaagataacttgttttcttctgatcgagcaatccagtcacttactattcagactgcatgtgcttttgagcagctagtagtgctaatgaaacactggctgagtgatttactgccttgtaccaacatagcaagacttgaggatgagttgagacaagaagttaaaaaactgggaggctacttacagttatttttgcagggatgctgtttggatatttcatcaatgataaaagaggctcaaaagaatgcaatccaaattgtacaacaagctgtaaagtatgtggggcagttagcagttctgaaagggagcaagctacattttctagaaaacggtaacaataaagctgccagtgtccaggaggaattcatggatgctgtttgtgatggtgtaggcttaggaatgaagattttattagattctggactggaaaaagcaaaagaacttcagcatgaactctttaggcagtgtacaaaaaatgaggttaccaaagaaatgaaaactaatgccatgggattgattagatctcttgaaaacatctttgctgaatcgaaaattaaaagtttcagaaggcaagtacaagaagaaaactttgaataccaagatttcaagaggatggttaatcgtgctccagaattcttaaagttaaaacattgcttagagaaagctattgaaattattatttctgcactgaaaggatgccatagtgatataaatcttctccagacttgtgttgaaagtattcgcaacttggccagtgatttttacagtgacttcagtgtgccttctacttctgttggcagctatgagagtagagtaactcacattgtccaccaggaactagaatctctagctaagtctctcctcttttgttttgaatctgaagaaagccctgatttgttgaaaccctgggaaacttataatcaaaataccaaagaagaacaccaacaatctaaatcaagcgggattgacggcagtaagaataaaggtgtaccaaagcgtgtctatgagctccatggctcatccccagcagtgagctcagaggaatgcacacccagtaggattcagtgggtgtgaatactgatgtgtaggcacttttatgaccacccatgaaagaaaaagaacacttgctcggtaattttctttatgcaggagagtttaagagaaatcagcacagatatttcaaaaaagtccatgtctttttatctttaaaatatctatttatcaaaggccagacacagtggctcacgcctgtaatcccagcactttgggaggcgggcagatcacaaggtcaggagtttgagaccggcctggccaacatggtgaaaccccgtctctactaaaaatacaaaaatttgctgggcatggtggcgcgtgcctgtaatcccagctactaggggggctgaggcaggaggatcgcttgaacctgagaggcagaggttgcagtgagccaagatcatgccactttactccagtctgagcaacagaacgagacttagtcaaaataaataaataaataagtaaataaataaataaataaaatatcttttatctttaaagtgtttaacattggtatactgtctgtagttggttcattagtcgtttataaagggttattttctcatgagtggaaacctgaacaatcagttacctttgtgcctatgccttctctctcctcagacagctgggatgtttatggtgaaatggcctgtacaagtttaactaagacaacttaacttgcattgttaatcaaaaattcttttctcaaagggttaactggttgccattttgaatagtatgttcaagggtgtagcttcctgtttctttccaaattataagtagctacctaaatatagtataattatatattaataatatggcttgctggcacagtagtttaccctgttatctgtgtttcataatgggggctgtatgaatattatttaaaactaataaaatgttgccagaattatactaaactgttggatgagattaggagatcagaggctggaccttctcttgataatgcttgttttgttaaaggtataatgaaataatttgtatatgatttgatgaagattaaagacccttattttccacagctttaaaaaaaaacctttatttatgatcaagtaataaagataatattctacttgtgggatcttacattatggaaatagtttgacgtttttgacctcaagagtatgtataatttgaagagatactttgtaactatgcttgggtgatattgagcagttcctaaagaataattcattt

SEQ ID NO: 1164 - DNA, 2972 bp, Homo sapiens
tcttcggacctaggctgccctgccgtcatgtcgcaagggatcctttctccgccagcgggcttgctgtccgatgacgatgtcgtagtttctcccatgtttgagtccacagctgcagatttggggtctgtggtacgcaagaacctgctatcagactgctctgtcgtctctacctccctagaggacaagcagcaggttccatctgaggacagtatggagaaggtgaaagtatacttgagggttaggcccttgttaccttcagagttggaacgacaggaagatcagggttgtgtccgtattgagaatgtggagacccttgttctacaagcacccaaggactcgtttgccctgaagagcaatgaacggggaattggccaagccacacacaggttcaccttttcccagatctttgggccagaagtgggacaggcatccttcttcaacctaactgtgaaggagatggtaaaggatgtactcaaagggcagaactggctcatctatacatatggagtcactaactcagggaaaacccacacgattcaaggtaccatcaaggatggagggattctcccccggtccctggcgctgatcttcaatagcctccaaggccaacttcatccaacacctgatctgaagcccttgctctccaatgaggtaatctggctagacagcaagcagatccgacaggaggaaatgaagaagctgtccctgctaaatggaggcctccaagaggaggagctgtccacttccttgaagaggagtgtctacatcgaaagtcggataggtaccagcaccagcttcgacagtggcattgctgggctctcttctatcagtcagtgtaccagcagtagccagctggatgaaacaagtcatcgatgggcacagccagacactgccccactacctgtcccggcaaacattcgcttctccatctggatctcattctttgagatctacaacgaactgctttatgacctattagaaccgcctagccaacagcgcaagaggcagactttgcggctatgcgaggatcaaaatggcaatccctatgtgaaagatctcaactggattcatgtgcaagatgctgaggaggcctggaagctcctaaaagtgggtcgtaagaaccagagctttgccagcacccacctcaaccagaactccagccgcagtcacagcatcttctcaatcaggatcctacaccttcagggggaaggagatatagtccccaagatcagcgagctgtcactctgtgatctggctggctcagagcgctgcaaagatcagaagagtggtgaacggttgaaggaagcaggaaacattaacacctctctacacaccctgggccgctgtattgctgcccttcgtcaaaaccagcagaaccggtcaaagcagaacctggttcccttccgtgacagcaagttgactcgagtgttccaaggtttcttcacaggccgaggccgttcctgcatgattgtcaatgtgaatccctgtgcatctacctatgatgaaactcttcatgtggccaagttctcagccattgctagccagcttgtgcatgccccacctatgcaactgggattcccatccctgcactcgttcatcaaggaacatagtcttcaggtatcccccagcttagagaaaggggctaaggcagacacaggccttgatgatgatattgaaaatgaagctgacatctccatgtatggcaaagaggagctcctacaagttgtggaagccatgaagacactgcttttgaaggaacgacaggaaaagctacagctggagatgcatctccgagatgaaatttgcaatgagatggtagaacagatgcaacagcgggaacagtggtgcagtgaacatttggacacccaaaaggaactattggaggaaatgtatgaagaaaaactaaatatcctcaaggagtcactgacaagtttttaccaagaagagattcaggagcgggatgaaaagattgaagagctagaagctctcttgcaggaagccagacaacagtcagtggcccatcagcaatcagggtctgaattggccctacggcggtcacaaaggttggcagcttctgcctccacccagcagcttcaggaggttaaagctaaattacagcagtgcaaagcagagctaaactctaccactgaagagttgcataagtatcagaaaatgttagaaccaccaccctcagccaagcccttcaccattgatgtggacaagaagttagaagagggccagaagaatataaggctgttgcggacagagcttcagaaacttggtgagtctctccaatcagcagagagagcttgttgccacagcactggggcaggaaaacttcgtcaagccttgaccacttgtgatgacatcttaatcaaacaggaccagactctggctgaactgcagaacaacatggtgctagtgaaactggaccttcggaagaaggcagcatgtattgctgagcagtatcatactgtgttgaaactccaaggccaggtttctgccaaaaagcgccttggtaccaaccaggaaaatcagcaaccaaaccaacaaccaccagggaagaaaccattccttcgaaatttacttccccgaacaccaacctgccaaagctcaacagactgcagcccttatgcccggatcctacgctcacggcgttcccctttactcaaatctgggccttttggcaaaaagtactaaggctgtggggaaagagaagagcagtcatggccctgaggtgggtcagctactctcctgaagaaataggtctcttttatgctttaccatatatcaggaattatatccaggatgcaatactcagacactagcttttttctcacttttgtattataaccacctatgtaatctcatgttgttgtttttttttatttacttatatgatttctatgcacacaaaaacagttatattaaagatattattgttcacattttttattgaaaaaaaaaaaaaa

SEQ ID NO: 1165 - DNA, 9895 bp, Homo sapiens
gggaggtggctgccgggtgggaggtgtgtgcgcgtgtgccgcgccgtagggagcggcgggtcgcgccgccggctgtcagctagctccgcgccgccgcccgatggcgcgaggaggcgcgcgggcccagccccggggggccggccgcgggtgagcccctcggcctgccgcccgcgagcatgtcacctccagccgccgccgccgcagcctccgccagccgcgcccgcgcccccgcctcccgcagccgcagccgctgcctcgggcattggcccccagacccccgcctctgatccacgcccagaccctagctccagagggccatggccggccagggggactgctgcgtcaaggtggccgtcaggatccggccccagctgtcgaaggagaagattgagggctgtcacatctgtacctctgttaccccgggagagccccaggtcctgctggggaaggacaaggccttcacctatgactttgtcttcgacctggacacctggcaagaacagatctattccacctgtgtgagcaagctcatcgagggctgcttcgagggctataatgccacggtgctggcctatgggcagacgggggccgggaagacgtacaccatgggcactggctttgacatggcaacgtcggaggaggagcagggcatcatcccgagggccatcgcacacctctttgggggcattgccgagcgcaagcgccgggcacaggagcagggcgtggctggacctgagttcaaagtcagcgcccagtttctggagctctacaacgaggagatccttgacctgtttgacagcacccgtgaccctgacacccgccaccgcaggtccaacatcaagatccacgaggacgcaaacggtggcatctacaccactggcgtcacttctcgcctcatccactcccaggaggagctgatccagtgcctgaagcagggggccctgtcccgcaccacagccagcacccagatgaacgtgcagagctcacgctcccacgccatcttcaccatccacctgtgccagatgcgcatgtgcacccagcccgacctggtgaatgaggcggtgactgggcttcctgatggtacacctccctcgagtgagtatgagacactcactgctaagtttcactttgtggacctggccggctcagagcggctgaagcggacaggggctactggcgagcgggccaaggagggcatctccatcaactgtggcctgctggccttgggcaatgtgatcagcgccttaggggaccagagcaagaaggtggtgcacgttccctacagggactccaagctcactcggctcctccaggattcgctggggggcaacagccagaccatcatgatcgcctgtgtgagcccctcagaccgagatttcatggagaccctcaacacactcaaatatgccaatcgggcccgcaacatcaagaacaaggtggtagtgaaccaggacaagaccagccagcaaatcagtgcactgcgggctgagattgctcggctgcagatggagctgatggagtataaggcgggcaagcgagtgataggagaggatggcgctgagggctatagtgatctgttccgagagaatgccatgctacagaaggagaatggggccctgcggctgcgggtgaaagccatgcaggaggccatcgatgccatcaacaaccgcgtcacccagctcatgagccaggaggccaacctgctgctagccaaggccggcgatggcaatgaggccattggtgcgctgatccagaactacatccgggagatcgaggagctacggactaagcttctagagagtgaagccatgaacgagtccctgcgccgcagcctctcacgggcctcggctaggagcccctactccctgggtgcttctccagccgccccggccttcgggggcagccctgccagctccatggaggatgcctcggaggtgatccgcagggccaagcaggacctggagcggctaaagaagaaggaggtcaggcagcggaggaagagccccgagaaggaagccttcaaaaagagggcaaaactccaacaggagaacagcgaggagacggatgagaacgaggcggaggaggaggaggaagagcgagacgagagtggctgtgaggaggaggaagggcgcgaggatgaagatgaggactcgggcagtgaagagagcctggtggactcagactcagaccccgaggagaaggaggtgaacttccaggcggacctggccgacctgacttgtgagatcgaaatcaagcagaagctgatcgacgagctggagaacagccagcggcggttgcagacgctcaagcaccagtatgaggaaaagctgattctgctgcagaacaagatccgagacacacagctggagcgcgaccgtgtgctgcagaacctcagcaccatggagtgctatactgaggagaaggccaacaagatcaaggcagactatgagaagaggctgcgggagatgaaccgggacctgcagaagctgcaggccgcccagaaagagcacgcccggctgcttaagaaccagtcgcgctacgagagggagctgaagaagctacaggccgaggtggctgagatgaagaaggccaaggtggccctgatgaagcagatgcgtgaggagcaacagcggcggcggctagtggagaccaagaggaaccgggagatcgcacagctcaagaaggagcagcggcgacaggagtttcagatccgagctctggagtcccagaagcggcagcaggagatggtcctgaggaggaagacccaggaggtttctgcactgaggcgcctggccaagcccatgtctgagcgggtggcagggcgtgcaggactaaagccacccatgctggactctggggctgaggtgtcggccagcactacctcatctgaggctgaatcaggggcccgctctgtctccagcatcgtgcgccagtggaaccgcaaaatcaaccacttcttgggggaccatcctgcgcccactgtcaatggcacccgtcctgcccgaaagaagttccagaagaagggggccagccagagcttcagtaaggcggcaaggctcaagtggcagtccctggagcgacggatcattgacatcgtcatgcagagaatgaccattgtcaacctggaggctgacatggagcggctcatcaagaaaagggaggagctgttcctcctgcaggaggcactgcggaggaagcgggagcggctgcaggctgagagccccgaggaagagaaggggctgcaggagctggctgaggagatcgaggtgctggcagccaacattgactacatcaatgacggcatcaccgactgccaggccaccatcgtgcagctggaggagaccaaggaggagctggactccacagacacatccgtggtcatcagctcctgctccctggctgaagcccgcctcctgctagacaacttcctcaaggcatccattgacaaggggctgcaagtggcacaaaaggaagcccagatccggctgttggagggccgactgaggcagacggatatggcaggctcctcccagaaccatctgctcctggacgccctgcgtgagaaggctgaagctcaccccgagctgcaggccctcatctacaatgtgcagcaggagaatggctacgccagcacagatgaggagatctcagagttctctgagggcagcttctcccagtcattcaccatgaaaggctccaccagccatgacgatttcaagttcaagagcgagcccaaactgtctgcccaaatgaaagctgtgtcggctgagtgcctgggccccccactggatatctccaccaagaacatcaccaagtccctggcctccctcgttgagatcaaagaggacggagtgggcttctctgtccgagacccctattaccgggacagggtctcgcgcaccgtcagtctgcctacccggggcagcactttccctaggcaatctcgagccacagagacgtccccgctgacgagaaggaagtcctacgaccgagggcagcccattaggtccacagatgtgggattcacacccccatcatcccctcccactcggccccgcaatgaccgcaatgtcttctctcgtctcaccagtaatcagagccaggggtcagcgctggacaagggcatcatctccccggttggaggagccaagggtgcacggacggccccactgcagtgtgtctccatggccgaaggccacaccaagcccatcctctgcctggatgccacagatgagttgctattcacagggtccaaagaccgaagctgcaagatgtggaacttggttacgggacaggagatcgcagctctaaagggccaccccaacaacgtggtctccatcaagtactgcagccactcggggcttgtgttctccgtgtccacctcctacatcaaggtgtgggacatccgggactcagccaagtgcattcggactctcacgtcctcgggccaggtgatctcaggggatgcctgtgccgccacatccacccgtgccatcaccagtgctcagggcgagcatcagatcaaccagatcgccctcagcccttcgggcaccatgctgtacgccgcctcgggcaatgccgtccgcatctgggagcttagcaggttccagcctgtcggcaagctgactggccacatcggccctgtgatgtgcctgacggtcacccagacggccagccagcatgacctcgtggtgactggctccaaggaccactacgttaagatgttcgagctgggcgagtgtgtgacgggcaccatcggccccactcacaacttcgagcccccgcactacgatggcatcgagtgtctcgccatccagggagacatcctgttcagtggctcccgagataacggcatcaagaagtgggacctagaccagcaggagctcatccagcaaatccccaatgcgcacaaggactgggtgtgcgccctggccttcatcccgggccgccccatgctgctcagcgcctgccgtgcgggtgtcatcaaggtctggaacgtggacaacttcacacccatcggtgagatcaagggccacgacagtcccatcaatgccatctgcaccaatgccaagcatatcttcacagcctccagtgactgccgggtaaagttgtggaattacgtccctggactcaccccctgccttcctcgccgagtcctggccataaagggccgcgccaccaccctgccctgaccctccccaactctccctgtctcctctttcattcttcccctctttccttttccctctctttccccacttcgatctgagctgcttcttaacggtatgagattattttactccttcttcttcctttcccttcctgtcctgcctggcctagagaggtgccctgcctgtccctcctgcacccaccgtccttttccaagcatgaacagtgggacaggccccaggagatgggtgccagggagcagaagggggagccttcaggcctggacaaaacgaaacacccccccaaaaaaagaaaacccatgacaaagctcccctgggggcctctgagtgcacaggcctctccatctgcccagcaccccaccacctgcagtccacctccccgtaagccatgcttgcctcccagccccaaccacatttggggagtttggggaatccagttcatcctctacttttgggggcagccagccaagcccactgcaagagctgaccggcacccctccactttgtcctccaccccagtgacctgacggtgaagttctggagtgtccggcggttaccccacagcggcccaccctaggagtgaggtcagagggatgcccccggaccctcgaccccagcagcctggacaccatggaagggaagctgtgacccggccgatggggccagctgctctggggacagagggcgtggccccctctcctgccctcctccctctcccttggccttcccacaggacactgttccctcatccctcccctgcctctcaggagcctctgggtgagagagaggctggggaggaaattaagctgtgaagccaaagggcattatcccttcttgttcccctcctggcagtcgtggccacattgtctcctgctgaaccggctctgcccctttctcaggcctttggcccagtggtggagccctgtggggaggtgcagcagcctggccccatcccacccttccgaggagctggcctccccgcttctcccagcccagcctctagagccactgcacctgcctctgagcccaaaaagataagtcctcaggtagctaaggaaaccaggtgtgggcggctgggccttgcagctaacccttaaccctctggcaacccgcagatagccccaactggccccaacagttccctggggtcccttttggatggggccaaggtggagctgctagaaagattcctttggggagatggtcagaaatacttcagttatttattattttgttatttttattttttgctgttgcctcctggaaacggacttgaagtttcttcccctatattctttccctcagctcttgggggccagaaatcccaaagggagtccgctgccccggccctccagggccgcctcctctgtttgctttgcagaggagggaactgctccttcgactctgcagctcaggcctgtccccgacacagcccccagggagtcttctagctacccctggcctctaggccgcctgacgctcagtgccttcctccgttccggggcctggcacccgtgccgggcagccttacaccagccatgcccgcggcaccacatgtgtcttctcactcgcgaggtcttgtgcccagcgcccccgggaaggcgggggcgctcaccccacagcccaggccccggggttctgccccacagtcctgcgtgggccacgtaggaagcagcgtgggggctgtgtctgctgggaggtggcttggatggggaggacagcccggcaccctgacccccgcccctccccagccctgcagtcccccactgggccggggagtctctccagcttctctctctctggttattcaggagacacattttcggccttaaaactggcatggagcgcaggccctcccttgcagaaaattatcaaggaagagggagttggcagagtttctctgccccggggctggggacgcggagctccggggaaattgttaaatcagtgttctggcgccccctgttgggggaactctggaattacaggagtgggccttgggggggactgagctccatccctctcccccgccccacccccacccaaagttgcccaccctgtttttccgttgcatcgctggtcttgtgcttcccgcttcagtctgggagccaagagccagccccacctcccttcagaggacgcagtgacttttggactttccagaggtggttctgtgtttctgcccttggctcctctccgtcttgggctggggcacttggagccctctccatgtggcgcccagtgttggggggaggcaggctccagtggaggctgagtgaggcctggtcccttccccgtgccctcctcggagctgccacagaggctaagacggctgtcctgctggtgctggccctgctggatgtggtattgaagtctggggcagctgatagcaggaaggagacccccttggatgctggtctcctgggacctgaacagtctgtcagcaatggctggaaatccttcttcctctggccaccccgggggtgccgggcaacccccttagctctaagatgtggccacaaatctcttcccactcctccccgccaacctgaacagaaagttttgaccttgcaacctgtaagaaagaatccgtccgcatgactgtttacaagcgatagaaacacgtaagactctgtccccttgagctcccacccccgggccggggatgccccacctggggtgactgcactgtagctgcaaggcgtgttcttgcacgaagtgtgatcttatggccctgcgagaggtgctcatcatcatgcccattttctgctgtttctgatgggtcagctacctcacggcggggtcagctctgctgtcctggcaagtgtcattgactctctaaacttgaagtccttcaggagccctgagcccaacatccatgagacaccccgagttgtgcttcatgagagttggattctctgcccactctttcagggatgtccaaggtccatgttagggggcaggcccccagctccactcactgcacaagcaccctaaatgttggaagcacaaaatggttgtgatttgagcacaatggcagggtcccgcaggcagacttgacaggcccaggcccgggaggatccccccacgttggctctgtccaaagtgagattgggggtgcctgtgtctgggacagggggctgcccttgctcagaccaggccttggctcatggcttgtcctaattctgggactcgtcatcttacttcttgcccttctgtgcccatcttaagactggaggctgagccttgtcaggcccagccacatctttacgccatgggaccaggagtaaagcgctctctaaaccccgcaccccaaatctctaaacgcctgagttcaggctgagtcctagccctagtgagcctgaagagcttggactgattcccagtctcctgggtcaagccccactttgtgctttcgaagcttatgagcgggttccctggatagaaggagtcttccatccccactgcccttgggcctcttcagcatagtcctgtgccagggccctgtcctcactatcagtcagttcagtatttgctttcacgtgagtggcggactcttctgaagcagccagaactctcaaaggcagcgcatggagttgccttgcgagatttccaaggaaggaggaaagattaacaggcggagcctggcacacccaagcctttgaggtggtcagagtgccaccttcagccccttgggaagggacagcggtgggtctgggagtggcctcaccctggattcagcctaggaatctcttcaccctcagctgtccagccctgctgcctgtctggggatgtgtggcctgggcagagggcagtttaaagcacaaaaccacatggggaaaacacaaggttgcggggactttctcatgtgcctgatgtggtggagggagacaccagcaggtggctgcagtgacgttagggaacataacacttctttgccctgctagctctcagctctggggggcatcccccgatgtggtctgggctgggagcaggcatatcccctggttgttgcctgtgcctggtctgttcaccatcgtgtttgtgtgggcagagcctgccctgcaggagcagtgactttcttcccactgtgtgtcccggacctgtggtatgtgtccctttgccatcccaaacaggcaactgcttgctgctctccttgcttggcatagcctcctggtcagtggccaatgccccacaggccttcctgggcctggccctcctctcctgactcccagatccttccctgccctcttgtgtgcaaggacagattttgcagggaaagttctgtttcttctttgatacctttgttctgtcccctgccccatccccagcactcatgatcttgaagcccctatcacactctagttcagtcctgtgaaccatgtcctgagggccttgcagggaagtaggaaatagaaactcctccacaaagagccgaggatcagagaagacccctgagatgaatcagggccctgccctgcccaccaactcttttctagcaatcatgtcctgcccaggctgcaggcttcattaggctcctgctgtcctccatgatgtgactagcacaaggtgtatatatgttttgtacctctgccgatggctgtacatagtgtatgaaagttatttaagccccatgttgtacatttctgttcctagattggatgtgtgtgttctaagaagttgtcataaataaaacctgaatgacc

SEQ ID NO: 1166 - DNA, 3324 bp, Homo sapiens
gcagagcaccgcgccttagccgcgaagttctagttcttgctgccggtcctaacgtcccgcagtcttcgccagccagccgtcccgcatgcgcgtttgggcggcgtggagcctgctgccatgaagtcagcgagagctaagacaccccggaaacctaccgtgaaaaaagggtcccaaacgaaccttaaagacccagttggggtatactgtagggtgcgcccactgggctttcctgatcaagagtgttgcatagaagtgatcaataatacaactgttcagcttcatactcctgagggctacagactcaaccgaaatggagactataaggagactcagtattcatttaaacaagtatttggcactcacaccacccagaaggaactctttgatgttgtggctaatcccttggtcaatgacctcattcatggcaaaaatggtcttctttttacatatggtgtgacgggaagtggaaaaactcacacaatgactggttctccaggggaaggagggctgcttcctcgttgtttggacatgatctttaacagtatagggtcatttcaagctaaacgatatgttttcaaatctaatgataggaatagtatggatatacagtgtgaggttgatgccttattagaacgtcagaaaagagaagctatgcccaatccaaagacttcttctagcaaacgacaagtagatccagagtttgcagatatgataactgtacaagaattctgcaaagcagaagaggttgatgaagatagtgtctatggtgtatttgtctcttatattgaaatatataataattacatatatgatctattggaagaggtgccgtttgatcccataaaacccaaacctccacaatctaaattgcttcgtgaagataagaaccataacatgtatgttgcaggatgtacagaagttgaagtgaaatctactgaggaggcttttgaagttttctggagaggccagaaaaagagacgtattgctaatacccatttgaatcgtgagtccagccgttcccatagcgtgttcaacattaaattagttcaggctcccttggatgcagatggagacaatgtcttacaggaaaaagaacaaatcactataagtcagttgtccttggtagatcttgctggaagtgaaagaactaaccggaccagagcagaagggaacagattacgtgaagctggtaatattaatcagtcactaatgacgctaagaacatgtatggatgtcctaagagagaaccaaatgtatggaactaacaagatggttccatatcgagattcaaagttaacccatctgttcaagaactactttgatggggaaggaaaagtgcggatgatcgtgtgtgtgaaccccaaggctgaagattatgaagaaaacttgcaagtcatgagatttgcggaagtgactcaagaagttgaagtagcaagacctgtagacaaggcaatatgtggtttaacgcctgggaggagatacagaaaccagcctcgaggtccagttggaaatgaaccattggttactgacgtggttttgcagagttttccacctttgccgtcatgcgaaattttggatatcaacgatgagcagacacttccaaggctgattgaagccttagagaaacgacataacttacgacaaatgatgattgatgagtttaacaaacaatctaatgcttttaaagctttgttacaagaatttgacaatgctgttttaagtaaagaaaaccacatgcaagggaaactaaatgaaaaggagaagatgatctcaggacagaaattggaaatagaacgactggaaaagaaaaacaaaactttagaatataagattgagattttagagaaaacaactactatctatgaggaagataaacgcaatttgcaacaggaacttgaaactcagaaccagaaacttcagcgacagttttctgacaaacgcagattagaagccaggttgcaaggcatggtgacagaaacgacaatgaagtgggagaaagaatgtgagcgtagagtggcagccaaacagctggagatgcagaataaactctgggttaaagatgaaaagctgaaacaactgaaggctattgttactgaacctaaaactgagaagccagagagaccctctcgggagcgagatcgagaaaaagttactcaaagatctgtttctccatcacctgtgcctttactctttcaacctgatcagaacgcaccaccaattcgtctccgacacagacgatcacgctctgcaggagacagatgggtagatcataagcccgcctctaacatgcaaactgaaacagtcatgcagccacatgtccctcatgccatcacagtatctgttgcaaatgaaaaggcactagctaagtgtgagaagtacatgctgacccaccaggaactagcctccgatggggagattgaaactaaactaattaagggtgatatttataaaacaaggggtggtggacaatctgttcagtttactgatattgagactttaaagcaagaatcaccaaatggtagtcgaaaacgaagatcttccacagtagcacctgcccaaccagatggtgcagagtctgaatggaccgatgtagaaacaaggtgttctgtggctgtggagatgagagcaggatcccagctgggacctggatatcagcatcacgcacaacccaagcgcaaaaagccatgaactgacagtcccagtactgaaagaacattttcatttgtgtggatgatttctcgaaagccatgccagaagcagtcttccaggtcatcttgtagaactccagctttgttgaaaatcacggacctcagctacatcatacactgacccagagcaaagctttccctatggttccaaagacaactagtattcaacaaaccttgtatagtatatgttttgccatatttaatattaatagcagaggaagactccttttttcatcactgtatgaattttttataatgtttttttaaaatatatttcatgtatacttataaactaattcacacaagtgtttgtcttagatgattaaggaagactatatctagatcatgtctgattttttattgtgacttctccagccctggtctgaatttcttaaggttttataaacaaatgctgctatttattagctgcaagaatgcactttagaactatttgacaattcagactttcaaaataaagatgtaaatgactggccaataataaccattttaggaaggtgttttgaattctgtatgtatatattcactttctgacatttagatatgccaaaagaattaaaatcaaaagcactaagaaataaaaaaaaaaaaaaaaaaa

SEQ ID NO: 1167 - DNA, 3636 bp, Homo sapiens
gcagagcaccgcgccttagccgcgaagttctagttcttgctgccggtcctaacgtcccgcagtcttcgccagccagccgtcccgcatgcgcgtttgggcggcgtggagcctgctgccatgaagtcagcgagagctaagacaccccggaaacctaccgtgaaaaaagggtcccaaacgaaccttaaagacccagttggggtatactgtagggtgcgcccactgggctttcctgatcaagagtgttgcatagaagtgatcaataatacaactgttcagcttcatactcctgagggctacagactcaaccgaaatggagactataaggagactcagtattcatttaaacaagtatttggcactcacaccacccagaaggaactctttgatgttgtggctaatcccttggtcaatgacctcattcatggcaaaaatggtcttctttttacatatggtgtgacgggaagtggaaaaactcacacaatgactggttctccaggggaaggagggctgcttcctcgttgtttggacatgatctttaacagtatagggtcatttcaagctaaacgatatgttttcaaatctaatgataggaatagtatggatatacagtgtgaggttgatgccttattagaacgtcagaaaagagaagctatgcccaatccaaagacttcttctagcaaacgacaagtagatccagagtttgcagatatgataactgtacaagaattctgcaaagcagaagaggttgatgaagatagtgtctatggtgtatttgtctcttatattgaaatatataataattacatatatgatctattggaagaggtgccgtttgatcccataaaacccaaacctccacaatctaaattgcttcgtgaagataagaaccataacatgtatgttgcaggatgtacagaagttgaagtgaaatctactgaggaggcttttgaagttttctggagaggccagaaaaagagacgtattgctaatacccatttgaatcgtgagtccagccgttcccatagcgtgttcaacattaaattagttcaggctcccttggatgcagatggagacaatgtcttacaggaaaaagaacaaatcactataagtcagttgtccttggtagatcttgctggaagtgaaagaactaaccggaccagagcagaagggaacagattacgtgaagctggtaatattaatcagtcactaatgacgctaagaacatgtatggatgtcctaagagagaaccaaatgtatggaactaacaagatggttccatatcgagattcaaagttaacccatctgttcaagaactactttgatggggaaggaaaagtgcggatgatcgtgtgtgtgaaccccaaggctgaagattatgaagaaaacttgcaagtcatgagatttgcggaagtgactcaagaagttgaagtagcaagacctgtagacaaggcaatatgtggtttaacgcctgggaggagatacagaaaccagcctcgaggtccagttggaaatgaaccattggttactgacgtggttttgcagagttttccacctttgccgtcatgcgaaattttggatatcaacgatgagcagacacttccaaggctgattgaagccttagagaaacgacataacttacgacaaatgatgattgatgagtttaacaaacaatctaatgcttttaaagctttgttacaagaatttgacaatgctgttttaagtaaagaaaaccacatgcaagggaaactaaatgaaaaggagaagatgatctcaggacagaaattggaaatagaacgactggaaaagaaaaacaaaactttagaatataagattgagattttagagaaaacaactactatctatgaggaagataaacgcaatttgcaacaggaacttgaaactcagaaccagaaacttcagcgacagttttctgacaaacgcagattagaagccaggttgcaaggcatggtgacagaaacgacaatgaagtgggagaaagaatgtgagcgtagagtggcagccaaacagctggagatgcagaataaactctgggttaaagatgaaaagctgaaacaactgaaggctattgttactgaacctaaaactgagaagccagagagaccctctcgggagcgagatcgagaaaaagttactcaaagatctgtttctccatcacctgtgcctctttctagtaactatattgctcagatttccaacggccagcaactcatgagccagccacagctacataggcgctctaactcttgcagcagcatttctgtagcttcctgtatttcggaatgggagcagaaaattcctacgtacaacacacctctcaaagtcacatctattgcaaggcgtaggcagcaggagccaggacaaagcaaaacttgtatcgtgtcagacagaaggcgagggatgtactggactgaaggcagggaggtggttcctacattcagaaatgagatagaaatagaagaggatcattgcggcaggttactctttcaacctgatcagaacgcaccaccaattcgtctccgacacagacgatcacgctctgcaggagacagatgggtagatcataagcccgcctctaacatgcaaactgaaacagtcatgcagccacatgtccctcatgccatcacagtatctgttgcaaatgaaaaggcactagctaagtgtgagaagtacatgctgacccaccaggaactagcctccgatggggagattgaaactaaactaattaagggtgatatttataaaacaaggggtggtggacaatctgttcagtttactgatattgagactttaaagcaagaatcaccaaatggtagtcgaaaacgaagatcttccacagtagcacctgcccaaccagatggtgcagagtctgaatggaccgatgtagaaacaaggtgttctgtggctgtggagatgagagcaggatcccagctgggacctggatatcagcatcacgcacaacccaagcgcaaaaagccatgaactgacagtcccagtactgaaagaacattttcatttgtgtggatgatttctcgaaagccatgccagaagcagtcttccaggtcatcttgtagaactccagctttgttgaaaatcacggacctcagctacatcatacactgacccagagcaaagctttccctatggttccaaagacaactagtattcaacaaaccttgtatagtatatgttttgccatatttaatattaatagcagaggaagactccttttttcatcactgtatgaattttttataatgtttttttaaaatatatttcatgtatacttataaactaattcacacaagtgtttgtcttagatgattaaggaagactatatctagatcatgtctgattttttattgtgacttctccagccctggtctgaatttcttaaggttttataaacaaatgctgctatttattagctgcaagaatgcactttagaactatttgacaattcagactttcaaaataaagatgtaaatgactggccaataataaccattttaggaaggtgttttgaattctgtatgtatatattcactttctgacatttagatatgccaaaagaattaaaatcaaaagcactaagaaataaaaaaaaaaaaaaaaaaa

SEQ ID NO: 1168 - DNA, 4653 bp, Homo sapiens
agagcgaagctgaggagtccagcgctcgccgacaggggcctgggctgtcccgagccggaatccagatcttacataagatggaagtctctcacactagatactgaacattaaatagaaaatctatttagtaaaatctaagttgccatggaagaaataccagtaaaagttgctgtaagaattagacctctgctttgcaaagaagctcttcataatcatcaagtttgtgtgagagttattccaaacagccagcaagttatcattgggagagatagagtcttcacttttgattttgtttttggcaaaaattccactcaagatgaagtttataacacatgtataaagcccctagtgttgtcactcattgagggctataatgcaactgtttttgcctatggacaaactggatctgggaagacatacaccattggagggggccatattgcttcagttgtggagggccaaaagggtatcattcctcgagctattcaagaaatatttcaaagcatctctgaacatcctagcattgactttaatgtaaaagtatcttatatagaagtgtacaaggaagacctaagagatcttctagaattggagacatccatgaaggatcttcacatccgagaagatgaaaaaggaaacacagtgattgttggggccaaggaatgccatgtggagagtgcaggtgaagtgatgagtcttttggagatggggaatgcagccagacatacaggtaccactcaaatgaatgagcactccagcagatcacatgcaatttttacaatcagcatttgtcaagttcataaaaatatggaggcagctgaagatggatcatggtattcccctcggcatattgtctcaaagttccactttgtggatttggcaggatcagaaagagtaaccaaaacggggaatactggtgaacggttcaaagaatccattcaaatcaatagtggattgctggctttaggaaatgtaataagcgctcttggggacccacgcaggaagagttcacatattccatatagggatgctaaaattacccggcttctgaaagattctctgggaggcagtgctaagactgtcatgatcacatgtgtcagcccctcctcctcgaattttgatgagtccttaaattctctcaaatatgccaacagagcacggaacattagaaacaaacccactgtaaacttcagccccgagtcagaccgtatagatgaaatggaatttgagattaaattgcttcgagaagctttgcaaagccagcaggctggtgtcagccaaactacccagatcaatcgagaagggagtcctgatacaaataggattcattctcttgaggagcaagtagctcagcttcaaggagaatgtctgggttaccagtgttgtgtagaagaagcctttaccttcctggttgacctaaaagatactgtcagactaaacgaaaagcagcaacacaaactgcaggagtggtttaacatgatccaagaggtcaggaaggctgtcctcacctcatttcgaggaatcggaggcactgcaagtctggaagaaggaccacagcatgttacagttctccagctgaagagagagcttaagaaatgccagtgtgtgcttgctgctgatgaagtagtatttaatcagaaggaactggaggtgaaggaactgaagaatcaagtgcagatgatggtacaggaaaacaaagggcatgctgtatctttgaaagaagcgcaaaaagtgaatagactgcagaatgaaaaaataatagaacaacaacttcttgtggatcaactgagtgaagaactaacaaaacttaacctgtcagtgacttcttcagctaaagaaaattgtggagatgggccagatgccaggatccctgaaaggagaccatatactgtaccatttgatactcatttggggcattatatttatatcccatcaagacaagattccaggaaggtccacacaagtccgcctatgtactctctggatcgaatatttgctggatttcgaacacgaagtcagatgctgttgggtcacatagaagaacaagataaggtcctccactgccaattttctgataacagtgatgatgaagaatcagaaggccaagagaaatctggaactagatgtagaagtcgttcatggattcagaagccagactctgtttgttcccttgttgaattgagtgatactcaggatgaaacacaaaagtcagatttggagaatgaagatttaaagattgattgtctccaggagagtcaagaattgaatttgcaaaaattaaagaattcagaacgcatacttactgaagctaaacaaaaaatgagagaacttacaattaacatcaagatgaaggaagatctgattaaagaattaataaaaacaggtaatgatgccaagtctgtaagcaagcagtattctttgaaagtaacaaagctagagcatgatgcagaacaggcaaaagtcgaactgattgaaacacaaaagcagctacaggagctggaaaacaaagatctttctgatgttgcaatgaaggtaaaattacagaaagagtttcgtaaaaagatggatgctgcaaagctgagagttcaggtcttgcagaagaagcaacaagatagtaagaaactggcatcactgtcaatccaaaatgagaaacgtgctaatgagctagagcagagtgtagatcacatgaaatatcaaaagatacagctacaaagaaaactacgagaagaaaatgaaaaaaggaagcaactggatgcagtaattaagcgggaccagcaaaaaatcaaagaaatacaattaaaaacaggacaggaagaaggtctaaaaccgaaagctgaggaccttgatgcatgtaacttgaaaaggagaaaaggttcgtttggaagtatagaccatctccagaaattggatgagcaaaagaaatggttagatgaagaagtagagaaagttctgaaccaacgccaagaattagaggagctggaagcagacttaaagaaacgggaggccatagtttctaagaaggaggctctgttacaggagaagagtcacctggaaaataagaaattgagatctagtcaggccttaaacacagatagtttgaaaatatcaactcgcctgaacttactggaacaagagttgtctgaaaagaatgtgcagctccagaccagtacagctgaggagaaaacaaagatttcagaacaagttgaagtcctccagaaagaaaaggatcagctccagaaacgcagacacaatgtggatgaaaaacttaaaaatggtagagtgttatcacctgaagaagaacatgttcttttccaacttgaagaagggattgaagctttggaagctgcaattgaatacaggaatgaaagtatccagaatcgccagaagtcacttagagcatcattccataacctctctcgtggtgaagcaaatgtcttggaaaagctagcttgcctgagtcctgttgagattagaactattcttttcagatatttcaataaggtggtgaatttgcgagaagctgaacggaaacaacagttatataatgaagaaatgaaaatgaaagttctggaacgggataatatggttcgtgaattagaatctgcactggaccatctaaaattgcagtgtgaccggagactgaccctccagcaaaaggaacacgaacaaaagatgcagttgctattacatcatttcaaagaacaagatggagaaggcattatggaaactttcaaaacatatgaagataaaatccagcagttggaaaaagatctttatttctataagaaaaccagccgggatcataagaagaaacttaaggaactggtaggggaagcaattcggcggcaactagcaccatcagagtatcaagaggctggagatggagtcctgaagccagaaggaggaggcatgctttcagaagaattaaaatgggcatccagacctgaaagtatgaaattaagtggaagagaaagagaaatggacagttcagcaagcagcttaagaacacagccaaatcctcaaaagctctgggaagatatcccagaattacctccaattcatagttctttagcaccccccagtgggcatatgttaggtaatgagaataaaacagaaacagatgataatcagtttacaaaatctcacagtcgactgtcatcccaaattcaggttgtgggaaatgtgggacgacttcatggtgtcacacctgtaaaactgtgtcgaaaagaattacgtcaaatttccgccttggaactatcattgcgacgttccagtcttggagttggcattggatcaatggctgctgattccatcgaagtatctaggaaaccaagggacttaaaaacttagacattgaataatagaacttttagtagatatgtaaaaagattcctttttctaacctgttaaaaactaaagctcaagttcactacctctttcctcagaataaaggaagaaggggaggaaggaatccctaattcttttatatgctatagatgtgtacatcttctatatatatttggggagttttagtttatattcccatagtaatcaaacatgttttccaatacttgataacatttaaatatttataaatacgcttaaatgtttttccaggcatatttgaagattaaaactagtaatagactaaaa

SEQ ID NO: 1169 - DNA, 6257 bp, Homo sapiens
gcggctgcgcactgggcgctctcgcccgagaagccgcagtctcgagagcgtcaacgaggtgtttcggtagtctctggccatcctttctgcgcacccggtgtcgctgggctgcaccccgggcggggacgtccgccgggcacgggagggggccaagatgccgatcaataaatcagagaagccagaaagctgcgataatgtgaaggttgttgttaggtgccggcccctcaatgagagagagaaatcaatgtgctacaaacaggctgtcagtgtggatgagatgaggggaactatcactgtacataagactgattcttccaatgaacctccaaagacatttacttttgatactgtttttggaccagagagtaaacaacttgatgtttataacttaactgcaagacctattattgattctgtacttgaaggctacaatgggactatttttgcatatggacaaaccggaacaggcaaaacttttaccatggaaggtgttcgagctattcctgaacttagaggaataattcccaattcatttgctcacatatttggtcatattgcaaaagcggagggtgatacaagatttttggttcgagtgtcttatttggaaatatataatgaagaagttcgtgaccttttgggcaaggatcagacacaaaggttagaggttaaagaaagacctgatgtgggagtttatatcaaagatttatcagcttatgtggtaaataatgctgatgatatggatagaattatgacgctaggccacaaaaatcgttctgttggtgcaactaatatgaacgaacatagttcccgttcccatgccatctttacaattactatagaatgcagtgaaaaaggcattgatggtaacatgcatgtcaggatggggaagctccatcttgtagatcttgctggttcagaaagacaggcaaaaactggagctactggacagcgcctaaaggaagctacaaaaatcaatctttcactttccacccttggtaatgtaatttctgccttggttgatggaaaaagcactcatgtgccttatcgtaactctaaactgactcgtcttcttcaggattccttaggaggaaattcaaaaaccatgatgtgtgcaaatattgggccagcagattacaattatgatgaaactatcagtacattacggtatgccaatcgtgctaagaatattaaaaataaagctagaattaatgaagatccaaaggatgctttgctgcgtcagttccagaaagaaatagaagaactgaaaaagaagcttgaagaaggagaagaaatatcaggctctgatatcagtgggtcagaggaagatgatgatgaagagggtgaggttggagaagatggagagaaaaggaaaaaaagaaggggaaaaaagaaagtctccccagacaagatgattgaaatgcaagcaaaaattgatgaggagagaaaagcacttgaaacaaagctcgacatggaagaagaagaaagaaacaaggctagagctgaattagagaaacgggaaaaagatcttcttaaagcccaacaagagcatcagtctttgctggaaaaattatctgccctggaaaagaaggtaattgttggtggggttgacttgttggccaaagctgaggaacaagagaaacttcttgaagaatctaacatggaactggaagaaaggaggaaaagagcagagcaacttcgcagagaacttgaggaaaaagagcaagaacgcttggatattgaagaaaaatataccagtttgcaagaggaagcacagggaaagaccaagaagttaaagaaagtttggactatgctgatggctgcaaagtcagagatggctgatctccaacaagaacatcagagggaaattgaaggcctactggagaacattcggcaacttagccgggagcttcgacttcagatgcttattattgataactttatacctcgggattatcaggaaatgattgaaaactatgtccattggaatgaagacataggagaatggcagctaaaatgtgttgcttatacaggaaataacatgaggaagcaaaccccagtacctgataaaaaggagaaagatccctttgaggtggacctttctcacgtgtatcttgcctatactgaggagagtctgcgtcagtctttgatgaaactagaaagaccacgaacttcaaaggggaaagcaaggccaaagacagggagaagaaagcgttctgcaaagcctgaaactgtaattgactctttactgcagtaaatgttacagacttaaagtcacaataaaaattagtgatattctcatgcctggacaaaatctttaattaaaacagtgaagacttctctataatttcaattaatggaagttgtagatcaatgaataagactggaaataataatttgcttaagaacttttagtctacatatattaatataacattaaaattgtacaactggtgattgttcaaattgttgtactactactcttcaattgtactgtgcagggaagttgggggaacagttcatactatagagagttacagtttagatgtatgtgtaaatcgattagctatttatccaactactgtatatttaggtaactagaatttcaaaatagaaaaaaaaaaactgtgtcctgttttgcacatagaaagaagcagatcagattgtcctatgttgcgctgttatatatgaatgtttggactgtacatctaaagaatgattccgtcctaacacccacccagcctgtttgaacacattctaattgtctaacatttgttgcattttaagtatgagatgactgatcttatgaatgttttgtagaaaatgttataatttaacagtctttgcgagtatacatgttttttaacaagttgaaaatgtttcatctgaacctttcctaacttttttttgccagtttgagttcaaatcaaatacaccttaagttctggtttcatgttctcttgaaacattgaattgtacgtaaatataaaggatctactgttgcggaaaattaagaagctaaatactgctcagttatctttgcctgcgtgtatatttttaaaaattcactctgaagtgttatggatgcttttctttgagttctaaattttggtgggaattactttatgtctcccagttaagaagagtctccattttccagaaaatacagctaagcaagaaaaatatcttttaaatactttgcctttaaaacacttttttattttgtttttctattttaaaaataaaatattattttctgaatttcttctattgggtaatccagttagaccatattcctctacaaataaaaactatgttgatttcatagtaaagtaagttgtaatagagataattatttttttctgttgttagctgcttatgaaacttttattgtatttttttaaagttatgctactcctggccgggcatggtggctcacgcctgtaatcccagcactttgggaggccgaggcacgtggatcacttgatgtcaggagttcgagaccagcctggctaacatggtgaaaccctgtctccagtacaaatacaataattagctgggtgtggtggcgcacacctgtaatcccagctacttgggaggctgaggcaggagaatcacttgaacctgggaggcggaggttgcagtgagctgagatggcatcactgcactccagcctgggtgacagggtgacactccacctcaaaaaataaaaataaaataaaaataaagttatgctactcctaaaccacttaatatatgttttgtggttttcaaaattatgtaatcagccctgaaacacattggttgaaaatattttgagactttataagttagtatttattaaattaatattattttaataagttttgttaaatcctagtttaaatgacaaagctgtgtatagagtaggggtgagtgaaggtggagtactcttgaggtggcgataaaaatgtacccataaatttaaagtccattctgtaattggaatactgaatgtcctgtgtgtggtgaacattttctaggtgattagaattgcatttcactggctgcatttgtttgtggtatgtaagatagctagaaatttattacttaactctgtggggcattgtttagatactgtgaagagttgaggtaaatatgtgtcttgtaaaagctttgtgtgatcagaatattttggtaattataaaatgtttttgatgatacacatttaactctgttagtaattactctaaagaaatcttaattttaccagtttaaaaaaaacgcttctttttaaaagttcatgtttctaacctttaacaattcagttaataggaaaggagtaacttttaaatcaagctttaaaacatggaaatttaagccagtatgttagatattttttctatcccaccctaccatgataataaaaataaatctataaaaagtcaaaataaaaagccgatctataaaaagtcaattgagaagttctaaaagcaggctactatagcaggggtgtttgttttttgtttggagacggagtctggctctattacctaggctggagtgcagtgggacaatctcggctcactgtaacctctgtctcttcagcctcctgagttgctggaactacagctgtatgccatcatgctcggctaatttttgtatttttttgtagagatggggttttgccatgttgcccgggcctgtcttgaactcctagagcttaagtgatccacccgcctcaggctcccgaagtgctgggattacaggcatgattataggcctgagccaccacaccccgcctactatagcagttttttaaaaaaagcattatgttaaaactgattataccagatggacattaaatatccatctcagaaataccaaaatttgatacataagcctggcctgaatatcttttttttttttttgagacggagtcttactctgtcgcccaggctggagtgcagtggcgcgatctcggctcactgcaacctctgcctcctgggttcaagggattctcctgcctcagcctcttgagtagctgggattacaggtttgcgccaccacacccagctaatttttgtattttttttttagtagagaccgggtttcaccatgttggccaggctggtctcacctgactttgtgatccgcccgcctcagcctcccaaagtgctgggattacaggtgtgagccaccacgcctggcctcaagcctggtctgaatatctatatgcaaatatgggacactgacttcagagctattcatttagctccagtcatagcaattctgtagtttcctcacatttactgtgtctttgtccacaaatgaaatatgttgtaaggtcagtgttaatttcgtgagacgatatagatgaacacacttgctcattttttgaaataaatatgcagatttaaaatgagtggcacatatatataaataggttattgaatgggtattctcttttccctttaatttaaaaagtgatatttatttattaaaaggagcattggtagaattattggtttatagtatcttctttaataatccttacaattacatatactaataggatgttaaaattatcatcgtgtttcctatttgtgtttagattcttataaagcatgagatgagtaatcaagggaagggtcgcatctccatgtttgccccatgaatagaatccatttgacaagccatttcatttcctttctggagaaagggagttgttttttttttctttttacagcaaaaatttaaggttttattgggggagggggtggtgctacttcctctgtaacatgtttttaaaactatgattatggtttttggttgttttttgttttgtttgtttccttttagtctgtttttaatatccttccccttaactcttaaggaaagtcttctttcctacagggctgtgaattaaggaatgggtagcgtttacatttaagtacaccaatgtctgcccaatttcctaatgtatacatttgttttattttaaattattttttgttcttaaaaatactagaagaaaacatagatgtttctagtgcctttgaacttatactgtagtctgactaatttaatgaataacttcagtagcattactataatactgtatgctggccaaaattacaaattacagtttgttgcatcagtttcaaaagccatgctttcattgtattttatgtataaattgtatttgttcaagttgtatatattggtattgtatgtatacatgcagcatggttaaataagaataaaaatcttttacctaa

SEQ ID NO: 1170 - DNA, 6103 bp, Homo sapiens
atccggggcagcggggaatggctgagccaggggttcgccgcccccgccgccgccgccgccgccgccgccgccgccgccgcccgctttcggctcgggcctcaggaccgtagcatcctgagacattttgaattgacacttctcaagatttgactggatcagagttcatcatgtcaaagttgaaaagctcagagtcagtcagggtggtggttcgctgtcggcccatgaatggcaaggaaaaggctgcttcgtatgacaaagtggtggatgtggatgttaagctggggcaggtgtctgtgaagaaccccaaagggacggcccatgaaatgcccaagaccttcacctttgatgccgtctatgactggaatgccaagcagtttgaactgtacgatgagacgttccgaccacttgttgactctgtcctgcaaggtttcaatggaaccatttttgcctatggacaaactgggacaggaaaaacctacaccatggaaggaatccgtggtgaccctgaaaaaagaggagtcattcctaactcatttgaccatatcttcacccacatctctcgatcccagaatcaacaatacctggtcagggcttcttacttagagatctaccaggaggagatccgagatttgctctcaaaggatcagaccaaaaggcttgagctcaaagagaggcctgacacaggagtgtatgtgaaagacctgtcttcctttgtcaccaagagtgtgaaggagatagagcatgtgatgaatgtggggaaccagaaccgttctgtcggtgctaccaacatgaacgagcacagctcgcgttctcatgcaattttcgttatcactattgagtgcagcgaggtgggcctcgatggtgaaaaccacatccgtgtaggaaaattgaaccttgtagatcttgctggcagcgaacggcaagccaagaccggcgcacaaggggagagattaaaagaagctaccaagatcaacctctccctttccgctttgggtaatgtcatctctgctctagtggacggcaaaagcactcacattccatatcgggactcaaagcttaccaggctcctccaagattcccttggtggcaatgccaagactgtgatggtggccaacgtggggcctgcctcttacaacgtagaagagactctgaccactctgcgatatgccaaccgtgccaaaaacattaagaacaaaccaagggtcaatgaggaccccaaggatgccctccttcgagaattccaggaagagattgctcggctcaaggcccagctggaaaaacggtccattggtaggaggaagaggcgagagaagcggagggaaggtggtggcagtggtgggggtggggaagaggaggaggaggagggagaagagggtgaggaggaaggggatgataaggatgattactggcgggaacagcaagaaaaactggagattgagaagcgggccattgtagaggatcacagcttggttgcagaggagaagatgaggctgctgaaggagaaagagaaaaagatggaggacctgcggcgggagaaggatgctgccgagatgctgggcgccaagatcaaggccatggagagtaagttgcttgttggaggaaaaaatatagtagatcatacgaatgaacagcagaaaatcctggagcagaaacgacaggaaattgcagagcagaaacgtcgagaaagagaaatccagcaacagatggaaagtcgagatgaggagaccttggaacttaaagagacatacagctcattgcagcaagaggtggacatcaagaccaaaaaactcaaaaagctcttctccaagcttcaggcagtgaaggctgagatccatgacctccaagaagaacacatcaaggagcgccaagagctagagcagactcagaatgagctcaccagggagctgaaactcaagcatcttattatagaaaactttatccctctggaagaaaaaagtaaaattatgaatagagccttctttgatgaagaggaagatcattggaaactacatcctataaccagactggagaaccagcagatgatgaagcggccagtctcagccgtgggatataagagaccattgagccagcacgcaagaatgtccatgatgattcgtccagaggcccgatatagggcagaaaacattgtgctgttagagctggacatgcccagccggaccaccagagactatgagggtccagccattgcccccaaggtccaggctgcattggatgcggctctgcaggatgaagatgagatacaggtggatgcatcatcatttgaaagcactgcaaataagaaatccaaggccaggcctaaaagtggaaggaagtcgggatcctcctcctcttcctcaggaacccctgcatctcagctttatccacagtctcgggggctggttccaaagtaaagccagcttctcctctcccagggcggaaacagcatttgccttctgagagaagagactagcaaaaagctgcagagaggattcggcccaaactcagaactgttcccctgaggagaagcggtggcctctttgcagatcaaccaacttaatctggttgaacgtgctgttcctaatctggcactcagcccctctgggaaacatcttttaattagcatctcagaaatgcatgggtaaggtaaagtgcgatagttcaagtggaaagcaagagaatgaccagtgaccttgcttccttcccccttgccttcttctcccccttcccctgtgctccctttctctcctctctccttttctagcctgttctttacatggggctcccttcttgttgaacaatagggcagaatcaggagtcaccttagcaggaccacatctttggagcctcgggataaaatgacagtgaggttgaaaagtgaaaaccctagaacttgaataggtgcctgttcttgtagggagaaatgagaaatcgcatttggatccaggccccaggtgggcaccatcagcagtcttgcttccatgcacctcagtaagaagtggatctgcctttgggacctgctcagtgaggaaatctcttccaatttctgcttctgaatgattcaatgttgggagcaatagaaataacattccctttgccttctctgagtgtttagggaaatagcttctttaaaacctcaaaaccatgaccatcctgtcaaagacctaagtctgtaagctggtgccatgtccatacaccatgtcactttactcttcatttgtcaccatcttttcccatgcacgcatactctgaacatccttgtgtgggcccatcctctgcatccagagcatgctctgcagtgggcctgttttgtggaagaaaggaggctgtctctgccttctctgatgggactggagttgagggaaggagctgtattgtggcacttctgaattccccgttttgttccatattggtatagagagcagaagagtagctaggcagatgcagagatggagacatgagactcagtgcagtgggcagggaagacataacagatggaagcaaaggaatcctgcctgccttcagcagagaattcaccgaatcctagaactgtggctccctccaggcagagcctaagatgctggtgaagaatagctgtgtgattgaataggctcaaaggagagttcagaattcccatttacatattactagtttggtttgtaagttttagttccttgtattattgagattcagagcttcattttatgttggtcattaggtgaatattactcattttccctcaagagaagctcataagtgtgtgtgggtgtgagagcacgatggtgcctgtgttctgtgaatgtgtccatatgtgtctgtaagagagacagagaccaagaacttgcccaattttagaaatacactaatgtgcagttgttgccttttgtctgtattgaaggcccattgaatgactaatccaggctggaagcattcccatgtgggtgtctgagtccatgagccaagcctgaggggacagtgagtctccaggtctgccacactggtgcaccttgctggcacggtgcctcaggaaggtggcgactcaggtgggccttgagttatattttaactcagctgctcagttcccagggcacatttctggatcagaacccatgggaaacaggaggtactaagtgcaatgtcttagcattctgcaaaatggagatctgttgtccagcggcttatctcctttttagtaacccttctttctgaacccagggcccttttcagccttccctcatattttcttgagatcaaactttacttctttcttatttactaagaatttgcctgtttgaataagaacaaaacgctaaggtgggtagcctaagctgattttctgctggttacacgtgtctctcacaccacatttcctcaaagctaatctgaattctgtaggctaaaaatattcatgtagcaaatctgagaattgaaaactgcagataaccggccgggtatggtgactcatgcctgtaatcctagcactttgggaggccgaggtgggtggaccacctgaggttaggacttcaagaccagcctggccaacatggtgaaaccccatctgtactaaaaatacaaaaatttgcctggtgtggtggtgcatgcctctagtcctagctactcgggaggctgaggcacgagaatcacttgaacctgggaggcggaggttgcagtgagtcgagataacactactgcattccagcctgggtgacagagtgagactccacctcaaaaaaaaaaaaaaaaaaaaaaaaaacagaaagaaagaaaaagaaaactgcagataaccctatacattaatactggtatctcgaggtgactcttctgaccaagggtggttaagtgacacatagaacttttctaagagaagacagacaagttgacaggcatgccttgtactcagctgtgttcatgtggtggtctgtggaaagaaaagaagactcatttggaaatgaagctgtccctttccaagcagtctctggtgcttttcttctctcaaaatggatccgataaatatttgaatagagcagattgtagaatgtcgtgctgtcaccagaaagctgctgttttgggttctgcattgagccaaatatgtagaggacctaccaagcccactgagggactaggttttcatgtctctagtcatacctagaatgttctgagccgtctgagggccttcatgccggcagcagctagcaaagccagaaagcaagtctaacaggatctaagatgaccatcaggagaaggagtttgagactgtgtatgcaacccccaatagacccccttttactctgatctggagaatgtatctggcttcatattttcaagtcacatgtctctcagacccctggattcagaacccaaggccacaaatcataggcatgaagcactttcttaagactgacctaacgctggattatttcccgtccaatgcctgcatgctgcttgaattgctccacccacacctccatgaccaagggcgccagagtgctgcaactggggcgtgggccgctctctgcttttcctgtctgactctgacaagtcctccctcactgaatgtagaatcgttgccaagtttctgagaagtgtcgattccctgttaacatggatatcagttctgcctcacatttcccacttgaggttgaggcgtactggagacaacacctcagaccatctgaaccccatcagtggacgaaaatggggctgttaatatactctaaaagccatactaaaaatgctctgagggaactggctaagaatagtgggcctggtgattgtctatcacgcaaggctttgttttgtactgttcagaaatctgtcacctttctgcctgcccttgtttcctgaatgaaatgcttctggggttatttatgaaaggagtgatcctggggcaggcaggaggcagtgggcttcatggctccttgaagttattactgatcttgaccttctctttggctacctttagacaaagaatacgccaatcaatacttggggctctaagttttacaattgatatttatttgtatcatctctttgtctaggaatgtaaaagtgattctaaactaagatgtgtaataaaaatcaatcagatttattgtacctacaaaaa

SEQ ID NO: 1171 - DNA, 5401 bp, Homo sapiens
tcactctcgctgccgctgctccgccccatccccttctgtttttctctctcattctccagtggcggcggcggggaaggcggaggcagaggcagcagcagccgcgctggctgcaatgaatgatcccccagcttggggggaggactccaggtgagcctctgccctcgggaggcccgggacccccggccgcccacgaccggcagcccacgctatggatccctagaggaaggaggagaagacagctcgccgcccacccccatcccattttcctcttcctttatctcattgttgccgaagctgtttacggcagcgctccctctgctccagcatggggcgggctccgggcacggctgctcggcaggcgctgctcccgcggcgactgggggattctgcctaattcacctcccagccggtgcagagaggaccggagagcggtggaggcccggactgcagcagcgttggggccacctcccagcgtccccaccctaggaggctgcatgcggattgaagagctgcgcctgggggctgggccggccccgctgatcccgacctagcgagcaggatagcaggaccgcccaggctgcggaggggctcgggggcaggaaggtcagagcagcaagatggccagtaagaccaaggccagcgaggccctcaaggtggtggcccggtgccgccccctcagcaggaaggaggaggctgctggtcacgagcagatcctgaccatggacgtgaaactgggccaggtgaccctgcggaacccccgcgccgccccgggggagctgcccaagaccttcacctttgacgccgtgtatgatgccagctccaagcaggccgacctgtatgacgaaaccgtgaggcccctgatagactccgtgctccagggtttcaatggcacggtgtttgcctatggccagacgggcactggcaagacctataccatgcaggggacctgggtggagcccgagctgcgcggggtcatcccgaatgcctttgagcacatcttcacccacatctcccgctcccagaaccaacagtacctggtccgggcctcctatttggagatctaccaggaagagattcgagacctgctctccaaggagccgggcaagaggctagagctgaaagagaaccccgagactggcgtctacatcaaggacctctcctccttcgtcaccaagaatgtcaaggagattgagcatgtgatgaacctggggaaccagacccgggctgtgggcagcacccacatgaatgaggtcagctcccgctcccatgccatcttcatcatcactgtggagtgcagcgaacgtggctctgatggccaggaccacatccgagtgggcaagctcaacctcgtggacctggctggcagcgagaggcagaacaaggcaggccccaacacagcgggaggggcagccacaccatcctcgggtggcggtggtggcggtggaggcagtggtggtggtgctggtggagagaggcctaaggaagcctccaaaatcaacctctcattatctgccctgggcaacgtgattgctgccctggcgggcaacaggagcacccacattccctaccgggactccaagctgacccggctgctccaggactccctgggggggaatgccaagaccatcatggtagccacactggggccagcttctcacagctacgatgagagcctctccaccttgcgctttgccaaccgagccaagaacatcaagaacaagccccgggtgaacgaggaccccaaggacacactgctgcgggaattccaagaggagattgcccgcctgaaggcccagctggagaagagggggatgctggggaagcggccccggaggaagagcagccgcaggaagaaggccgtgtccgccccgcctgggtaccctgagggcccagtgattgaggcctgggtggcagaagaggaggatgacaacaacaacaaccaccgcccgccccagcccatcctggagtcagccttggagaagaacatggagaattacctgcaggaacagaaggagcggctggaggaggagaaggcagccatccaggatgaccgcagcctggtgagcgaggagaagcagaagctgctggaggagaaggagaagatgctggaggacctgcggcgggaacagcaggccacagagctgcttgcggccaagtacaaggccatggagagcaagctcctcatcgggggcaggaacatcatggatcacaccaacgaacagcagaagatgttggaactgaagaggcaggagattgccgagcagaaacgtcgtgagcgggagatgcagcaggagatgatgctccgggacgaggagactatggagctccggggcacctacacatccctgcagcaggaggtggaggtcaaaaccaagaaactcaagaagctctacgccaagctgcaggcggtgaaggcggagatccaggaccagcatgatgagtatatccgcgtgcggcaggacctggaggaggcgcagaacgagcagacccgcgaactcaagctcaagtacctaatcatcgagaacttcatcccgccggaggagaagaacaagatcatgaaccggcttttcctggactgtgaggaggagcagtggaagttccagccactggtgccagccggcgtcagtagcagccagatgaagaagcggccaacatctgcagtgggctacaagaggcctatcagccagtatgctcgggttgccatggcaatggggtcccaccccaggtacagggctgaaaacataatgtttctggagttggatgtgtcccctccagctgtctttgagatggaattctctcacgaccaagaacaagaccctcgtgcgctacacatggagaggctcatgcgattggacagctttctggaaagaccttccacgtctaaagtccgaaagtccagatcctggtgccagagtcctcagcggcctccaccttccaccacacatgcctccctggcctctgcttctctgcgccctgcaacagtggcggaccatgagtgacaaccatcacgtcaggctgcccatccaatagactcctgggatggggcagccaaccctggctcatctcatctgccgcttggtgcgtgtgcgtgtgcgtgcatgtgcgtgtgcgtgtgtgcaggggtgagaatctggcagatggtgcctctgcctgctcttcttcgcctcctttatttaattcatgttatttattcgcggagctctgttcgtgttggggagatgccctcgcctgagccgtctgggcctaccgtggtcactgcgtagcctctttttcttctgacttgagagctcccccagtcagatctcaggcttgtccccctgtcagctgcctccagaagggaaggtagccagtgcctgagaagacagtcccttttctacccaccgcactccataacctccatcttctcccacactgatggcgagcagcccctgagcactttctgggactgggagactgcttggtgttccctgaggacaagagacatcctgacagtgttgggcatctgctccccgtggacacagccccactctccactttctgagcctcagacaacctcattcagcctcttgggctccttttcaaggacattaataacctcaccaacatagctcatgcccttcagctttgacaagaactcacggcttcccaaactctgctttctgcccaccttggatgggaactgtggaccaagcaattaccatcgccttggaacctgcaggaaatggaacagcaattgagacaacttgaacagtcatcaacggaagtccctccactggattcctttgtttctgtcccctccgaggagtcattttggtcgacaggctctcaaggcaactccccattttcaagaggctgctcctgcctgcttcgatcatttctccctgcagctgcctagaccccgttcacagtgggaggagtcaatgtcattctacccctcgctaaacgaagatattaacatctattgctttttcccttcatctgtcacaggaaacagaagcccaggcacaatcttttccagctttgcctgttacccctgtttctgaattgcatctttaaggtattattttgttgacaatagatcctttattcactagttacgcaaattggttcctagggggatactccttaccttcctttgtgatggcccaaaatgtctctaggtatctcaagtgataagtaaatttctacaaaaaaaaatggttaatgttcattgactggctttttaagtgtatattttggaggacgggtgaagaggtcataacgaaagcaagcgagtgaattaggatttcaaagtgccctaatagtgtgagtctccagttcctagaatatgaagagtgctgtcgttggggtgaaaccatgagactgacagatctgcctgaaatggggggtgtgggaggtggtggcgggggttattctctttccttcaggaaatgaacccttcttacatcattcaagttctgctctgaggatcaagcttgggtctgatttaactcagcgacactgtcatttctgcttcattactggactagagggttgagccacccacttgccatttgctcctgtccttccaggaaatcacaattttcatcagagcccaagagattatttgagactcaggattcagatcagaggttcgactgtggctgggacaggagttgtgtgtagaaattcaccaggtggcctgagcgcagggggacctccagggctgcgttgagcagcctctcccactgacctctttctcgtttgtggacaaagcagcacgtatcacctcattcatcacttggacacatcgcctttgcattgtcttgtcacacctccctcacagtcttatagcacaatatacccaaatcagcccccccagtccgagggctgggcccaaggtatggtcggaggaggagctcctgcctgcggttttgtgtatgtgtgtatgtgtgtgcgtgtttgtgtgcgtgtttacctccacaggggacactctacactcagtgtaagatctgctgggaacagggccaccaggagtggctggatctcagtctctctgtctctctttctctccttttccttttggtgtatcaaatatttgattgacaaagtaagggccttgattaggaccaaattctcgtgtgttgctatggtctttatttaggacaacaattaacaatgcagtggcccattcttgtcactctacacatatgactatacgggacatatgtaatatataaatatatatataaaacattcccctctgtccccttggcttcggatggaggcctttctgttgagctgaaatgcacctgcagctgggtgctgccagcagcttgcaggccccagccctgttccaatcaatgcagttgacaataaaggaatgagtatcgtcacggaaaaaaaaaaaaaaaaaaaaaaa

SEQ ID NO: 1172 - DNA, 4447 bp, Homo sapiens
aattggttggcgtctccgggacggatttgaaacttggcggttaaagctccggctgggacagggcggcgggaggcccagggagaacggggaagggacatttagtttgagacggtgctgagataggatcatgaaggaagaggtgaagggaattcctgtaagagtggcgctgcgttgtcgccctctggtccccaaagagattagcgagggctgccagatgtgcctttccttcgtgcccggagagcctcaggtggtggttggtacagataaatccttcacctacgattttgtatttgatccctctactgaacaggaagaagtcttcaatacagcagtagcgccactcataaaaggtgtatttaaaggatataatgcaacggtcctggcctatgggcagactggctctggaaaaacctattcaatgggaggtgcatatactgcagagcaagagaatgaaccaacagttggggttattcctagggtaatacaactgctcttcaaagaaattgataaaaagagtgactttgaatttactctgaaagtgtcttacttagagatttacaatgaagaaattttggatcttctatgcccatctcgtgagaaagctcaaataaatatacgagaggatcctaaggaaggcataaagattgtgggactcactgagaagactgttttggttgccttggatactgtttcctgtttggaacagggcaacaactctaggactgtggcctccacggctatgaactcccagtcgtcccgatctcatgccatctttacaatctccttagagcaaagaaagaaaagtgacaagaatagcagctttcgctccaagctgcatcttgtagacctcgctggatcagaaagacagaagaaaaccaaggctgaaggggatcgtctaaaagagggtattaatattaaccgaggcctcctatgcttgggaaatgtaatcagtgctcttggagatgacaaaaagggtggctttgtgccctacagagattccaagttgactcgactgcttcaagattctctaggaggtaatagccatactcttatgatagcctgtgtgagtcctgctgactccaatctagaggaaacattaaatacccttcgctatgctgacagagcaagaaaaatcaagaacaaacctattgttaatattgatccccagacagctgaacttaatcatctaaagcaacaggtacaacagctacaagtcttgttgctacaggcccatggaggtaccctgcctggatctataactgtggaaccatcagagaatctacaatccctgatggagaagaatcagtccctggtagaggagaatgaaaaattaagtcgtggtctgagcgaggcagctggtcagacagcccagatgttggagaggatcattttgacagagcaagcgaatgaaaaaatgaacgccaagctagaagagctcaggcagcatgcggcctgcaaactggatcttcaaaagctagtggagactttggaagaccaggaattgaaagaaaatgtagagataatttgtaacctgcagcaattgattacccagttatcggatgaaactgttgcttgcatggctgcagccattgatactgcggtggagcaagaagcccaagtagaaaccagtccagagacgagcaggtcttctgacgcttttaccactcagcatgctctccgtcaagcgcagatgtctaaggagctggttgagttgaataaagcgcttgcactgaaagaggccctggctaggaagatgactcagaatgacagccaactgcagcccattcagtaccaataccaggataacataaaagagctagaattagaagtcatcaatctgcaaaaggaaaaggaagaattggttcttgaacttcagacagcaaagaaggatgccaaccaagccaagttgagtgagcgccgccgcaaacgtctccaggagctggagggtcaaattgctgatctgaagaagaaactgaatgagcagtccaaacttctgaaactaaaggaatccacagagcgtactgtctccaaactgaaccaggagatacggatgatgaaaaaccagcgggtacagttaatgcgtcaaatgaaagaagatgctgagaagtttagacagtggaagcagaaaaaagacaaagaagtaatacagttaaaagaacgagaccgtaagaggcaatatgagctgctgaaacttgaaagaaacttccagaaacaatccaatgtgctcagacgtaaaacggaggaggcagcagctgccaacaagcgtctcaaggatgctctccagaaacaacgggaggttgcagataagcggaaagagactcagagccgtggaatggaaggcactgcagctcgagtgaagaattggcttggaaacgaaattgaggttatggtcagtactgaggaagccaaacgccatctgaatgacctccttgaagatagaaagatcctggctcaagatgtggctcaactcaaagaaaaaaaggaatctggggagaatccacctcctaaactccggaggcgtacattctcccttactgaagtgcgtggtcaagtttcggagtcagaagattctattacaaagcagattgaaagcctagagactgaaatggaattcaggagtgctcagattgctgacctacagcagaagctgctggatgcagaaagtgaagacagaccaaaacaacgctgggagaatattgccaccattctggaagccaagtgtgccctgaaatatttgattggagagctggtctcctccaaaatacaggtcagcaaacttgaaagcagcctgaaacagagcaagaccagctgtgctgacatgcagaagatgctgtttgaggaacgaaatcattttgccgagatagagacagagttacaagctgagctggtcagaatggagcaacagcaccaagagaaggtgctgtaccttctcagccagctgcagcaaagccaaatggcagagaagcagttagaggaatcagtcagtgaaaaggaacagcagctgctgagcacactgaagtgtcaggatgaagaacttgagaaaatgcgagaagtgtgtgagcaaaatcagcagcttctccgagagaatgaaatcatcaagcagaaactgaccctcctccaggtagccagcagacagaaacatcttcctaaggatacccttctatctccagactcttcttttgaatatgtcccacctaagccaaaaccttctcgtgttaaagaaaagttcctggagcaaagcatggacatcgaggatctaaaatattgttcagagcattctgtgaatgagcatgaggatggtgatggtgatgatgatgagggggatgacgaggaatggaagccaacaaaattagttaaggtgtccaggaagaacatccaagggtgttcctgcaagggctggtgtggaaacaagcagtgtgggtgcaggaagcaaaagtcagactgtggtgtggactgttgctgtgaccccacaaagtgtcggaaccgccagcaaggcaaggatagcttgggcactgttgaacggacccaggattccgaaggctccttcaaactggaggatcctaccgaggtgaccccaggattgagcttctttaatcccgtctgtgccacccccaatagcaagatcctgaaagagatgtgcgatgtggagcaggtgctgtcaaagaagactcccccagctccctccccttttgacctcccagagttgaaacatgtagcaacagaataccaagaaaacaaggctccagggaagaaaaagaaacgggctctggccagcaacaccagcttcttctctggctgctcccctatcgaagaagaggcccactgaagttggagtcatcatctctacccccagtctggcttgggagatgctttcaggttgcagccagaaggggttttttaaatgacttctctggatttcaggtttcttgctgttgaaaaaaggaacaaagcgttactgaaaagaaggtaacctttgttggatgtgggccttagcctccaggtccagactactactctatgttctccagaagggtgctaagtcacctactgaagagagaaccaactgactttcctattgactcatcaggaaccagtcctcagtctggtcaagttgtttcttatttgtgagcagttcaggctatctcctgatggggatgaggccaaggctttcttatcttttggttgtctctgcttaatggaggagcctggcctaggatggaggcctggcttagatctttcattccacctcaggaatgaggttgtgatctttcctgtcctgaccctctctgaattatgtttcaatagtactcttgattgtctgccatgttgttgaagcaaatgaattatttttaaatgttaagtaagtaaataaaccttagcccgtctactgtttgggaagatccttctgtgctagagggagaaataaaatttcaacctgtgttcctca

SEQ ID NO: 1173 - DNA, 3688 bp, Homo sapiens
ccagcccccgcagtccgcccagaccgtaaagggggacgctgaggagccgcggacgctctccccggtgccgccgccgctgccgccgccatggctgccatgatggatcggaagtgagcattagggttaacggctgccggcgccggctcttcaagtcccggctccccggccgcctccacccggggaacgcgagcgcggcgcagctgactgctgcctctcacggccctcgcgaccacaagccctcaggtccggcgcgttccctgcaagactgagcggcggggagtggctcccggccgcggccccggctgcgagaaagatggcggacctggccgagtgcaacatcaaagtgatgtgtcgcttcagacctctcaacgagtctgaagtgaaccgcggcgacaagtacatcgccaagtttcagggagaagacacggtcgtgatcgcgtccaagccttatgcatttgatcgggtgttccagtcaagcacatctcaagagcaagtgtataatgactgtgcaaagaagattgttaaagatgtacttgaaggatataatggaacaatatttgcatatggacaaacatcctctgggaagacacacacaatggagggtaaacttcatgatccagaaggcatgggaattattccaagaatagtgcaagatatttttaattatatttactccatggatgaaaatttggaatttcatattaaggtttcatattttgaaatatatttggataagataagggacctgttagatgtttcaaagaccaacctttcagttcatgaagacaaaaaccgagttccctatgtaaaggggtgcacagagcgttttgtatgtagtccagatgaagttatggataccatagatgaaggaaaatccaacagacatgtagcagttacaaatatgaatgaacatagctctaggagtcacagtatatttcttattaatgtcaaacaagagaacacacaaacggaacaaaagctgagtggaaaactttatctggttgatttagctggtagtgaaaaggttagtaaaactggagctgaaggtgctgtgctggatgaagctaaaaacatcaacaagtcactttctgctcttggaaatgttatttctgctttggctgagggtagtacatatgttccatatcgagatagtaaaatgacaagaatccttcaagattcattaggtggcaactgtagaaccactattgtaatttgctgctctccatcatcatacaatgagtctgaaacaaaatctacactcttatttggccaaagggccaaaacaattaagaacacagtttgtgtcaatgtggagttaactgcagaacagtggaaaaagaagtatgaaaaagaaaaagaaaaaaataagatcctgcggaacactattcagtggcttgaaaatgagctcaacagatggcgtaatggggagacggtgcctattgatgaacagtttgacaaagagaaagccaacttggaagctttcacagtggataaagatattactcttaccaatgataaaccagcaaccgcaattggagttataggaaattttactgatgctgaaagaagaaagtgtgaagaagaaattgctaaattatacaaacagcttgatgacaaggatgaagaaattaaccagcaaagtcaactggtagagaaactgaagacgcaaatgttggatcaggaggagcttttggcatctaccagaagggatcaagacaatatgcaagctgagctgaatcgccttcaagcagaaaatgatgcctctaaagaagaagtgaaagaagttttacaggccctagaagaacttgctgtcaattatgatcagaagtctcaggaagttgaagacaaaactaaggaatatgaattgcttagtgatgaattgaatcagaaatcggcaactttagcgagtatagatgctgagcttcagaaacttaaggaaatgaccaaccaccagaaaaaacgagcagctgagatgatggcatctttactaaaagaccttgcagaaataggaattgctgtgggaaataatgatgtaaagcagcctgagggaactggcatgatagatgaagagttcactgttgcaagactctacattagcaaaatgaagtcagaagtaaaaaccatggtgaaacgttgcaagcagttagaaagcacacaaactgagagcaacaaaaaaatggaagaaaatgaaaaggagttagcagcatgtcagcttcgtatctctcaacatgaagccaaaatcaagtcattgactgaataccttcaaaatgtggaacaaaagaaaagacagttggaggaatctgtcgatgccctcagtgaagaactagtccagcttcgagcacaagagaaagtccatgaaatggaaaaggagcacttaaataaggttcagactgcaaatgaagttaagcaagctgttgaacagcagatccagagccatagagaaactcatcaaaaacagatcagtagtttgagagatgaagtagaagcaaaagcaaaacttattactgatcttcaagaccaaaaccagaaaatgatgttagagcaggaacgtctaagagtagaacatgagaagttgaaagccacagatcaggaaaagagcagaaaactacatgaacttacggttatgcaagatagacgagaacaagcaagacaagacttgaagggtttggaagagacagtggcaaaagaacttcagactttacacaacctgcgcaaactctttgttcaggacctggctacaagagttaaaaagagtgctgagattgattctgatgacaccggaggcagcgctgctcagaagcaaaaaatctcctttcttgaaaataatcttgaacagctcactaaagtgcacaaacagttggtacgtgataatgcagatctccgctgtgaacttcctaagttggaaaagcgacttcgagctacagctgagagagtgaaagctttggaatcagcactgaaagaagctaaagaaaatgcatctcgtgatcgcaaacgctatcagcaagaagtagatcgcataaaggaagcagtcaggtcaaagaatatggccagaagagggcattctgcacagattgctaaacctattcgtcccgggcaacatccagcagcttctccaactcacccaagtgcaattcgtggaggaggtgcatttgttcagaacagccagccagtggcagtgcgaggtggaggaggcaaacaagtgtaatcgtttatacatacccacaggtgttaaaaagtaatcgaagtacgaagaggacatggtatcaagcagtcattcaatgactataacctctactcccttgggattgtagaattataacttttaaaaaaaatgtataaattatacctggcctgtacagctgtttcctacctactcttcttgtaaactctgctgcttcccaacacaactagagtgcaattttggcatcttaggagggaaaaaggacagtttacaactgtggccctatttattacacagtttgtctatcgtgtcttaaatttagtctttactgtgccaagctaactctaccttataggactgtactttttgtattttttgtgtatgtttattttttaatctcagtttaaattacctagctaaaaaaaaaaaaaaaaaaaaaaaaaaaaaaaaaaaaaaaaaaaaaaaaaaaaaaaaaaaaaaaaaaaaaaaaaaaaaaaaaaaaaaaaa

SEQ ID NO: 1174 - DNA, 1691 bp, Homo sapiens
gtctgcaccggcagcaccatgtcgctcatggtcgtcagcatggcgtgtgttgggttcttcttgctggaggggccctggccacatgtgggtggtcaggacaagcccttcctctctgcctggcccggcactgtggtgtctgaaggacaacatgtgactcttcagtgtcgctctcgtcttgggtttaacgaattcagtctgtccaaagaagacgggatgcctgtccctgagctctacaacagaatattccggaacagctttctcatgggccctgtgaccccagcacatgcagggacctacagatgttgcagttcacacccacactcccccactgggtggtcggcacccagcaaccctgtggtgatcatggtcacaggagtccacagaaaaccttccctcctggcccacccaggtcccctggtgaaatcgggagagacggtcatcctgcaatgttggtcagatgtcaggtttgagcgcttccttctgcacagagaggggatcactgaggaccccttgcgcctcgttggacagctccacgatgcgggttcccaggtcaactattccatgggtcccatgacacctgcccttgcagggacctacagatgctttggttctgtcactcacttaccctatgagttgtcggctcccagtgaccctctggacatcgtggtcgtaggtctatatgggaaaccttctctctcagcccagccgggccccacggttcaggcaggagagaatgtgaccttgtcctgcagctcccggagcttgtttgacatttaccatctatccagggaggcagaggccggtgaacttaggctcactgcggtgctgagggtcaatggaacattccaggccaacttccctctgggccctgtgacccacggagggaactacagatgcttcggctctttccgtgccctgccccacgcgtggtcagacccgagtgacccactgcccgtttctgtcacaggtaactccagacacctgcacgttctgattgggacctcagtggtcatcatcccctttgctatcctcctcttctttctccttcatcgctggtgtgccaacaaaaagaatgctgttgtaatggaccaagagcctgcagggaacagaacagtgaacagggaggactctgatgaacaagaccctcaggaggtgacatacgcacagttgaatcactgcgttttcacacagagaaaaatcactcgcccttctcagaggcccaagacacccccaacagataccagcgtgtaacacggaacttccaaatgctgagcgcagatccaaagttgtcttctgtccactagcaccacagtcaggccttgatgggatcttctagggagacaatagccctgtctcaaaaccgggttgccagctcccatgtaccagcagctggactctgaaggcgtgagtctgcatcttagggcatcgctcttcctcacaccacgaatctgaacatgcctctctcttgcttacaaatgtctaaggtccccactgcctgctggagagaaaacacacttgcttagcccacaattctccatttcacttgacccctgcccacctctccaacctaactggcttacttcctagtctacttgaggctgcgatcacactgaggaactcacaattccaaacatataagaggctccctcttaacacggcacttagatacgtgctattccacctttcctcag

SEQ ID NO: 1175 - DNA, 1101 bp, Homo sapiens
caccggcagcaccatgtcgctcacggtcgtcagcatggcgtgtgttgggttcttcttgctgcagggggcctggccacatgagggagtccacagaaaaccttccctcctggcccacccaggtcgcctggtgaaatcagaagagacagtcatcctgcaatgttggtcagatgtcatgtttgaacacttccttctgcacagagaggggatgtttaacgacactttgcgcctcattggagaacaccatgatggggtctccaaggccaacttctccatcagtcgcatgaagcaagacctggcagggacctacagatgctacggttctgttactcactccccctatcagttgtcagctcccagtgaccctctggacatcgtgatcataggtctatatgagaaaccttctctctcagcccagccgggccccacggttctggcaggagagaatgtgaccttgtcctgcagctcccggagctcctatgacatgtaccatctatccagggaaggggaggcccatgaacgtaggctccctgcagggaccaaggtcaacggaacattccaggccaactttcctctgggccctgccacccatggagggacctacagatgcttcggctctttccgtgactctccatacgagtggtcaaagtcaagtgacccactgcttgtttctgtcacaggaaacccttcaaatagttggccttcacccactgaaccaagctccgaaaccggtaaccccagacacctacatgttctgattgggacctcagtggtcaaaatccctttcaccatcctcctcttctttctccttcatcgctggtgctccgacaaaaaaaatgctgctgtaatggaccaagagcctgcagggaacagaacagtgaacagcgaggattctgatgaacaagaccatcaggaggtgtcatacgcataattggatcactgtgttttcacacagagaaaaatcactcgcccttctgagaggcccaagacacccccaacagataccagcatgtacatagaacttccaaatgctgagcccagatccaaagttgtcttctgtccacgagcaccacagtcaggccttgaggggatcttctagggaga

SEQ ID NO: 1176 - DNA, 1498 bp, Homo sapiens
catggcgtgtgttgggttcttcttgctgcagggggcctggccacaggagggagtccacagaaaaccttccttcctggccctcccaggtcacctggtgaaatcagaagagacagtcatcctgcaatgttggtcggatgtcatgtttgagcacttccttctgcacagagaggggaagtttaacaacactttgcacctcattggagagcaccatgatggggtttccaaggccaacttctccattggtcccatgatgcctgtccttgcaggaacctacagatgctacggttctgttcctcactccccctatcagttgtcagctcccagtgaccctctggacatggtgatcataggtctatatgagaaaccttctctctcagcccagccgggccccacggttcaggcaggagagaatgtgaccttgtcctgcagctccatctatccagggaaggggaggcccatgaacgtaggctccctgcagtgcgcagcatcaacggaacattccaggccgactttcctctgggccctgccacccacggagggacctacagatgcttcggctctttccgtgacgctccctacgagtggtcaaactcgagtgatccactgcttgtttccgtcacaggaaacccttcaaatagttggccttcacccactgaaccaagctccaaaaccggtaaccccagacacctacatgttctgattgggacctcagtggtcaaaatccctttcaccatcctcctcttctttctccttcatcgctggtgctccgacaaaaaaaatgctgctgtaatggaccaagagcctgcagggaacagaacagtgaacagcgaggattctgatgaacaagaccatcaggaggtgtcatacgcataattggatcactgtgttttcacacagagaaaaatcactcgcccttctgagaggcccaagacacccccaacagataccagcatgtacatagaacttccaaatgctgagcccagatccaaagttgtcttctgtccacgagcaccacagtcaggccttgaggggatcttctagggagacaacagccctgtctcaaaaccgggttgccagctcccatgtaccagcagctggaatctgaaggcatcagtcttcatcttagggcatcgctcttcctcacaccacgaatctgaacatgcctctctcttgcttacaaatgtctaaggtccccactgcctgctggagagaaaacacactcctttgcttagcccacaattctccatttcacttgacccctgcccacctctccaacctaactggcttacttcctagtctacctgaggctgcaatcacactgaggaactcacaattccaaacatacaagaggctgcctcttaacacagcacttagacacgtgctgttccacctcccttcagactatctttcagccttctgccagcagtaaaacttataaattttttaaataatttcaatgtagttttcccgccttcaaataaacatgtctgccctcatg

SEQ ID NO: 1177 - DNA, 10923 bp, Homo sapiens
attcatttcctgagaactgcagagagccgctgagaggctctgcgtgtgcgtgtgcgcgggtgacgccgtgtgtgtgcgagtgtgtgtgtgtgtgtgcgcgcgcgcgtgtgagagagagaaagggagagagagagggggactctgtgtgagggaaagaaaacaatttctcctgctctgcagcttctgttcaggatcaatgtgactctaagaacaaatggatgaatgaatatccatatgaagagaaaaacaataaagaatatcaacacctttgagaacagaatgttaatgcttgatgggatgccggcagtcagagtcaaaacagagcttttggaatctgaacaagggtctccaaacgtccacaactatcccgatatggaagccgttcccctgttgctaaataatgtgaaaggggagcccccggaggactcgttatctgtagatcacttccaaacacaaactgagccagtggacttgtcaataaacaaagccaggacgtcccctactgccgtttcatcctccccagtttccatgacagcatctgcctcctcaccttcttcaacttcaacctcttcatcgtcttctagtcgtctagcctcatccccaactgttatcacatcagtatcttcagcgtcatcttcgtcaacagtattaactccagggccccttgtggcctctgcatctggtgttggaggccagcagtttttgcacattatccatcccgtaccgccttcaagtcccatgaatttacagtctaacaaactgagtcatgttcaccgcatccccgtggtggtacagtcggtgcctgttgtctacacagctgtaaggtcacctggaaatgtgaacaacactattgtcgtgccgcttttggaggatgggagaggccatggcaaagcacaaatggacccccgaggcctatctcccagacaaagtaaaagtgacagtgatgatgatgacctgccaaatgtgaccttagatagcgttaatgaaactggatctacggccctttccatagccagagcagtacaagaggtacatccgtccccagtatcaagggtccggggcaatcgaatgaataatcaaaagtttccttgttcaatttcaccatttagtattgagagcacaagacgccagagacggtctgaatccccagactccagaaaacggcgtatccacagatgtgattttgagggatgcaacaaagtgtacacaaaaagttctcacctgaaggctcaccggaggacacatacaggagagaaaccttacaagtgtacctgggaaggctgcacctggaagttcgctcgttcagatgaactgacgaggcattaccgcaaacatacgggagtgaagccattcaagtgcgcggactgtgatcgcagcttttcccggtcagatcatttggccctgcaccgccggaggcatatgttggtgtgaggaatgctacctgtccagctgagcgtaagagctggatctcttagcggcacccaattcagcagggctgaatccccttcacagtgttaacacaaaagggcatcaccatcccacgatgtctgaaaccagagcaggaaaaagaaggcacacttcttttggtctgaaggtaacccccatcatgactagacgagaaccgtctttacccgggcctgggagctcagtgacataaatgctgaagagacaggcattgttttccgtgctgtgtcctctgccatttaaagatgtttgtagcttgtacattttctgagctgtcagacattttgttattgataccttaaaggtcacctaccacaaattgatggctagagcaagaccttttaaatttggatgaatctcccatcatcccatcccttaacccctttttacagaaattttagttacaatctgagtaagctagaacacacatccaatctgttaccagcaagcagcatgaaagtagaaacgaagaagcagatggagaggtcccattacctgcaaagaaagggcactcaggcagccctttgcaatcgcgatggcagccactagatatcactctcaacttgtcattctgccatgccctgaagaaaaccaacattgaatctttcatttgtttgtcgttgattgtttttgttttgtttcgattctgttttgttcatctgttcgagcagaggggcagttgaagtctcgtcctggtctctgccctggcatggactggcacagaggtgttctgtagttgaataggaagagcctgtctaaaaaactactgccccacttcaaattgcagtgttctgtcacctaggcatcatctcttcctgcccctagtatttgattacaaggaaccaggggaaaaaaactttcttagacacactggcaccaaggtaagaggtggggctgcccaggcaaagtcagtgaacatgaaaactcagacaaagcagagatggaaataatgcgcctcttgaggagaaaagcaataatgaataaaaggactttcctacaataacttcactgaggactcacgttaccaattttcatacttactaaagggattgtaaaaaacaccccagcattttaggtgtcttggttccatttacagcactgaggtaatctttctgctgtttgttgtcctgcttggttgagtaccacaattaaagattatgctccccttttcttgtttgaaaacagttatttggtgactagaaaggcaagggaggcatagccgggaattaactcttcggttaatgggtcagttctccttggaactgaatcagtggaaagagaatgcttcccatagaaagcccgacatggtgctagtttcctctcttggagagccaaggataagtgactctccaataggttcttctataccgatttcattttctaaactgtatcaggacccaggtgtcctgcattggcatctgcagggatattgaacccactcatcctgtgcagaggatgagaggaaggtgttagttccatcagccccataaaattatgaacctttttgcaactaggaacatatacagtaaacaagcaatacatcaccaacgagcattctttcagaaaaattaccatatttttgtccccaccacaagctgggtttttttccagctttctgtggctgaggggctggtgagattttttgttgttattgttgttgttgctagaattttttatagcttagatataaaaggtctccaacaaagacctttgcaatatattttaattacaaacacttgattttgggaattgcacatattaacctcacaatattactagctcatttttaaatgtctggacattctgaaataatttccggttacagaattaccctttttaggatcatcttctaattcagataatcttattctgatgaagcgagaactatgaacgttgaaacaaggacaatttgtgttggatggtattcaaaaggaattttttaaaacattaagcaacagtgtaatgattttcaggtcaaattatggcttcacaaatatgtgctctatattgtctgccaggtctcaaaaattcatcaagcaatttccctccaacaagggctgcagttctagtgataaatagcatctttagctgcacagtctactactcatcaaccagtgggttttttttagcacctggaaagtttttttgtactatatgcaactcctacttcacattgcctgtgaccattcagaatagaaaaaggtctgttgatgcatgccagtgctggttactagtcagtgacagagaacacagagagggacaaacacagccatgaaccccctggcactagtaccagcacctagttggcaagtagtgggtgcatctctcaagtgaagtgtagatttgtatttagtcctgcttgctctcataaaaagagccagttcttttctctgctgaaagatgtcttgagagtattacaggtagacttggtttttagaattcataaaactgacaggcaggggaatcttcctgagtgacagcttggtttaaatttagcacagaactagatgagttgcacttttctaataacataggatggatttggggaagggaacattttccctcatcctctgaaagtggaaaccagactgagatggtaagttaactgataaaacctgtcagcattccatcattttccccttttgacgtatcagtacttctaagaagggatctaagcacaattaagtgaattgagtccctggtctagcctcaggaactgaaacttctttggggcttgtcttgagacgtggcaaattctccttggtgagttttctaaaagtatttccccatggaaaggagaaagtggtttgggacagaaagaaatggaatgtcttcagtcatggaagagcctccatttcatctcatgtccatttctagcctctttcaaaaagcacagtgcatcatgagcaacagaaaagcagtagaatcctaaaggacataacagttgttccgtaactagaagcattctttgattttaaatttgaagctgttcagtttgcagctggggatatgtgcatggttgggaacttatacacatagagccattaactacttaagcagctgcagtagacctgattttctgtttgcagtatagagattgatttcaagggagttacattatttgaaaagttatgactttcagcctttgaggttttaagaatcccttttcatggtctgatcttaagttgtttgaaaaaagattcacgcttctgcatccacctctgccctcattctgtcaattgtgtgtggactctgagaagcctgcttgataacttgtcttaagttctattaaggcagttagactgagatttctaatgacttcaccataaagattatacttctgcctggcgtcgtttctataaaacactataggacatttgttttcaaaagcagttgagtaacagcaacataaaccacattttttaaaaaaatgagcacttttcattcacttgaaagcttaagtgggaaaaaggaagatgattgtcaggggaaaaacttacaaaatgctacagtgtttacaaatgccagttccaggtgattagaaaggccgttttcattatggttcagatttggaatagcttatgcaaagattgtgttcatttttatacaattctttttaactttaaattgccatctgtgttttaaacataattctgcactttggaatcagttcattagaatgataacatttatatggataaagatgcagtattccttattctgtacttgatttattatacttaccaaagctgcaactgaataaatctggtgaggtgaggccttcaaaatgtattaatacgcctttgttatgttgttatgactgcttagaaatgtagccatgatgttgttctaaagatgtcttaacatttatagtgaggattgacagaaattaagcagtgttaagaataccagcatccatgttacagtctgcgtataagggactgaatgtgaggtaactcttatgaatcataataggcccagaaagccttaatattcatagttcataatccagtctcagattttgctcttcaatgttgcctgtaaacttagcaggtaaatgtattctagtataaaacatcattgaccaaatctcttcctttagtttttctgaggtagtgcatcccattaaaaaagtctcttcaattagatttggctttagtttagaaaggggtttggtaagtcatgtcttccatatgacatttctactcatccccacactgccttccacttaacctgtacagacagccccaacacatgcacatgtgtgtacacaactgtatatgcagcagccagtgggctaacaaatatcagcaaagaacttttttaaaaagaatttgtaataatccgtgctgtctagaaatgtgagttacttaccttattaggaaaccggcttataatactatatatgactctgcctgcattttatagttaagaaatgtacataaaaattgctatattttcacagtttcattataatgtctgtttagtaacccatgtccactgatactttaaatatgctaattactgagcaattgcaatagaaatccagattttcataagaaaatgaaatagaaggatactgcatctttaaaaaatagagtgaagatattttactgtattcgtaacatatgtgatagtggaaaaagtattttcaaactcacaaattttacagaggttgtaaatagtttgatgaagtatgttgggaaagagagcttctagttttcatcacaataaaaagaaaaaacttgttcagatatgccttgtatatcttacacacaatgagtgaaattgccatgggaactctgtccaactttgtcagagcatgctcttcgtgttctgttcaaaatagagtggccacttgtcatggtttagccaggatggtttaaaatataatgaagtcattttaagttgcagacaactgattccaaactagtaatgtcttttcctgaaaagggcaaaacagctgcacaggattttgcttgtactaaagaggagcatcttacaattgttctcttttctcagttatctccctcctcaacagagtgtgaacaaccatacaggtgtttattcttgttttattccagggagactgcttttaggtataactacatgttgacaagattaagtgctgtggatatggccacgtgttaaaggaatctatactcgcaataggaataagctaatgcccattttcagaaataaattaaatgctgaaagtgcctgtcagtaaaccttatgaccaatgagatattcctatacttttacacagcaataattcttaataagactgggttttttcctgcacatgtgaacacacacacacatacacacagagagagtaaatacatacacatagtaaatcaaatctgttcacatgcccacaaaaaacgcttttatagctttcaaatatacctaatcttgtttacattaacatttcttaatttgatctttctaacttgcagaacgttaagaacacaaatctgaacattaagtttatcttcagtgaacactattgcatatggtaattataatttccagataaaaagttgactgtcatttgccccaaacttatgaaacagtatgtatgattcaaaaagttttgctcagttaaaaacaccaatttatttggcgcaaaagactgaaggatatttgtttgcttgttcattttatccactcatatcaaacgcacaaattcatctttacatttcttcattcccctttcccctaatatttcctattatcatcttaagaatcattttggaatgaatattgacagaatcatttctccccaaaaagtctgttgaagtaccactgacacttagtaagcctagcctttaaccatctttgcagttagtcctaaaaattaccagatgcacattcagaagctcacaggttttttcctgtaattactgtactgctaaaagtggagtcatggatagaaatatacaatgagactatatgaatagacatgaaccctggaaattctccaaccctgccatctcagagcacaaattcacccaaacaagctactgaggctatcagtaaaattatactcatggagagtcacacatcgggtaagggcaattttaaaagtaggactgtgattaaacattcaggctttagacttccatgatggactcagaccacaggcctcaaaaaaacatccactgttttctcctcccaatgttagaaagaagaaaagggagacggaaatgtaccaggataagggggtaaaataaccaattaagtgtcaaaggaaagctgctgggttccttaatctcactgaagtcaagtcttctgactgggcttcttaccatgtgttgtctgaaaaaactaaagtaccttgaaaggttacacattcagcaaaccatgaagataatagctattctttattaaacactgtgtgccaagcaatagactaggcaatttttagatacgttacctgcaacctgtacaacatttctacactttatggatgggaaacggagacatgggaagtgtggctgagttgttcatggatgtagaaatagtaaacggcagagtaggaaagtgaaaccgcctatctctgacctggaggtctgcctgtatctttcccactccaccacactgcacgtgggtgtcccgaaaccaccttcccagattcctgactctcagtaattttattatggacaacatgcatgagtagtcatcatatttttcaagtgaaatatcgggacatgatataacacatgacttaacaatggtactgaatatttgaaatcaggcctttcccggaaaatcatgcatgaaggatcattataaacaaacaatagcaaccagttgtctccccgaacttgtcacttttctcataaatgtctggcctggagctccaaaatcatccaaatacttagtagcattttagcctgagtacactttctcagttcctcaactctttgtatacctttccaccaatatagacattctagaatctgcttcagatgcatttgaaattttcacccccatggaactagtgattaatatcagagcccactcttgcagttggtaatggggtggcaatcaaacgttcagatgatgataaaggagagataatggataattctttttcagagttctcacttaacagctctgttgtggaatgttttaaatagtcttataaataatttgtttatagtattgttgttagtttaattgaattttatgtaagaagctgtccaacatcagagaaatgaaattcctcccactttctgtgtagaacaaggtctctgacagtattgattcatggaagtactaatggacttagaaaacattaagagaatgtcatttctcatagtgtttctgtttctgaaaatgaatctcctgaattattatctttctccctgttacttggctggggaaagagatagaagctgtataaacaaattctcttccatgctcaaagcaagtgttccatgtgcacaacctgctgcagactggggcccttctcagttaattgggtttcacaagcaataatttctccacaacaaaaaccacaacttgaagtgagttgaaaagagatcaatagtggaaacagtcgcctcagtactttttctttctggatttcatctctagaaatttgaagtgtttgagacagagtccaccctttgtgcaaggcgagaaccaatgaatggactccttgtgtgaattattgcatcttcttccaaagcaggttcatcaagactttcacagagattcatttttgttgagaagtaagggttaataggaggatagaatttggatccaaatctagtgataaaagtgtccaagcaatcaaaaagtaagatattttagggacataccaacatcttccctttctgctaatttcatgctccaaagatatggcaaaaaaaaaaatcataaaaagtgcttttgccctacttgtgttctagttttcccatggcagaattttgtaattacatccagaatatagtgtatattttgttcctcaaactttattacattggatggatattgttgaactggggcactggtgcctatattcaaggctctttcctatcaacgtgtctgtccacgatttgttgtgtttaaagcttcattttgaaaaatcactgtccccctgtggggtagtgactgtattgttttgttcatgtctatgtgggacacattgcatcacatggcaaaccaactctctgtggatgtgagataagtacttataaaaccagcttgaaaacatcgtcttatgtattatgtcatcctgcatcataatgcaattatgtgtatcataacatgctcatttaaaaaaagagaaaccagcaaattcatgtttgtccatagaagaatgtactcagaactttgtgttgtgaaacgatgagaacagaccacctttaagatacccacctgccacttaaaatgacttagttataattagtagtagtctagacgttgttcttggtgtgtgggggtcaattctaacgtcatgttcttttgaataaatctctcagtcatatttgaaaaaaaaatacatgggaataaagaaaaatatcatctttggccaaatcaagcaggcatcttttttcttttccttgacgtttagctcattatacgtggtgattggatcacgagatctgtccgtgtgaaaatacagaaacatcctttagtttacaaaacagttattctaggcttgaagcctctgaacagcaaattgaatagatgggctgcatctgatttgctttatggatgtaattttacaaaacactcttgggtctctgaccccagggagttaagagtgcccagaggaggtcctacacattaaaggataaagccccccagtgatgctggcaagcaaatgtgttgagttcttaaatcttcatttggttttctgttcaggattttaattgcaaatgaatttatttctccagtttatctaaagacctaatttcccaatagtttcctctgcatttatatactctgtagtgtttaggcaaccctgttataagtttattaatattatgtaagtgttgttcttgtatttatgtatagtgtatgtattgtaaatatactcagagcttttttccttttactgtaaaatggtgatttttttgccctatgataatgtaaagggagaccctcctaatgagattctctcagaggatgattattccagtctattctcagagatttaaatgaacaagtgttattgtttttaatggtgtctcagacatattctgttggtgcattgcttttctgtattcaactttcctatgaattgagctgtgaactgaaatagagtttaaacctttaactgtatgcatttgtataattatctgaatgaaggcatgaaggttaaataaagcattttgtatggaacaaaactccctaactgactcagacactttggaaatcatagttattaaccattctaattaaacctttgttatgaaaagttttaaaaaaaaaaaaaaa

SEQ ID NO: 1178 - DNA, 1597 bp, Homo sapiens
agccgctgagaggctctgcgtgtgcgtgtgcgcgggtgacgccgtgtgtgtgcgagtgtgtgtgtgtgtgtgcgcgcgcgcgtgtgagagagagaaagggagagagagagggggactctgtgtgagggaaagaaaacaatttctcctgctctgcagcttctgttcaggatcaatgtgactctaagaacaaatggatgaatgaatatccatatgaagagaaaaacaataaagaatatcaacacctttgagaacagaatgttaatgcttgatgggatgccggcagtcagagtcaaaacagagcttttggaatctgaacaagggtctccaaacgtccacaactatcccgatatggaagccgttcccctgttgctaaataatgtgaaaggggagcccccggaggactcgttatctgtagatcacttccaaacacaaactgagccagtggacttgtcaataaacaaagccaggacgtcccctactgccgtttcatcctccccagtttccatgacagcatctgcctcctcaccttcttcaacttcaacctcttcatcgtcttctagtcgtctagcctcatccccaactgttatcacatcagtatcttcagcgtcatcttcgtcaacagtattaactccagggccccttgtggcctctgcatctggtgttggaggccagcagtttttgcacattatccatcccgtaccgccttcaagtcccatgaatttacagtctaacaaactgagtcatgttcaccgcatccccgtggtggtacagtcggtgcctgttgtctacacagctgtaaggtcacctggaaatgtgaacaacactattgtcgtgccgcttttggaggatgggagaggccatggcaaagcacaaatggacccccgaggcctatctcccagacaaagtaaaagtgacagtgatgatgatgacctgccaaatgtgaccttagatagcgttaatgaaactggatctacggccctttccatagccagagcagtacaagagtaagtatcacattcacaggatgaattaagaattgccaaggtgttcaatggataatggaaactgcagcatctcctgtcccccagccatgtcattctagctgtgaactggcacgaatgtcagcagcttttcattcagctgaatgctctttgggagattagggcagagaatggagtgttttaatgagttggaaattcatgctttgatgagatataagacctatgtgcatcttttctaatacctcctgcacccttctcctgaactctgcaaaaaaaaaaaaattgttatttttgaatgtcactatttgattatcatcatcattattattacacaaagtcaagggaaatatggcaaagtattgttatcttgttttgataggaaattacagaatagctttttggaagatttaaatttggaaaataatatgttcatcctttgaaaagtagtactcatatgttatttttaaatgaatcttttctctgtccttttacctggaccgcagggttagatttcagccctcgtttattgaaaatagctgcttttctatcagtcaaccttgtacctagaattgaacctaaatgattgaaaaaaaaaa

SEQ ID NO: 1179 - DNA, 1133 bp, Homo sapiens
atgtcggcggccgtggcgtgcgtggattacttcgccgccgacgtgctcatggccatctcttcgggcgccgtggtgcaccgcgggcggcccggccccgagggcgcgggccccgccgccggcctggatgtgcgcgcggcgcgccgcgaggccgcctcacccgggaccccggggccacccccgccgccccccgccgcttctggcccgggccccggcgccgccgcggcgccccacctgctggccgccagcatcctggccgacctgcgcggcggacccggagccgccccggggggcgcctcgcccgcctcctcctcctcagccgcctcgtccccgtcctcgggccgcgcccccggcgccgcgccctccgccgccgccaagagccaccgctgtcccttcccggactgcgccaaagcctactacaagtcctcgcacctaaagtcgcacctgcggacgcacacaggggaacgcccttttgcttgtgactggcagggctgcgacaagaagttcgcccgctccgacgagctggcccgccaccaccggacgcacacgggcgagaagcgcttctcctgccctctgtgctccaagcgcttcacccgcagtgaccacctggccaagcacgcccgccgccaccccggcttccacccggacctgctccggcgccctggtgcccgcagtacctcccccagcgactcgctgccctgcagcctggccgggagccctgcgcccagccccgcgcccagcccagcccccgcaggcctgtagggccctcgtgcagcccaccctgaccgccaggatgcttctgccatccaggggtgtagtgaggacccacggggagcctgggccccttccagccgtgggcaaaccctgaagacacccctgcccccctccagagagtgaggagggggcctgagactggacctgggtctgcctgacctcagagtgtccaggggcttggagagacctgcgcccacccctccactctcccaggagtcgctgatcactgggacctggttccagccgtttgcaggggaggcggctccgagaggcgtgtgctttccgtgggtggcgcccctcccccgccctgcctggcctcatccttgtatttaattaattaaacaagcccctttttaaaccct

SEQ ID NO: 1180 - DNA, 2208 bp, Homo sapiens
cgggcttggccggaactgaattggtagaggtaaaaggggaacggaggaccttaagctctggccacttcggcccagcgaacccactttatttttgtccaaggaaaagctgcaggggggaggattctttttaggaagtctactctgccggcccctgatttttgggttggatgcttgagagctttgtttcccttgttccgagagtggcccagctgggtctgaatcgactccctcccctttcgaccccccctcctcattttccagcccggagaaataggggagtgggggcccaagaacgagaagacgagaacgcgtcgccctgcgctatgtcagaatggggcgggtgtgaggggaacagctctcttgcgatcagctcaggagtatgagcctcccggaggacggcatgagttctggacacttcaggagtcctcagctagtgacatggtcgatatggataaactcataaacaacttggaggtccaacttaattcagaaggtggctcaatgcaggtattcaagcaggtcactgcttctgttcggaacagagatccccctgagatagaatacagaagtaatatgacttctccaacactcctggatgccaaccccatggagaacccagcactgtttaatgacatcaagattgagcccccagaagaacttttggctagtgatttcagcctgccccaagtggaaccagttgacctctcctttcacaagcccaaggctcctctccagcctgctagcatgctacaagctccaatacgtccccccaagccacagtcttctccccagacccttgtggtgtccacgtcaacatctgacatgagcacttcagcaaacattcctactgttctgaccccaggctctgtcctgacctcctctcagagcactggtagccagcagatcttacatgtcattcacactatcccctcagtcagtctgccaaataagatgggtggcctgaagaccatcccagtggtagtgcagtctctgcccatggtgtatactactttgcctgcagatgggggccctgcagccattacagtcccactcattggaggagatggtaaaaatgctggatcagtgaaagttgaccccacctccatgtctccactggaaattccaagtgacagtgaggagagtacaattgagagtggatcctcagccttgcagagtctgcagggactacagcaagaaccagcagcaatggcccaaatgcagggaggagagtcgcttgacttgaagagaagacggattcaccaatgtgactttgcaggatgcagcaaagtgtacaccaaaagctctcacctgaaagctcaccgcagaatccatacaggagagaagccttataaatgcacctgggatggctgctcctggaaatttgctcgctcagatgagctcactcgccatttccgcaagcacacaggcatcaagccttttcggtgcacagactgcaaccgcagcttttctcgttctgaccacctgtccctgcatcgccgtcgccatgacaccatgtgagccgcacaggtcacactagagaagctgcgctggtatctttcctggtcgtgtgctgaggttgggacaattttttcctctttgacttcagcttgcatatggggttgaagcagcccactgagccaagttgaggagactggaggaaaagagagctggtctcccgtggggctcttcatattctaccttcacggaattccagtgtggcacccatggctgccttcccatccccccctgctctgaaataggacatttttcctacagtaacaaaacaggaatcaaactcaaggctgtgaacaaacatacgctgctttattctttccaatttttctcttgttttctagaactcttatccatatgtttttaaaataagtacctaaaagtggtttgatagtgtcctaaacgacttttttaacttcctaaatggaaagagcataacaagtagttgattggtaagatttacagggatttggtttctgagtttgaggcacattcccagtgaataagctgagtcccataccacactcaaaaggttttaataaatctaatcctatttcttcttaaagtttggttttcagacagtgctggtgcttctgcttcttaagttcatcaagggaatgaggagttcttgtccttctcctcctcttttttttcttttccactttctccttcaggattaaagattttgcggaattc

SEQ ID NO: 1181 - DNA, 1459 bp, Homo sapiens
gcacctagcagatcccaagctggggaatgccagttctggcaccaaccttcctgctccctgctggggcctctgctcccccatctctcaggagtcgaaagtgagaaagcaagacatcaaggagggacctgtgccctgctccacatcctcccacctgccgcccgcagagcctgcaggccccgcccccctcgtctctggtccctacctctctgctgtgtcttcatgtccctgagggtcttgggctctgggacctggccctcagcccctaaaatgttcctcctgctgacagcacttcaagtcctggctatagccatgacacagagccaagaggatgagaacaagataattggtggccatacgtgcacccggagctcccagccgtggcaggcggccctgctggcgggtcccaggcgccgcttcctctgcggaggcgccctgctttcaggccagtgggtcatcactgctgctcactgcggccgcccgatccttcaggttgccctgggcaagcacaacctgaggaggtgggaggccacccagcaggtgctgcgcgtggttcgtcaggtgacgcaccccaactacaactcccggacccacgacaacgacctcatgctgctgcagctacagcagcccgcacggatcgggagggcagtcaggcccattgaggtcacccaggcctgtgccagccccgggacctcctgccgagtgtcaggctggggaactatatccagccccatcgccaggtaccccgcctctctgcaatgcgtgaacatcaacatctccccggatgaggtgtgccagaaggcctatcctagaaccatcacgcctggcatggtctgtgcaggagttccccagggcgggaaggactcttgtcagggtgactctgggggacccctggtgtgcagaggacagctccagggcctcgtgtcttggggaatggagcgctgcgccctgcctggctaccccggtgtctacaccaacctgtgcaagtacagaagctggattgaggaaacgatgcgggacaaatgatggtcttcacggtgggatggacctcgtcagctgcccaggccctcctctctctactcaggacccaggagtccaggccccagcccctcctccctcagacccaggagtccaggcccccagcccctcctccctcagacccgggagtccaggcccccagcccctcctccctcagacccaggagccccagtccccagcatcctgatctttactccggctctgatctctcctttcccagagcagttgcttcaggcgttttctccccaccaagcccccacccttgctgtgtcaccatcactactcaagaccggaggcacagagggcaggagcacagaccccttaaaccggcattgtattccaaagacgacaatttttaacacgcttagtgtctctaaaaaccgaataaataatgacaataaaaatggaatcatcctaaattgta

SEQ ID NO: 1182 - DNA, 1331 bp, Homo sapiens
ccttgtcgaaggaccaaaggcgaccggtgcaggtgcacgacgccagctcccttctggggggccggggcctgggggttgccatggcccccagccacctgtcagtgcgggagatgagggaagatgagaagcccctggtgctggagatgctgaaggccggcgtgaaggacacggaaaaccgcgtggccctccatgccttgacacggccgccggccctgctcctcctggcggcggccagcagcggcctgcgctttgtcctggcttccttcgccctggccctcctcctgccggtgttcctggctgtggccgccgtgaagctgggcctgcgggcccgatggggctcgctgcctccgccgggtggcctggggggcccctgggtggccgtgcggggctccggtgacgtgtgtggggtcctggctctggcccctggcacaaatgcaggggacggggcccgggtcacccgcctgtctgtctctcgctggcaccgccgccggggcgtgggcaggaggctgctggccttcgcggaggcccgggctcgggcctgggctgggggcatgggggagccccgggcccggctcgtggtccccgtggctgtggccgcctggggggtgggagggatgctggagggctgtggctaccaggccgaggggggctggggctgcctgggctacacgctggtgagggaattcagcaaagacctgtgaagctacagactgacagccagggcaggggaggagggaggggcgccagcacctgatgatcgcctactgtctgcgggttcttttacctgctctccctcagtgagtcctcaaccaccctgggcccagaaacagaggcctgccgaggggaggagcctggcctctgtccacccgtcagcagtgtgaagtctgtagtgtttgagcttctcagagtggaatgactccttttccttcctggccctcgggggcctctcgaggtcagcctctccaacccctacctcagctcctgtctgcactgagaaacctccccgggtgatgtctgcaaagtctgtgctgtccgtgccccaggctgggagagctatctggggagggggagaggaggccgagcagaatacaccccagagttagggtttgcgactccgcctccctgggacctggattgggtcagatgcctgtccttggaggggacaaggttgactgcttaggaggcgcgacgcacagggctgccaggcctggcccctctctgggaaggttgagagctgagacgggcagccctgtcccttcctccagatccgtctggttttttacaccgtttgttaataaagcctgaaaccgctgaaaaaaaaaaaaaaaaaa

SEQ ID NO: 1183 - DNA, 2150 bp, Homo sapiens
ctcgagccacgaaggccccgctgtcctgtctagcagatacttgcacggtttacagaaattcggtccctgggtcgtgtcaggaaactggaaaaaaggtcataagcatgaagcgcagttcagtttccagcggtggtgctggccgcctctccatgcaggagttaagatcccaggatgtaaataaacaaggcctctatacccctcaaaccaaagagaaaccaacctttggaaagttgagtataaacaaaccgacatctgaaagaaaagtctcgctatttggcaaaagaactagtggacatggatcccggaatagtcaacttggtatattttccagttctgagaaaatcaaggacccgagaccacttaatgacaaagcattcattcagcagtgtattcgacaactctgtgagtttcttacagaaaatggttatgcacataatgtgtccatgaaatctctacaagctccctctgttaaagacttcctgaagatcttcacatttctttatggcttcctgtgcccctcatacgaacttcctgacacaaagtttgaagaagaggttccaagaatctttaaagaccttgggtatccttttgcactatccaaaagctccatgtacacagtgggggctcctcatacatggcctcacattgtggcagccttagtttggctaatagactgcatcaagatacatactgccatgaaagaaagctcacctttatttgatgatgggcagccttggggagaagaaactgaagatggaattatgcataataagttgtttttggactacaccataaaatgctatgagagttttatgagtggtgccgacagctttgatgagatgaatgcagagctgcagtcaaaactgaaggatttatttaatgtggatgcttttaagctggaatcattagaagcaaaaaacagagcattgaatgaacagattgcaagattggaacaagaaagagaaaaagaaccgaatcgtctagagtcgttgagaaaactgaaggcttccttacaaggagatgttcaaaagtatcaggcatacatgagcaatttggagtctcattcagccattcttgaccagaaattaaatggtctcaatgaggaaattgctagagtagaactagaatgtgaaacaataaaacaggagaacactcgactacagaatatcattgacaaccagaagtactcagttgcagacattgagcgaataaatcatgaaagaaatgaattgcagcagactattaataaattaaccaaggacctggaagctgaacaacagaagttgtggaatgaggagttaaaatatgccagaggcaaagaagcgattgaaacacaattagcagagtatcacaaattggctagaaaattaaaacttattcctaaaggtgctgagaattccaaaggttatgactttgaaattaagtttaatcccgaggctggtgccaactgccttgtcaaatacagggctcaagtttatgtacctcttaaggaactcctgaatgaaactgaagaagaaattaataaagccctaaataaaaaaatgggtttggaggatactttagaacaattgaatgcaatgataacagaaagcaagagaagtgtgagaactctgaaagaagaagttcaaaagctggatgatctttaccaacaaaaaattaaggaagcagaggaagaggatgaaaaatgtgccagtgagcttgagtccttggagaaacacaagcacctgctagaaagtactgttaaccaggggctcagtgaagctatgaatgaattagatgctgttcagcgggaataccaactagttgtgcaaaccacgactgaagaaagacgaaaagtgggaaataacttgcaacgtctgttagagatggttgctacacatgttgggtctgtagagaaacatcttgaggagcagattgctaaagttgatagagaatatgaagaatgcatgtcagaagatctctcggaaaatattaaagagattagagataagtatgagaagaaagctactctaattaagtcttctgaagaatgaagataaaatgttgatcatgtatatatatccatagtgaataaaattgtctcagtaaaaaaaaaaaaaaaaaaaaaaaaaaaaaaaaaaaaaaaaaaaaaaaaaaaaaaaaaaaaaaaa

SEQ ID NO: 1184 - DNA, 4205 bp, Homo sapiens
ctccctcgctccctccctgcgcgccgcctctcactcacagcctcccttccttctttctccctccgcctcccgagcaccagcgcgctctgagctgcccccagggtccctcccccgccgccagcagcccatttggagggaggaagtaagggaagaggagaggaaggggagccggaccgactacccagacagagccggtgaatgggtttgtggtgacccccgccccccaccccaccctcccttcccacccgacccccaacccccatccccagttcgagccgccgcccgaaaggccgggccgtcgtcttaggaggagtcgccgccgccgccacctccgccatggagctgatcaccattctcgagaagaccgtgtctcccgatcggctggagctggaagcggcgcagaagttcctggagcgtgcggccgtggagaacctgcccactttccttgtggaactgtccagagtgctggcaaatccaggaaacagtcaggttgccagagttgcagctggtctacaaatcaagaactctttgacatctaaagatccagatatcaaggcacaatatcagcagaggtggcttgctattgatgctaatgctcgacgagaagtcaagaactatgttttgcagacattgggtacagaaacttaccggcctagttctgcctcacagtgtgtggctggtattgcttgtgcagagatcccagtaaaccagtggccagaactcattcctcagctggtggccaatgtcacaaaccccaacagcacagagcacatgaaggagtcgacattggaagccatcggttatatttgccaagatatagacccagagcagctacaagataaatccaatgagattctgactgccataatccaggggatgaggaaagaagagcctagtaataatgtgaagctagctgctacgaatgcactcctgaactcattggagttcaccaaagcaaactttgataaagagtctgaaaggcactttattatgcaggtggtctgtgaagccacacagtgtccagatacgagggtacgagtggctgctttacagaatctggtgaagataatgtccttatattatcagtacatggagacatatatgggtcctgctctttttgcaatcacaatcgaagcaatgaaaagtgacattgatgaggtggctttacaagggatagaattctggtccaatgtctgtgatgaggaaatggatttggccattgaagcttcagaggcagcagaacaaggacggccccctgagcacaccagcaagttttatgcgaagggagcactacagtatctggttccaatcctcacacagacactaactaaacaggacgaaaatgatgatgacgatgactggaacccctgcaaagcagcaggggtgtgcctcatgcttctggccacctgctgtgaagatgacattgtcccacatgtcctccccttcattaaagaacacatcaagaacccagattggcggtaccgggatgcagcagtgatggcttttggttgtatcttggaaggaccagagcccagtcagctcaaaccactagttatacaggctatgcccaccctaatagaattaatgaaagaccccagtgtagttgttcgagatacagctgcatggactgtaggcagaatttgtgagctgcttcctgaagctgccatcaatgatgtctacttggctcccctgctacagtgtctgattgagggtctcagtgctgaacccagagtggcttcaaatgtgtgctgggctttctccagtctggctgaagctgcttatgaagctgcagacgttgctgatgatcaggaagaaccagctacttactgcttatcttcttcatttgaactcatagttcagaagctcctagagactacagacagacctgatggacaccagaacaacctgaggagttctgcatatgaatctctgatggaaattgtgaaaaacagtgccaaggattgttatcctgctgtccagaaaacgactttggtcatcatggaacgactgcaacaggttcttcagatggagtcacatatccagagcacatccgatagaatccagttcaatgaccttcagtctttactctgtgcaactcttcagaatgttcttcggaaagtgcaacatcaagatgctttgcagatctctgatgtggttatggcctccctgttaaggatgttccaaagcacagctgggtctgggggagtacaagaggatgccctgatggcagttagcacactggtggaagtgttgggtggtgaattcctcaagtacatggaggcctttaaacccttcctgggcattggattaaaaaattatgctgaataccaggtttgtttggcagctgtgggcttagtgggagacttgtgccgtgccctgcaatccaacatcatacctttctgtgacgaggtgatgcagctgcttctggaaaatttggggaatgagaacgtccacaggtctgtgaagccgcagattctgtcagtgtttggtgatattgcccttgctattggaggagagtttaaaaaatacttagaggttgtattgaatactcttcagcaggcctcccaagcccaggtggacaagtcagactatgacatggtggattatctgaatgagctaagggaaagctgcttggaagcctatactggaatcgtccagggattaaagggggatcaggagaacgtacacccggatgtgatgctggtacaacccagagtagaatttattctgtctttcattgaccacattgctggagatgaggatcacacagatggagtagtagcttgtgctgctggactaataggggacttatgtacagcatttgggaaggatgtactgaaattagtagaagctaggccaatgatccatgaattgttaactgaagggcggagatcgaagactaacaaagcaaaaacccttgctacatgggcaacaaaagaactgaggaaactgaagaaccaagcttgatctgttaccattgggatgataacctgaggacccccactggaaatctcccatcttttgaaaaacctggaagtgaggagtgtgcacggatgctgaatgtttgggaatgagaggatgagtgagtgaggcttgaaaacacaccacattgaaaatcctgccacagcagcagccgcagccgccaacagcagcgctgttagtgagctaagtaagcactgacttcgtagaaaaccataacatcggccatcttggaaaagagaaaaacaatggagttacttatttaaaaaaaaagaaagaaagttatctcttcccaggagaggctagaagtagcttttctgtcttttggccagtgccgagtggaatgcctggtttgggggaggaggagggactgggttcagctgtggtgctttgttgtaaaaggcagcctggcctttgctactgaggagaaagatggagcctgggtctcaagcccaccttcgctgtacctttgccacatggtactgtatgcttgccagctagaaggagggtcagggattttttacagtctgagaatgagtgtgtgtgagtgaggcggtatccacattctcaacttcaagtcattgcagtttctttttcccagaaaacaaggggttagatgttgcatttcataaaactaaccgaagttctgtctactgatgcagcacaagagatgtaaaaaaaaaaaaaaaaaaaaaaaaaaaaacacacacacagaggaaagacgctctttaggttttgttttgttttttttttttggttttgttttttgttttttttactctagggaaaacactgacgaatggtcagagctcctatcctgatcttttcatcaaggcgcctttcctaataatatggttcaactgtgaatgtagaagtgggggggaggggggagaaaaagaaaactctggcgttagaggatatagaaaaatataagtacaattgttacaaataacgcagacttcaaaaacaaaaaaatcacaacccaaacaaaccaaaatttaaatgatcagaattggcagcacaaagaaaacgccctctcctgacttgtattgtggcagtctgaacgcccccagaaaattgtgccaaagagtttagaaaaataaatatacaataaaagtaaacacatacacacaaaacagcaaacttcaggtaactattttggattgcaaacaggataaattaaatgttcaaacaatctgataaaataaccatttggaaactgaaaa

SEQ ID NO: 1185 - DNA, 1975 bp, Homo sapiens
ggccaatatgtttaactggaccacagaggaagtggatcgtgcggcagagcatcacaccatggcgtatgagtgttcctctgtgtagactcaacctgcgcctcgccgtcccccattcgcacacccgatgcccgggggtcgctacggacttaaaatctccgcaccgcaccctccacctcagaaacgttcctggatccgaacactgccccctgacgacctagagagatcccggctcccagcccactgagtggcttcagcctcgctggaagaagtctggaagaagaggaagaggaaagaaaaggagtcagggatggcccttactcaggtacggttgacatttagggatgtggccatagaattctctcaggaggagtggaaatgcctggaccctgctcagaggatcttatacagggacgtgatgttggagaactactggaaccttgtttctctgggactgtgtcattttgatatgaatattatctccatgttggaggaagggaaagagccctggactgtgaagagctgtgtgaaaatagcaagaaaaccaagaacgcgggaatgtgtcaaaggcgtggtcacagatatccctcctaaatgtacaatcaaggatttgctaccaaaagagaagagcagtacagaagcagtattccacacagtggtgttggaaagacacgaaagccctgacattgaagacttttccttcaaggaaccccagaaaaatgtgcatgattttgagtgtcaatggagagatgacacaggaaattacaagggagtgcttatggcccagaaagaaggtaaaagagatcaacgcgacagaagagacatagaaaacaagcttatgaacaatcagcttggagtaagctttcattctcatctgcctgaactgcagctatttcaaggtgaggggaaaatgtatgaatgtaatcaagttgagaagtctaccaacaatggttcctcagtgtcaccacttcaacaaattccttctagtgtccaaacccacaggtctaaaaaatatcatgaacttaaccatttttcattactcacacaaagacgaaaagcaaacagttgtggaaaaccttataaatgtaatgaatgtggcaaggcgttcactcagaattcgaaccttacaagtcataggagaattcatagtggagagaagccttacaaatgcagtgagtgcggcaaaacctttactgttcgttcaaatctaactattcatcaggtcatccatactggagaaaaaccttacaaatgtcatgagtgtggcaaggtcttcaggcacaattcataccttgcaactcatcggcgaattcatactggagagaaaccttacaagtgtaatgagtgtggaaaagcctttagaggacattcaaacctaactacccatcagttaattcatactggagaaaaaccgttcaaatgtaatgaatgtggcaagctcttcactcaaaattcacaccttataagtcattggagaattcacactggagagaaaccttacaagtgcaatgagtgcggcaaagcctttagtgttcgttcaagcctagcaatccatcagacaatccacactggagaaaaaccttacaaatgtaatgaatgtggcaaagtctttaggtacaattcatacctcggaaggcatcggagagttcatactggtgagaaaccttacaagtgtaatgaatgtggcaaagccttcagtatgcattcaaacctagctacccatcaggtcatccatactggaacaaaacctttcaaatgcaatgaatgcagcaaggttttcactcaaaattcacaacttgcaaatcatcgaagaattcatactggagagaaaccttacaagtgtaatgagtgtgggaaagccttcagtgttcgttcaagtctgactacccatcaggcaatccattctggagagaaaccttacaaatgtattgaatgtggcaagagcttcactcaaaaatcacaccttagaagtcatcgg

SEQ ID NO: 1186 - DNA, 2507 bp, Homo sapiens
agctccttcccttactctaccttgctcctacttttctctaagtcaacatgagtcgacagtttagttccaggtctgggtaccgaagtggagggggcttcagctctggctctgctgggatcatcaactaccagcgcaggaccaccagcagctccacacgccgcagtggaggaggtggtgggagattttcaagctgtggtggtggtggtggtagctttggtgctggtggtggatttggaagtcggagtcttgttaaccttggtggcagtaaaagcatctccataagtgtggctagaggaggtggacgtggtagtggctttggtggtggttatggtggtggtggctttggtggtggtggctttggtggtggtggctttggtggaggtggcattgggggtggtggctttggtggttttggcagtggtggtggtggttttggtggaggtggctttgggggtggtggatatgggggtggttatggtcctgtctgccctcctggtggcatacaagaagtcactatcaaccagagccttcttcagcccctcaatgtggagattgaccctgagatccaaaaggtgaagtctcgagaaagggagcaaatcaagtcactcaacaaccaatttgcctccttcattgacaaggtgaggttcctggagcagcagaaccaggtactgcaaacaaaatgggagctgctgcagcaggtagatacctccactagaacccataatttagagccctactttgagtcattcatcaacaatctccgaaggagagtggaccaactgaagagtgatcaatctcggttggattcggaactgaagaacatgcaggacatggtggaggattaccggaacaagtatgaggatgaaatcaacaagcggacaaatgcagagaatgaatttgtgaccatcaagaaggatgtggatggtgcttatatgaccaaggtggaccttcaggccaaacttgacaacttgcagcaggaaattgatttccttacagcactctaccaagcagagttgtctcagatgcagactcaaatcagtgaaactaatgtcatcctctctatggacaacaaccgcagtctcgacctggacagcatcattgctgaggtcaaggcccagtacgaggatatagcccagaagagcaaagctgaggccgagtccttgtaccagagcaagtatgaagagctgcagatcactgctggcagacatggggatagtgtgagaaattcaaagatagaaatttctgagctgaatcgtgtgatccagagacttagatctgaaatcgacaatgtcaagaagcagatctccaacttgcagcagtccatcagtgatgcagagcagcgtggcgagaatgccctcaaggatgccaagaacaagctgaatgacctggaggatgccctgcagcaggccaaggaagacctggcccgcctgctgcgcgactaccaggagctgatgaacaccaagctggccctggatctggagattgccacctacaggaccctcctggagggagaagaaagcaggatgtctggagaatgtgccccgaacgtgagtgtgtctgtgagcacaagccacaccaccatcagtggaggtggcagccgaggaggtggcggcggtggctacggctctggaggtagcagctatggctccggaggtggtagctatggttctggaggtggcggcggcggcggccgtggcagctatggctccggaggtagcagctacggctccggaggtggcagctatggctctggaggtggcggcggcggccatggcagctacggctccggaagcagcagtgggggctacagaggtggctctggaggcggcggcggcggcagctctggcggccggggctctggcggcgggagctctggaggctccataggaggccggggatccagctctgggggtgtcaagtcctctggtggcagttccagcgtgaggtttgtttctaccacttattccggagtaaccagataaagagatgccctctgtttcattagctctagttctcccccagcatcactaacaaatatgcttggcaagaccgaggtcgatttgtcccagccttaccggagaaaagagctatggttagttacactagctcatcctattcccccagctctttcttttctgctgtttcccaatgaagttttcagatcagtggcaatctcagtcccctggctatgaccctgctttgttctttccctgagaaacagttcagcagtgaccaccacccacatgacatttcaaagcacctccttaagccagccagagtaggaccagttagacccagggtgtggacagctccttagcatcttatctctgtgctgttttggttttgtacataaggtgtaagcaagttgtttttcttttgtggagaggtcttaaactccccatttccttgttttgctgcaataaactgcatttgaaattctccatgtctcgatcgcccttgtttacggctctgtctaacctggatgggtgttttgtgaggtaaaagaa

SEQ ID NO: 1187 - DNA, 2145 bp, Homo sapiens
cagcatcaccatgtctgttcgatacagctcaagcaagcactactcttcctcccgcagtggaggaggaggaggaggaggaggatgtggaggaggaggaggagtgtcatccctaagaatttctagcagcaaaggctcccttggtggaggatttagctcaggggggttcagtggtggctcttttagccgtgggagctctggtgggggctgctttgggggctcatcaggtggctatggaggattaggaggttttggtggaggtagctttcgtggaagctatggaagtagcagctttggtgggagttatggaggcagctttggagggggcagtttcggaggtggcagctttggtgggggcagctttggtggaggcggctttggtggaggcggctttggaggaggctttggtggtggatttggaggagatggtggccttctctctggaaatgaaaaagtaaccatgcagaatctgaatgaccgcctggcttcctacttggacaaagttcgggctctggaagaatcaaactatgagctggaaggcaaaatcaaggagtggtatgaaaagcatggcaactcacatcagggggagcctcgtgactacagcaaatactacaaaaccatcgatgaccttaaaaatcagattctcaacctaacaactgataatgccaacatcctgcttcagatcgacaatgccaggctggcagctgatgacttcaggctgaagtatgagaatgaggtagctctgcgccagagcgtggaggctgacatcaacggcctgcgtagggtgctggatgagctgaccctgaccaaggctgacctggagatgcaaattgagagcctgactgaagagctggcctatctgaagaagaaccacgaggaggaaatgaaagaccttcgaaatgtgtccactggtgatgtgaatgtggaaatgaatgctgccccgggtgttgatctgactcaacttctgaataacatgagaagccaatatgaacaacttgctgaacaaaaccgcaaagatgctgaagcctggttcaatgaaaagagcaaggaactgactacagaaattgataataacattgaacagatatccagctataaatctgagattactgaattgagacgtaatgtacaagctctggagatagaactacagtcccaactggccttgaaacaatccctggaagcctccttggcagaaacagaaggtcgctactgtgtgcagctctcacagattcaggcccagatatccgctctggaagaacagttgcaacagattcgagctgaaaccgagtgccagaatactgaataccaacaactcctggatattaagatccgactggagaatgaaattcaaacctaccgcagcctgctagaaggagagggaagttccggaggcggcggacgcggcggcggaagtttcggcggcggctacggcggcggaagctccggcggcggaagctccggcggcggctacggcggcggccacggcggcagttccggcggcggctacggaggcggaagctccggcggcggaagctccggcggcggctacgggggcggaagctccagcggcggccacggcggcagttccagcggcggctacggtggtggcagttccggcggcggcggcggcggctacgggggcggcagctccggcggcggcagcagctccggcggcggatacggcggcggcagctccagcggaggccacaagtcctcctcttccgggtccgtgggcgagtcttcatctaagggaccaagatactaacaaaaccagagtaatcaagacaattattgaagaggtggcgcccgacggtagagttctttcatctatggttgaatcagaaaccaagaaacactactattaaactgcatcaagaggaaagagtctcccttcacacagaccattatttacagatgcatggaaaacaaagtctccaagaaaacacttctgtcttgatggtctatggaaatagaccttgaaaataaggtgtctacaaggtgttttgtggtttctgtatttcttcttttcactttaccagaaagtgttctttaatggaaagaaaaacaactttctgttctcatttactaatgaatttcaataaactttcttactgatgcaaactaaaaaaaaaaaaaaaaaaaaaa

SEQ ID NO: 1188 - DNA, 1719 bp, Homo sapiens
cacagtcctcggcccaggccaagcaagcttctatctgcacctgctctcaatcctgctctcaccatgagcctccgcctgcagagctcctctgccagctatggaggtggtttcgggggtggctcttgccagctgggaggaggccgtggtgtctctacctgttcaactcggtttgtgtctgggggatcagctgggggctatggaggcggcgtgagctgtggttttggtggaggggctggtagtggctttggaggtggctatggaggtggccttggaggtggctatggaggtggccttggaggtggctttggtgggggttttgctggtggctttgttgactttggtgcttgtgatggcggcctcctcactggcaatgagaagatcaccatgcagaacctcaacgaccgcctggcttcctacctggagaaggtgcgcgccctggaggaggccaacgctgacctggaggtgaagatccgtgactggcacctgaagcagagcccagctagccctgagcgggactacagcccctactacaagaccattgaagagctccgggacaagatcctgaccgccaccattgaaaacaaccgggtcatcctggagattgacaatgccaggctggctgcggacgacttcaggctcaagtatgagaatgagctggccctgcgccagagcgtggaggccgacatcaacggcctgcgccgggtgctggatgagctcactctgtctaagactgacctggagatgcagatcgagagcctgaatgaagagctagcctacatgaagaagaaccatgaagaggagatgaaggaatttagcaaccaggtggtcggccaggtcaacgtggagatggatgccaccccaggcattgacctgacccgcgtgctggcagagatgagggagcagtacgaggccatggcagagaggaaccgccgggatgctgaggaatggttccacgccaagagtgcagagctgaacaaggaggtgtctaccaacactgccatgattcagaccagcaagacagagatcacggagctcaggcgcacgctccaaggcctggagattgagctgcagtcccagctgagcatgaaagcggggctggagaacacggtggcagagacggagtgccgctatgccctgcagctgcagcagatccagggactcatcagcagcatcgaggcccagctgagcgagctccgcagtgagatggagtgccagaaccaagagtacaagatgctgctggacatcaagacacgtctggagcaggagatcgccacctaccgcagcctgctcgagggccaggacgccaagatgattggtttcccttcctcagcaggaagcgtcagcccccgtagcacctctgttaccacgacttctagtgcctctgttaccaccacctctaatgcctctggtcgccgcacttctgatgtccgtaggccttaaatctgcctggcgtcccctccctctgtcttcagcacccagaggaggagagagccggcagttccctgcaggagagaggaggggctgctggacccaaggctcagtccctctgctctcaggaccccctgtcctgactctctcctgatggtgggccctctgtgctcttctcttccggtcggatctctctcctctctgacctggatacgctttggtttctcaacttctctaccccaaagaaaagattattcaataaagtttcctgcctttctgcaaacataaaaa

SEQ ID NO: 1189 - DNA, 1693 bp, Homo sapiens
cacagtcctcggcccaggccaagcaagcttctatctgcacctgctctcaatcctgctctcaccatgagcctccgcctgcagagctcctctgccagctatggaggtggtttcgggggtggctcttgccagctgggaggaggccgtggtgtctctacctgttcaactcggtttgtgtctgggggatcagctgggggctatggaggcggcgtgagctgtggttttggtggaggggctggtagtggctttggaggtggctatggaggtggccttggaggtggctatggaggtggccttggaggtggctttggtgggggttttgctggtggctttgttgactttggtgcttgtgatggcggcctcctcactggcaatgagaagatcaccatgcagaacctcaacgaccgcctggcttcctacctggagaaggtgcgcgccctggaggaggccaacgctgacctggaggtgaagatccgtgactggcacctgaagcagagcccagctagccctgagcgggactacagcccctactacaagaccattgaagagctccgggacaagatcctgaccgccaccattgaaaacaaccgggtcatcctggagattgacaatgccaggctggctgcggacgacttcaggctcaagtatgagaatgagctggccctgcgccagagcgtggaggccgacatcaacggcctgcgccgggtgctggatgagctcactctgtctaagactgacctggagatgcagatcgagagcctgaatgaagagctagcctacatgaagaagaaccatgaagaggagatgaaggaatttagcaaccaggtggtcggccaggtcaacgtggagatggatgccaccccaggcattgacctgacccgcgtgctggcagagatgagggagcagtacgaggccatggcagagaggaaccgccgggatgctgaggaatggttccacgccaagagtgcagagctgaacaaggaggtgtctaccaacactgccatgattcagaccagcaagacagagatcacggagctcaggcgcacgctccaaggcctggagattgagctgcagtcccagctgagcatgaaagcggggctggagaacacggtggcagagacggagtgccgctatgccctgcagctgcagcagatccagggactcatcagcagcatcgaggcccagctgagcgagctccgcagtgagatggagtgccagaaccaagagtacaagatgctgctggacatcaagacacgtctggagcaggagatcgccacctaccgcagcctgctcgagggccaggacgccaagaagcgtcagcccccgtagcacctctgttaccacgacttctagtgcctctgttaccaccacctctaatgcctctggtcgccgcacttctgatgtccgtaggccttaaatctgcctggcgtcccctccctctgtcttcagcacccagaggaggagagagccggcagttccctgcaggagagaggaggggctgctggacccaaggctcagtccctctgctctcaggaccccctgtcctgactctctcctgatggtgggccctctgtgctcttctcttccggtcggatctctctcctctctgacctggatacgctttggtttctcaacttctctaccccaaagaaaagattattcaataaagtttcctgcctttctgcaaacataaaaa

SEQ ID NO: 1190 - DNA, 1512 bp, Homo sapiens
ctcctctccagcccttctcctgtgtgcctgcctcctgccgccgccaccatgaccacctccatccgccagttcacctcctccagctccatcaagggctcctccggcctggggggcggctcgtcccgcacctcctgccggctgtctggcggcctgggtgccggctcctgcaggctgggatctgctggcggcctgggcagcaccctcgggggtagcagctactccagctgctacagctttggctctggtggtggctatggcagcagctttgggggtgttgatgggctgctggctggaggtgagaaggccaccatgcagaacctcaatgaccgcctggcctcctacctggacaaggtgcgtgccctggaggaggccaacactgagctggaggtgaagatccgtgactggtaccagaggcaggccccggggcccgcccgtgactacagccagtactacaggacaattgaggagctgcagaacaagatcctcacagccaccgtggacaatgccaacatcctgctacagattgacaatgcccgtctggctgctgatgacttccgcaccaagtttgagacagagcaggccctgcgcctgagtgtggaggccgacatcaatggcctgcgcagggtgctggatgagctgaccctggccagagccgacctggagatgcagattgagaacctcaaggaggagctggcctacctgaagaagaaccacgaggaggagatgaacgccctgcgaggccaggtgggtggtgagatcaatgtggagatggacgctgccccaggcgtggacctgagccgcatcctcaacgagatgcgtgaccagtatgagaagatggcagagaagaaccgcaaggatgccgaggattggttcttcagcaagacagaggaactgaaccgcgaggtggccaccaacagtgagctggtgcagagtggcaagagtgagatctcggagctccggcgcaccatgcaggccttggagatagagctgcagtcccagctcagcatgaaagcatccctggagggcaacctggcggagacagagaaccgctactgcgtgcagctgtcccagatccaggggctgattggcagcgtggaggagcagctggcccagcttcgctgcgagatggagcagcagaaccaggaatacaaaatcctgctggatgtgaagacgcggctggagcaggagattgccacctaccgccgcctgctggagggagaggatgcccacctgactcagtacaagaaagaaccggtgaccacccgtcaggtgcgtaccattgtggaagaggtccaggatggcaaggtcatctcctcccgcgagcaggtccaccagaccacccgctgaggactcagctaccccggccggccacccaggaggcagggagcagccgccccatctgccccacagtctccggcctctccagcctcagccccctgcttcagtcccttccccatgcttccttgcctgatgacaataaagcttgttgactcagctaaaaaaaaaaaaaaa

SEQ ID NO: 1191 - DNA, 2163 bp, Homo sapiens
ggcagatgaaatataagattcatcaaccacatttgacagcccatggcaggtttcctgttttccatcgtccctctgcaggtcacagacacacagagcccagccgtggcaggctcagccggggtccggggctgctaacaacggctacattcctcccccagggccaagggaaatcctgagcgcaggccagggttgtttggttttgaggtgtgctgggatgaaaggcaccctggaagtggaaggtaaatgaacaatggaaaaacttcacggcaagattagaaagatacctgagcccaatacccgcctgatgtcgtgggccacacctccgggttaccaggggaagggaggaagcaaactgtcatattgatgtggctctaaacaacaacagtgtgcgaaggcccaggggcactttgggattgaccaagaggaaacacaagttgcacaatgatacaatcttgttggtacaattgtcagagaagggaactcccacagcaaaggccataaaaccatccagggcagtctggggcggctcagttctgcggtgccagggagtggagcagagctcagccccgtcccaaacacagatgggaccatgaactccggacacagcttcagccagaccccctcggcctccttccatggcgccggaggtggctggggccggcccaggagcttccccagggctcccaccgtccatggcggtgcggggggagcccgcatctccctgtccttcaccacgcggagctgcccaccccctggagggtcttggggttctggaagaagcagccccctactaggcggaaatgggaaggccaccatgcagaatctcaacgaccgcctggcctcctacctggagaaggttcgcgccctggaggaggccaacatgaagctggaaagccgcatcctgaaatggcaccagcagagagatcctggcagtaagaaagattattcccagtatgaggaaaacatcacacacctgcaggagcagatagtggatggtaagatgaccaatgctcagattattcttctcattgacaatgccaggatggcagtggatgacttcaacctcaagtatgaaaatgaacactcctttaagaaagacttggaaattgaagtcgagggcctccgaaggaccttagacaacctgaccattgtcacaacagacctagaacaggaggtggaaggaatgaggaaagagctcattctcatgaagaagcaccatgagcaggaaatggagaagcatcatgtgccaagtgacttcaatgtcaatgtgaaggtggatacaggtcccagggaagatctgattaaggtcctggaggatatgagacaagaatatgagcttataataaagaagaagcatcgagacttggacacttggtataaagaacagtctgcagccatgtcccaggaggcagccagtccagccactgtgcagagcagacaaggtgacatccacgaactgaagcgcacattccaggccctggagattgacctgcagacacagtacagcacgaaatctgctttggaaaacatgttatccgagacccagtctcggtactcctgcaagctccaggacatgcaagagatcatctcccactatgaggaggaactgacgcagctacgccatgaactggagcggcagaacaatgaataccaagtgctgctgggcatcaaaacccacctggagaaggaaatcaccacgtaccgacggctcctggagggagagagtgaagggacacgggaagaatcaaagtcgagcatgaaagtgtctgcaactccaaagatcaaggccataacccaggagaccatcaacggaagattagttctttgtcaagtgaatgaaatccaaaagcacgcatgagaccaatgaaagtttccgcctgttgtaaaatctattttcccccaaggaaagtccttgcacagacaccagtgagtgagttctaaaagatacccttggaattatcagactcagaaacttttattttttttttctgtaacagtctcaccagacttctcataatgctcttaatatattgcacttttctaatcaaagtgcgagtttatgagggtaaagctctactttcctactgcagccttcagattctcatcattttgcatctattttgtagccaataaaactccgcactagcaaaaaaaaaaaaaaaa

SEQ ID NO: 1192 - DNA, 1753 bp, Homo sapiens
cagccccgcccctacctgtggaagcccagccgcccgctcccgcggataaaaggcgcggagtgtccccgaggtcagcgagtgcgcgctcctcctcgcccgccgctaggtccatcccggcccagccaccatgtccatccacttcagctccccggtattcacctcgcgctcagccgccttctcgggccgcggcgcccaggtgcgcctgagctccgctcgccccggcggccttggcagcagcagcctctacggcctcggcgcctcacggccgcgcgtggccgtgcgctctgcctatgggggcccggtgggcgccggcatccgcgaggtcaccattaaccagagcctgctggccccgctgcggctggacgccgacccctccctccagcgggtgcgccaggaggagagcgagcagatcaagaccctcaacaacaagtttgcctccttcatcgacaaggtgcggtttctggagcagcagaacaagctgctggagaccaagtggacgctgctgcaggagcagaagtcggccaagagcagccgcctcccagacatctttgaggcccagattgctggccttcggggtcagcttgaggcactgcaggtggatgggggccgcctggaggcggagctgcggagcatgcaggatgtggtggaggacttcaagaataagtacgaagatgaaattaaccaccgcacagctgctgagaatgagtttgtggtgctgaagaaggatgtggatgctgcctacatgagcaaggtggagctggaggccaaggtggatgccctgaatgatgagatcaacttcctcaggaccctcaatgagacggagttgacagagctgcagtcccagatctccgacacatctgtggtgctgtccatggacaacagtcgctccctggacctggacggcatcatcgctgaggtcaaggcgcagtatgaggagatggccaaatgcagccgggctgaggctgaagcctggtaccagaccaagtttgagaccctccaggcccaggctgggaagcatggggacgacctccggaatacccggaatgagatttcagagatgaaccgggccatccagaggctgcaggctgagatcgacaacatcaagaaccagcgtgccaagttggaggccgccattgccgaggctgaggagcgtggggagctggcgctcaaggatgctcgtgccaagcaggaggagctggaagccgccctgcagcggggcaagcaggatatggcacggcagctgcgtgagtaccaggaactcatgagcgtgaagctggccctggacatcgagatcgccacctaccgcaagctgctggagggcgaggagagccggttggctggagatggagtgggagccgtgaatatctctgtgatgaattccactggtggcagtagcagtggcggtggcattgggctgaccctcgggggaaccatgggcagcaatgccctgagcttctccagcagtgcgggtcctgggctcctgaaggcttattccatccggaccgcatccgccagtcgcaggagtgcccgcgactgagccgcctcccaccactccactcctccagccaccacccacaatcacaagaagattcccacccctgcctcccatgcctggtcccaagacagtgagacagtctggaaagtgatgtcagaatagcttccaataaagcagcctcattctgaggcctgagtgatccacgtgaaaaaaaaaaaaaaaaaaaaaaaaaaaaaaaaaaaaaaaaaaaaaaaaaaa

SEQ ID NO: 1193 - DNA, 782 bp, Homo sapiens
ccaccttcctggaaatccacccagaacctccaccctctgacaccatggtcaactcctgttgtggctctgtgtgctctgaccagggctgtggcctagagaactgctgccgtcccagctgctgccagaccacctgctgcaggaccacctgctgccgccccagctgctgtgtgtccagctgctgcagaccgcagtgctgccagtctgtgtgctgccagcccacctgctgcagccccagctgctgccagaccacttgctgcaggaccacctgctgccgtcccagctgctgtgtgtccagctgcttcagaccccagtgctgccagtctgtgtgctgccagcccacctgctgccgccccagctgtggccagaccacctgctgcaggaccacctgctaccgccccagctgctgtgtgtccacctgctgccgcccaacctgctctagtggctcttgctgctgatgccctcacctatactcacctgcctttattaaccagcattcttgatatgatccacctgtgaactgaatcatgcaaggccaattggacaacctcagttccaaccaattcttggattgagtttggcctccaaatatgctcaccaaacactatgttgctaccctctaccaaatgaatacaagtttgaattttctctgaaatatgtcaaccccatgttccctgaattgaaatatttgctctctaccataatttatcacatggagctattcctctatcttaaataaattttaatttttgaggcatgcaaataaaaaaaaaaaaaaaaaaaaa

SEQ ID NO: 1194 - DNA, 1285 bp, Homo sapiens
atggcagcactggggtctgcagcagctggacacacagcagctggggtggcagcaggtcgtcctgcagcaggtggtctgacagcagctggggcggcagcaggtgggctggcagcacacggaatggcagcactggggtctgcagcagctggacacagagcagctgtgggagcaggaggtggttctgcagcaggtggtctgacaacagctggggtgacagcagttggggctgcggccaagacctctgtcaggagacctgctgccgccccagctgctgtgagaccacctgctgcaggaccacctgctgccgccccagctgttgtgtatccagctgctgcaggccccagtgctgccagtctgtgtgctgccaacccacttgttcccgccccagctgctgtcagaccacctgttgcaggaccacctgctaccgccccagctgttgtgtgtccagctgctgcaggccccagtgctgccagcctgcgtgctgccaacccacttgctgtcgccccagctgctgtgagacgacctgctgccaccctaggtgctgcatctccagctgctgtcgccccagctgctgtgtgtccagctgctgcaagccccagtgctgccagtctgtgtgctgccagcccaactgctgccgccccagctgcagcatctccagctgctgccgcccctcttgctgtgaatccagctgctgccgcccctgctgctgcgtgcgtccagtctgtggccgagtctcctgccacaccacttgctatcgcccaacctgtgtcatctccagctgcccccgccccttgtgctgtgcctcctcttgctgctgagcccactgccctggcttatctcccccttcaccactggcccacagatgtagacccttctactgtgctgaccattaggatacaggaagtggggttgatgtcattcaatagaatggaactcatgtttccaatgagcccatcaccatttcactgactctttgagaacattctgattcattttaaactccctcccttgctttctttttcttccggtggtggcaccaaatgtgaattaatttgtaatccactagctagaaattattccaatcctctaatttcctcattttctttatcactttgaggtacagatcttcttctcagtgaggcagacattatctgcaggaccagttttgtcactgaggttgcaccctcagatccagccgcccagttatattctgtgtttctcctagtgtgaatttcttatgctttgttgcatctctgctttttaataaaatttctgtacataagaa

SEQ ID NO: 1195 - DNA, 819 bp, Homo sapiens
ggaccacctgctgccagcccacctgtctgaccagctgctgccagccttcctgctgcagcacaacctgctgccagcccatctgctgtgggtccagctgctgtggccaaaccagctgtgggtccagctgtggccagagcagctcctgtgcacctgtgtactgcagaagaacctgctactacccgacgactgtctgcctgcctggttgcctcaaccagagctgtggatccagctgctgccagccctgctgccgccccgcctgctgtgagaccacctgctgcaggaccacttgcttccagcccacctgtgtgtccagctgctgccagccttcttgctgctgatcaagtcccaagagaacaaccatcttcacacaacaaccttctgctcaactgacttatcttttggaggactaatttaccttactgctgacagcaaccatgttctcacccaaatttttatgaattctctgcatatttaaaatcttgtgaatcagcttgagggagggcagaatacttcatcctgattctctttttcttataccttgtgaatcatgtgccagcttcatctgttctcaattttgagtcatggtctcagctttgactcaaaagtcaagagcttcattctcttcacttaagaaacttaagttgctgcaaatgattaagaatcttcacaactatgttttcttttcaatatactcatgattcttgtatcctgcttccttcttttaatgatcactttgggttatctccctataaccagggatcttacctatatatttcttaataaataaatttggaactataaaaaaaaaaaaaaaaaaaa

SEQ ID NO: 1196 - DNA, 1713 bp, Homo sapiens
ggaaaggaaactatgctgtatgccaagcccccacccacaattaatggtataaaaggactgcagaggaaggagagactcaaacctgcccacatccacctccagcagcttacctgcttttccattacctgttccagcaccatgtcttacagttgttgcctgcccagcctgggctgccgcaccagctgctcctcccggccctgcgtgccccccagctgccacggctacaccctgcctggggcctgcaacatccccgccaatgtgagcaactgcaactggttctgtgagggctccttcaatggcagcgagaaggagactatgcagttcctgaacgaccgcctggccagctacctggagaaggtgcgtcagctggagcgggacaacgcggagctggagaaactcatccaggagcggtcccagcagcaggagcccttgctgtgccccagctaccagtcctacttcaagaccattgaggagctccagcagaagattctgtgtgccaaggctgagaatgccaggctggtggtgaacattgacaatgccaagctggcctctgacgacttcagaagcaagtaccagacggagcagtccctgaggctgttggtggagtcggacatcaacagcatacgcaggatcctggatgagctgaccctctgcaagtctgacctggagtcccaggtggagtccctgagggaggagctgatctgcttgaagaagaaccatgaggaggaggttaacaccctgcgctcccagcttggagaccgcctcaacgtggaggtggacactgcccccactgtggacctgaaccaggtcctgaacgagaccaggagtcagtatgaggctctggtggaaattaaccgcagggaagtggagcaatggttcgccacgcagaccgaggagctgaacaagcaggtggtatccagctcagagcagctgcagtcctgccaggcggagatcatcgagctgagacgcacagtcaacgccctggagatcgagctgcaggcccagcacaacctgcgagactctctggaaaacacgctgacggagagcgaggcccactacagctcccagctgtcccaggtgcagagcctgatcaccaacgtggagtctcagctggcagagatccgctgtgacctggagcggcagaaccaggagtaccaggtgctgctggacgtgcgtgcccggctggagtgtgagatcaacacgtaccggagcctcctggagagtgaggactgcaagctcccctgcaacccatgcgccaccaccaatgctagtggcaactcctgtggaccctgtggcacctctcaaaagggttgctgtaattgaaaagcttgtatcctctttgaagacatctacaaagccatttagatcaaccacaggaaggatcctcaagtcctgacttttctggagctcagctgacatcaagaaacctcatcttgcctctatgttatttctagaatgctgaaaagctttcctgacccaagcaaagacacacatcatcaacttccaatgtctggacaactccttcctgttgagggtcgagcctgtttgtttctaaagatgttcagctccctgtaatctgagctccagttactacttaaggtgtttcctgaacgtactactgcatttcctgttttccttttttctttggcattctctggaatgcaaggaggagacttcatttacttcccaataaacttcatttctctggcataa

SEQ ID NO: 1197 - DNA, 2384 bp, Homo sapiens
gctgaggctggagtttggagtttgacccgcttggaggctctctcagcagcgggcatataggaggaagggtcactgctgtctccggaagctcttggctgcaaagagagaggatcccgggtatctccctccttacaaccaccgccacctcctagtgccttagaagccactgacagcccccagggcaggtgagccctgcatctggaataaggatccagaggtctcgttcaggaccatggagagcggcaccagcagccctcagcctccacagttagatcccctggatgcgtttccccagaagggcttggagcctggggacatcgcggtgctagttctgtacttcctctttgtcctggctgttggactatggtccacagtgaagaccaaaagagacacagtgaaaggctacttcctggctggaggggacatggtgtggtggccagtgggtgcatccttgtttgccagcaatgttggaagtggacatttcattggcctggcagggtcaggtgctgctacgggcatttctgtatcagcttatgaacttaatggcttgttttctgtgctgatgttggcctggatcttcctacccatctacattgctggtcaggtcaccacgatgccagaatacctacggaagcgcttcggtggcatcagaatccccatcatcctggctgtactctacctatttatctacatcttcaccaagatctcggtagacatgtatgcaggtgccatcttcatccagcagtctttgcacctggatctgtacctggccatagttgggctactggccatcactgctgtatacacggttgctggtggcctggctgctgtgatctacacggatgccctgcagacgctgatcatgcttataggagcgctcaccttgatgggctacagttttgccgcggttggtgggatggaaggactgaaggagaagtacttcttggccctggctagcaaccggagtgagaacagcagctgcgggctgccccgggaagatgccttccatattttccgagatccgctgacatctgatctcccgtggccgggggtcctatttggaatgtccatcccatccctctggtactggtgcacggatcaggtgattgtccagcggactctggctgccaagaacctgtcccatgccaaaggaggtgctctgatggctgcatacctgaaggtgctgcccctcttcataatggtgttccctgggatggtcagccgcatcctcttcccagatcaagtggcctgtgcagatccagagatctgccagaagatctgcagcaacccctcaggctgttcggacatcgcgtatcccaaactcgtgctggaactcctgcccacagggctccgtgggctgatgatggctgtgatggtggcggctctcatgtcctccctcacctccatctttaacagtgccagcaccatcttcaccatggacctctggaatcacctccggcctcgggcatctgagaaggagctcatgattgtgggcagggtgtttgtgctgctgctggtcctggtctccatcctctggatccctgtggtccaggccagccagggcggccagctcttcatctatatccagtccatcagctcctacctgcagccgcctgtggcggtggtcttcatcatgggatgtttctggaagaggaccaatgaaaagggtgccttctggggcctgatctcgggcctgctcctgggcttggttaggctggtcctggactttatttacgtgcagcctcgatgcgaccagccagatgagcgcccggtcctggtgaagagcattcactacctctacttctccatgatcctgtccacggtcaccctcatcactgtctccaccgtgagctggttcacagagccaccctccaaggagatggtcagccacctgacctggtttactcgtcacgaccccgtggtccagaaggaacaagcaccaccagcagctcccttgtctcttaccctctctcagaacgggatgccagaggccagcagcagcagcagcgtccagttcgagatggttcaagaaaacacgtctaaaacccacagctgtgacatgaccccaaagcagtccaaagtggtgaaggccatcctgtggctctgtggaatacaggagaagggcaaggaagagctcccggccagagcagaagccatcatagtttccctggaagaaaaccccttggtgaagaccctcctggacgtcaacctcattttctgcgtgagctgcgccatctttatctggggctattttgcttagtgtggggtgaacccaggggtccaaactctgtttctcttcagtgctccatttttttaatgaaagaaaaaataataaagcttttgtttaccaaaaaaaaaaaaaaaaaaaaaaaaaaaaaaaaaaa

SEQ ID NO: 1198 - DNA, 2869 bp, Homo sapiens
ggtccacccagtgcttgcggcctcgcggccgggccggcctgggctgcaatcaatgcggctttgtctgggacgcccacatcccagaggccattcccgggtcggcaaatcggagcgcggccggggcgcgcgggggtgagataagcggccatgtgatcccacctgggctggaaggggaggggcgccaggtgaggcggcggccggcggggcgcgggcggccacgcggggctcctgcagcatggctgtcagcaggaaggactggtccgcgctgtccagccttgcccggcagaggactctggaggatgaggaggaacaggagcgcgagcgcaggcggcggcaccgcaacctgagctccaccacggacgatgaggctcccaggctcagccagaatggagaccggcaggcctctgcttctgagagactaccgagcgtggaagaagcagaggtgcccaagccactgcccccagcctccaaagatgaggacgaggacatccagagcatcctcagaacacggcaggagcggaggcagaggcggcaggtggtggaggctgcacaggcccccatccaggagaggctggaggcagaggaggggaggaacagcttgagccctgtgcaggccacacagaaacccctagtctccaagaaggaactggaaatcccacctcgccggagactgagtcgggaacagcggggcccctgggccctggaggaggagagcttggtgggcagggagccagaagagaggaagaaaggggttccagaaaagtccccagtcttggagaagtcctccatgccaaagaagacggcacctgaaaagagcctggtctccgataaaacctccatctctgagaaggtgctggcctcagagaagacatctctatcagagaagatagcagtgtcagagaaaagaaacagctcagagaagaagtctgttctagaaaaaaccagtgtctctgagaagtcgctggccccagggatggcactgggctcaggaaggaggctggtgtctgagaaagcttccatctttgagaaggcactggcctcagagaagagcccaactgcagatgctaagccggccccaaagagggccacagcctcagagcagcccctggcgcaggagccgccagcctctgggggaagcccagccaccaccaaggagcagagaggaagggccctccctgggaagaacctgccctctttggcaaagcagggggcttcagaccctccgactgtggcctcccgcctcccacccgtcacactccaggtgaaaatccccagcaaggaggaagaggcagatatgtcctcacccacacagcgaacctacagcagctccctcaaacgctccagccccaggaccatctcctttcggatgaaacccaagaaagaaaactcggaaacaaccctaactcgcagtgccagcatgaagctcccagacaacacagtgaagttgggagagaagctggagagataccacacggccatacggagatcagaatctgtcaagtctcggggtctgccttgcactgagttattcgtggctcctgtgggtgtagccagcaagcgccacctctttgagaaggaactggcgggccagagccgagcagaaccagcctccagccggaaggagaacttgaggctctcaggggttgtgacatcaaggctcaacctgtggatcagcaggacccaggaatctggagatcaggacccccaggaggcacagaaagcatcatctgcaaccgagaggactcagtggggacagaaatctgactcctcgctggacgctgaggtgtgacaagccccgccaagacagacctgcaagtcttcgtctcaagggacctccctcatgccaggcccctgcctctcacagcagcaccctttcctctcattgtccctgttccctttttgcctgtggatctgtttggccagggtccctggggtcaggaatatttgcaagactcagccagctccttcccagcccagcctcttggggctgggactttctcaccctgcggcaggcacaacagatgctgggacccagtctctgcccaggtcacagcacaagtgcacatcagcactatggggcctatgtcctgcccagagacctctgctccttcctgctcacatccacagtcagggcacggcgcccctcaagaactccagagtcacctgtctcatcggctcccagcaagtgcctctttgtctatgatgtcccccttctctgaggcctggacccacccatctttgtccctggggcctgctcccagccactgaggcccgctctggccaggggagaaggagctgccgtgcgtcttccctgtgccccgtctccctgcttggttctcccctcccttccctggccggctgccatggccaggagctaagtgcctttttgtgtgcaaccacttaccctttctctgaaaaacctgttctcaggaaggatctgataaactcatttactctcaggtgtaagagactgatgagaccttagaagcgaattcctctctggaggccttgctttctagcagaggtcacctgaagtgtgtgaggaggatcatcattttcctcatcccccctcttctcacattaaggtggtggcttgccactcagcagtcctagcttggtgactgggaactgccacatacagggccaggcctaccctccttccccacaagccccctccaacccccacccccatgctctggacctcatggctcctatgagcttggagcatggtgaaccatcagagaatctagaaccaaccaagctaggaacatcagcctggtgccctgttaaccccttaaagctgtggtttacaacttttcaaaaatttaaatcattagaaaaaaaaaaaaaaaaaaaaaaaaaaaaaaaa

SEQ ID NO: 1199 - DNA, 11426 bp, Homo sapiens
agacccgccgggctcccgccgcgcgcgctgtccctggagctcggggacgcggcccggagccgggaagatggcgaagcggctctgcgcggggagcgcactgtgtgttcgcggcccccggggccccgcgccgctgctgctggtcgggctggcgctgctgggcgcggcgcgggcgcgggaggaggcgggcggcggcttcagcctgcacccgccctacttcaacctggccgagggcgcccgcatcgccgcctccgcgacctgcggagaggaggccccggcgcgcggctccccgcgccccaccgaggacctttactgcaagctggtagggggccccgtggccggcggcgaccccaaccagaccatccggggccagtactgtgacatctgcacggctgccaacagcaacaaggcacaccccgcgagcaatgccatcgatggcacggagcgctggtggcagagtccaccgctgtcccgcggcctggagtacaacgaggtcaacgtcaccctggacctgggccaggtcttccacgtggcctacgtcctcatcaagtttgccaactcaccccggccggacctctgggtgctggagcggtccatggacttcggccgcacctaccagccctggcagttctttgcctcctccaagagggactgtctggagcggttcgggccacagacgctggagcgcatcacacgggacgacgcggccatctgcaccaccgagtactcacgcatcgtgcccctggagaacggagagatcgtggtgtccctggtgaacggacgtccgggcgccatgaatttctcctactcgccgctgctacgtgagttcaccaaggccaccaacgtccgcctgcgcttcctgcgtaccaacacgctgctgggccatctcatggggaaggcgctgcgggaccccacggtcacccgccggtattattacagcatcaaggatatcagcatcggaggccgctgtgtctgccacggccacgcggatgcctgcgatgccaaagaccccacggacccgttcaggctgcagtgcacctgccagcacaacacctgcgggggcacctgcgaccgctgctgccccggcttcaatcagcagccgtggaagcctgcgactgccaacagtgccaacgagtgccagtcctgtaactgctacggccatgccaccgactgttactacgaccctgaggtggaccggcgccgcgccagccagagcctggatggcacctatcagggtgggggtgtctgtatcgactgccagcaccacaccaccggcgtcaactgtgagcgctgcctgcccggcttctaccgctctcccaaccaccctctcgactcgccccacgtctgccgccgctgcaactgcgagtccgacttcacggatggcacctgcgaggacctgacgggtcgatgctactgccggcccaacttctctggggagcggtgtgacgtgtgtgccgagggcttcacgggcttcccaagctgctacccgacgccctcgtcctccaatgacaccagggagcaggtgctgccagccggccagattgtgaattgtgactgcagcgcggcagggacccagggcaacgcctgccggaaggacccaagggtgggacgctgtctgtgcaaacccaacttccaaggcacccattgtgagctctgcgcgccagggttctacggccccggctgccagccctgccagtgttccagccctggagtggccgatgaccgctgtgaccctgacacaggccagtgcaggtgccgagtgggcttcgagggggccacatgtgatcgctgtgcccccggctactttcacttccctctctgccagttgtgtggctgcagccctgcaggaaccttgcccgagggctgcgatgaggccggccgctgcctatgccagcctgagtttgctggacctcattgtgaccggtgccgccctggctaccatggtttccccaactgccaagcatgcacctgcgaccctcggggagccctggaccagctctgtggggcgggaggtttgtgccgctgccgccccggctacacaggcactgcctgccaggaatgcagccccggctttcacggcttccccagctgtgtcccctgccactgctctgctgaaggctccctgcacgcagcctgtgacccccggagtgggcagtgcagctgccggccccgtgtgacggggctgcggtgtgacacatgtgtgcccggtgcctacaacttcccctactgcgaagctggctcttgccaccctgccggtctggccccagtggatcctgcccttcctgaggcacaggttccctgtatgtgccgggctcacgtggaggggccgagctgtgaccgctgcaaacctgggttctggggactgagccccagcaaccccgagggctgtacccgctgcagctgcgacctcaggggcacactgggtggagttgctgagtgccagccgggcaccggccagtgcttctgcaagccccacgtgtgcggccaggcctgcgcgtcctgcaaggatggcttctttggactggatcaggctgactattttggctgccgcagctgccggtgtgacattggcggtgcactgggccagagctgtgaaccgaggacgggcgtctgccggtgccgccccaacacccagggccccacctgcagcgagcctgcgagggaccactacctcccggacctgcaccacctgcgcctggagctggaggaggctgccacacctgagggtcacgccgtgcgctttggcttcaaccccctcgagttcgagaacttcagctggaggggctacgcgcagatggcacctgtccagcccaggatcgtggccaggctgaacctgacctcccctgaccttttctggctcgtcttccgatacgtcaaccggggggccatgagtgtgagcgggcgggtctctgtgcgagaggagggcaggtcggccacctgcgccaactgcacagcacagagtcagcccgtggccttcccacccagcacggagcctgccttcatcaccgtgccccagaggggcttcggagagccctttgtgctgaaccctggcacctgggccctgcgtgtggaggccgaaggggtgctcctggactacgtggttctgctgcctagcgcatactacgaggcggcgctcctgcagctgcgggtgactgaggcctgcacataccgtccctctgcccagcagtctggcgacaactgcctcctctacacacacctccccctggatggcttcccctcggccgccgggctggaggccctgtgtcgccaggacaacagcctgccccggccctgccccacggagcagctcagcccgtcgcacccgccactgatcacctgcacgggcagtgatgtggacgtccagcttcaagtggcagtgccacagccaggccgctatgccctagtggtggagtacgccaatgaggatgcccgccaggaggtgggcgtggccgtgcacaccccacagcgggccccccagcaggggctgctctccctgcacccctgcctgtacagcaccctgtgccggggcactgcccgggatacccaggaccacctggctgtcttccacctggactcggaggccagcgtgaggctcacagccgaacaggcacgcttcttcctgcacggggtcactctggtgcccattgaggagttcagcccggagttcgtggagccccgggtcagctgcatcagcagccacggcgcctttggccccaacagtgccgcctgtctgccctcgcgcttcccaaagccgccccagcccatcatcctcagggactgccaggtgatcccgctgccgcccggcctcccgctgacccacgcgcaggatctcactccagccatgtccccagctggaccccgacctcggccccccaccgctgtggaccctgatgcagagcccaccctgctgcgtgagccccaggccaccgtggtcttcaccacccatgtgcccacgctgggccgctatgccttcctgctgcacggctaccagccagcccaccccaccttccccgtggaagtcctcatcaacgccggccgcgtgtggcagggccacgccaacgccagcttctgtccacatggctacggctgccgcaccctggtggtgtgtgagggccaggccctgctggacgtgacccacagcgagctcactgtgaccgtgcgtgtgcccaagggccggtggctctggctggattatgtactcgtggtccctgagaacgtctacagctttggctacctccgggaggagcccctggataaatcctatgacttcatcagccactgcgcagcccagggctaccacatcagccccagcagctcatccctgttctgccgaaacgctgctgcttccctctccctcttctataacaacggagcccgtccatgtggctgccacgaagtaggtgctacaggccccacgtgtgagcccttcgggggccagtgtccctgccatgcccatgtcattggccgtgactgctcccgctgtgccaccggatactggggcttccccaactgcaggccctgtgactgcggtgcccgcctctgtgacgagctcacgggccagtgcatctgcccgccacgcaccatcccgcccgactgcctgctgtgccagccccagacctttggctgccaccccctggtcggctgtgaggagtgtaactgctcagggcccggcatccaggagctcacagaccctacctgtgacacagacagcggccagtgcaagtgcagacccaacgtgactgggcgccgctgtgatacctgctctccgggcttccatggctacccccgctgccgcccctgtgactgtcacgaggcgggcactgcgcctggcgtgtgtgaccccctcacagggcagtgctactgtaaggagaacgtgcagggccccaaatgtgaccagtgcagccttgggaccttctcactggatgctgccaaccccaaaggttgcacccgctgcttctgctttggggccacggagcgctgccggagctcgtcctacacccgccaggagttcgtggatatggagggatgggtgctgctgagcactgaccggcaggtggtgccccacgagcggcagccagggacggagatgctccgtgcagacctgcggcacgtgcctgaggctgtgcccgaggctttccccgagctgtactggcaggccccaccctcctacctgggggaccgggtgtcatcctacggtgggaccctccgttatgaactgcactcagagacccagcggggagatgtctttgtccccatggagagcaggccggatgtggtgctgcagggcaaccagatgagcatcacattcctggagccggcataccccacgcctggccacgttcaccgtgggcagctgcagctggtggaggggaacttccggcatacggagacgcgcaacactgtgtcccgcgaggagctcatgatggtgctggccagcctggagcagctgcagatccgtgccctcttctcacagatctcctcggctgtcttcctgcgcagggtggcactggaggtggccagcccagcaggccagggggccctggccagcaatgtggagctgtgcctgtgccccgccagctaccggggggactcatgccaggaatgtgcccccggcttctatcgggacgtcaaaggtctcttcctgggccgatgtgtcccttgtcagtgccatggacactcagaccgctgcctccctggctctggcgtctgtgtggactgccagcacaacaccgaaggggcccactgtgagcgctgccaggctggcttcgtgagcagcagggacgaccccagcgccccctgtgtcagctgcccctgccccctctcagtgccttccaacaacttcgccgagggctgtgtcctgcgaggcggccgcacccagtgcctctgcaaacctggttatgcaggtgcctcctgcgagcggtgtgcgcccggattctttgggaacccactggtgctgggcagctcctgccagccatgcgactgcagcggcaacggtgaccccaacttgctcttcagcgactgcgaccccctgacgggcgcctgccgtggctgcctgcgccacaccactgggccccgctgcgagatctgtgcccccggcttctacggcaacgccctgctgcccggcaactgcacccggtgcgactgtaccccatgtgggacagaggcctgcgacccccacagcgggcactgcctgtgcaaggcgggcgtgactgggcggcgctgtgaccgctgccaggagggacattttggtttcgatggctgcgggggctgccgcccgtgtgcttgtggaccggccgccgagggctccgagtgccacccccagagcggacagtgccactgccgaccagggaccatgggaccccagtgccgcgagtgtgcccctggctactgggggctccctgagcagggctgcaggcgctgccagtgccctgggggccgctgtgaccctcacacgggccgctgcaactgccccccggggctcagcggggagcgctgcgacacctgcagccagcagcatcaggtgcctgttccaggcgggcctgtgggccacagcatccactgtgaagtgtgtgaccactgtgtggtcctgctcctggatgacctggaacgggccggcgccctcctccccgccattcacgagcaactgcgtggcatcaatgccagctccatggcctgggcccgtctgcacaggctgaacgcctccatcgctgacctgcagagccagctccggagccccctgggcccccgccatgagacggcacagcagctggaggtgctggagcagcagagcacaagcctcgggcaggacgcacggcggctaggcggccaggccgtggggacccgagaccaggcgagccaattgctggccggcaccgaggccacactgggccatgcgaagacgctgttggcggccatccgggctgtggaccgcaccctgagcgagctcatgtcccagacgggccacctggggctggccaatgcctcggctccatcaggtgagcagctgctccggacactggccgaggtggagcggctgctctgggagatgcgggcccgggacctgggggccccgcaggcagcagctgaggctgagttggctgcagcacagagattgctggcccgggtgcaggagcagctgagcagcctctgggaggagaaccaggcactggccacacaaacccgcgaccggctggcccagcacgaggccggcctcatggacctgcgagaggctttgaaccgggcagtggacgccacacgggaggcccaggagctcaacagccgcaaccaggagcgcctggaggaagccctgcaaaggaagcaggagctgtcccgggacaatgccaccctgcaggccactctgcatgcggctagggacaccctggccagcgtcttcagattgctgcacagcctggaccaggctaaggaggagctggagcgcctcgccgccagcctggatggggctcggaccccactgctgcagaggatgcagaccttctccccggcgggcagcaagctgcgtctagtggaggccgccgaggcccacgcacagcagctgggccagctggcactcaatctgtccagcatcatcctggacgtcaaccaggaccgcctcacccagagggccatcgaggcctccaacgcctacagccgcatcctgcaggccgtgcaggctgccgaggatgctgctggccaggccctgcagcaggcggaccacacgtgggcgacggtggtgcggcagggcctggtggaccgagcccagcagctcctggccaacagcactgcactagaagaggccatgctccaggaacagcagaggctgggccttgtgtgggctgccctccagggtgccaggacccagctccgagatgtccgggccaagaaggaccagctggaggcgcacatccaggcggcgcaggccatgcttgccatggacacagacgagacaagcaagaagatcgcacatgccaaggctgtggctgctgaagcccaggacaccgccacccgtgtgcagtcccagctgcaggccatgcaggagaatgtggagcggtggcagggccagtacgagggcctgcggggccaggacctgggccaggcagtgcttgacgcaggccactcagtgtccaccctggagaagacgctgccccagctgctggccaagctgagcatcctggagaaccgtggggtgcacaacgccagcctggccctgtccgccagcattggccgcgtgcgagagctcattgcccaggcccggggggctgccagtaaggtcaaggtgcccatgaagttcaacgggcgctcaggggtgcagctgcgcaccccacgggatcttgccgaccttgctgcctacactgccctcaagttctacctgcagggcccagagcctgagcctgggcagggtaccgaggatcgctttgtgatgtacatgggcagccgccaggccactggggactacatgggtgtgtctctgcgtgacaagaaggtgcactgggtgtatcagctgggtgaggcgggccctgcagtcctaagcatcgatgaggacattggggagcagttcgcagctgtcagcctggacaggactctccagtttggccacatgtccgtcacagtggagagacagatgatccaggaaaccaagggtgacacggtggcccctggggcagaggggctgctcaacctgcggccagacgacttcgtcttctacgtcggggggtaccccagtaccttcacgccccctcccctgcttcgcttccccggctaccggggctgcatcgagatggacacgctgaatgaggaggtggtcagcctctacaacttcgagaggaccttccagctggacacggctgtggacaggccttgtgcccgctccaagtcgaccggggacccgtggctcacggacggctcctacctggacggcaccggcttcgcccgcatcagcttcgacagtcagatcagcaccaccaagcgcttcgagcaggagctgcggctcgtgtcctacagcggggtgctcttcttcctgaagcagcagagccagttcctgtgcttggccgtgcaagaaggcagcctcgtgctgttgtatgactttggggctggcctgaaaaaggccgtcccactgcagcccccaccgcccctgacctcggccagcaaggcgatccaggtgttcctgctggggggcagccgcaagcgtgtgctggtgcgtgtggagcgggccacggtgtacagcgtggagcaggacaatgatctggagctggccgacgcctactacctggggggcgtgccgcccgaccagctgcccccgagcctgcgacggctcttccccaccggaggctcagtccgtggctgcgtcaaaggcatcaaggccctgggcaagtatgtggacctcaagcggctgaacacgacaggcgtgagcgccggctgcaccgccgacctgctggtggggcgcgccatgactttccatggccacggcttccttcgcctggcgctctcgaacgtggcaccgctcactggcaacgtctactccggcttcggcttccacagcgcccaggacagtgccctgctctactaccgggcgtccccggatgggctatgccaggtgtccctgcagcagggccgtgtgagcctacagctcctgaggactgaagtgaaaactcaagcgggcttcgccgatggtgccccccattacgtcgccttctacagcaatgccacgggagtctggctgtatgtcgatgaccagctccagcagatgaagccccaccggggaccaccccccgagctccagccgcagcctgaggggcccccgaggctcctcctgggaggcctgcctgagtctggcaccatttacaacttcagtggctgcatcagcaacgtcttcgtgcagcggctcctgggcccacagcgcgtatttgatctgcagcagaacctgggcagcgtcaatgtgagcacgggctgtgcacccgccctgcaagcccagaccccgggcctggggcctagaggactgcaggccaccgcccggaaggcctcccgccgcagccgtcagcccgcccggcatcctgcctgcatgctgcccccacacctcaggaccacccgagactcctaccagtttgggggttccctgtccagtcacctggagtttgtgggcatcctggcccgacataggaactggcccagtctctccatgcacgtcctcccgcgaagctcccgaggcctcctcctcttcactgcccgtctgaggcccggcagcccctccctggcgctcttcctgagcaatggccacttcgttgcacagatggaaggcctcgggactcggctccgcgcccagagccgccagcgctcccggcctggccgctggcacaaggtctccgtgcgctgggagaagaaccggatcctgctggtgacggacggggcccgggcctggagccaggaggggccgcaccggcagcaccagggggcagagcacccccagccccacaccctctttgtgggcggcctcccggccagcagccacagctccaaacttccggtgaccgtcgggttcagcggctgtgtgaagagactgaggctgcacgggaggcccctgggggcccccacacggatggcaggggtcacaccctgcatcttgggccccctggaggcgggcctgttcttcccaggcagcgggggagttatcactttagacctcccaggagctacactgcctgatgtgggcctggaactggaggtgcggcccctggcagtcaccggactgatcttccacttgggccaggcccggacgcccccctacttgcagttgcaggtgaccgagaagcaagtcctgctgcgggcggatgacggagcaggggagttctccacgtcagtgacccgcccctcagtgctgtgtgatggccagtggcaccggctagcggtgatgaaaagcgggaatgtgctccggctggaggtggacgcgcagagcaaccacaccgtgggccccttgctggcggctgcagctggtgccccagcccctctgtacctcgggggcctgcctgagcccatggccgtgcagccctggccccccgcctactgcggctgcatgaggaggctggcggtgaaccggtcccccgtcgccatgactcgctctgtggaggtccacggggcagtgggggccagtggctgcccagccgcctaggacacagccaaccccggcccctggtcaggcccctgcagctgcctcacaccgccccttgtgctcgcctcataggtgtctatttggactctaagctctacgggtgacagatcttgtttctgaagatggtttaagttatagcttcttaaacgaaagaataaaatactgcaaaatgtttttatatttggcccttccacccatttttaattgtgagagatttgtcaccaatcatcactggttcctccttaaaaattaaaaagtaacttctgtgtaa

SEQ ID NO: 1200 - DNA, 2560 bp, Homo sapiens
tgcggggagccgagccgccggcgctcgacgcgcgcgctctcgcgagacccgcgggatcacgtgacgcccgggcgcggcgcagctcacgtgacaagcgctgccggccgcggtgtcttcttcgtgccggcgtcgcagtggccgggcctcttgcgtctggtaacgccgctgtctctaacgccagcccttggcgcccgcgccccgccaccgcagcgcccggcagtccgcggcccaaccgccgcccgcgcccccgctccccgcaccgtacccggccgcctcgcgccatggcggcccccggcagcgcccggcgacccctgctgctgctactgctgttgctgctgctcggcctcatgcattgtgcgtcagcagcaatgtttatggtgaaaaatggcaacgggaccgcgtgcataatggccaacttctctgctgccttctcagtgaactacgacaccaagagtggccctaagaacatgacctttgacctgccatcagatgccacagtggtgctcaaccgcagctcctgtggaaaagagaacacttctgaccccagtctcgtgattgcttttggaagaggacatacactcactctcaatttcacgagaaatgcaacacgttacagcgtccagctcatgagttttgtttataacttgtcagacacacaccttttccccaatgcgagctccaaagaaatcaagactgtggaatctataactgacatcagggcagatatagataaaaaatacagatgtgttagtggcacccaggtccacatgaacaacgtgaccgtaacgctccatgatgccaccatccaggcgtacctttccaacagcagcttcagcaggggagagacacgctgtgaacaagacaggccttccccaaccacagcgccccctgcgccacccagcccctcgccctcacccgtgcccaagagcccctctgtggacaagtacaacgtgagcggcaccaacgggacctgcctgctggccagcatggggctgcagctgaacctcacctatgagaggaaggacaacacgacggtgacaaggcttctcaacatcaaccccaacaagacctcggccagcgggagctgcggcgcccacctggtgactctggagctgcacagcgagggcaccaccgtcctgctcttccagttcgggatgaatgcaagttctagccggtttttcctacaaggaatccagttgaatacaattcttcctgacgccagagaccctgcctttaaagctgccaacggctccctgcgagcgctgcaggccacagtcggcaattcctacaagtgcaacgcggaggagcacgtccgtgtcacgaaggcgttttcagtcaatatattcaaagtgtgggtccaggctttcaaggtggaaggtggccagtttggctctgtggaggagtgtctgctggacgagaacagcatgctgatccccatcgctgtgggtggtgccctggcggggctggtcctcatcgtcctcatcgcctacctcgtcggcaggaagaggagtcacgcaggctaccagactatctagcctggtgcacgcaggcacagcagctgcaggggcctctgttcctttctctgggcttagggtcctgtcgaaggggaggcacactttctggcaaacgtttctcaaatctgcttcatccaatgtgaagttcatcttgcagcatttactatgcacaacagagtaactatcgaaatgacggtgttaattttgctaactgggttaaatattttgctaactggttaaacattaatatttaccaaagtaggattttgagggtgggggtgctctctctgagggggtgggggtgccgctgtctctgaggggtgggggtgccgctgtctctgaggggtgggggtgccgctctctctgagggggtgggggtgccgctttctctgagggggtgggggtgccgctctctctgagggggtgggggtgctgctctctccgaggggtggaatgccgctgtctctgaggggtgggggtgccgctctaaattggctccatatcatttgagtttagggttctggtgtttggtttcttcattctttactgcactcagatttaagccttacaaagggaaagcctctggccgtcacacgtaggacgcatgaaggtcactcgtggtgaggctgacatgctcacacattacaacagtagagagggaaaatcctaagacagaggaactccagagatgagtgtctggagcgcttcagttcagctttaaaggccaggacgggccacacgtggctggcggcctcgttccagtggcggcacgtccttgggcgtctctaatgtctgcagctcaagggctggcacttttttaaatataaaaatgggtgttatttttatttttttttgtaaagtgatttttggtcttctgttgacattcggggtgatcctgttctgcgctgtgtacaatgtgagatcggtgcgttctcctgatgttttgccgtggcttggggattgtacacgggaccagctcacgtaatgcattgcctgtaacaatgtaataaaaagcctctttcttttaaaaaaaaaaaaaaaaaaaa

SEQ ID NO: 1201 - DNA, 4544 bp, Homo sapiens
ccgagaagggcttcaggacgcgggaggcgcacttgcttcaagtcgcgggcgtgggaacggggttgcaaaacggggcctttttatccgggcttgcttccggcgtcatggctcaaagggccttcccgaatccttatgctgattataacaaatccctggccgaaggctactttgatgctgccgggaggctgactcctgagttctcacaacgcttgaccaataagattcgggagcttcttcagcaaatggagagaggcctgaaatcagcagaccctcgggatggcaccggttacactggctgggcaggtattgctgtgctttacttacatctttatgatgtatttggggaccctgcctacctacagttagcacatggctatgtaaagcaaagtctgaactgcttaaccaagcgctccatcaccttcctttgtggggatgcaggccccctggcagtggccgctgtgctatatcacaagatgaacaatgagaagcaggcagaagattgcatcacacggctaattcacctaaataagattgatcctcatgctccaaatgaaatgctctatgggcgaataggctacatctatgctcttctttttgtcaataagaactttggagtggaaaagattcctcaaagccatattcagcagatttgtgaaacaattttaacctctggagaaaacctagctaggaagagaaacttcacggcaaagtctccactgatgtatgaatggtaccaggaatattatgtaggggctgctcatggcctggctggaatttattactacctgatgcagcccagccttcaagtgagccaagggaagttacatagtttggtcaagcccagtgtagactacgtctgccagctgaaattcccttctggcaattaccctccatgtataggtgataatcgagatctgcttgtccattggtgccatggcgcccctggggtaatctacatgctcatccaggcctataaggtattcagagaggaaaagtatctctgtgatgcctatcagtgtgctgatgtgatctggcaatatgggttgctgaagaagggatatgggctgtgccacggttctgcagggaatgcctatgccttcctgacactctacaacctcacacaggacatgaagtacctgtatagggcctgtaagtttgctgaatggtgcttagagtatggagaacatggatgcagaacaccagacacccctttctctctctttgaaggaatggctggaacaatatatttcctggctgacctgctagtccccacaaaagccaggttccctgcatttgaactctgaaaggatagcatgccacctgcaactcactgcatgaccctttctgtatattcaaacccaagctaagtgcttccgttgctttccaaggaaacaaagagtcaaactgtggacttgattttgttagcttttttcagaatttatctttcattcagttcccttccattatcatttacttttacttagaagtatccaaggaagtcttttaactttaatttccatttcttcctaaagggagagtgagtgatatgtacagtgttttgagattgtatacatatattccagaacttggaggaaatcttatttaagtttatgaatataaccatctgttactgttctaaaaatgtttaaaagaaactcaatacagataaagataaatatgtgactattattgggtattacacttcacttctctttaatatttttcctccaactggagggcagacaattttctgacttgcttttctctaggtggttcattttgaaaggggacagaaatataactaaatgcttccaggagaaaaattccaagagttacaatctggacttggtacctaaatatcattttttaaattcttgatgcctatttggactagaggtaaacatactttcagattggcctgtttttgtcggtaaggcatacagccttcagaagccaacatttttaatcaaaaacttataaaacatgatgatcattgtgaaaattctgagttgaaggttagtttaagataagctaacaataacagtctgtgttttctctaaaataatctgagttttttggaactctttatttaaatatgtgtgtttttcagtattcaaataagatcaggaagccaattttctatgtatgaatatgctttaacctaggatttcagtccactctgactgactttctaaactttaacttgggtttttacagtgactatgcattagtgctgactctttggtataagccataaaatattttccttcctatcaatttatctgaactttggtcttttcactaaattgtacagtattctacttctgtttaaaaaggggagatgagaaagggaatactatctaaccaataacttgaacaaaaacactaaactaagcatttaatagaaatgctttttattgaggaggtattatccagagttcatgcttagaacaaatgcatctttgcgtatcctagacttaacaattcatcagtttctgagaccacagaatcaggttttccgtagtagataaagactctctggtgcttcaaattctgttcaagtgttttgactcatcagcttctactctttctattactgcctttgcctggcttgttttgtctctttgcaactgattttgcaaaaaaaaattgtagctttaaaataacagggtctaagtattttaaatgtgcctatttcacagctctcttggtcacaaaaacatgctatttttattggaacttcaaaccaaatccccactgagtgtgtactggttcctgcaggtagcagtctcctattatctcctgtttagcaccaaaagagctaatattattggaaactgaccttttaaaggccactggcagtaggatttaaaaagcagcccactgctcagtttccaggatcagcttcctccttctgtcacttgtgtaagttggcactaccttgtgcctctcagattgctgaagtgctgctggtaagcatgtgcatgctctgcctttcttgtgaaagttttcaatcagcgatatcagcacttacagtaagaagtaaaagtagtgcacagcaaagctaatttgcctttgcctggggtgttcagcttgaaagaataaagctcatttggtttagttaaatgtcttactctactgtgcctatgcttttagctgcgttactaagcaagggaaaaataacagtttctctgagccagagaagacttgatcacagttctccaagcatcgtgatagcaatgcttaaccccaggaagatttcaaggcagggagaagaacatttcaaataagattcttgttaacccatttatgcctagtgttccattattggaatgctaagcttgtgggagtcatttacatcctactgctcaaagtcattgccaaggtctgatttttcacacaaaaaattgcaacccccagcataaatgggttagctactgtcatcagttagcaaattcatccacacaaacacaattagagtttggtttttttttaagcttttcaaaacttactaaactggcacaattttatatgtatgctatttgttgtatttatgcttaagagcaaaaaagttttgatgggattttaaattcagcaaagcctacaacgctgagacaatcccctaacaacatggtagtaactaaagaaacttttatactaggcttcttagttttaaaaggaagtggcatcattgtttcagttctagtttgtatttttctctcagatatttttcttctttaaaaatctttcccagaagttggttcctagaaaactcaataccatcatctcttatctctatacagggactaggtaataaaaccttcaaaggttgtcaaaggtcatcaagcagtgttcatttatcctgtcacatgtttctgtttctatagtaatttagaaattgcaaatagttaacttttcatcatgtaaaaagttaacattatcctatttccatagataccatggacggcggtgtggcctgagttgtcagtctttaatcctgagtcatgtggctctcttttcatctttgatgtcagttccaattatttggcatcaaaaaccttcatggtaggtagagttttaggtaaaagtggatctagggttactttctttattaacatttcctaaataactgaattgagagacatactctgctactatgtcctcaggttaatttttgtctgatcttacgatgccctgccttttactagctactttagaaatagaaaatgtgaagagtgactatttacatgtatactcctttggctgctagaactcatctgtagtcctttattatttacactgaattccaatttcatttctcttccgctaagtaagagcacctcattcctgtgttttctctactattgagctgtagacgaactgtttctctaattataaagcaaactgtttgggatattcagggaaactaccccaatgttatgttgtcatttaatgggaaaggctgggatcatatgtatttctatgttctgtaaagtatttgacttactagttctcaataaaattttattaggactataaaaaaa

SEQ ID NO: 1202 - DNA, 2931 bp, Homo sapiens
aagcgaacttagcactggctacaccctcctcaattctggttggcgagatgcgctcttcccggaagtgacgcacaagtgccggcggaaggggaagtccaggagcatgggtggtttttttccccctaccgaggtccgtgaggtgtgtgctaaccaaggggcggctcacaaccgtgacagactgccattcctgagtctcttctggccatgggcccccggagccgtgagcgtcgggcaggcgcggtacagaacaccaacgacagcagcgccctcagcaagcgttccctggccgcgcgcgggtacgtgcaggacccctttgccgcgttgctggttccgggcgcggcgcgccgcgcaccgctcattcaccgaggctactacgtccgcgcacgcgccgtgaggcactgcgtgcgcgcttttttggagcagattggcgcgccccaggccgcgcttcgcgcgcagatcttgtctctcggcgctggcttcgactcgctctattttcgcttaaaaaccgcgggccgcctggcccgggctgcagtctgggaggtggattttccggacgtggcgcggcgcaaagcagaaaggattggagagacgccagagctgtgcgcgttaaccgggcctttcgagaggggggagcccgcgtccgcgctgtgctttgagagcgcagactactgcatcctgggtctggacttgcggcagctccagcgagtggaggaggccctgggcgccgcggggctcgacgcagcctcacccactctgctcctggccgaggcggtgctgacctacctcgagccggagagtgccgcggccctcatcgcctgggcagcccagcgttttcctaatgcccttttcgtggtctatgagcagatgaggcctcaagacgcctttggccagttcatgctgcaacattttcggcagctaaactcccccctgcatggcctggagcgttttcctgacgtggaggcgcagcggcgccgcttccttcaagctggctggaccgcctgcggtgccgtggacatgaatgaattctatcactgctttcttcccgcagaagaacgccggcgggtggaaaatattgaaccctttgacgaatttgaggagtggcatctgaagtgcgcccattatttcattctggcagcttctaggggagacaccctctcccacaccctagtgtttccatcctcagaggcatttcctcgcgtaaatcctgcttcgccttcaggggtattccctgccagcgtagtcagtagcgagggccaggtcccaaacctgaagagatatggccacgcctctgtcttcttgagcccagacgttattctcagtgcaggaggatttggagagcaggaggggcggcactgccgagtgagccagtttcacttgctctcaagagattgtgactctgaatggaaaggcagccaaataggcagttgtgggactggagttcagtgggatggacgcctttatcacaccatgacaagactctcagagagtcgggttctggttctgggagggagactgtccccagtaagtccagccttgggggttctccagcttcatttttttaagagtgaggataataacactgaggacctgaaagtgacaataacaaaggctggccgaaaggatgattccactttgtgttgttggcggcattcaacaacagaagtgtcctgtcagaatcaggaatatttgtttgtgtatgggggtcgaagcgtggtggaacctgtactaagtgactggcatttcctccatgtagggacaatggcttgggtcaggatcccagtggagggagaagtacctgaagcccggcattctcacagtgcctgcacttggcaagggggagcccttattgctggaggtctcggggcttctgaggagccattgaactctgtgctctttctgagaccaatctcttgtggattcctctgggagtcagtagacatccagcctcccattaccccaaggtactcccacacagctcatgtgctcaatggaaagctgttactggttggagggatctggattcattcctcctcatttcctggagtgactgtgatcaatttgactacaggattgagctctgagtatcagattgacacaacatatgtgccatggccattaatgttacacaaccatactagtatccttcttcctgaagagcaacagctcctgctccttggaggtggtgggaactgcttttcctttggtacctacttcaacccccatacagtcacattagacctttcttccttaagtgctgggcagtaaggactggactaatattcaggacccactaaagtagacaataaagttttccacaaataggatgaccctctagctatagatactgccactcctcctttccccatcctttttttcccttagcactattcagtgcaaaaagtgaaaaaggttggtaaaataggtaaaatacctagaaacaatcactacagaaaacagctgaagacagtggccatgcagtccgagaggagtagtggtctgcctctaattttctaatctaagttcgtttattgagttacagtggtctttagtaaagtaaaacaatttcccaatcccaggccttgtgatttgagatggtaccttagaaaaagttacacgcagttccgtggttgaatatatttgagatggtaccttagaaaaagtttcacgcagatccttggttgaatatagttgagggagcgtagtattgacaattcttcatgtaggaaacctgaaatgaacacagtcacagtttgattaaaacattgtcctgtttgttgcaacagaaaactcggatagttttaacaacaggaaacacttgtaggacttcctttaccaacatactttttaaatgttttgctattggttccatatttatttagatttataagtgtcaataaagcaaacttttgatgcctcaaaaaaaaaaaaaaa

SEQ ID NO: 1203 - DNA, 5774 bp, Homo sapiens
agccaggaggcggaagttcccgcgggcggtggggacggcgccctcaccgcgagtcacttgtcagcccttgtctgaggcggaggcagccccgcgccgcgccggacccgagcatatttcattttctgtcattggactttgagccattagaaccatgagcaactacagtgtgtcactggttggcccagctccttggggtttccggctgcagggcggtaaggatttcaacatgcctctgacaatctctagtctaaaagatggcggcaaggcagcccaggcaaatgtaagaataggcgatgtggttctcagcattgatggaataaatgcacaaggaatgactcatcttgaagcccagaataagattaagggttgtacaggctctttgaatatgactctgcaaagagcatctgctgcacccaagcctgagccggttcctgttcaaaagcccacagtcaccagcgtgtgttccgagacttctcaggagctagcagagggacagagaagaggatcccagggtgacagtaaacagcaaaatggcccaccaagaaaacacattgtggagcgctatacagagttttatcatgtacccactcacagtgatgccagcaagaagagactgattgaggatactgaagactggcgtccaaggactggaacaactcagtctcgctctttccgaatccttgcccagatcactgggactgaacatttgaaagaatctgaagccgataatacaaagaaggcaaataactctcaggagccttctccgcagttggcttcctcggtagcttccacacggagcatgcccgagagcctggacagcccaacctctggcagaccaggggttaccagcctcacaactgcagctgccttcaagcctgtaggatccactggcgtcatcaagtcaccaagctggcaacggccaaaccaaggagtaccttccactggaagaatctcaaacagcgctacttactcaggatcagtggcaccagccaactcagctttgggacaaacccagccaagtgaccaggacactttagtgcaaagagctgagcacattccagcagggaaacgaactccgatgtgcgcccattgtaaccaggtcatcagaggaccattcttagtggcactggggaaatcttggcacccagaagaattcaactgcgctcactgcaaaaatacaatggcctacattggatttgtagaggagaaaggagccctgtattgtgagctgtgctatgagaaattctttgcccctgaatgtggtcgatgccaaaggaagatccttggagaagtcatcaatgcgttgaaacaaacttggcatgtttcctgttttgtgtgtgtagcctgtggaaagcccattcggaacaatgtttttcacttggaggatggtgaaccctactgtgagactgattattatgccctctttggtactatatgccatggatgtgaatttcccatagaagctggtgacatgttcctggaagctctgggctacacctggcatgacacttgctttgtatgctcagtgtgttgtgaaagtttggaaggtcagacctttttctccaagaaggacaagcccctgtgtaagaaacatgctcattctgtgaatttttgaaagtcaacagttcaggagaagagaaggaatttgaagagaaaaaggaaaattaaaattactaattaatttttagattcaatatttatatggagttttgaaaaataatagtggccctgaaggaataaattccagctttaaaaaccaagtctgaggaaatatttggcttcataaagtaaagagacggtttggcatttattattactttttcctgtattttatgcccataaaataagctttataaaaaccaatttcctgatggactattaaattcatcttagaataaattagtgaagaatttaattttagaataaataatccaatctgaaataattataccttctttccttgttaggtagttatgagtaaatctgcaaaaggcaatgaaaatgccttaaattttatcaataacagaattattgtatttaaaaaaaaactaatacttatctttaaaatagtaaataggattttaaacagagaattttatcagtaataggtgtcagtttttaaaaaattgcttgtaggctgagcgcggtggctcacgcctgtaatcccagcactttgggaggccaaggtgggtggaccacatgaggtcaggagtttgagatcagcctggccaacatggtgaaaccccatctctactaaaaatacaaaaattagccggacgcagtggcacgcgcctgtaatcccagctactcaagaggctgaggcacgagaatcacttgaacccgggagggagaggttgcagtgagccaagatcgtaccactgcactccagcctgggtgacagagtgagactctgtctccaaaaaaaaactttgcttgtatattatttttgccttacagtggatcattctagtaggaaaggacaataagattttttatcaaaatgtgtcatgccagtaagagatgttatattcttttctcatttcttccccacccaaaaataagctaccatatagcttataagtctcaaatttttgccttttactaaaatgtgattgtttctattcattgtgtatgcttcatcacctatattaggcaaattccatttttttcccttgtgctaaggtaaagatttaattaaataattttggcctctcatagttttctctctctttaaagagaataaatagagggccaggtgtggtggctcacgcctgtgatcccagcactttgggaggccaagacgggcggatcatgaggtcaagagatcaagatcatcctggccaacatggtgaaaccctgtctctactaaaaatacaaaaatgagctgggcatggtggggcgtgcctgtagtcccatgtacttgggaggctgaggcaggaaaattcttgaacccaggagacggaagttgcagtgagctgagatcacaccactgcactccagcctggtgacagagcaagactccggctcttaaaaaaaaaaaaaaaaaaaaaaaaagagagagagagaataaatagaaaagaatgtggctgggaattgtgaatcagaagattataccccccaattgtttttcaatccccttttctcaaataataaattagttaaatcagtttctgagttatgccactggctgatgaagagttgagaggtctctttgcagaatgatctttttgtttcgttttgtttcttcttctgcatttaaaaattaaaagattggtttgaggatgtgatgaaattgagactttttgtggttttctctcaataataagtgaaccaatttcaaatgtgatcacaaagtttggaaagcttttattcacagaggttgggtagtgttgggaggggagtttaattactcagattggcctgttatttgatttcctcctttgggaaaagaattatgtagataccacatggagacagggaaacaattgtggtaaaactgtggatcctgttgctatttgcccagtgagaaaacagattctggtatttgatttggtttttctctttgtttccagaatggatgaaagtccatgaacctcctaagttataatttaaatttgtttggggcaaggtgattttatagtcgagacagagccctaggtccttcctgccccatcactcacttacgacatcacttccattgtgtgcatgtttgttatagaggaggttttaggctacaatatttgtttaacctccctaagaactttcaaggcatctgtcctgaaagctgttaatttatggtctagcagatttatattatatgcagataataattaactggggataaaagaatggcaaggggtgacacaaagtagcaaactgaatacttctccaatagcaaccccaagctacctcctcaccctgcatcttggagggaggcaggaaatttcttttgaaataaagtgctggagctgaattctgcattatttatcgttgctgctgaaaccacctataaaagacttgctggctaatgtgcattgtcatataatgtacactgtcacatctttacagtcttgtatgttatagaatacaaaataagttgatggttttgtttggtgtgagctttttgtttgtttgtttagttttgccttcataggttatatgccaagatagtatttgataagtcaatgacatttggatgttttcttcaaagaattttatttgacccagatttcttataaagttatcttacattaaggatgtcattttcatcagaccttctttctacatattattcatgaagcataatgttgcatttctccaaattttatgcctgaaagggtagtgttgcttcctaaggtatcatgttgtctttgtgctttgtccatctcttccgtggcgaagctttatatctgttcctaaaacagttaatcctgtgaaataaatattgaacataatccagaagaatctctctgtttcccttggggaatgccatatttaattcaccagcagtaatcctttaataactggcagagcactttattcttctggtgagctccctgaatatttatttttctgattataaattttctatattagtagcattttttaattattacttcttcactatagagcatttacttttagtctctagatgtatattttggaatgctgtacttggcataacatagattaaaatcataatgcatgactaaaaactccttggatttatttcccattttaaaatttttagcggtaagttcagatttataatctttctctagacttccatggtctgaatgttgcctgctgaagtagcaacctaaaaagtatcccctgcttatgcttgtccagttggccctccatgtccataggcttcgcatctgtgattcagcccactgtgggtcaaaaatatttggggaaaaaaatggatggttgcgcctttgctgaacatgtacaaacttttttttgtcattaaacaatatagtataacaactatttacaaagcatttacattgtattagctattataggtaatctagagatgatttaaagtgtatggtaggatgtgcataggttatatgcaaatactacaccattttctataagggacttgaacatcatggactttagtatcctagggggttcttggaacccatcacccataggggcaccataggacaactatagtaccgtgtttatttcctattaattcaggttccgtttagagtctaaaactaaaacctaatcatttagtcacagtgtaaaaacaaatggaaataacagctcaaatcttcaaaatattactatagcattatgtttaaaataatctacaacaaaaatgtaccattttcaagcagtactacattaggagcccttttatagaaaataatttcttctttacccccgttccagtgtgaatctagtattctgttaacatttgtgtggcatttggagtttgtcatccccattgaagggagagccttctcagacatgaagcaagggaaacatactgaatagttttacacaaatttgatctggcttccatttgtccccctcatttcccaaatgtttaaatgtattggatttggattctcaatgtataagttgccttatctgttaatgtctatcttctgtctctttaattttgtatatctgctgttttgcttttggatacattttctaattagaagtcacatgataaatataatcagtatagtaataataccataatgtgcacatactcaataaataaatgactgcattgttgtaaatga

SEQ ID NO: 1204 - DNA, 1941 bp, Homo sapiens
agccaggaggcggaagttcccgcgggcggtggggacggcgccctcaccgcgagtcacttgtcagcccttgtctgaggcggaggcagccccgcgccgcgccggacccgagcatatttcattttctgtcattggactttgagccattagaaccatgagcaactacagtgtgtcactggttggcccagctccttggggtttccggctgcagggcggtaaggatttcaacatgcctctgacaatctctagtctaaaagatggcggcaaggcagcccaggcaaatgtaagaataggcgatgtggttctcagcattgatggaataaatgcacaaggaatgactcatcttgaagcccagaataagattaagggttgtacaggctctttgaatatgactctgcaaagagcatctgctgcacccaagcctgagccggttcctgttcaaaagaaaacacaagtgacaaataaccctggcactgtgaaaatcccacctaaacgcccaccaagaaaacacattgtggagcgctatacagagttttatcatgtacccactcacagtgatgccagcaagaagagactgattgaggatactgaagactggcgtccaaggactggaacaactcagtctcgctctttccgaatccttgcccagatcactgggactgaacatttgaaagaatctgaagccgataatacaaagaaggcaaaggaaaagataccccttcacgtctttagtcccaaatacacaaaattacgtgactggcaccatgaagtttcagcacgtgctcttaacgtacagtgatttatgagccttgccccccaagcagccagcacataccttttcatttactttttttttttcaacttcatagcaaaatctgtattaaatttgccttatgaaaaaatagaactttttctatacttttctaacaatttcctattgttgtgagaaaaggaagatgaacatgttttgtgctagttggtagctcacaaatgtaaaaccaaaaaaaaaaaaaaatagaaaattaagggactagatctatttgtggatttgtatctgtttttgttgtgattagggtagtaatcttggaaaacgaattattttcataagttgaatttggttagttggttggttgaagcagaggataatgagcaaataaagtccttgtctaatttggaaaatactttctttatattattaacatctcccaagattactttttaagttcattattatgttacattcaaagttgattgtaaattattctaaataagtaaatataaggaggcaagaataaacaaagactttattaaagaagagtgcgtgcattgtagatttaggtatcttttaaagtaggtactattcaggatggctctatgaagaggaggaggtccagatttggctcctgaaaaaggaaagaagagaattttacccctatttgcaatggagaaatacagtattctttggtttggttggatttgcaaatcctatttcctatcaaaggaaatatctctagtggatatttttagaatatagacaatttctaggtattaactaataagatatggaaaagatagctttgctttttttaatcagaagaacataaaataaattacaatatgaatgattgtgagacatcagagaaatattttacttagtgacgtaaactactgtgcactgctgctattcctaggaagctgtgttttgggcaatacatggaagctaaatatatgaccagaaatgctttctgccttgtaatatagtgtattatatattagagctaaatttagtaataaatgcattttgaagtttggaaaagtattgtaataaagttgcctttaacttagctttgtacttgttctgtttccttgaggctagacacagtgccatccaggacttattacagtataactgggtaaaataaacaattctctgacaaaaaaaaa

SEQ ID NO: 1205 - DNA, 1680 bp, Homo sapiens
agagtgctgaaggtcctgccaacggctctcttggcgtctcaacgttcggatcagcagcttttttccattctctctctccacttcttcagtgagcagccatgagttggactgtgcctgttgtgcgggccagccagagagtgagctcggtgggagcgaatttcctatgcctggggatggccctgtgtccgcgtcaagcaacgcgcatcccgctcaacggcacctggctcttcacccccgtgagcaagatggcgactgtgaagagtgagcttattgagcgtttcacttccgagaagcccgttcatcacagtaaggtctccatcataggaactggatcggtgggcatggcctgcgctatcagcatcttattaaaaggcttgagtgatgaacttgcccttgtggatcttgatgaagacaaactgaagggtgagacgatggatcttcaacatggcagccctttcacgaaaatgccaaatattgtttgtagcaaagattactttgtcacagcaaactccaacctagtgattatcacagcaggtgcacgccaagaaaagggagaaacgcgccttaatttagtccagcgaaatgtggccatcttcaagttaatgatttccagtattgtccagtacagcccccactgcaaactgattattgtttccaatccagtggatatcttaacttatgtagcttggaagttgagtgcatttcccaaaaaccgtattattggaagcggctgtaatctggatactgctcgttttcgtttcttgattggacaaaagcttggtatccattctgaaagctgccatggatggatcctcggagagcatggagactcaagtgttcctgtgtggagtggagtgaacatagctggtgtccctttgaaggatctgaactctgatataggaactgataaagatcctgagcaatggaaaaatgtccacaaagaagtgactgcaactgcctatgagattattaaaatgaaaggttatacttcttgggccattggcctatctgtggccgatttaacagaaagtattttgaagaatcttaggagaatacatccagtttccaccataattaagggcctctatggaatagatgaagaagtattcctcagtattccttgtatcctgggagagaacggtattaccaaccttataaagataaagctgacccctgaagaagaggcccatctgaaaaaaagtgcaaaaacactctgggaaattcagaataagcttaagctttaaagttgcctaaaactaccattccgaaattattgaagagatcatagatacaggattatataacgaaattttgaataaacttgaattcctaaaagatggaaacaggaaagtaggtagagtgattttcctatttatttagtcctccagctcttttattgagcatccacgtgctggacgatacttatttacaattcctaagtatttttggtacctctgatgtagcagcacttgccatgttatatatatgtagttggcatttggttcccaaaaagtaggatgtaggtatttattgtgttctagaaattccgactcttttcattagatatatgctatttctttcattcttgctggtttatacctatgttcatttatatgctgtaaaaaagtagtagcttcttctacaatgtaaaaataaatgtacatacaaaaaaaaaaaaaa

SEQ ID NO: 1206 - DNA, 1077 bp, Homo sapiens
aaatcaaatagctatccatggaatattagaacttgacttgctccatcctcttaaactttttgtgtctcacactaaagaaatgagagatgcagaattctaaggctaaatagctaggaagtattcattcaaacttgaatattcttcaaagagagtgtgggggcaactctaatcagaggaagaaactaaaggaagtaaaaccagatgttttccaccaaagccctccttttggctggtctgatttctaccgcactggcagggccatgggctaatatatgtgctggcaagtcttccaatgagatccggacgtgtgaccgccatggctgtggacagtactctgctcaaagaagtcagaggcctcaccagggtgtggacatcttgtgctctgctggatctactgtgtacgcaccattcactggaatgattgtgggccaggagaaaccttatcaaaacaagaatgctatcaataatggtgttcgaatatctggaagaggtttttgtgtcaaaatgttctacattaagccaattaagtataaaggtcctattaagaagggagaaaaacttggaactctattgcccttgcagaaagtttatcctggcatacaatcgcatgtgcacattgaaaactgtgactcgagtgaccctactgcatacctgtaaatcgaaggccaatggtcagatcttcaaaataaaaagtcatcttaaaaacctggatgcatacccttctcttcaagaaatttgtgttcacaaaggaaaaatgcatgaagggatggataccccattttccatgacatgattattacacattgcatgcctgtatcaaaacatctcacgtacctcataaacatatacacctatgtacccacaaaaattttttaattaaaaaaaggaaatttgagtttaaatagaaacatgataaatgcaagaaagaaaacattttgattttaactcattgtcactctgatgttcatgtgaactggttgcttcgggctctttgatctgtcacctatggaatctgagtggttttattttttagatttctcagtcccaaagatctaagataaataaacaagagaactt

SEQ ID NO: 1207 - DNA, 2529 bp, Homo sapiens
gttctcgactattgccgaagtgagccgaagtttgtggccccgcttccggagaactcaagctcccgattgtgcccgaaggaacccgaagggagaccccgcctcattcctcacgccgagctccagaccccgcctcctttccagagcccgtctgttccccttcgggtccaaagcttttggctcctccttgttccgagcccgaaggcccgccccttcacgtactcggagctcggatcccagtgtggacctggactcgaatcccgttgccgactcgcgctctcggcttctgctccggggcttcttccctgcccgcccggggccctgaccgtggcttcttccccggcctgatctgcgcagcccggcgggcgcccagaaggagcaggcggcgcgggggcgcgctgggcgggggaggcgtggccggagctgcggcggcaagcgggctgggactgctcggccgcctcctgcccggcgagcagctcagaccatgtcgcctgaagaatggacgtatctagtggttcttcttatctccatccccatcggcttcctctttaagaaagccggtcctgggctgaagagatggggagcagccgctgtgggcctggggctcaccctgttcacctgtggcccccacactttgcattctctggtcaccatcctcgggacctgggccctcattcaggcccagccctgcccctgccacgccctggctctggcctggactttctcctatctcctgttcttccgagccctcagcctcctgggcctgcccactcccacgcccttcaccaatgccgtccagctgctgctgacgctgaagctggtgagcctggccagtgaagtccaggacctgcatctggcccagaggaaggaaatggcctcaggcttcagcaaggggcccaccctggggctgctgcccgacgtgccctccctgatggagacactcagctacagctactgctacgtgggaatcatgacaggcccgttcttccgctaccgcacctacctggactggctggagcagcccttccccggggcagtgcccagcctgcggcccctgctgcgccgcgcctggccggccccgctcttcggcctgctgttcctgctctcctctcacctcttcccgctggaggccgtgcgcgaggacgccttctacgcccgcccgctgcccgcccgcctcttctacatgatccccgtcttcttcgccttccgcatgcgcttctacgtggcctggattgccgccgagtgcggctgcattgccgccggctttggggcctaccccgtggccgccaaagcccgggccggaggcggccccaccctccaatgcccaccccccagcagtccggagaaggcggcttccttggagtatgactatgagaccatccgcaacatcgactgctacagcacagatttctgcgtgcgggtgcgcgatggcatgcggtactggaacatgacggtgcagtggtggctggcgcagtatatctacaagagcgcacctgcccgttcctatgtcctgcggagcgcctggaccatgctgctgagcgcctactggcacggcctccacccgggctactacctgagcttcctgaccatcccgctgtgcctggctgccgagggccggctggagtcagccctgcgggggcggctgagcccagggggccagaaggcctgggactgggtgcactggttcctgaagatgcgcgcctatgactacatgtgcatgggcttcgtgctgctctccttggccgacacccttcggtactgggcctccatctacttctgtatccacttcctggccctggcagccctggggctggggctggctttaggtgggggcagccccagccggcggaaggcagcatcccagcccaccagccttgccccggagaagctccgggaggagtaagctgtcacgacgctccctctgccagctggtcccgggaattctgtgaaccaggctgctgtctcctccccagaaagagtccttaccttggagagggtcctggagagaatttcctcttccccagctaaataccctgcctgcaactgaagcagacccgggggtgtcctccctgccctctgcccagaggccacctccactcctacaaaatcaaagtattgtccagacaagagtcactggcccctgctccagcttctgggtatccagagagcactgcacttccccaaaacggaaggggcccctgggcagtgggttttgggcaaattccctttctttgcatccacaatgtggggtcggagcttgggggcaggtcctgggagtgggaagcctcttccttgtgtctttcgctccacttttagctcatcgcaccaatattgcagacttggaaggaagcataagcttcccatttcacaaaggggaaactgaggtgcgggtgcgcgggcctggggacggccgtcccatggcttccatctgagccacctcgggaccccagcgctcctggcgccctcttctcatcgcttggcctatgacaggtcaccgtgtgtaaatctttcccaataaagtgttgcacaaag

SEQ ID NO: 1208 - DNA, 1368 bp, Homo sapiens
ctcgactgcgaattactgtttatgaggtgactcgctggttctatcggtggacagtgggacattctgaagggaggcaaggaggcggactgagcgctcccaattggggaggatgctggtggtggaggtggcgaacggccgctccctggtgtggggagccgaggcggtgcaggccctccgggagcgcctgggtgtggggggccgcacggtaggcgccctgccccgcgggccccgccagaactcgcgcctgggcctcccgctgctgctgatgcccgaagaggcgcggctcttggccgagatcggcgccgtgactctggtcagcgccccgcgtccagactctcggcaccacagcctggccctgacatccttcaagcgccagcaagaggagagcttccaggagcagagcgccttggcagctgaggcccgggagacccgtcgtcaggagctcctggagaagattacggagggccaggctgctaagaagcagaaactagaacaggcttcaggggccagctcaagccaggaggccggctcgagccaggctgccaaagaggatgagaccagtgatggccaggcttcgggagagcaggaggaagctggcccctcgtcttcccaagcaggaccctcaaatggggtagcccccttgcccagatctgctctccttgtccagctggccactgccaggcctcgaccggtcaaggccaggcccctggactggcgtgtccagtctaaagactggccccacgccggccgccctgcccacgagctgcgctacagtatctacagagacctgtgggagcgaggcttcttcctcagtgcggctggcaagttcggaggtgacttcctggtctatcctggtgaccccctccgcttccacgcccattatatcgctcagtgctgggcccccgaggacaccatcccactccaagacctggttgctgctgggcgccttggaaccagcgtcagaaagaccctgctcctctgttctccgcagcctgatggtaaggtggtctacacctccctgcaatgggccagcctgcagtgaactccagagacctaggggatgtggctgtgtcggcagcaagagcctttctggatgttccccagctcttctctgggagtctagaacatcctcctacctttctccgcggttagtttttgattccaggttttcgaacactacatcttttttatgttcttccttgtttcaaagcacttattggctgtgtttttgtagttacctattttcacactgtgagcttcccgagaatggggcctgggtttgattcatctgttttctacagggtttaagtctcaggaggtctcaataaacttggtatataaatgttcatgaaaaaaaaaaaaaaaaaa

SEQ ID NO: 1209 - DNA, 2701 bp, Homo sapiens
ccgccgtagcgcgtcttgggtctcccggctgccgctgctgccgccgccgcctcgggtcgtggagccaggagcgacgtcaccgccatggcaggcatcaaagctttgattagtttgtcctttggaggagcaatcggactgatgtttttgatgcttggatgtgcccttccaatatacaacaaatactggcccctctttgttctatttttttacatcctttcacctattccatactgcatagcaagaagattagtggatgatacagatgctatgagtaacgcttgtaaggaacttgccatctttcttacaacgggcattgtcgtgtcagcttttggactccctattgtatttgccagagcacatctgattgagtggggagcttgtgcacttgttctcacaggaaacacagtcatctttgcaactatactaggctttttcttggtctttggaagcaaggacgacttcagctggcagcagtggtgaaaagaaattactgaactattgtcaaatggacttcctgtcatttgttggccattcacgcacacaggagatggggcagttaatgctgaatggtatagcaagcctcttgggggtattttaggtgctcccttctcacttttattgtaagcatactattttcacagagacttgctgaaggattaaaaggattttctcttttggaaaagcttgactgatttcacacttatctatagtatgctttttgtggtgtcctgctgaatttaaatatttatgtgtttttcctgttaggttgattttttttggaatcaatatgcaatgttaaacacttttttaatgtaatcatttgcattggttaggaattcagaattccgccggctctattactggtcaagtacatcttttctcttaaaattatttagcctccattattacaaaaaattataaaaataagttttcagtcagtcaggatgacatcactcccaatgttatgcagacatacagacggttggcatacgttatagactgtatactcagtgcaaatatagctgcatttatacctcagaggggccaagtgttaatgcccatgccctccgttaagggttgttggttttactggtagacagatgttttgtggattgaaaattattttatggaattgctacagaggagtgcttttcttctcaattgttagaagaatttatgttaaactttaaggtaagggtgtaaaaacatttttgagataaggtttttatttatgtttattattgttagagtgagttgcaatgtgggaagaaatgacattgaaattccagtttttgaatcctgtttctatttataagtgaaatttgtgatctcctatcaacctttcatgttttaccctgttaaaatggacatacatggaaccactactgatgagggacagttgtatgtttgcatcatatatgccagaaaaccttcctctgcttcctccttttgacttatttggtatgttgtatatattacataaaataacttttcaaatatagtttaataacacttagaagtgtttacttacctggaaaataattgctatgccgtacattcagagtgccccctcccctgcaaggccttgccatgattaacaagtaacttgttagtcttacagataattcatgcattaacagtttaagatttagaccatggtaatagtagttcttattctctaaggttatatcatatgtaatttaaaagtatttttaagccaagtttcctgtatacctctgaactgttttgattttgagttcatcatgatagatctgctgtttccttataaaaggcatttgttgtgtgagttaatgcaaagtagccaagtccagctatatagcagcttcagaaacatacctgaccaaaaaattcccagtaaccaggcatgatcaatttatagtggtcgtttacatctaataattatcaggacttttttcaggagtgggttataaaaacattcaagttggtctgacagtattttgttaaggatatttgtttgtatgtttattcagtatacttacataaaaattatttcgccatcagccaaaactcagtaatcatgacagctgtctgttgttttatgaagtttatttctcaagaaaatgggaataaatttgggatttgttcagcttttttactaaagatgcctaaagccacaggttttattgcctaacttaagccatgacttttagatatgagatgacgggaagcaggacgaaatatcggcgtgtggctggagccttcccactggaggctgaaagtggcttgtggtattataatgttcagatttcaagaggaaggtgcaggtacacatgagttagagagctggtgagacagttgggaactctttgtgcttgtgatctactggactttttttttgcaggaagtgcattctctggtccttccctattttctgttctggatgtcagtgcagtgcactgctactgttttatccacttggccacagactttttctaacagctgcgtattatttctatatactaattgcattggcagcattgtgtctttgaccttgtatactagcttgacatagtgctgtctctgatttctaggctagttacttgagatatgaattttccatagaatatgcactgatacaacattaccattcttctatggaaagaaaacttttgatgatgaaacaataaagattttaaatatcaaaaaaaaaaaaaaaaaa

SEQ ID NO: 1210 - DNA, 1631 bp, Homo sapiens
agcttgggggtcccgggaaggagctgggaggacctaggcggccgttccgcggagcccggccgaggaggtccctatgttaactacttgagacaaaaataaatatggccttctacagttataattcagttctggctattgctcgaacaagattcccatttaaataagacatgtatgaagaactatgagagcaagaagtactcggatcctagtcagccaggcaatacagtacttcacccaggaactagactaatacaaaagctacacacatccacttgctggctgcaagaagttcctggcaaacctcagctggagcaagccacaaaacatccacaggtgacaagccctcaggccacaaaagaaactggcatggagattaaagaaggcaaacaatcttatagacaaaaaatcatggatgaactaaaatattattacaatggattctacttactttggattgacgccaaagttgctgccagaatggtttggaggctgttgcatggacaggtcctgaccagacgagagagacgaagggaagaaaaacagaaaaagaaaatggctgtaaagttggaactagcaaaatttcttcaagaaaccatgacagaaatggcaaggaggaacagagccaagatgggcgatgcctctacacagctctcatcctacgtgaagcaggtccagacaggccacaagcccagcacaaaggagatagttcgcttctccaaactatttgaggaccagctggccctggaacacttagatcgccctcagctggttgccctttgcaaactgctggaattgcagacatttggaaccaacaacctgctccgctttcagctcctgatgaaactgaagtctataaaagcagatgatgaaataattgccaaggaaggggtgacagcattgagtgtatcagaactacaggctgcctgtagggcccgagggatgagatcactgggtctcacggaggaacaactgcgacaacagctcacggagtggcaggacctccacctgaaggagaacgtccctccttcccttttgctcctgtcccgcaccttctacctgatagatgtgaagcccaagccgattgagataccactcagtggggaggctccaaagactgatattcttgtggaattacctactttcactgaatctaaagagaacatggtggatcttgcacctcaactgaagggaactaaggatgaagactttatacagccgccaccagttacatcatcacccataacaccatcaacacctatttcattacctaaaggacccatcacttcttctgaagaacctacactccaggccaaatcacaaatgacggcccagaacagcaaggctagttcaaaaggagcataaaggactacttgaggatggagctcactctcttcagcttccggccctcaacagtggcatctgtaaaggacctcccagataagactgtctggcttcagagagcggatcagctgtttagcccgtggggcagtcctttgaggcctggtaaccattccaggtgatgtgggtagtgagaccaagttcagaccacttagaaaaatataattgcaaagtcccatttcctctgtaccattgtcaccccactcaactttgtataaagcccaccccccatc

SEQ ID NO: 1211 - DNA, 610 bp, Homo sapiens
actggactcaattctgaaggtcgccaagaaggagagaacaatgtcttctttacccgtgccatacaaactgcctgtgtctttgtctgttggttcctgcgtgataatcaaagggacaccaatccactcttttatcaatgacccacagctgcaggtggatttctacactgacatggatgaggattcagatattgccttccgtttccgagtgcactttggcaatcatgtggtcatgaacaggcgtgagtttgggatatggatgttggaggagacaacagactacgtgccctttgaggatggcaaacaatttgagctgtgcatctacgtacattacaatgagtatgagataaaggtcaatggcatacgcatttacggctttgtccatcgaatcccgccatcatttgtgaagatggtgcaagtgtcgagagatatctccctgacctcagtgtgtgtctgcaattgagggagatgatcacactcctcattgttgaggaatccctctttctacctgaccatgggattcccagaacctgctaacagaataatccctgctcacattttcccctacactttgtcattaaaacagcacgaaaactcaaaaaaaaaaaaaaaa

SEQ ID NO: 1212 - DNA, 3285 bp, Homo sapiens
cgcgcgcccccgccgcccgcgccgcagtccgcagccacccggcgcggtcagccccggctgcggctccagctccgcgctccgctcttctctcccgagccggatcgcgggagcgagcaggggaggggaccgcagccggcgcccgagggcaggaggagtccgcaggcgggcccctggctgcggtagcagctgccggtggcagggaggtgccagcccgcgcggggtggcccagccgcgggagcggtggggcgggggccgcggccgccggccccagggagagatcgcgggcagcatggcggggctgcgggccagggggggcccggggccggggctgctggcgctctccgcgctcggcttctgcctcatgctgcaagtcagcgctaagaggccccccaagacgcccccctgcccgcccagctgctcttgcaccagggacaccgccttctgcgtggactcaaaggcggtgcccaggaacctgccctcggaggtcatctccctgaccctggtgaatgccgccttctcagagatccaggatggagcgttctcccacctcccgctgctgcagttcttgttactcaactccaacaagtttacactgattggagacaacgccttcacaggactgtcgcacctgcagtatctcttcattgagaacaatgacatctgggcactatccaagttcaccttccgaggactcaagtccttgactcacctctcgctggccaacaataacctgcagacactgcccagagacatcttccggcccctggacatcctgaatgacttggacctgcggggcaactcactcaactgtgactgcaaggtgaagtggttggtggagtggctggcacacaccaacaccacggtggcacccatctactgcgccagcccgccccgcttccaggagcacaaggtgcaggacctgccgctgcgggagttcgattgcatcaccacagattttgtgttgtaccagaccctggccttcccagcagtgtcggctgagcccttcctctactccagtgacctctatttggctctggcccagccaggagtcagtgcctgcaccatcctgaagtgggactatgttgagcggcagcttcgagactatgatagaatcccagccccctctgcagtgcactgcaagccgatggtggtggacagccagctgtacgtggtcgtggcccagctgtttggcggctcttacatttaccactgggatcccaacaccacgcgcttcaccaggctgcaagacattgacccgcagcgcgtgcgcaagcctaacgacctagaagccttccgcatcgacggtgactggtactttgccgtggctgacagctccaaggcaggcgccaccagcctctaccgctggcaccagaatggcttctactcccaccaggcactgcacccctggcaccgtgacaccgacctggagtttgtggacggcgagggcaagccacggctgattgtgtccagcagctcccaggcacccgtcatctatcagtggagtcgcacccagaagcagtttgtggcccagggtgaggtgacccaggtgcctgatgcccaagctgtgaaacactttcgtgccggccgcgacagctacctgtgcctcagccgctacattggcgactccaagatcctgcgctgggagggtacccgcttctcggaggtgcaggccctgccctcccggggctcgctggccctgcagcccttccttgtgggtggccgccgctacctggcactgggcagtgatttctccttcacccagatctaccagtgggatgagggacgacagaagtttgtacggttccaggagctggctgtgcaggctcctcgggccttctgctacatgcctgctggggacgcccagctactcctggcccccagcttcaagggacagacgctggtgtatagacacattgtggtggatctcagtgcctagggggtgccgaggcctctggtctcctcagggtggccactggaggatgggtgggggcctctgtgagcaccacgtatgcctgtgtgaagacaagcgaccaacctgcattcatgcccttgtatccgcacacgcccagtgtgtacaggcgcaccccgtggactggcccaggaggacgtgcatcatcactgcaatcagcatgaacaccaggcacccctgggacacctaacgcccagttcccgtgaccccaactgcaggccccccctactctgcagcctttcccatgctctgccccctgtctcatgcacgagtggtgcggggtgctgggagcgaggggggccgcatcctcctgtccttgtgcttctccttctgcccctctggtctttcctgttggtgctccaggcattgtttacctgctcttgctccccgctgtagcccacagccatatctgtcatgcttccccggggccactcacccctgccccaccccgtctgcatgctcacatggacgcggacggacacactcattacacactcacacgccccgactgcacccggtgtccatctataaacatgtcagggcacgtgtgcatacaagcagattcagcactgcctaccaggctctcctgttaccttgcctctctgcttggagggggccccctctgctcacccccagcgtgccccccccggaactgataaggatgagaatggtggtgccagcttctgagggcctgcttggcctcctgggggcaaagcccctctgcccgaagcaataacaacagcagcagaagcaatcccggggagctgccaggggtgtctgtctctgttctccttggcgtttccttcatggccgtgaatcccagctcacccatggacagaagacctcccctcatctgaaagcctttctgccttccttcctgtagctgtcgctttctcaggcttggactgtcccctggttcaccctgtctttgggatgtggcccttgagctgggcgggctccttgggtggattagagagctggccgagctgcaagcacctgagttacctgcgagggtgcccagagtggagcttggcctgagggcgtgttgcagccctggccccaccagtccacagaggcccccaggagcactgcctttcagtggaccgggtgggggctggtgggaggggccccactagctgagcttctgctgccctctgctgtctgctgagatgccaggctagtggagagggcacaccatgtgcccaaatggtgtgatgctccttgtagcaggataccagggtactggggggcaatgctatgattaacttgcttcaaataaaaagttcccgccccataaaaaaaaaaaaaaaaaaaaa

SEQ ID NO: 1213 - DNA, 2649 bp, Homo sapiens
cttttcttttttttttgacagggtctcactctgttgcccaagctggggtgcagtggcacgatcttggctcactgtagccttgacatcctgggctcaagggatcctcccatctcagcctcccaagtagctgcgactatgggtgtgacaccacgctgggctagtttttcaattttttgtagagatggagtctccctatgttgctcaggccggttgcgaactcctgggctcaagtgattctcctgcctcagcctcccaaagtgctgggattacagatgatagccacctcacccggcccacccctaccttctgaaagaggcattcttattcttattcccattttgcagatcaggaaacagagctcagtgcagcccactaaattgctcagggccctacagctaacaagcggcagaggcaggatctgcactcaggagctgcttggagatgctgctgtggccactgctgctgctgctgctgctgctgccaacattggccctgctcaggcagcagcggtcccaggatgccaggctgtcctggcttgctggcctccagcaccgagtggcatggggggccctggtctgggcagccacctggcagcgccggaggctggagcagagcacgctccatgtgcaccagagccagcagcaggccctgaggtggtgtctacagggagcccagcgcccccactgttccctcagaaggagcacagacataagcaccttccggaatcatctccctctgaccaaggccagccagacccagcaggaagacagtggagagcagccactgcccccgacctcaaaccaggaccttggggaggcctctctgcaggccaccttgctgggtctggcagccctaaacaaggcctacccagaagtgctggctcagggacgcactgcccgtgtgacgctcacatccccttggccccgacccctgccttggcctgggaataccctgggccaggtgggcacccctggaaccaaggaccctagggccctgctgctggacgcactgaggtccccagggctgagggcactggaggctgggacggctgtcgaacttctggatgttttcttgggcctggagactgatggtgaagagctagctggggcgatagctgccgggaaccctggagcgcctctccgtgaacgggcagctgagctccgggaggccctagagcaggggccacggggactggcccttcggctctggccaaagctgcaggtggtggtgactctggatgcaggaggccaggccgaggctgtggctgccctcggggccttgtggtgccaaggactagccttcttctctcctgcttatgctgcctcgggaggggtgctgggcctaaacctacagccagagcagccccatgggctctaccttctgccccctggggccccctttatcgagctgctcccagtcaaggaaggcacccaggaggaagctgcctccaccctccttttggccgaggcccagcagggcaaggagtatgagctggtgctgacggaccgcgccagcctcaccaggtgccgcctgggtgatgtggtgcgagtggttggtgcctacaatcagtgtccagtcgtcaggttcatctgcaggctggaccagaccctgagtgtgcgaggggaagatattggtgaagacctgttctctgaggccctgggccgggcagtggggcagtgggcgggggccaagctgctggaccatggctgtgtggagagcagcattctggattcctctgcgggctctgctccccactacgaggtgtttgtggcgctgagggggctgaggaatctgtcagaggaaaatcgagacaagctggaccactgccttcaggaagcctctccccgctacaagtccctgcggttctggggcagcgtgggccctgccagagtccacctggtggggcagggagccttccgagcactccgggcagccctcgctgcctgcccctcctcccccttcccccctgcgatgccccgggtccttcggcacaggcacctggcccagtgtctgcaggagagggtggtgtcctgagtcaagtcctgccccaccgcccagctccccccagaggccacctcgcccctccctctgggacctctccggatggggagtccttggccagggtctctgactctgtgtcacctgacatttgcccatgagagccgctgggccttagagaggccttggcccagctgaccggttctgaagtatgggcctccggggttagcagatgccagcagtgcctgcccgtgtccccatgtcccggcatgaaggacactgctagagagttaccatgcacaccgatggtttcctgtatcacagcccaaagaggttctctggtggccacagctgtgtgctcagtcagtgcactgggcaagctagaagtgttggggggttaatgtccccaggagcagcaaccctgagtcaataaggagcaggacctcagcttcattgtccttgagcaggacaattctgaagtgtattctacataaactctcagaggatgcccagcaggatggagtcccagttgcccgcagcagtaacccactcattcatgtacttcctgcgggggctctcccttccctctcttccccactcccccgccttgggcttcctgggatggctcccaaataaacctcttgcacccag

SEQ ID NO: 1214 - DNA, 4115 bp, Homo sapiens
ccacagcgctgtagactgcgccgcattagaagcctggcctcctgatgctgtgctcttcatctagacccaagccccaggtcgtgggacgatttctcccgtttttgactccctggaactgtattgcctgctttacctgcgtacatgttgattctttctcatggcaaccccgcaggaaaccatcaagatctcattttacagctgggattctctggttcacagaggtaacggagcttgcccgaggccagttaaacgagaagattcatcaccgctttgatggctgcctcacaaacttcacaaactgttgcatctcacgttccttttgcagatttgtgttcaactttagaacgaatacagaaaagtaaaggacgtgcagaaaaaatcagacacttcagggaatttttagattcttggagaaaatttcatgatgctcttcataagaaccacaaagatgtcacagactctttttatccagcaatgagactaattcttcctcagctagaaagagagagaatggcctatggaattaaagaaactatgcttgctaagctttatattgagttgcttaatttacctagagatggaaaagatgccctcaaacttttaaactacagaacacccactggaactcatggagatgctggagactttgcaatgattgcatattttgtgttgaagccaagatgtttacagaaaggaagtttaaccatacagcaagtaaacgaccttttagactcaattgccagcaataattctgctaaaagaaaagacctaataaaaaagagccttcttcaacttataactcagagttcagcacttgagcaaaagtggcttatacggatgatcataaaggatttaaagcttggtgttagtcagcaaactatcttttctgtttttcataatgatgctgctgagttgcataatgtcactacagatctggaaaaagtctgtaggcaactgcatgatccttctgtaggactcagtgatatttctatcactttattttctgcatttaaaccaatgctagctgctattgcagatattgagcacattgagaaggatatgaaacatcagagtttctacatagaaaccaagctagatggtgaacgtatgcaaatgcacaaagatggagatgtatataaatacttctctcgaaatggatataactacactgatcagtttggtgcttctcctactgaaggttctcttaccccattcattcataatgcattcaaagcagatatacaaatctgtattcttgatggtgagatgatggcctataatcctaatacacaaactttcatgcaaaagggaactaagtttgatattaaaagaatggtagaggattctgatctgcaaacttgttattgtgtttttgatgtattgatggttaataataaaaagctagggcatgagactctgagaaagaggtatgagattcttagtagtatttttacaccaattccaggtagaatagaaatagtgcagaaaacacaagctcatactaagaatgaagtaattgatgcattgaatgaagcaatagataaaagagaagagggaattatggtaaaacaacctctatccatctacaagccagacaaaagaggtgaagggtggttaaaaattaaaccagagtatgtcagtggactaatggatgaattggacattttaattgttggaggatattggggtaaaggatcacggggtggaatgatgtctcattttctgtgtgcagtagcagagaagccccctcctggtgagaagccatctgtgtttcatactctctctcgtgttgggtctggctgcaccatgaaagaactgtatgatctgggtttgaaattggccaagtattggaagccttttcatagaaaagctccaccaagcagcattttatgtggaacagagaagccagaagtatacattgaaccttgtaattctgtcattgttcagattaaagcagcagagatcgtacccagtgatatgtataaaactggctgcaccttgcgttttccacgaattgaaaagataagagatgacaaggagtggcatgagtgcatgaccctggacgacctagaacaacttagggggaaggcatctggtaagctcgcatctaaacacctttatataggtggtgatgatgaaccacaagaaaaaaagcggaaagctgccccaaagatgaagaaagttattggaattattgagcacttaaaagcacctaaccttactaacgttaacaaaatttctaatatatttgaagatgtagagttttgtgttatgagtggaacagatagccagccaaagcctgacctggagaacagaattgcagaatttggtggttatatagtacaaaatccaggcccagacacgtactgtgtaattgcagggtctgagaacatcagagtgaaaaacataattttgtcaaataaacatgatgttgtcaagcctgcatggcttttagaatgttttaagaccaaaagctttgtaccatggcagcctcgctttatgattcatatgtgcccatcaaccaaagaacattttgcccgtgaatatgattgctatggtgatagttatttcattgatacagacttgaaccaactgaaggaagtattctcaggaattaaaaattctaacgagcagactcctgaagaaatggcttctctgattgctgatttagaatatcggtattcctgggattgctctcctctcagtatgtttcgacgccacaccgtttatttggactcgtatgctgttattaatgacctgagtaccaaaaatgaggggacaaggttagctattaaagccttggagcttcggtttcatggagcaaaagtagtttcttgtttagctgagggagtgtctcatgtaataattggggaagatcatagtcgtgttgcagattttaaagcttttagaagaacttttaagagaaagtttaaaatcctaaaagaaagttgggtaactgattcaatagacaagtgtgaattacaagaagaaaaccagtatttgatttaaagctaggtttcctagtgaggaaagcctctgatctggcagactcattgcagcaggtggtaatgataaaatactaaactacattttatttttgtatcttaaaaatctatgcctaaaaagtatcattacatataggaaaacaataattttaacttttaaggttgaaaagacaatagcccaaagccaagaaagaaaaattatcttgaatgtagtattcaatgattttttatgatcaaggtgaaataaacagtctaaagaagaggtgtttttataatatccatatagaaatctagaatttttacttagatactaataaaatacatttagaaacttttaaagtcatgaaaaagcattaaccttctaaacagtatattctaaaaagtcaaaacgttaacaatagtttttatctaataaaagcactgcaagaaaatagggtagaattgttacagctggacttgtaaaaatatgtctttttactcagggtttaaaatgtcccatttaaatatgaaatgtaaacaaatttgttttttaaggttaaggccaaatgtaacaataaaaccctgtcgatggttttagctaaattagaggaagttgtatgagacttaatgatctaaaaacttaaaattgaattggtttgattaaaaataaagcttgcaattttaaaagtagctcacatttaatttcttgtgtgaaatagaacatgctttaaaggaagtatttttatgtgaatttgcattccagtataaatagtattcacaaaaaagattttcctagattttatctattgaataggtgtcaatatggcatgcatattgtaactttcattagaaataagttgctttgacttttaaaaatgacatagttagattatttaaagtcaatgtatatagtatatattatgtatggatttatataccaaattttggaatacagcctatctcatgaccatattgaaatgtacggaatttgatccatgcgatactatgtgtgcattatttgaaagttattggaaattttattcaaaccgtggaacaaatgtatgtgattttgttatacttcttaatttaaataaaatatttaatgcactattaaaaaaaaaaaaaaaaaaa

SEQ ID NO: 1215 - DNA, 3994 bp, Homo sapiens
cttctggcgccagcttccggcttagcggctgagcttcaggcttgacgtcaggaaaccatcaagatctcattttacagctgggattctctggttcacagaggtaacggagcttgcccgaggccagttaaacgagaagattcatcaccgctttgatggctgcctcacaaacttcacaaactgttgcatctcacgttccttttgcagatttgtgttcaactttagaacgaatacagaaaagtaaaggacgtgcagaaaaaatcagacacttcagggaatttttagattcttggagaaaatttcatgatgctcttcataagaaccacaaagatgtcacagactctttttatccagcaatgagactaattcttcctcagctagaaagagagagaatggcctatggaattaaagaaactatgcttgctaagctttatattgagttgcttaatttacctagagatggaaaagatgccctcaaacttttaaactacagaacacccactggaactcatggagatgctggagactttgcaatgattgcatattttgtgttgaagccaagatgtttacagaaaggaagtttaaccatacagcaagtaaacgaccttttagactcaattgccagcaataattctgctaaaagaaaagacctaataaaaaagagccttcttcaacttataactcagagttcagcacttgagcaaaagtggcttatacggatgatcataaaggatttaaagcttggtgttagtcagcaaactatcttttctgtttttcataatgatgctgctgagttgcataatgtcactacagatctggaaaaagtctgtaggcaactgcatgatccttctgtaggactcagtgatatttctatcactttattttctgcatttaaaccaatgctagctgctattgcagatattgagcacattgagaaggatatgaaacatcagagtttctacatagaaaccaagctagatggtgaacgtatgcaaatgcacaaagatggagatgtatataaatacttctctcgaaatggatataactacactgatcagtttggtgcttctcctactgaaggttctcttaccccattcattcataatgcattcaaagcagatatacaaatctgtattcttgatggtgagatgatggcctataatcctaatacacaaactttcatgcaaaagggaactaagtttgatattaaaagaatggtagaggattctgatctgcaaacttgttattgtgtttttgatgtattgatggttaataataaaaagctagggcatgagactctgagaaagaggtatgagattcttagtagtatttttacaccaattccaggtagaatagaaatagtgcagaaaacacaagctcatactaagaatgaagtaattgatgcattgaatgaagcaatagataaaagagaagagggaattatggtaaaacaacctctatccatctacaagccagacaaaagaggtgaagggtggttaaaaattaaaccagagtatgtcagtggactaatggatgaattggacattttaattgttggaggatattggggtaaaggatcacggggtggaatgatgtctcattttctgtgtgcagtagcagagaagccccctcctggtgagaagccatctgtgtttcatactctctctcgtgttgggtctggctgcaccatgaaagaactgtatgatctgggtttgaaattggccaagtattggaagccttttcatagaaaagctccaccaagcagcattttatgtggaacagagaagccagaagtatacattgaaccttgtaattctgtcattgttcagattaaagcagcagagatcgtacccagtgatatgtataaaactggctgcaccttgcgttttccacgaattgaaaagataagagatgacaaggagtggcatgagtgcatgaccctggacgacctagaacaacttagggggaaggcatctggtaagctcgcatctaaacacctttatataggtggtgatgatgaaccacaagaaaaaaagcggaaagctgccccaaagatgaagaaagttattggaattattgagcacttaaaagcacctaaccttactaacgttaacaaaatttctaatatatttgaagatgtagagttttgtgttatgagtggaacagatagccagccaaagcctgacctggagaacagaattgcagaatttggtggttatatagtacaaaatccaggcccagacacgtactgtgtaattgcagggtctgagaacatcagagtgaaaaacataattttgtcaaataaacatgatgttgtcaagcctgcatggcttttagaatgttttaagaccaaaagctttgtaccatggcagcctcgctttatgattcatatgtgcccatcaaccaaagaacattttgcccgtgaatatgattgctatggtgatagttatttcattgatacagacttgaaccaactgaaggaagtattctcaggaattaaaaattctaacgagcagactcctgaagaaatggcttctctgattgctgatttagaatatcggtattcctgggattgctctcctctcagtatgtttcgacgccacaccgtttatttggactcgtatgctgttattaatgacctgagtaccaaaaatgaggggacaaggttagctattaaagccttggagcttcggtttcatggagcaaaagtagtttcttgtttagctgagggagtgtctcatgtaataattggggaagatcatagtcgtgttgcagattttaaagcttttagaagaacttttaagagaaagtttaaaatcctaaaagaaagttgggtaactgattcaatagacaagtgtgaattacaagaagaaaaccagtatttgatttaaagctaggtttcctagtgaggaaagcctctgatctggcagactcattgcagcaggtggtaatgataaaatactaaactacattttatttttgtatcttaaaaatctatgcctaaaaagtatcattacatataggaaaacaataattttaacttttaaggttgaaaagacaatagcccaaagccaagaaagaaaaattatcttgaatgtagtattcaatgattttttatgatcaaggtgaaataaacagtctaaagaagaggtgtttttataatatccatatagaaatctagaatttttacttagatactaataaaatacatttagaaacttttaaagtcatgaaaaagcattaaccttctaaacagtatattctaaaaagtcaaaacgttaacaatagtttttatctaataaaagcactgcaagaaaatagggtagaattgttacagctggacttgtaaaaatatgtctttttactcagggtttaaaatgtcccatttaaatatgaaatgtaaacaaatttgttttttaaggttaaggccaaatgtaacaataaaaccctgtcgatggttttagctaaattagaggaagttgtatgagacttaatgatctaaaaacttaaaattgaattggtttgattaaaaataaagcttgcaattttaaaagtagctcacatttaatttcttgtgtgaaatagaacatgctttaaaggaagtatttttatgtgaatttgcattccagtataaatagtattcacaaaaaagattttcctagattttatctattgaataggtgtcaatatggcatgcatattgtaactttcattagaaataagttgctttgacttttaaaaatgacatagttagattatttaaagtcaatgtatatagtatatattatgtatggatttatataccaaattttggaatacagcctatctcatgaccatattgaaatgtacggaatttgatccatgcgatactatgtgtgcattatttgaaagttattggaaattttattcaaaccgtggaacaaatgtatgtgattttgttatacttcttaatttaaataaaatatttaatgcactattaaaaaaaaaaaaaaaaaaa

SEQ ID NO: 1216 - DNA, 3332 bp, Homo sapiens
gcgccgagccggtttccccgccggtgtccgagaggcgcccccggcccggcccggcccggcccgcgccctccgcccccgcctccccgggccggcggcggtgggcgagctcgcgggcccggccgcccccagccccagccccgccgggccccgccccccgtcgagtgcatgaggttgacgctactttgttgcacctggagggaagaacgtatgggagaggaaggaagcgagttgcccgtgtgtgcaagctgcggccagaggatctatgatggccagtacctccaggccctgaacgcggactggcacgcagactgcttcaggtgttgtgactgcagtgcctccctgtcgcaccagtactatgagaaggatgggcagctcttctgcaagaaggactactgggcccgctatggcgagtcctgccatgggtgctctgagcaaatcaccaagggactggttatggtggctggggagctgaagtaccaccccgagtgtttcatctgcctcacgtgtgggacctttatcggtgacggggacacctacacgctggtggagcactccaagctgtactgcgggcactgctactaccagactgtggtgacccccgtcatcgagcagatcctgcctgactcccctggctcccacctgccccacaccgtcaccctggtgtccatcccagcctcatctcatggcaagcgtggactttcagtctccattgaccccccgcacggcccaccgggctgtggcaccgagcactcacacaccgtccgcgtccagggagtggatccgggctgcatgagcccagatgtgaagaattccatccacgtcggagaccggatcttggaaatcaatggcacgcccatccgaaatgtgcccctggacgagattgacctgctgattcaggaaaccagccgcctgctccagctgaccctcgagcatgaccctcacgatacactgggccacgggctggggcctgagaccagccccctgagctctccggcttatactcccagcggggaggcgggcagctctgcccggcagaaacctgtcttgaggagctgcagcatcgacaggtctccgggcgctggctcactgggctccccggcctcccagcgcaaggacctgggtcgctctgagtccctccgcgtagtctgccggccacaccgcatcttccggccgtcggacctcatccacggggaggtgctgggcaagggctgcttcggccaggctatcaaggtgacacaccgtgagacaggtgaggtgatggtgatgaaggagctgatccggttcgacgaggagacccagaggacgttcctcaaggaggtgaaggtcatgcgatgcctggaacaccccaacgtgctcaagttcatcggggtgctctacaaggacaagaggctcaacttcatcactgagtacatcaagggcggcacgctccggggcatcatcaagagcatggacagccagtacccatggagccagagagtgagctttgccaaggacatcgcatcagggatggcctacctccactccatgaacatcatccaccgagacctcaactcccacaactgcctggtccgcgagaacaagaatgtggtggtggctgacttcgggctggcgcgtctcatggtggacgagaagactcagcctgagggcctgcggagcctcaagaagccagaccgcaagaagcgctacaccgtggtgggcaacccctactggatggcacctgagatgatcaacggccgcagctatgatgagaaggtggatgtgttctcctttgggatcgtcctgtgcgagatcatcgggcgggtgaacgcagaccctgactacctgccccgcaccatggactttggcctcaacgtgcgaggattcctggaccgctactgccccccaaactgccccccgagcttcttccccatcaccgtgcgctgttgcgatctggaccccgagaagaggccatcctttgtgaagctggaacactggctggagaccctccgcatgcacctggccggccacctgccactgggcccacagctggagcagctggacagaggtttctgggagacctaccggcgcggcgagagcggactgcctgcccaccctgaggtccccgactgagccagggccactcagctgcccctgtccccacctctggagaatccacccccaccagattcctccgcgggaggtggccctcagctgggacagtggggacccaggcttctcctcagagccaggccctgacttgccttctcccaccccgtggaccgcttcccctgccttctctctgccgtggcccagagccggcccagctgcacacacacaccatgctctcgccctgctgtaacctctgtcttggcagggctgtcccctcttgcttctccttgcatgagctggagggcctgtgtgagttacgcccctttccacacgccgctgccccagcaaccctgttcacgctccacctgtctggtccatagctccctggaggctgggccaggaggcagcctccgaaccatgccccatataacgcttgggtgcgtgggagggcgcacatcagggcagaggccaagttccaggtgtctgtgttcccaggaaccaaatggggagtctggggcccgttttccccccagggggtgtctaggtagcaacaggtatcgaggactctccaaacccccaaagcagagagagggctgatcccatggggcggaggtccccagtggctgagcaaacagccccttctctcgctttgggtcttttttttgtttctttcttaaagccactttagtgagaagcaggtaccaagcctcagggtgaagggggtcccttgagggagcgtggagctgcggtgccctggccggcgatggggaggagccggctccggcagtgagaggataggcacagtggaccgggcaggtgtccaccagcagctcagcccctgcagtcatctcagagccccttcccgggcctctcccccaaggctccctgcccctcctcatgcccctctgtcctctgcgttttttctgtgtaatctattttttaagaagagtttgtattattttttcatacggctgcagcagcagctgccaggggcttgggattttatttttgtggcgggcgggggtgggagggccattttgtcactttgcctcagttgagcatctaggaagtattaaaactgtgaagctttctcagtgcactttgaacctggaaaacaatcccaacaggcccgtgggaccatgacttagggaggtgggacccacccacccccatccaggaaccgtgacgtccaaggaaccaaacccagacgcagaacaataaaataaattccgtactccccaccc

SEQ ID NO: 1217 - DNA, 3701 bp, Homo sapiens
taggcggtgcatcccgttcgcgcctggggctgtggtcttcccgcgcctgaggcggcggcggcaggagctgaggggagttgtagggaactgaggggagctgctgtgtcccccgcctcctcctccccatttccgcgctcccgggaccatgtccgcgctggcgggtgaagatgtctggaggtgtccaggctgtggggaccacattgctccaagccagatatggtacaggactgtcaacgaaacctggcacggctcttgcttccggtgttcagaatgccaggattccctcaccaactggtactatgagaaggatgggaagctctactgccccaaggactactgggggaagtttggggagttctgtcatgggtgctccctgctgatgacagggccttttatggtggctggggagttcaagtaccacccagagtgctttgcctgtatgagctgcaaggtgatcattgaggatggggatgcatatgcactggtgcagcatgccaccctctactgtgggaagtgccacaatgaggtggtgctggcacccatgtttgagagactctccacagagtctgttcaggagcagctgccctactctgtcacgctcatctccatgccggccaccactgaaggcaggcggggcttctccgtgtccgtggagagtgcctgctccaactacgccaccactgtgcaagtgaaagaggtcaaccggatgcacatcagtcccaacaatcgaaacgccatccaccctggggaccgcatcctggagatcaatgggacccccgtccgcacacttcgagtggaggaggtggaggatgcaattagccagacgagccagacacttcagctgttgattgaacatgaccccgtctcccaacgcctggaccagctgcggctggaggcccggctcgctcctcacatgcagaatgccggacacccccacgccctcagcaccctggacaccaaggagaatctggaggggacactgaggagacgttccctaaggcgcagtaacagtatctccaagtcccctggccccagctccccaaaggagcccctgctgttcagccgtgacatcagccgctcagaatcccttcgttgttccagcagctattcacagcagatcttccggccctgtgacctaatccatggggaggtcctggggaagggcttctttgggcaggctatcaaggtgacacacaaagccacgggcaaagtgatggtcatgaaagagttaattcgatgtgatgaggagacccagaaaacttttctgactgaggtgaaagtgatgcgcagcctggaccaccccaatgtgctcaagttcattggtgtgctgtacaaggataagaagctgaacctcctgacagagtacattgaggggggcacactgaaggactttctgcgcagtatggatccgttcccctggcagcagaaggtcaggtttgccaaaggaatcgcctccggaatggcctatttgcactctatgtgcatcatccaccgggatctgaactcgcacaactgcctcatcaagttggacaagactgtggtggtggcagactttgggctgtcacggctcatagtggaagagaggaaaagggcccccatggagaaggccaccaccaagaaacgcaccttgcgcaagaacgaccgcaagaagcgctacacggtggtgggaaacccctactggatggcccctgagatgctgaacggaaagagctatgatgagacggtggatatcttctcctttgggatcgttctctgtgagatcattgggcaggtgtatgcagatcctgactgccttccccgaacactggactttggcctcaacgtgaagcttttctgggagaagtttgttcccacagattgtcccccggccttcttcccgctggccgccatctgctgcagactggagcctgagagcagaccagcattctcgaaattggaggactcctttgaggccctctccctgtacctgggggagctgggcatcccgctgcctgcagagctggaggagttggaccacactgtgagcatgcagtacggcctgacccgggactcacctccctagccctggcccagccccctgcaggggggtgttctacagccagcattgcccctctgtgccccattcctgctgtgagcagggccgtccgggcttcctgtggattggcggaatgtttagaagcagaacaagccattcctattacctccccaggaggcaagtgggcgcagcaccagggaaatgtatctccacaggttctggggcctagttactgtctgtaaatccaatacttgcctgaaagctgtgaagaagaaaaaaacccctggcctttgggccaggaggaatctgttactcgaatccacccaggaactccctggcagtggattgtgggaggctcttgcttacactaatcagcgtgacctggacctgctgggcaggatcccagggtgaacctgcctgtgaactctgaagtcactagtccagctgggtgcaggaggacttcaagtgtgtggacgaaagaaagactgatggctcaaagggtgtgaaaaagtcagtgatgctccccctttctactccagatcctgtccttcctggagcaaggttgagggagtaggttttgaagagtcccttaatatgtggtggaacaggccaggagttagagaaagggctggcttctgtttacctgctcactggctctagccagcccagggaccacatcaatgtgagaggaagcctccacctcatgttttcaaacttaatactggagactggctgagaacttacggacaacatcctttctgtctgaaacaaacagtcacaagcaaaggaagaggctgggggactagaaagaggccctgccctctagaaagctcagatcttggcttctgttactcatactcgggtgggctccttagtcagatgcctaaaacattttgcctaaagctcgatgggttctggaggacagtgtggcttgtcacaggcctagagtctgagggaggggagtgggagtctcagcaatctcttggtcttggcttcatggcaaccactgctcacccttcaacatgcctggtttaggcagcagcttgggctgggaagaggtggtggcagagtctcaaagctgagatgctgagagagatagctccctgagctgggccatctgacttctacctcccatgtttgctctcccaactcattagctcctgggcagcatcctcctgagccacatgtgcaggtactggaaaacctccatcttggctcccagagctctaggaactcttcatcacaactagatttgcctcttctaagtgtctatgagcttgcaccatatttaataaattgggaatgggtttggggtattaatgcaatgtgtggtggttgtattggagcagggggaattgataaaggagagtggttgctgttaatattatcttatctattgggtggtatgtgaaatattgtacatagacctgatgagttgtgggaccagatgtcatctctggtcagagtttacttgctatatagactgtacttatgtgtgaagtttgcaagcttgctttagggctgagccctggactcccagcagcagcacagttcagcattgtgtggctggttgtttcctggctgtccccagcaagtgtaggagtggtgggcctgaactgggccattgatcagactaaataaattaagcagttaacataactggcaa

SEQ ID NO: 1218 - DNA, 2914 bp, Homo sapiens
tgacagcagcgcttctttcttagctagtcaccggcccctgctcaagaatgccagtgtgtgtgtagcctccacagagaggtcgttttctcggagtccagaggggccgcctgagcttctgagaactagggaggagccatcccagccatgagcccctgtgggaatctgctgggggccaagtggcctggagtcctcaggctcccgcagctgctccggagggagaggtgagctcagggcagcctgcctgcagccagaggtgccgggagccccgggcctgtcatggtggccatctacagccggcctgaggcagtcacagacggatttgcagctgagcctgtctatctggtgtgggaagaagatggggagttacttgtcagtcccggcttacttcacctccagagacctgtttcggtgttcagaatgccaggattccctcaccaactggtactatgagaaggatgggaagctctactgccccaaggactactgggggaagtttggggagttctgtcatgggtgctccctgctgatgacagggccttttatggtggctggggagttcaagtaccacccagagtgctttgcctgtatgagctgcaaggtgatcattgaggatggggatgcatatgcactggtgcagcatgccaccctctactgtgggaagtgccacaatgaggtggtgctggcacccatgtttgagagactctccacagagtctgttcaggagcagctgccctactctgtcacgctcatctccatgccggccaccactgaaggcaggcggggcttctccgtgtccgtggagagtgcctgctccaactacgccaccactgtgcaagtgaaagaggtcaaccggatgcacatcagtcccaacaatcgaaacgccatccaccctggggaccgcatcctggagatcaatgggacccccgtccgcacacttcgagtggaggaggtggaggatgcaattagccagacgagccagacacttcagctgttgattgaacatgaccccgtctcccaacgcctggaccagctgcggctggaggcccggctcgctcctcacatgcagaatgccggacacccccacgccctcagcaccctggacaccaaggagaatctggaggggacactgaggagacgttccctaaggcgcagtaacagtatctccaagtcccctggccccagctccccaaaggagcccctgctgttcagccgtgacatcagccgctcagaatcccttcgttgttccagcagctattcacagcagatcttccggccctgtgacctaatccatggggaggtcctggggaagggcttctttgggcaggctatcaaggtgacacacaaagccacgggcaaagtgatggtcatgaaagagttaattcgatgtgatgaggagacccagaaaacttttctgactgaggtgaaagtgatgcgcagcctggaccaccccaatgtgctcaagttcattggtgtgctgtacaaggataagaagctgaacctcctgacagagtacattgaggggggcacactgaaggactttctgcgcagtatggatccgttcccctggcagcagaaggtcaggtttgccaaaggaatcgcctccggaatggcctatttgcactctatgtgcatcatccaccgggatctgaactcgcacaactgcctcatcaagttggacaagactgtggtggtggcagactttgggctgtcacggctcatagtggaagagaggaaaagggcccccatggagaaggccaccaccaagaaacgcaccttgcgcaagaacgaccgcaagaagcgctacacggtggtgggaaacccctactggatggcccctgagatgctgaacggaaagagctatgatgagacggtggatatcttctcctttgggatcgttctctgtgagatcattgggcaggtgtatgcagatcctgactgccttccccgaacactggactttggcctcaacgtgaagcttttctgggagaagtttgttcccacagattgtcccccggccttcttcccgctggccgccatctgctgcagactggagcctgagagcagagccccccccggggccgcaggagagggcccgggctgcgcggatgatgagggcccagtgaggcgccaagggaaggtcaccatcaagtatgaccccaaggagctacggaagcacctcaacctagaggagtggatcctggagcagctcacgcgcctctacgactgccaggaagaggagatctcagaactagagattgacgtggatgagctcctggacatggagagtgacgatgcctgggcttccagggtcaaggagctgctggttgactgttacaaacccacagaggccttcatctctggcctgctggacaagatccgggccatgcagaagctgagcacaccccagaagaagtgagggtccccgacccaggcgaacggtggctcccataggacaatcgctaccccccgacctcgtagcaacagcaataccgggggaccctgcggccaggcctggttccatgagcagggctcctcgtgcccctggcccaggggtctcttcccctgccccctcagttttccacttttggatttttttattgttattaaactgatgggactttgtgtttttatattgactctgcggcacgggccctttaataaagcgaggtagggtacgcctttggtgcagctcaaaaaaaaaaaaaaaaatgatttccagcggtccacattagagttgaaattttctggtgggagaatctataccttgttcctttataggccaaggaccgcagtccttcagtaacaccagtgtaaaagcttgaggagaaattgtgaagctacacagtatttgttttctaatacctcttgtcattctaaatatctttaatttattaaaaaatatatatatacagta

SEQ ID NO: 1219 - DNA, 3848 bp, Homo sapiens
tgacagcagcgcttctttcttagctagtcaccggcccctgctcaagaatgccagtgtgtgtgtagcctccacagagaggtcgttttctcggagtccagaggggccgcctgagcttctgagaactagggaggagccatcccagccatgagcccctgtgggaatctgctgggggccaagtggcctggagtcctcaggctcccgcagctgctccggagggagaggtgagctcagggcagcctgcctgcagccagaggtgccgggagccccgggcctgtcatggtggccatctacagccggcctgaggcagtcacagacggatttgcagctgagcctgtctatctggtgtgggaagaagatggggagttacttgtcagtcccggcttacttcacctccagagacctgtttcggtgttcagaatgccaggattccctcaccaactggtactatgagaaggatgggaagctctactgccccaaggactactgggggaagtttggggagttctgtcatgggtgctccctgctgatgacagggccttttatggtggctggggagttcaagtaccacccagagtgctttgcctgtatgagctgcaaggtgatcattgaggatggggatgcatatgcactggtgcagcatgccaccctctactgtgggaagtgccacaatgaggtggtgctggcacccatgtttgagagactctccacagagtctgttcaggagcagctgccctactctgtcacgctcatctccatgccggccaccactgaaggcaggcggggcttctccgtgtccgtggagagtgcctgctccaactacgccaccactgtgcaagtgaaagaggtcaaccggatgcacatcagtcccaacaatcgaaacgccatccaccctggggaccgcatcctggagatcaatgggacccccgtccgcacacttcgagtggaggaggtggaggatgcaattagccagacgagccagacacttcagctgttgattgaacatgaccccgtctcccaacgcctggaccagctgcggctggaggcccggctcgctcctcacatgcagaatgccggacacccccacgccctcagcaccctggacaccaaggagaatctggaggggacactgaggagacgttccctaaggcgcagtaacagtatctccaagtcccctggccccagctccccaaaggagcccctgctgttcagccgtgacatcagccgctcagaatcccttcgttgttccagcagctattcacagcagatcttccggccctgtgacctaatccatggggaggtcctggggaagggcttctttgggcaggctatcaaggtgacacacaaagccacgggcaaagtgatggtcatgaaagagttaattcgatgtgatgaggagacccagaaaacttttctgactgaggtgaaagtgatgcgcagcctggaccaccccaatgtgctcaagttcattggtgtgctgtacaaggataagaagctgaacctcctgacagagtacattgaggggggcacactgaaggactttctgcgcagtatggatccgttcccctggcagcagaaggtcaggtttgccaaaggaatcgcctccggaatggcctatttgcactctatgtgcatcatccaccgggatctgaactcgcacaactgcctcatcaagttggacaagactgtggtggtggcagactttgggctgtcacggctcatagtggaagagaggaaaagggcccccatggagaaggccaccaccaagaaacgcaccttgcgcaagaacgaccgcaagaagcgctacacggtggtgggaaacccctactggatggcccctgagatgctgaacggaaagagctatgatgagacggtggatatcttctcctttgggatcgttctctgtgagatcattgggcaggtgtatgcagatcctgactgccttccccgaacactggactttggcctcaacgtgaagcttttctgggagaagtttgttcccacagattgtcccccggccttcttcccgctggccgccatctgctgcagactggagcctgagagcagaccagcattctcgaaattggaggactcctttgaggccctctccctgtacctgggggagctgggcatcccgctgcctgcagagctggaggagttggaccacactgtgagcatgcagtacggcctgacccgggactcacctccctagccctggcccagccccctgcaggggggtgttctacagccagcattgcccctctgtgccccattcctgctgtgagcagggccgtccgggcttcctgtggattggcggaatgtttagaagcagaacaagccattcctattacctccccaggaggcaagtgggcgcagcaccagggaaatgtatctccacaggttctggggcctagttactgtctgtaaatccaatacttgcctgaaagctgtgaagaagaaaaaaacccctggcctttgggccaggaggaatctgttactcgaatccacccaggaactccctggcagtggattgtgggaggctcttgcttacactaatcagcgtgacctggacctgctgggcaggatcccagggtgaacctgcctgtgaactctgaagtcactagtccagctgggtgcaggaggacttcaagtgtgtggacgaaagaaagactgatggctcaaagggtgtgaaaaagtcagtgatgctccccctttctactccagatcctgtccttcctggagcaaggttgagggagtaggttttgaagagtcccttaatatgtggtggaacaggccaggagttagagaaagggctggcttctgtttacctgctcactggctctagccagcccagggaccacatcaatgtgagaggaagcctccacctcatgttttcaaacttaatactggagactggctgagaacttacggacaacatcctttctgtctgaaacaaacagtcacaagcaaaggaagaggctgggggactagaaagaggccctgccctctagaaagctcagatcttggcttctgttactcatactcgggtgggctccttagtcagatgcctaaaacattttgcctaaagctcgatgggttctggaggacagtgtggcttgtcacaggcctagagtctgagggaggggagtgggagtctcagcaatctcttggtcttggcttcatggcaaccactgctcacccttcaacatgcctggtttaggcagcagcttgggctgggaagaggtggtggcagagtctcaaagctgagatgctgagagagatagctccctgagctgggccatctgacttctacctcccatgtttgctctcccaactcattagctcctgggcagcatcctcctgagccacatgtgcaggtactggaaaacctccatcttggctcccagagctctaggaactcttcatcacaactagatttgcctcttctaagtgtctatgagcttgcaccatatttaataaattgggaatgggtttggggtattaatgcaatgtgtggtggttgtattggagcagggggaattgataaaggagagtggttgctgttaatattatcttatctattgggtggtatgtgaaatattgtacatagacctgatgagttgtgggaccagatgtcatctctggtcagagtttacttgctatatagactgtacttatgtgtgaagtttgcaagcttgctttagggctgagccctggactcccagcagcagcacagttcagcattgtgtggctggttgtttcctggctgtccccagcaagtgtaggagtggtgggcctgaactgggccattgatcagactaaataaattaagcagttaacataactggcaa

SEQ ID NO: 1220 - DNA, 7745 bp, Homo sapiens
ggaagcggaagtgaagggtgcgcttggcggcggcggcgggagctgcggagtcgggaatcaaaacaaagggcctggggggggcggggggaaggcggcggggccggaatgtgagcggaggtggagccggcggcagagggtggaagaatgaaagaaaagaaagatgaaaggatgttgaatcactttgcatggctgtatgatggaaggaaacggaactgagaactcctgcagtagaacacgtggatggcttcaacaagataatgatgctaagccatggctttggaaattctctaattgcttttctcgtcctgagcagacgctgccacatagtccccaaacgaaagagtacatggagaacaagaaagttgctgtggaactaaaggatgtaccatcaccccttcatgctggctctaagctttttccagcagtcccacttcctgatattcgttctcttcagcagcctaaaatacagctttcttctgtccccaaagtaagctgctgtgctcattgccctaatgaaccctccacttcgccaatgcgttttggtggtggtggtggcggtagcggaggtaccagtagcttgattcacccgggcgcactgttagactcgcaaagcaccaggacaatcacgtgtcaggtagggtcagggtttgctttccagtctgcatcttcactccagaatgcctcagctaggaacaatttggcaggcattgcaagtgactttcccagcatgtgtctagagagtaacctgtcttcctgcaaacacctgccctgttgtggaaaactccacttccagtcatgtcatggtaatgtgcacaagctgcatcagtttccgagtctgcagggctgcacctccgctggctatttcccctgttctgatttcacaagcggggctccagggcatttggaagagcacatttcacagtcggagctaacgcctcacttgtgcaccaactctttgcaccttaatgtggtacctccggtttgtttaaagggctcactttactgcgaagactgtctaaacaagccagcaagaaatagcataatcgatgcggctaaagtctggccaaatataccacctccaaatactcaacctgcacctcttgctgtccctctgtgtaatggctgtggaaccaaaggaacagggaaggagaccacgttgttattggcgaccagtctaggcaaagctgcttcaaaatttgggtcaccagaagttgcagtagctggacaggtgctagaaaacttaccccccattggagttttttgggatattgaaaactgctccgttccctctggccggtcagcaactgctgttgtgcaaagaatccgtgagaagttttttaaaggccacagagaagcagaattcatctgtgtatgtgacatcagtaaagaaaacaaggaagttattcaagagctgaataattgccaggtaaccgttgcccacatcaatgctactgcaaagaatgccgctgatgataaactgcggcagagtctccgcagatttgcaaatacacacactgctccagccacagtggttcttgtgtcaactgatgtcaattttgcattggaacttagtgacctgagacacaggcatggtttccacattattttggtccataaaaaccaggcctcagaagcactgctgcatcatgctaacgagctgatcagatttgaagagttcatttccgacttgccccccaggttaccactaaaaatgccacagtgccacactctgctctatgtttataacctaccagcaaataaggatggcaagagcgtcagcaacaggctcagacgcctgtccgataattgtggtgggaaagtgctgagtatcacaggctgcagtgcaattctccgcttcataaaccaagatagtgcagagcgcgctcagaagcgaatggaaaacgaagatgtctttggtaataggatcattgtgtcatttactccaaaaaatagagaactctgtgaaacaaagagttcaaatgcaattgctgataaagtgaagtctcccaaaaaacttaagaatccaaaattgtgcctcatcaaagatgcaagtgaacaatcttccagtgccaaagccacgcctggaaaagggtcacaggcaaattctggatctgctacaaaaaatacaaatgttaaaagtttacaggagctgtgccgcatggagtcaaaaactggtcatagaaacagtgagcaccagcaaggtcacctgaggctggtcgtacccactcacggtaactcaagtgctgcagtgtcgacgccgaaaaactcgggggtggcagaacccgtttacaaaaccagtcagaaaaaggagaacctcagtgcccgaagtgttaccagttctcctgtagagaaaaaagataaagaggagactgtattccaagtgagttacccgtctgcttttagcaagttagttgcatccaggcaagtcagtcctctgctcgcatctcagtcttggtcttctaggagtatgtctccaaaccttttaaacagagcatccccgcttgctttcaacattgcaaattcgagcagcgaagccgactgcccagacccatttgcaaatggtgctgatgtccaagtcagcaacatagactacagattatcccggaaggagctgcagcagctcctgcaggaagcatttgccaggcatggcaaggtgaagagtgttgagctcagcccccatacagattatcaactcaaggctgttgtgcaaatggaaaacttacaagatgcgatcggtgcagtgaatagcctccacagatacaaaattggcagcaaaaagatcctggtctcacttgccaccggggctgccagcaaatcactctctttactgagtgcagaaacaatgtctgttcttcaggatgcccctgcctgttgcctgcctctgtttaaatttacagatatctatgaaaaaaagtttggacacaagttgaatgtgtcagatctatataaattaacagacacggtcgcaatccgtgaacaaggaaacggacggctggtgtgtctcctacccagcagtcaggcccgccagagccccttggggtcttcccagtcacacgacggctcctccacgaattgcagcccaattatatttgaagagttagaatatcacgagcctgtctgcagacagcattgttccaataaggatttcagcgaacatgaatttgatccagactcttacaagattccttttgtgattctttctttgaagacatttgcgccccaggttcacagtcttctccagacccacgagggcaccgtgcctttattgagctttccagattgttacattgcagagtttggcgatctagaagtagtgcaagaaaaccaaggaggtgttcccttagaacacttcattacctgtgttccaggtgtaaacattgccactgctcagaatggcatcaaagtggttaaatggattcacaacaagcccccgcctcccaacactgacccttggcttctgcgttcgaagagtcctgtaggtaacccccagctgatccagttcagtagagaagtgattgacttgctgaaaagccagccatcttgtgtcatacccatcagtcatttcatcccatcctatcaccatcattttgcaaagcagtgccgagtgtcagactacggatactccaagctgattgagttattagaagcagtgcctcatgtattgcagattcttggaatgggctccaaacgtctgctgacccttacccacagggcccaggtgaagcgctttactcaggatttactaaaacttctcaaatcccaggccagcaaacaggtcattgtgagagaattctcacaggcttatcactggtgtttctcaaaggactgggatgtcactgaatatggtgtttgtgagttgattgacatcgtatcagagattccagacacaaccatctgcttgtcccaacaagataatgaaatggtgatttgtatccccaaaagagaacgcactcaggatgaaatagaaaggacaaaacagttctccaaggatgtcgttgatttgctgcgtcaccaaccccatttccggatgccctttaataaatttatcccttcttaccatcaccactttggccggcagtgcaaacttgcgtactatgggtttaccaaactacttgaactttttgaagccatacctgatactttacaagtattggaatgtggagaagaaaagatccttactctgacagaggtggagcggttcaaagctctagctgcccagtttgttaaactccttcggtcccaaaaagataactgccttatgatgacagatctccttacagaatatgctaaaacttttggttatacatttcgtctccaagactatgatgtcagttccatttcggctttaactcagaaactctgccatgtcgtgaaggttgccgatatagaatctggcagacagattcagctgatcaaccgaaagtctctgcgatctctcactgcccagttgctggtattgttgatgtcttgggaaggaaccacccatctttctgttgaggagctcaagagacattacgaaagtacccacaacactccccttaacccctgtgaatatggattcatgaccttgaccgaactgctgaagagcctgccatacttggttgaggttttcactaatgataagatggaagaatgtgtgaagctcacaagtctgtatttgtttgcaaagaatgtgcggtctttacttcatacttaccactaccagcagattttccttcatgagttttccatggcctataccaagtatgtcggagaaactctgcagcccaagacctacggccacagcagcgtggaggagctcttgggagcaattccacaggtggtctggataaaaggacatggtcataagagaattgtagtgttaaaaaatgacatgaaaagtcgtttgagttcactcagtctctcccctgccaatcatgaaaaccagccctcggagggcgagcgcatcctggaggtgcccgaatcgcacacagcctcggaactcaagcttggagctgacggcagtgggcccagtcacacagagcaggagcttctccgcctgaccgacgactcccccgtcgacctcctgtgtgcgcctgtcccctcgtgcctgccgtcccctcagctgagaccagaccccgttatcctccaatctgctgatctcattcagtttgaggagcgccctcaagagccttctgaaattatgattttaaaccaagaagaaaaaatggagattccaataccaggaaagagcaaaactctgacctctgactccagctcgtcctgcatctcagcagctgtccccgtgcctccctgcccctcctcggaaacctccgagtcactgctcagcaaggaccccgtggaaagcccggccaaaaagcaacccaaaaatagagtcaaattggcagccaacttttccttagcacctataaccaagctttaactcccatttggaatatagaattaggatgggaaaacactgtctgattctgcacacaaaagtgggtttcaaaaatacatccttttctgtgtcatgaaaaccccccgaagccattgacttcatcttacctgtgttctatcatgtttttcttttccattgaacacagctttgagctgaagtctttcttttcttcttcctttttctttcttttttcaattatttgaagaacttgtggcatttgttaaagaatccttaatatattttaccaaatttttagtaactattatgaaatacaatggtgttccaaaagaagaaagcactaaaaactcaactagcaggaagcggttttgcttccattgagccacgtcggtggtgtcatcctacatgtagcataatagagtctctcagcctttgcttactggtgtttccgacagtattaacccagtgcgtggcatgtctttgaagcaaagcctgtcccgctagcctgtgtgttcacacaccaaaggagaagggtaggcgaggggttcggagtgtattttcaggttggaatgtgaaggttcctggcttccatgtgacttgtaagtgtgccttgttttttatttaaactatgtctgtagttgacaaaagtggcttcatcacaaatttttttaaacgtttctactttggggttccatttaggagctttctagaaagttgaggatgtttgaagcttcccttctgtgttccagtttgatatgggttaggttaaggaaaaggagatggtctcgatgtcatggatttaaagtcagcatttggattacaacacacattattgtgtgtcgagaggcagcattggaaagagcctgattttctaaaatatgcatcaagtgcataaattacaaatcagagctgagtggggaggtgcttcagcagcagcgggatcaatacgatttccactgggaagagacaggaattctacctacacataggaaggccaaggttgatccacttaaccttgttattgtaattttaaagctggtatcggtagctgggaagctttatgtgtgtgtatgtcagctcagcatcttttaatcgtgtctgattttactctcgttacttctcgctgttggaagcatctctgggtttcttgtggcgtctggtgtggaatggccttcctctctaggtgcctgaggtgtccgctgacgggtggcctctcacccccctctagagaaacctgacatttacaatggattgtatttgtccggcaaaaaaggcggattcattcatagagcagaaagaacctgttggcgtaaggtcttccactagttagatggtttcttttggggaaatgtttatatttggtaacttctagaaagccagaaaatggactctgatttcatagcattttgataaaatgccacaaaataagggctatagagagatttttacaagtcagattttttgttccccaaatcttttaaatgaagccagtgactcccagttctcaacacatggccccagtcaagacagaacaccatggaaaaaaccctgtaagtattatggcactctccgaatcctcctgaaggcatttcctctacagacatagtgttacaggaagtgaaatgcaaatgtgcaattttttttaaaggagcttttaaacaaagtaataataattggtgttgagaacatcagttgccttattctaagatttcataaggctgagtttgcacgcttggacttcagttctgctagcatgtaaagagtggtggactttaaaaccgtaagaggtatcattacaagtcacctggaacagactcaaagaacaggttctttgggcaacagacaaagaagaatcaagttctgtgctgtcccgtgagtgtgtctgagtaccattcactggagttgctgcttaggtctgggacgtgtgtgtgactcttaacaattgctgtctgaaaatgagagagaagacttcggaagcacattgtgttcataatgtactccacaatggccagtccaattgctatctatttttttatccagaggcttaattaaatgatgtggtaaaatgatgtttgagcattaagacaatgtaattctttatttctgggtggaaagatataccggattaaatttatctgtttaaaaaaatgacaaaagttatcaccaaaaccccctttcccatcttgcactgtttgttttggattgggtttgggggaaagagatgtttttcttagttgtctactttgtttgaacacttttgttgtggttcaagtgctgttttgtgtgttgggaccaaacagttgtcaataaactttacaagcgagcatctaaaaaaaaaaaaaaaaaa

SEQ ID NO: 1221 - DNA, 4653 bp, Homo sapiens
catcttgcagccggcggcgcggattgaatgagcccgccgagcccgggccgccgtcgggagcagcgcaggccgcgagccgccgccaccatggccacgccgctgcccggccgcgcgggcgggcccgccacgccgctgtcgcccacgcgcctgtcgcggctgcaggagaaggaggagctgcgcgagctcaacgaccgcctggcgcactacatcgaccgcgtccgcgcgctggagctggagaacgaccggctcctgctcaagatctcagagaaggaggaggtgaccacgcgcgaggtgagtggcatcaaggcgctgtacgagtcggagctggccgatgcccggagagtcctggatgagacggctcgagagcgtgcccggctgcagatagagattgggaagctgagggcagagttggacgaggtcaacaagagcgccaagaagagggagggcgagcttacggtggcccagggccgtgtgaaggacctggagtccctgttccaccggagcgaggtggagctggcagctgccctcagcgacaagcgcggcctggagagtgacgtggctgagctgcgggcccagctggccaaggccgaggacggtcatgcagtggccaaaaagcagctggagaaggagacgctgatgcgtgtggacctggagaaccgctgccagagcctgcaggaggagctggacttccggaagagtgtgttcgaggaggaggtgcgggagacgcggcggcggcacgagcggcgcctggtggaggtggacagcagccggcagcaggagtacgacttcaagatggcacaggcgctggaggagctgcggagccagcacgacgagcaagtgcggctctacaagctggagctggagcagacctaccaggccaagctggacagcgccaagctgagctctgaccagaacgacaaggcggccagtgcggctcgcgaggagctgaaggaggcccgcatgcgcctggagtccctcagctaccagctctccggcctccagaagcaggccagtgccgctgaagatcgcattcgggagctggaggaggccatggccggggagcgggacaagttccggaagatgctggacgccaaggagcaggagatgacggagatgcgggacgtgatgcagcagcagctggccgagtaccaggagctgctggacgtgaagctggccctggacatggagatcaacgcctaccggaagctcctggagggcgaggaggagaggctgaagctgtcccccagcccatcctcgcgcgtcaccgtctcacgagccacctcgagcagcagcggcagcttgtccgccaccgggcgcctgggccgcagtaagcggaagcggctggaggtggaggagcccttgggcagcggcccaagcgtcctgggcacgggcacgggtggcagcggtggcttccacctggcccagcaggcctcggcctcgggtagcgtcagcatcgaggagatcgacctggagggcaagtttgtgcagctcaagaacaactcggacaaggatcagtctctggggaactggagaatcaagaggcaggtcttggagggggaggagatcgcctacaagttcacgcccaagtacatcctgcgcgccggccagatggtcacggtgtgggcagctggtgcgggggtggcccacagccccccctcgacgctggtgtggaagggccagagcagctggggcacgggcgagagcttccgcaccgtcctggttaacgcggatggcgaggaagtggccatgaggactgtgaagaagtcctcggtgatgcgtgagaatgagaatggggaggaagaggaggaggaagccgagtttggcgaggaggatcttttccaccaacagggggacccgaggaccacctcaagaggctgctacgtgatgtgaacccacactcctcatccacacacctttctttacccagagccactgaaaactatttttatatcattggctttctttagttcttgatacatttctagagaatttctaagcgaactgccagaacgtgtgggtgggtctcccccagccctccctcctggcgggtctcctccagcctcacttcgctgccacttcgccgctgccccggagacttttcaatcccaccccactcctcatctcaccatttggtcaaattggaagcccagggccaggacccggaggtttagaagatgcttgggcttggagggaggagggccggcgaggctagcgaggggacaggagacggccctgctgcggacggagcgcggaaactgcgtaggaattcagtggtggtgggtttttttaaggctttctacaaaaccaaattcagaatccaggcgtcgacctggtggggcccggggccaagcctgcattctggctgcccagcttcggacagcgggaactcctcaggcagccacgcagcgggtgtgggccagcatggggatggcgtggcccccagggcgggttttcactccgctgcctgggcttccagattcccgttctggcagcgcaccggccgggtttctcggaccgttgactttatttgggggagttttcccgcagttcagttcctgactgtgcaaggccaacagggcaggggaggggaagacctggggaaggaagaatgaggacagtcccgtcgtaagacctgtcacaacaataagcagggaggggagatgtggaggggacacatctggttgccttggaggcagaagctgtgagtttcagaacagctgtctgcagggaacgccaccatgttgaccctctggaggagagcgctgtggagcccctcccgtgttccagctccgtctgccctgtgcctatatatacacatgcgtctatccatactgtgcttttatctgtgattttctcgctgaaaccatgtttctcagacaggccaaggccacctgactcctatcacgacgcacccaagcccctcagtccagcttcccaatgcctggcaccccccttcggcaatagctcaccgtttacaccctccctcatagatacacagaagttatttttttaatggatatttatttttttacattggtcagtacacaggtcaggagctcacgccagggccttgaggacaggctgaccctcctccccggggtggcgtggggctggggcaccctccgacggcagagcctccttcagaaagtgcagctcaagtcttaaagacaccaaaactgagccatgggcacgcgccgtctccgggccatggcgttcactgcagggcgggggcggcaccgctcccctgtgactgcatcccgcctccctggggacctgcctgtggcaggaaggaatggggggccccagccccaggccgggaaggagccagcggccgacaaagcagaaacacccgctgctccacgtagcccctgctcgctgtccttgctctcagaagtcccggtcccatgtagatagaggggggcgcatcttaccaaagcatttcctcctggaggctacgccgctgtgctcccagtcaggcggctggtagggagctttgcctgccccggggataccctctgccagccgctggaagtgggaatgctggcgacagactgtgtcctctttcccaccttcatagcaggaatcacccggacccgactggctgggcttcgtgctagcgagggttctgggggtgggtcttggtgatcttgtcctatggggagtctgcagtggtctcagccacatcctatgtattttggctctggaggagcaaagctgtatcctggagttggtctgtgatttgccgacagccttgcaggctgggctcagggacaaagtcccccccaaaacccgcaggtcctcatgtccagacgctgcccagtcctgtcctgaaaacagcacgccccaggcccacagaaccccccaccctacatttgccttgggtggagctgggggtggtcctaggactgcgggtgcccttagctgaagggggtggggagaagcgtggactgggcagcctgtgggtaattggaggttcattgagaattgagtctttggaaacactaagaaaatcaaatttttaaaagttatttatggcctgggaaacaatttgcatttgtccccaaatacgcttagctgtgtgccgcttagaacgatgcgaaaccatccctctgtgtaagcccgtgccgtgtgactcgaagcctagcgccctccctgcgaagcatcagacgccacccagccctggggggaggcccacgcctgctggaccaacgcgggttctggggtgcacagcgccaggttaacgctgaagcctgccccgctgagcccaggagccgggaggcctgcgggctgacccagaatccgatcatgcacctgtcctcatgccagcggctttggctggggttggtctgaagcctgcacgcggcagttctttgttaaagatctgagggactcctcagtcctggggcgtcgccgcctgcagcctcttccaagccctgcgtccagcgagcgtcacagcacaacctgcaaaaacggagctgggctgcagctggggctggcatggactttcatttcagagattcggtttttaagaagatgcatgcctaatgtgttcttttttttttccaatgatttgtaatatacattttatgactggaaacttttttgtacaacactccaataaacattttgattttaaaaaaaaaaaaaaaaaaa

SEQ ID NO: 1222 - DNA, 1554 bp, Homo sapiens
gtgcggcgcgcgtgggcaggtcattgcagttgggcgctcagcagctgtggcagccggttgaggtctggaagtagcgttgggctgaagcagcggagttcgccatgcgcgagtgtatctctatccacgtggggcaggcgggtgtccagatcggcaatgcctgctgggaactgtactgccttgaacatggaattcagcccgatggtcaaatgccaagtgataaaaccattggtggcggggacgactccttcaacacgttcttcagtgagactggagctggcaagcacgtgcccagagcagtgtttgtggacctggagcccactgtggtcgatgaagtgcgcacagggacctacaggcagctcttccacccagagcagctgatcaccgggaaggaagatgcagccagtaattacgccaggggccattacaccatcggcaaggagattgttgacctagtcctggaccggatccgcaaactggcggatctgtgcacaggactgcagggcttcctcatcttccacagctttgggggcggcactggctctgggttcgcatctctgctcatggagcggctctcagtggattacagcaagaagtccaagctagagtttgccatttacccagccccccaggtctccacagccgtggtggagccctacaactccatcctaaccacccacacgaccctggaacattctgactgtgccttcatggtcgacaatgaagccatctatgacatatgtcggcgcaacctggacattgaacgtcccacgtacaccaacctcaatcgcctgattgggcagatcgtgtcctccatcacggcctccctgcgatttgatggggccctgaatgtggacttgacggaattccagaccaacctcgtgccgtacccccgcatccacttccccctggccacctacgccccagtcatctcagctgagaaggcctaccacgagcagctgtctgtggccgagatcaccaatgcctgcttcgagccagccaatcagatggtcaagtgtgaccctcgccatggcaagtacatggcctgctgcatgttgtacaggggggacgtggtccccaaagacgtcaatgcggccatcgccaccatcaagaccaagcgcactatccagtttgtggattggtgcccgactggatttaaggtgggcattaactaccagccccccacagtggtccccgggggagacctggccaaggtgcagcgggccgtgtgcatgctgagcaacaccacggccattgcggaggcctgggcccgcctggtccataagttcgatctcatgtatgccaagtgggcctttgtgcactggtacgtgggcgaaggcatggaagagggagagttctctgaggcccgcgaggacctggcagctctagagaaggattgtgaagaggtgggcgtggattccgtggaagctgaggctgaagaaggcgaagaatactgaggggagggtgtggtgggttctcccctgccacccctaggatggctgctttcaagttgtttgcaattaaagattctgtataaaaccaaaaaaaaaaaaaaaa

SEQ ID NO: 1223 - DNA, 18506 bp, Homo sapiens
atgcccccagggatggtcagtagcctccctctgagccgcaggctacggcatgtgtacctgctgctctttgtgtgtctgtccctgcactgggcctggttccggggcctgggtgtctcagcatcttggagggcagggctgaggggggcagggcagtcccttgggcgctgggtctatgctgctgcagctgaccacacccagggcattggcagccactggccagggggttgggctggccggcactggtgcaggctggaccccactccttggggaaaacaggtcaatgctaatggtgccgacaatgctgcagggtccagagccagccctaggagcaggcagaggcgggacaatggggggaggagctgtggagggaagaaccgggcgtggcagggggaggtggccagttgggatcttcgcttctgggccagttgggagagcgtctgtagcttccttgtgtccggccgtcagctgcagcccggggagccaggtgcagaaacggaagatgaccactctgtgactgaagggcctgcggatgagggcattcgaccacggccgcaggggtcttcacctgtctacgaatacacgactgaggctgccgactttggactccaggaagacgcccccggcaggcaaggttctgctgggagacggagatcctggtggaagcgagattcaggggactcacggacatttttcaggatgagtcgtccagaggctgtccaggaggcaacagaggtgacgctgaagacagaggtggaggcaggagccagtggctacagtgtcacaggtggtggggaccaggggatcttcgtcaagcaagtgctgaaggactcctcagccgccaagctttttaacttgagagaaggggatcagctgctcagtacaaccgtgttctttgaaaacataaaatatgaagatgctctcaaaatccttcaatattcagagccgtacaaggttcagttcaaaatcagacggcagctccctgccccacaggatgaagagtgggcttccagcgatgcccagcacggcccacagggcaaggagaaggaggacacggatgttgctgatgggtgcagagagacccccacgaaaactctggaaggagatggggaccaagagagactcatctccaaaccaagggtggggagaggcaggcagagccagagggagaggctctcttggccaaaatttcaatccataaagagcaagcgggggccgggaccccagaggtcacacagctcgtcagaggcctacgaacctagggacgcacatgacgtgtcccctacaagcacagacacagaggcccagctcacggtggagcgccaagagcagaaggcagggccgggcagccagaggaggcggaagttcctcaacctcagattcaggacaggctcgggacagggcccttcatcgacaggacagccaggcagggggttccagagtggggtgggccgtgctggggtcctggaagagttggggccctggggtgatagcctcgaggagactggggctgccacaggcagcaggagagaggagagggcagaacaggatcgagaagtgatgcctgctcagagcatgccattgcccacagagctcggtgaccctagactttgcgagggaacccctcaggaagggggactcagggcagccaggctccatggaaagaccctggaggggcaggcacaggagacagcagtggcccagaggaagcccagggcccagccaactcctggaatgagccgggagggtgaaggcgagggactgcagagcctggaaatcgggatcgccagactgtccttgagagacacaaccgaaggaggcacacagattggcccaccagaaattagggtgcgagtacacgatttaaagacaccaaaatttgcattttccacagaaaaagagccagaaagagaaaggcgccttagtaccccacagcgagggaagagacaggatgcgtcctcaaaagcgggtactggcctgaagggtgaggaggtggaaggagccgggtggatgccgggcagggaaccaaccacacatgcagaagcacagggggatgaaggagatggagaggaaggactacagaggacaaggatcactgaggaacaggacaagggcagggaagacacagaaggacagataagaatgcccaagttcaagataccctccttaggatggtcgccaagcaagcacacaaagacaggcagagaaaaagccacagaagacacagagcagggaagggaaggagaggccacagcaacagctgatagaagagaacagagacgcacagaggaaggattaaaagacaaagaagacagtgactcaatgacaaacacaacaaaaatacaactaatacacgatgaaaaacgcttaaaaaaggaacaaattctgacagaaaaggaagtggccaccaaagacagcaagttcaaaatgcccaagttcaagatgccattgttcggggcgtcagccccaggcaagtccatggaggcctcggtggatgtgtctgcgccgaaggtggaggccgacgtgagcctcctctccatgcagggggacctcaagaccactgacctcagcgtccagaccccttccgctgacctggaggtccaggatggccaagtggatgtgaaacttccggagggccccctgcccgagggagccagcctcaaagggcacctgcccaaggtgcagaggcccagtttgaagatgcccaaagtggacctcaagggccccaagctggacctgaaaggccccaaggcggaagtgacagcccccgatgtgaagatgtctctgtccagcatggaggtggacgtccaggccccgagagcaaagctggatggtgcgcggctggagggggacctgtccctggccgacaaggaggtgactgccaaagacagcaagttcaaaatgcccaagttcaagatgccatcattcggggtgtcggccccaggcaagtccatggaggactcggtggatgtgtctgcgccgaaggtggaggccgacgtgagcctctcctccatgcagggggacctcaaggccactgacctcagcattcagcccccttccgctgacctggaggtccaggctggccaagtggatgtgaaacttccggagggccctgtgcccgagggagccggccccaaagtgcacctgcccaaagtggagatgcccagtttcaagatgcccaaagtggacctcaagggcccccagatagatgttaagggccccaagctggacctgaaaggccccaaggcggaagtgacagcccccgatggcgaggtgtctctgcccagcatggaggtggatgtccaggcccagaaggccaagctggatggtgcgtggctggagggggacctgtccctggccgacaaggacgtgactgccaaagacagcaagttcaaaatgcccaagttcaagatgccgtcgttcggggtatcggccccagggaagtccatcaaggccttggtggatgtgtctgcacccaaggtggaggccgacctgagtctcccctccatgcagggggacctgaagaccactgacctcagcattcagcctgcttctactgacctgaaggtccaggctgaccaggtggatgtgaagctcccggagggccacctgcccgagggagctggccttaaagggcacttgcccaaggtggagatgcccagtttcaagatgcccaaagtggccctcaagggcccccaggtggacgtcaagggccccaagctggacctgaaaagccccaaggcggaagtcacagcccctgatgtggaggtgtctctgcccagcgtggaggtggacgtcgaggccccgggagccaagctggacagtgcgcggctggagggggaactgtccctggccgacaaggatgtgactgccaaagacagcaggttcaaaatgcccaagttcaagatgccatcgttcggggcgtcagccccaggcaagtccatcgaggcctcggtggatgtgtctgcacccaaagtggaggccgacgtgagtctcccctccatgcagggggacctcaagaccactgacctcagcattcagcccccttccgctgacctggaggtccacgctggccaggtggacgtgaagctcctggagggccacgtgcctgagggagccggcttcaaagggcacctgcccaaggtgcagatgcctagtttgaagatgcccaaagtggacctcaagggcccccaggtggaagtcaggggccccaagctggacctgaaaggtcataaggcagaggtgacggcccacgaagtggctgtgtctctgcccagtgtggaggtggacatgcaggccccgggagccaagttggatggcgcacagctggacggggacctgtccctggctgacaaggacgtgactgccaaagacagcaagttcaaaatgcccaagttcaagatgccgtcgttcggggtgtctgccccaggcaagtccattgaggcctccgtggacctgtctgcacccaaggtggaggccgacatgagcctcccctccatgcagggggacctcaagaccactgacctcagcattcagcccccttccactgacctggagctccaggctggccaattggacgtgaaactcccagagggccccgtgcccgagggagccggcctcaaagggcacctgcccaagctgcagatgcccagtttcaaggtgcccaaagtggacctcaagggccctgaaatagacatcaagggccccaagctggacctaaaagaccccaaggtggaagtgacagcccctgatgtggaggtttctctgcccagcgtggaggtggatgtcgaggccccaggagccaagctggatggtggacggctggaggaggacatgtccctggccgacaaggacttgactaccaaagacagcaagttcaaaatgcccaagttcaagatgccgtcgttcggggtgtctgccccaggcaagtccatcgaggcctcagtggatgtgtctgcgccgaaggtggaggccgacgtgagcctcccctccatgcagggggacctcaaggccactgacctgagcatacagcccccttctgctgacctggaggtccaggctggccaagtggacgtgaaactcccagagggccctgtgtccgagggagccggcctcaaagggcacctgcccaaagtgcagatgcccagtttcaagatgcccaaagtggacctcaaggggccccagatagatgttaagggccccaagctggacctgaaaggccccaaggtggaagtgacagcccccgatgtgaagatgtctctgtccagcatggaggtggacgtccaggccccgagagcaaagctggatggtgcgcagctggagggggacctgtccctggccgacaaggcggtgactgccaaagacagcaagttcaaaatgcccaagttcaagatgccatcatttggggtgtcggccccaggcaagtccatcgaggcctcggtggatgtgtctgagccgaaggtggaagctgatgtgagcctcccctccatgcagggggacctgaagaccactgacctcagcattcagtccccttccgccgacctggaggtccaggctggccaagtgaacgtgaaactcccggagggcccccttcccgagggagccggcttcaaagggcacctccccaaggtgcagatgcccagtttgaagatgcccaaagtggccctcaagggcccccagatggacgtcaagggccccaagctggacctgaaaggccccaaggcggaggtgatggcccccgacgtggaggtgtctctgcccagcgtggaggtggacgtcgaggctccaggagccaagctggacagtgtgcggctggagggtgacctgtccctggccgacaaggatgtgactgccaaagacagcaagttcaaaatgcccaagttcaagatgccgtcgttcggggtgtctgccccaggcaagtccatcgaggcctcggtggatgtgtctgcgccgaaggtggaggccgaagtgagcctcccctccatgcagggggacctcaagaccacggacctctgcattccgctcccttctgcagacctggtggtccaggctggccaagtggacatgaagctcccggagggccaggtgcccgagggagccggcctcaaagggcacttgcccaaggtggatatgcccagtttcaagatgcccaaagtggacctcaagggcccccagacagatgttaagggcgccaagctggacctgaaaggccccaaggcggaagtgacagcccccgatgtcgaggtgtctctgcccagcatggaggtggatgtccaggcccagaaggctaagctggatggtgcgcggctggagggagacctgtccctggccgacaaggacatgactgccaaagacagcaagttcaaaatgcccaaattcaagatgccgtcgttcgggggggacctgaagaccactgacctcagcattcagcccccttctgccgacctgaaggtccagactggccaggtggatgtgaagctcccggagggccacgtgcccgagggagctggcctcaaagggcacctgcccaaggtggagatgcccagtttgaagatgcccaaagtggacctcaagggcccccaggtggacatcaagggccccaaactggacctaaaagaccccaaggtggaaatgagagtccccgatgtcgaggtgtctctgcccagcatggaggtggacgtccaggccccaagagccaagctggatagtgcgcatctgcagggggacctgaccctggccaacaaggacctgactaccaaagacagcaagttcaaaatgcccaagttcaagatgccgtcgtttggggtgtctgccccaggcaagtccatcgaggcctcggtggatgtgtctccacccaaggtggaggccgacatgagtctcccctccatgcagggggacctcaagaccactgacctcagcattcagcccctttccgccgacgtgaaggtccaggctggccaggtggacgtgaaactcctggagggccctgtgcccgaggaagtcggcctcaaagggcacctgcccaagctgcagatgcccagtttcaaggtgcccaaagtggacctcaagggccccgaaatagacatcaagggccccaagctggacctaaaagaccccaaggtggaagtgacagcccctgatgtggaggtgtctctgcccagcgtggaggtggacgtcaaggccccaggagccaagctggatggtgcgcggctggagggggacatgtccctggccgacaaggacgtgactgccaaagacagcaagttcaaaatgcccaagttcaagatgctgtcgtttggggtgtctgcccttggcaagtccatcgaggcctcagcggatgtgtctgcgttgaaggtggaggccgacgtgagcctcccctccatgcagggggacctcaagaccactgacctcagcgttcagcccccttccgctgacctggaggtccaggctggccaagtggatgtgaaactcccagagggccccgtgccggagggagccggcctcaaagggcacctgcccaagctgcagatgcccagtttcaagatgcccaaagtagatctcaagggcccccagatagatgtcaagggccccaagctggacctgaaaggccccaagacggacgtgatggcccccgacgtggaggtgtctcagcccagcgtggaggtggatgtcgaggccccgggagccaagctggatggtgcgtggctggagggggacctgtctgtggcggacaaggatgtgactaccaaagacagcaggttcaaaattcccaagttcaagatgccgtcattcggggtgtctgccccaggcaagtccatcgaggcctcggtggatgtgtctgcgccgaaggtggaggccgacgggagcctctcctccatgcagggggacctcaaggccactgacctcagcattcagcccccttccgctgacctggaggtccaggctggccaagtggacgtgaaactcccagagggccctgtgccggagggagccggcctcaaagggcacctgcccaaggtgcagatgcccagtttcaagatgcctgaaatggacctcaagggcccccagctagatgtcaagggccccaagctggacctgaaaggccccaaggcggaagtgacagcccccgatgtggagatgtctctgtccagcatggaggtggacgtccaggccccgagagcaaagctggatggtgcgcggctggagggggacctgtccctggccgacaagggtgtgacagccaaagatagcaagttcaaaatgcccaagttcaagatgccatcattcagggtgtcggccccaggcgagtccatcgaggcgttggtggatgtgtctgagctgaaggtggaagccgacatgagcctcccctccatgcaaggggaccttaagaccactgacatcagcattcagcccccctctgcccaactggaggtccaggctggccaggtggatgtgaaactcccagagggccacgttcccgagggagccggcctcaaagggcacctgcccaagctgcagatgcccagtttcaagatgcctgaagtggacctcaagggcccccagatagatgttaagggccccaacgtggacctgaaaggccccaaggcggaagtgacagcccccgatgtgaagatgtctctgtccagcatggaggtggacgtccaggccccgagagcaaagctggatggtgcgcggctggagggggacctgtccctggccgacaagggcatgacagccaaagacagcaagttcaaaatgcccaagttcaagatgccgtcattcggggtgtcggccccaggcaagtccatcgaggcctcggtggatgtgtctgagctgaaggtggaagctgacgggagcttcccctccatgcaaggggatcttaagaccactgacatccgcattcagcccccctccgcccaactggaggtccaggctggccaggtggacgtgaaactcccagagggccacgttcccgagggagccggcctcaaagggcacctgcccaaggtgcagatgcccagtttcaagatgcccaaagtggatctcaagggcccccagatagacgtcaagggccccaagctggacctgaaaggccccaaggcggaggtgacggcccccgacgtggaggtgtctctgcccagcgtggaggtggacgtcgaggccccgagagcaaagctggatggtgcacggctggagggtgacctgtccctggccgacaaggatgtgactgccaaagacagcaagttcaaaatgcccaagttcaagatgccgtcgttcggggtgtctgccccaggcaagtccattgaggtctcggtggatgtgtctgcgccgaaggtggaggccgaagtgagcctcccctccatgcagggggacctgaagaccactgacatcagcattgagcccccctctgcccaactggaggtccaggctggccaggtggacctgaagctcccagagggccacgttcccgagggagctggcctcaaagggcacctgcccaagttgcagatgcccagtttcaagatgcccaaagtagatcgcaagggaccccagatagatgtcaagggccccaagctggacctgaaaggcccgaagacggacgtgacggcccccgacgtggaggtgtctcagcccggcatggaggtggatgtcgaggccccaggagccaagttggatggtgcacggctggagggggacctgtccctggccgacaaggatgtgactgccaaagacagcaagttcaaaatgcccaagttcaagatgccgtcgttcggggtgtctgccccaggcaagtccattgaggtcttggtggatgtgtctgcgccaaaggtggaggccgacctgagcctcccctccatgcagggggacctgaagaacactgacatcagcattgagcccccctctgcccaactggaggtccaggctggccaggtggacgtgaagctcccagagggccacgttctcgagggagctggcctcaaagggcacctgcccaagttgcagatgcccagtttcaagatgcccaaagtagatcgcaagggcccccagatagacatcaagggccccaagctggacctgaaaggcccgaagatggatgtgacggcccccgacgtggaggtgtctcagcccagcatggaggtggacgtcgaggccccaggagccaagttggatggtgcacggctggagggggacctgtccctggccgacaaggatgtgactgccaaagacagcaagttcaaaatgcccaaattcaagatgccgtcgtacagggcgtctgccccaggcaagtccatccaggcctcggtggatgtgtctgcgccgaaggcggaggccgacgtgagcctcccctccatgcagggggacctcaagaccactgacctcagcattcagctcccttctgtggacctggaggtccaggctggccaggtggacgtgaagctcccggagggccacgtgcccgagggagctggcctcaaagggcacctgcccaaggtggagatgcccagtttcaagatgcccaaagtggacctcaagagcccccaggtggacatcaagggccccaagctggacctaaaagtccccaaggcggaagtgacagtccctgatgtggaggtgtctctgcccagcgtggaggtggacgtccaggccccgagagccaagctggatggtgcgcggctggagggggacctgtccctggctgaaaaggatgtgactgccaaagacagcaagttcaaaatgcccaagttcaagatgccctccttcggggtgtcggccccaggcaggtccatcgaggcctcgctggatgtgtctgcgccgaaggtggaggccgacgtgagcctctcctccatgcagggggacctcaaggccactgacctcagcattcagcccccttccgctgacctggaggtccaggctgtccaagtggatgtggaactcctggagggccccgtgcccgagggagccggcctcaaagggcacctgcccaaagtggagatgcccagtttaaagacgcccaaagtggacctcaagggcccccagatagatgttaagggccccaagctggacctgaaaggccccaaggcagaagtgagagtccccgatgtcgaggtgtctctgcccagcgtggaggtggatgtccaggccccgaaggccaagctggatgctgggcggctggagggagacctgtccctggctgacaaggacgtgactgccaaagacagcaagttcaaaatgcccaaattcaagatgccgtcattcagggtatcggccccagggaagtccatggaggcctcggtggatgtgtctgcacccaaggtggaagccgatgtgagtctcccctccatgcagggggacctgaagaccactgacctcagcattcagcccccttctgccgacctgaaggtccaggctggccagatggatgtgaagctcccggagggccaggtgcccgagggagccggcctcaaagagcacctgcccaaggtggagatgcccagtttgaagatgcccaaagtggacctcaagggcccccaggtggacatcaagggccccaagctggacctaaaagtctccaaggcggaagtcacagcccctgatgtggaggtgtctctgcccagcgtggaggtggacgtccaggccccaagagccaaactggatagtgcacagctggagggggacctgtccctggccgacaaggatgtgactgccaaagacagcaaattcaaaatgcccaagttcaagatgccgtcatttggggtgtctgccccaggcaagtccattgaggcctcggtgcacgtgtctgcacccaaggtggaggccgatgtgagtctcccctccatgcagggggacctcaagaccactgacctcagcattcagccccattctgccgacctgacggtccaagctcgccaggtggacatgaaactcctggagggccacgtgcccgaggaagccggcctcaaaggacacctgcccaaggtgcagatgcccagtttcaagatgcccaaagtcgacctcaagggccctgaaatagacatcaagggccccaagctggacctaaaagaccccaaggtggaagtgacagcccctgatgtggaggtttctctgcccagcgtggaggtggacgtcgaggccccaggagccaagctggatggtgcgcggctggagggggacctgtccctggccgacaaggacatgacggccaaagacagcaagttcaaaatgcccaagttcaagatgccgtcgttcggggtgtctgccccaggcaagtccatggaggcatcagtggatgtgaccgcgccaaaggtggaggccgacgtgagcctcccttccatgcagggggacctcaaggccactgacctcagcgttcagcccccttccgctgacctggaggtccaggctggccaagtggacgtgaaactcccagagggccccgtgcccgagggagccagcctcaaagggcacctgcccaaggtgcagatgcccagtttcaagatgcccaaagtggacctcaagggcccccagatagatgttaagggccccaagctggacctgaaaggccccaaggcggaagtgacagcccctgatgtgaagatgtctctgtccagcatggaggtggacgtccaggccccgagagcaaagctggatggtgtgcagctggagggggacctgtccctggccgacaaggatgtgactgccaaagacagcaagttcaaaatgcccaagttcaagatgccatcattcggggtgtcggccccaggcaagtccatggaggcgtccgtggatgtgtctgagctgaaggcgaaagccgacgtgagcctcccctccatgcagggggacctcaagaccactgacctcagcattcagtccccttccgccgacctggaggtccaggctggccaagtggacgtgaaactcccggagggccccctgcccaagggagccggcctcaaagggcacctccccaaggtgcagatgccctgtttgaagatgcccaaagtggccctcaagggcccccaggtggatgtcaagggccccaagctggacctgaaaggccccaaggcggatgtgatgacccccgtcgtggaggtgtctctgcccagcatggaggtggacgtcgaggccccgggagccaagctggacagtgtgcggctggagggtgacctgtccctagccgacaaggacatgactgccaaagacagcaagttcaaaatgcccaagttcaagatgccgtcgttcggggtgtctgccccaggcaagtccatcgaggcctcgttggatgtgtctgcgctgaaggtggaggctgacgtgagcctcccctccatgcagggggacctgaagaccactcacctcagcattcagcccccttccgctgatctggaggtccaggctggccaagaggatgtgaaactcccagagggccctgtgcatgagggagccggcctcaaagggcacctgccgaagctgcagatgcccagtttcaaggtacccaaagtggacctcaagggtccccagatagacgttaatgtccccaagctggacctgaaaggccccaaggtggaggtgacgtcccccaacctggacgtgtctctgcccagcatggaggtggacatccaagccccaggagccaagctggacagtacgcggctggagggggacctgtccctggctgacaaggacgtgactgccaaagacagcaagttcaaaatgcccaagttcaagatgccatcctttgggatgttgtccccaggcaagtccatcgaggtctcggtggatgtgtctgcgccaaagatggaggccgacatgagcattccctccatgcagggggacctcaagaccactgacctccgcattcaggccccttccgccgacctggaggtccaggctggccaggtggacttgaaacttccagaaggccacatgcccgaggtagccggcctcaaagggcacctgcccaaggtggagatgcccagtttcaagatgcccaaagtggacctcaagggcccccaggtggacgtcaagggccccaagctggacctgaaaggcccaaaggcagaggtgatggcccccgatgtggaggtgtctctgcccagcgtggagacggatgtccaggccccaggatccatgctggatggtgcgcggcttgagggggacctgtccctggcccacgaggatgtagctgggaaagacagtaagtttcaaggaccaaaactgagcacgtctggttttgaatggtcgtcaaagaaagtttccatgtcttcctctgaaatcgaaggaaatgttacattccatgagaagacttccacatttcccattgtggaatctgttgttcatgaaggtgatcttcatgatccatctcgcgatggtaacttggggcttgctgttggagaagttggaatggattcgaagtttaagaaactgcattttaaagtgcccaaagtttcattttcttctaccaaaactcctaaagatagtttagtcccaggtgcaaagtctagcataggtctttccacgattcctttatcatcttcagaatgctcaagttttgaattacaacaggtttcggcttgttcagagccatccatgcagatgcctaaggtgggttttgctgggtttccatcatcccggcttgatctcactggtcctcactttgaatcttctattctctctccctgtgaggatgttacacttacaaaataccaggtgactgttcccagagctgccttggcccctgagcttgctctggaaattccttctgggtctcaggctgatattcctcttcccaagacagagtgctccactgacctgcagcctccagagggagttccaacatctcaagctgagagtcactctggcccactgaattccatgattcctgtttctcttggtcaggtatcttttcctaaattctataaaccaaagtttgtgttttcagtcccccaaatggcagttcctgagggagacctacatgcagcagtgggtgccccagtcatgtctcctcttagccctggagaaagagtgcagtgccccttgccaagcacccagctgccatccccaggcacctgtgtgtctcagggcccagaagagcttgtggcctccttgcagacatcagtagtggcccctggagaagccccttctgaagatgctgaccacgaagggaaagggagtcccttgaaaatgcctaagattaagcttccatcatttaggtggtccccgaagaaggaaacagggccaaaggtggacccagaatgcagcgtggaggactcaaaactcagcctggttttagacaaggatgaagtggccccgcagtctgccatccacatggatctgcctcctgagagggatggagagaaggggaggagcacaaagcctggctttgccatgccaaaacttgcacttcccaaaatgaaggcttctaagagtggggtcagcctgccacagagagacgtggatccttccctttctagtgccacagcagggggtagctttcaagacacagaaaaggccagcagtgacggtggtaggggaggacttggtgcaacagcaagtgccacaggaagtgagggtgtgaacctccaccggccacaggtccacattcccagtttgggctttgccaaacctgatctcagatcctccaaggccaaggtggaggtgagccagcctgaagctgacctgcctcttcccaaacatgatctgtctaccgaaggtgacagcagaggatgtgggctcggggatgtcccagtgagccagccttgtggggaggggatagcccccacacctgaagatcccctccagccatcctgtagaaaaccagatgctgaagtcctcacagtggaaagcccagaggaggaagccatgaccaagtactcgcaggaaagctggtttaaaatgcccaagttccgcatgcccagccttaggcgctctttcagggacagaggcggggctggaaagctggaagtggctcagacacaggcaccggcagcaacagggggtgaagcagcagctaaagtcaaagagttccttgtttctgggtcaaacgtggaggcagctatgtccctacagctcccagaggcagatgcagaagtgacagcttctgagagcaaatcatccacagatattctaaggtgtgatcttgacagcacaggcttgaagctgcacctctccactgctgggatgactggggatgagctttccacttctgaggtcaggatccatccatccaaaggacctctcccttttcagatgcctggcatgaggcttccagaaacccaggttcttccaggagaaatagatgagactcctctttccaagccaggacatgaccttgccagcatggaggataaaacagagaaatggtcttcccagcctgaaggtccacttaaattgaaagcttcaagtactgatatgccatcccagatttctgtggttaatgtggatcaactgtgggaagattctgtcctaactgtcaaattccccaaattaatggtaccaaggttctccttccctgcccccagctcagaggatgatgtgttcatccccactgtgagggaagtgcagtgtccagaggccaatattgatacagccctttgtaaggaaagtccggggctctggggagccagcatcctgaaggcaggtgctggggtccctggggagcagcctgtggaccttaacctgcctttggaagctcccccaatttcaaaggtcagagtgcatattcagggtgctcaggttgaaagtcaagaggtcactatacacagcatagtgacaccagagtttgtagatctctcagtacccaggactttttccactcagattgtgcgggaatcagagatccccacgtcagagattcaaacaccttcgtacggattttccttattaaaagtgaaaatcccagagccccacacgcaggctagagtgtacacaacaatgactcaacactctaggactcaggagggcacagaagaggctcccatacaagccaccccaggagtagactccatttctggagatctccagcctgacactggagaaccatttgagatgatctcttccagcgtcaatgtactgggacagcaaacactcacatttgaagttccttctggccaccagcttgcagacagctgttcagatgaggagccagcagaaattcttgagtttccccctgatgatagccaagaggcaaccacaccactggcagatgaaggcagggctccaaaagacaaaccagaaagtaaaaaatctggtctgctctggttttggcttccaaacattgggttttcctcttctgttgatgagacaggtgttgattccaaaaatgacgtccagagatctgctcccattcaaacacagcctgaggcacgaccagaggcagaactgcctaaaaaacaggagaaggcaggctggttccgatttcccaaattagggttctcctcatctcctaccaagaaaagcaaaagcaccgaagatggggcagagctggaagaacaaaaacttcaagaagaaacaatcacgttttttgatgcccgagaaagtttctcccctgaagagaaggaagagggtgaactgatcgggcctgtgggcactgggctggactccagagtgatggtgacatccgcggcaagaacagagttaatcctgcccgagcaggacagaaaagctgacgatgaaagcaaagggtcaggcctgggaccaaatgaaggctgagaggtatggctcatcagtacaagagagatgcaaaaaactaagttggaaagtaaaggctacacacacatatggagcaccccatcccacagcacattacatccacctcacttcacagaacggagaacagagcagaaatgaccagaacacctttgtcaccatcacacagccctcctaaaatggaaccaaagcttcccagctccctcaaagctttggatgcaaagaaggcaccctgacttccacaagacaccagaattcacacggtactcagaggcactgctggggaagtttgttggtctttattagataaatttccagagacctgtccataatacccaacagaacatgactgtttctttgaggaaagggttataatgtctgtggtgtacaagtcgtttttggtataacttctttcctgctgctgctgcttcccggcaaacatagttttcctatttcaggcagagtgcggtatattccaggaaacactgtttcctactcacttagcttacttctttgttgaatgcctcactaatggcaagtttcaagatgttttgggtgacaatgcacacatgctgggcaaaagggtgatggccagtggctggcagctgggccagcagaagctaggacatctgtgagttgtcattctcatctatccatgtccactggcctgccagcatccgccagtgccttgccagtgtgcacggtcccacactgtggcccctgagtcccctaatgtacacgctgcagccagaatgcagatggagctggcttggctgttccctggatgggcaataaagaaagtgctgcatccc

SEQ ID NO: 1224 - DNA, 1964 bp, Homo sapiens
tgctgcatgccttcattcctggtgccctctcttgtctcttccccagtcctgctgaagctgctctttagcccaggccccaagactatatggtccctgtggcagcagccaatgttgtttcaggaagcaacagcatttgaaaatatgaccaaagattggaattatttagaaggctctcaaaaggattgctacagagacacaatgctggacagttatgagaacacggtcccacagggatccttcttacagctctccatgatgcctcagagagctggaaatgatccacctggggtttcaaatgcaagtgaaatggaaatggagataagtaacatgagagaaaagtttcttatgagtgtaacaaagttagtagaaagcaaaagttacaacagcaaggtattttccaaagaaaagtactttcaaacaataaaggaagttaaagaagctaaagaaaaagggaagaagtcatcacgtgattatcgccgtgcagcaaaatatgatgtgatctctgtacagggcacagagaaactgatagaggctactcatggagaacgtgatcgaatacggtattatgtacataaggaagagttgtttgatattcttcatgatacacatctcagtattggacatggtgggcggacacgcatgctcaaggagctgcaaggaaaatatgggaatgtcaccaaagaagttattgtcttatatctgactctgtgtaaacagtgccaccagaagaacccagtacccaagagaggccttgcaccaaagcccatgacttttaaggacatagactccacatgccaagttgaaatacttgacatgcagtccagtgccgatggtgagttcaagttcattttatactaccaggatcactcaaccaagtttattattttacggccattaagaaccaaacaggcccatgaggtggtcagtgtcttgttagatattttcacaattcttggtacacccagtgtgttagactctgacagtggcgttgagttcacaaaccaggttgttcatgagctcaatgagttgtggccagacctaaagattgtatctggtaagtaccaccctggccaaagccagggctccctggaaggagcaagccgtgatgtaaagaacatgataagtacctggatgcagagtaaccactcatgtcactgggccaaaggcctccgattcatgcagatggtgaggaatcaggctttcgacgtttccttgcagcaaagtccatttgaggcaatgtttggctataaagccaaatttgggctatattcctcaaacttgccccgggaaactgtggctactttacaaacggaagaagagctagaaattgctgaagaacagctagaaaatagcctttggatcaggcaggaagaaagggctgagattggagcagacagatctgatatggacgatgacatggatcccactcctgaagcttcagaacccagcacctcacaagggacttccggtctcctctgctggtgaacagatggctgctgggtggacagtcacaggtgtctctctgagcatagtcatctgagaactgttgccagaggccccagaggaaaagattgaaggctgcactctcaggtcaagttgtacatggcagtccttgctcaaaaagacaaaagttcaggtctgtgtatttattcttagggctgccataaaaaattaccacaacctggccgggcgcagcgctcatgcccgtaatcccagcactttggtaggccgaggtgggcgggtcacttgagatcaggagttcaagactagcctggccaacatgatgaaaccctgtctctactgaaaatatagaaattggccaggcttggagctgtgtgcctgtaatcccagctaaccaggaggctgaggcaggagaatcacttgaacccgggaggcagaggttgcagtgagccgagaccatgccactgcactccggcctgggtgacaaagcaagactctgtctc

SEQ ID NO: 1225 - DNA, 1859 bp, Homo sapiens
tagccagggcgggcggccacctctgccctactccttccctccgcgttccgggcctcggagccgccttgaggaggatgagtccctggagctggttcctgctgcagaccctctgcctcctgcccacgggcgcagcttcgcggcgcggggcgcccggcaccgccaactgcgagctcaagccccaacaaagcgagctgaattccttcttgtggaccattaagcgagacccaccatcttacttctttggcacaatccatgtcccgtacacccgagtttgggacttcatccccgacaactctaaggaggctttcctgcagagcagcattgtgtactttgagttggatctcacagacccctataccatctcagctctcaccagctgtcagatgctgccacagggcgagaacctccaagatgtgctccccagggacatctactgccgcctcaagcgccacctggagtatgtcaagctcatgatgcccttgtggatgaccccagaccagcgcggcaaggggctctacgcagactacctcttcaatgctattgccggaaactgggagcgcaagaggcctgtctgggtgatgctcatggtcaactccctgactgaagtggacattaagtcccgtggagtgcctgtcttagacctgttccttgcccaggaggctgagcggctgaggaaacagactggggcagtggaaaaggtggaagagcagtgccatccattgaatgggttgaacttttcacaggtcatctttgctttgaaccagaccctcctgcagcaggaaagcctgcgagcaggcagtcttcagatcccctacacgacggaggatctcatcaaacactataactgcggggacctcagctccgtcatcctcagccatgacagctcccaggttcccaattttattaatgccacgctaccacctcaggagcgcatcactgctcaggagattgacagctacttacgccgggagctgatctacaagcggaatgagagaatagggaagcgggtgaaggcccttttggaggagttccctgacaaaggcttcttctttgcctttggagctggtcatttcatgggcaacaacacagtgctggatgttttgcggcgtgaaggctatgaggtagaacacgcccctgctggacgacccatccacaaagggaagagtaaaaagacctccacacggcccactctgtccaccatctttgctccaaaagtccctaccctggaagtaccggcaccagaagccgtatcctcagggcactcaacgctgcctccccttgtgtcccggcctggaagtgccgacacgcccagtgaggccgaacagaggttccggaagaagcggaggcggtcacagcggaggccgcgactccggcaattcagcgatctgtgggtccgcctggaggagagtgacatagtcccgcaactccaggtccctgtcctggacaggcacatctccactgaactgcggctccctcgccgtgggcattcccaccacagccagatggtggccagcagtgcctgcctgtctctctggactcctgtgttctgggtgctggtgctggctttccaaacagagacacccctcctgtaacgactggaagcaccaggctaagaacctgacccctcggacttgaagaatggccattcctgtactccacattctggtctagccttgttgggcccaatccagaagagactgctcttgaaaaagcggcccagtgttgattcttctctttccaaggaatgtgactttgggttatccaactttgggggcaggtgtacagttttgtaacatagtgagttgtgtgaaaataaattataaatgagttgtatgaaaataaatacctttttttgtata

SEQ ID NO: 1226 - DNA, 2558 bp, Homo sapiens
gggcctggagcttcctccgcggggcccccaggcccgagggccgggctgctgatccgccaggcacggtgtaaagaatatccagctggtggctacagttccccctctggttttgctgccatgcatcctgggcgaactactggtaaagggccctctactcacactcagattgaccagcaacctccacggcttctcattgtgcacattgctctaccgtcctgggctgacatctgcaccaacctctgtgaggctctgcagaacttcttctctctagcctgcagcttgatgggccccagccgcatgtccctgttcagtttatacatggtacaagatcagcatgagtgcatcctcccttttgtgcaagtgaaagggaactttgctaggttgcagacctgcatctcagaactccgcatgttacagagagaagggtgtttcagatcacaaggtgcttctctgcggctggcagtagaggatgggctccagcaattcaaacaatacagcagacatgtgaccacaagggcagctctgacctatacctccctggagattactattctgacttctcagcctggaaaagaggtggtcaaacagttggaggaagggttgaaagatacagacctagccagagtcaggaggtttcaggtcgttgaggtcacaaagggaatcctagagcacgtggactcagcgtctcctgttgaggataccagcaatgatgagagttctattctgggaactgacattgaccttcagactatagacaatgatatcgtcagcatggagattttcttcaaagcctggctacataacagtggaacagaccaagaacaaatccatcttcttctttcttcacagtgtttcagcaacatttccagacccagagataatccaatgtgtctgaaatgtgatctccaagagcgactgctctgcccatccctactcgctggcacagctgacggctccttgagaatggatgaccctaaaggagacttcatcacactctaccagatggcttcccagtcatcggcctctcattacaagctccaagtgatcaaggctttaaaatctagcgggctctgcgagtcattgacatatggactcccgttcatcctcagacctacaagctgttggcagctggactgggatgagctggagacaaatcagcaacatttccatgctttgtgtcacagcctgctgaaaagggaatggctgctgttagccaagggggaaccaccgggcccaggacacagccagagaattcctgccagcaccttctatgtgatcatgccgtcacactccctcacactgctggtaaaggcggtggccacgcgggaactgatgctgcccagcaccttccccctgctacctgaggacccacatgatgatagccttaagaatgtggagagcatgctggacagcctggagctggagcccacctacaaccccttgcatgttcaaagccacctgtactcacacctgagcagcatctatgccaagcctcaggggcggctccacccacactgggagagccgagctccgagaaagcatccctgcaagactgggcagttgcagaccaaccgagctcgagctactgtggcccccctgcctatgactcctgtcccaggcagagcctccaagatgccagcagccagcaaatcttcctcagatgccttcttcctgccttcagagtgggagaaggatccctcaaggccctaagtcaccagcaccagagcccagctgcccagcttaaccatatccatgctcaggttcacataatggctatctgtggtcagacttgctctctatccgcctgagcctctgtgagtgagggctgactgggaaacaacagccttcctgtcctgtttcagtgctgtcccactcctcaagtctggaagcgacacacccgagcctgtcctttctccagcaaggactttcattttctttagaatcatttgctactgtttacacaggtgaagattaaacacccagtaagcttctaccattgttaggagcattcataactcagaatttcttcttgtagctctgtgtaagcaggtggatgaggtcagatcacctttggtaaactggacctcaggaacaaggatgaggttttgaaagctcataaaagacaagtaagattgaaatccaagcctcatttcagagcctgtgcccttcccactacaccaccaggcttcagcctccaaagagacaagtgcttggtacctacatgcaaagtgtgtgtgctggggggtgggagggctgcccagaacaggggagaggatggtgtaaaaaaagacctactcctttcctgttaccctctccccacatgtaccaaccttcctgttgctccctccatccacagaataatagctaccatttataaaatgtttactctgggctgggagcagtggctcacacctgtaatcccaacactttgagaggctgaggtgggatgatcacttgaggccaggagttcgagaccagcctgagcaacactgtgagacccccccgccatctctacataaataataaaaacttttaaaaaaacaaaaaaaaaaaaaaaa

SEQ ID NO: 1227 - DNA, 1839 bp, Homo sapiens
ttctaccgcgggtgtacacatggtttgccagggtgtgcgcgtcttcccaaggggtctggggaccaaattccagctcccgccatcgggaggcacggtaagagaccgtaggggacacaatcccgagcaccgcagatgccgaggtctccgctgcgctccagtctgtcaacagaggcttcaggaccgcggggtcccttcaaatgccccgccagtcccaggccaatcaccgcgcagcttcttccgggatcgtcgccaatcatcggccgttgcgtattgcgggtacagaggggtaagtgaagcttcgggcccttacatctttcttgaaggcaagaagcctctcctctacttcccagacaccccgcctcccccactagaaaaagcagccgaagcggctttatttaagggcaagtgggacgatgaggccagagaagtcagaaaggctccatatttgatatggtcaaataatggcgcccttaagagcagcctgtgacaattgaagggtggtcgccatattttcagaaggcaccttccgggtcccttaacccgggtgtctatgtccaagcggccatgaagtgaataaacactgaggaattatatttgtccctatcagaatcctcgaatccctagcagccagtccctgctacttcggttgcctcggctgcgttcggacgccacggctgggcggggccgcccttcctgtggacaacgacagctgaggccgggagcggggaggcggcggctccagggacctggcggccgccgatcggggctgcgaggccccatggcgccgcccccagccccgctcctggcgccgaggcccggggagacccggcctggttgcaggaagcccgggactgtgagcttcgcggacgtggccgtgtacttctccccggaggagtggggctgtctgcggcccgcgcagagggctctgtaccgggacgtgatgcaggagacctacggccacctgggcgcgctcggattcccaggccccaaaccagccctcatctcttggatggaacaggagagtgaggcttggagccccgccgcccaggatcctgagaagggggaaagactgggaggagctcggagaggagatgtcccaaacaggaaggaagaggaaccggaggaagtcccaagagccaaagggcctagaaaggctcctgtgaaggagagtcctgaagtgctggtggaacgcaaccctgacccagctattagcgtggccccggcacgggcacagccacccaaaaatgctgcctgggacccgaccacaggagcacagcccccggcacccatacccagcatggatgctcaggccggccagcggcgccacgtgtgcacggactgcggccgccgcttcacctacccctcactgctggtcagccacaggcgcatgcactcgggggagcggcctttcccctgccccgagtgtggcatgcgcttcaagaggaagttcgcagtggaagcgcaccagtggatccaccgctcctgctccggggggcggcggggccggaggcctgggatccgggctgtgcctcgggcccccgtccgaggtgaccgggacccgcctgtgctcttccggcactacccagacatcttcgaggagtgcggctgagcggcaccgcaggctggagttgagcctgaccttggcacgaaggactgacggatccctgaggtgggccactgagtcggggactccggaactgaaattcatgccctgggctttcctcaaggatccctcaagtttccaacttgtaaaaagaaaagtgcctgtaaagattcgaatagattagacttgccacccatctccccagtcttttgtttaacaaaaaaaaaaaaaaaaaa

SEQ ID NO: 1228 - DNA, 3674 bp, Homo sapiens
atggacaacccacaggctctgccactcttcctactcctggcctccttggtagggatcctcaccctcagagcctcttctggacttcagcaaaccaacttctcctctgccttctcttcagactcaaagagctcttcccaggggctgggtgtggaagttccctccatcaaacctcccagctggaaagttccagatcagttcctggattcaaaagcctctgctggaatctctgattccagctggtttcctgaggccctgagttccaacatgtctgggtccttctggtcaaatgtttctgctgagggccaagatttgagcccggtttcccccttctctgaaacccctggttctgaagtatttcctgatatttcggatcctcaagttcctgccaaagaccccaagccttccttcactgttaagaccccagcttcaaacatttctactcaagtctcccataccaaactgtctgttgaggccccagattcaaaattctccccggatgatatggatcttaaactctctgcccagagccctgaatccaaattttctgcagagacccactcagctgcaagctttccccagcaggtggggggcccactcgctgtgctggtggggaccaccatccggctccccctagtcccaatccccaaccctgggccccccacctctctggtggtctggcgccggggctcaaaggtgctggcagctgggggcctggggccaggggcacctctgatcagcctggaccctgctcaccgagaccacctgcgatttgaccaggcccggggggttctggagctcgcctctgcccagctggacgatgcaggggtctacacggctgaggtcatccgggcaggggtctcccagcagactcacgagttcacggtgggtgtgtatgagcccctaccccagctgtcggttcagcccaaggctccagagacagaggagggggcggccgagctccggctgcgctgcctggggtgggggccaggtcgcggggagctgagctggagccgggacggacgcgccctggaggcggcggaatcggagggagccgagacgccccggatgcgctcagagggcgaccagctgctcatcgtgcgccctgtgcgcagcgaccacgcccggtacacttgccgcgtccgcagccccttcggccacagggaggctgccgccgacgtcagcgtcttctacggcccggacccgccgaccatcacggtctcctcggaccgcgacgccgcgcctgcccgctttgtcaccgcgggcagtaacgtgaccttgcgctgcgccgccgcctcgcggccgcccgccgacatcacgtggagcctggcggacccggccgaggccgcggtgcccgcggggtcgcgcctcctgctgcccgcggtcggaccgggccacgcaggcacctacgcctgcctggcggcgaacccgcgtaccggccgccgccgccgctcgctgctcaaccttacagtggcggacctgccccccggggccccacagtgctcagttgaagggggtcccggggaccgcagcctccgcttccgctgctcgtggcccggcggggcccctgctgcctccctgcagttccagggtctccccgaaggcatccgcgccgggccagtgtcctctgtgctgctggcggccgtccccgcccacccccggctcagcggcgtccccatcacctgccttgctcgccacctggtggccacgcgtacctgcacagtcacgccggaggccccccgagaggtgctgctgcatccgctggtggcagagacacggttgggggaggcagaggtggcactggaggcctctggttgtcccccaccctcacgggcatcctgggcccgggaagggaggcccctggctccaggaggcgggagtcgcctgcggctcagtcaagatgggcggaaactccacatcggcaacttcagcctggattgggacctgggaaattactccgtgctgtgcagtggggcgctgggtgctggcggtgaccagatcaccctcattggaccctccatatcctcgtggaggcttcagagagccagagatgcagccgtgctgacttgggatgtggagcgcggggccctgatcagcagttttgagatccaggcatggccagatgggcctgctctgggcaggacttccacctacagggactgggtctccctgctcatcctggggcctcaggagcggtcagccgtggtgccccttccacctcggaacccagggacctggacctttcggatcctgcccatcctggggggccagccagggactccatcacaaagccgggtctaccgggccggccccacgttgagccatggggccatcgctggcatcgtcctgggctccctgctgggcctggcgctgctagccgtacttctcctcctttgcatctgctgcctgtgccgctttcgtggaaagactcctgagaaaaagaagcatccttctaccttggtccccgtggtcaccccctcagaaaagaagatgcatagtgtgaccccagtggagatttcatggcctctggacctcaaagtccctctggaggaccacagctcaactagggcctaccaagcacagaccccagttcagttgtctctgtaggcggaggctcaaagactgttcgcgcagccacacaggtgtgatcagagccagtggtctgccctgcacagggcgttttgggccagaacttcctatttcactccagcagcagccagggcctgctatgactgagggttggaccctgaaagtgggactttctgtctccctctcttgctgcagaagaagagtcttcctgtatttgtgcaagtaaggagatgtgacttcttggctgggaaactcttgctgatctaactgtgtggtttgcacaacctccaagcctctgcagcagacaggcagggcttgctgtgttgctctgagctagagagggagcttggccatgttctctgaaaaggtccccttacattcactttgccacctgtaggccacaccccatccagctcccagcatcttcatcttaaaacagatcagatcatgtcactcttctctttaaacgcttctacggcctgtgcatttcccttcagatattatccaaactcatcgtcgtgaccttcaaaaccttgtggtctggcctctgttggcctccctgacctcccctcccaattctttctctgcccccggactccagtatcacagtctgtctctcagccacaatttattttgcccctagagtttgctgtgcttataacacttctttttcccatatgtcattcatttctcaagtctaagagtagcagttaccatcttagacgaccgttcccttacccctcccttagtcttgggttaagtcccagaatccttgaatttgccgttcctgatacataaatatgtaatttcttgtgtggcctgagactctctctctaaactaagggctttacaaaagcagagaccacatcattaactcagcacttaacccagagcctcacacacagcaggcaatcaataaatatttgttgactgatcaaatgttttggtgccagtgaagagttgggcttgctgctgctgtcttcagcgtaagtcttgctttttcagctgggtttctaattgagaatttagagagtgcattggtgaggattcttttgactgcaagtaacaaaataaaatggtggcaagaa

SEQ ID NO: 1229 - DNA, 1758 bp, Homo sapiens
acctggtgggttcgcgtgcccagattgactgcttgtgggtggcatggcctcaggtggagaggcttgctgcggactcaggctggcgaatagccctggcgaacaacgggcggaggggaaggtgtctttcaagtcggtatttactctgaactgagggaagaaaagaacggaggccgcgtcagaccgagagctgctctgcggcggccagagagggaatcccaagctcttaatgggcgggggtgggggtagaaatgtctttttctattgtgtttgagaccggtaatattggggagggggagaacaagtattatcccacgcagtacaccccaatctcccagttcatttcctaatccttaaactccggtttcaaactccctcgctttgctcttcagttgcaggttccgatctttgggtactccaggagctgttctatagcccctgcttctggacctatggattctccatctagcgtttcttcctattcctcctactctctctcttcgtcttttcccacctccccagtgaacagtgactttggcttcccctctgatagtgagagggaggacaagggggcccatgggcccaggccagacactgttgggcagaggggaggttcacggcccagcccgggtcctatccgctgcaggcatcgatcgaaggtttccggtaaccagcatacaccatctcatccgaaacagcggggttcggcttctcctatggcaggatctggggcgaaaagatcaagagatggtgaactggagaccagtctaaacacccaaggttgtaccacagagggagacctgctgtttgcccagaagtgtaaagaactccaaggatttatacctcctctcacagacctactcaatgggctgaagatgggtcgttttgagagaggattaagcagttttcagcagagtgtggcaatggacaggatccagcgtattgtaggtgttttgcagaagccacagatgggggaacgttacctaggaaccttgctacaggtagaagggatgttaaagacttggtttccacaaatagctgcccagaagtcatcattgggtggtggcaagcatcagctgaccaagcattttccaagccaccacagtgattcagctgcttcctctcctgcatctcctatggaaaagatggaccagacacagctaggacatctagctttaaaaccaaagcagccttggcacctcacacaatggccagctatgaacctcacctggatccacaccactccaatttgcaacccccctctcagctccccaggtactatctcctttagccatggtcctttaggcactggaaccggcattggcgtcattcttttcctccagcatggagtgcaacccttcacccactctgccccaaccaccccagtcccacctactacagcatctcctgtcatccctggtgagcctatgaaactatctggagagggtcctcgttgctacagtttgccagtaactctgccatcagactggagctataccctatcccctcccagtctacccaccttggccagaaagatgaccataggacaccgggagcagcagagaagccatcctccagttgctgctgatgctcatcttctcaacctctagcccagggcatacagctgtccactgtgacttctactttgtgtaaatatttatgtatatatgtatttttactattaatgtgtgcatttgtgttgagggaagataaatcctttctgattaaagaaatttttttataccaaaaaaaaaaaaaaaa

SEQ ID NO: 1230 - DNA, 5451 bp, Homo sapiens
tcctgctgggtgccgaggtagccaggtcaggggtcaagagtggaacaccctcactggcccgggccggcgcgggagggctgtgtgatggcctcggagcgcccggagccggaggtggaagaagctgggcaggtgttcctgttaatgaaaaaggattatcgaatctcccgaaatgttcgcctggcttggttcctcagtcatctgcaccaaactgtgcaggccacaccccaggagatgctgcttcagtctgaacaggaattggaagtcctcagtgtcctgccccctgggtggcagccagatgaaccagtggtcccaaggccattcctcctggtaccttccacccgggtcaccttcctggcttggcagtatcggtttgtcattgagttggaccttagcccatctactggcattgtggatgattccacaggggagatcttgtttgatgaagttttccatgccctgtcccgctgcttaggcgggctgcttcggcccttccgagtgcctggatcttgcatcgacttccagcctgagatctatgtaactatccaggcctactcctccatcattggactgcagtcccaccaggtgctggtacagggctgcctcttggacccttcccagcgggaggtgttcctgcagcagatatatgagcagctctgcctctttgaggataaggtggccaccatgctgcagcagcagtacgatccccagagccaggcagaagaccagtccccagactcaggggacctactgggccggaaggtaggcgtctccatggtgacagctgatcttgggctggtcagtatgattcgtcagggcatcttggcactgcagttactaccctcgaactctagtgcagggattatcgtgatcacggatggggtgaccagtgtacctgatgttgctgtctgtgagacactgctgaaccagcttcgcagtggcactgtggcttgttcctttgtccaggtgggaggagtttactcttatgactgcagttttggccatgtgcccaatgtggaattaatgaagttcatcgcaatggcaacatttgggtcctacctgtccacttgtcctgagccggagccaggcaacctgggtctgactgtctaccaccgggcatttctcctctattccttcctgcgcagtggggaagcactgaaccctgaatattactgcggctctcagcaccgcctatttaatgagcacctggtctctgcaagcagcaaccctgccctggccttgcgccggaagaagcacactgagaaggaggtgccagccgacttggtcagcactgtgtccgtacggcttcgagagggctacagtgtccgagaggtcacactggccaaaggagggtcccaattggaggtaaagctggtgctgctgtggaaacacaacatgcgcattgagtatgtggctatggcaccctggcccctggagcctgagggccctcgagtaacacgggtggaagtgacgatggaaggcggctacgacattttgcatgatgtgtcctgtgcactaaggcagcccattcgttcattgtatcgtacccatgttatccggcgtttctggaacacgctgcagagcatcaaccagacagaccagatgcttgcccaccttcagtccttctcctcagtgcctgagcatttcacgcttcctgacagcaccaagagcggagtgccactcttctacatccctccaggctccaccaccccggtgctctccctccagcccagtggttctgactcatcccatgcccagtttgctgcctactggaagccagtgctgtccatggatgcaaattcctggcagcgatggctgcacatgcatcgcctggtgctaatcctggagcatgacacaccaatccccaagcacttgcacaccccgggcagcaatgggcgctacagcactatccagtgcaggatctcccactcctccctgacctctctgctgcgggactggagcagcttcgtactagtcgagggctattcttatgttaagctgctctccagtgccccagaccagccccccaattccttctacatggtccgtatcatttccaaggccccatgcatggttcttcgcctgggttttcccattggcacaccagcaccggcccggcacaagattgtgtcaggcttgagggaagagatcctgcggctgcgtttcccccaccgggtacaaagcaaggagccaacgcccaaggtgaaacgaaaagggctagggggtgctggtgggggcagctctccctccaagtcaccccccgtgctggggccacagcaggccctgtctgaccggccctgccttgtggtcctgcataagccactggacaaactgctcatcaggtatgagaagctgcccttggactaccgggcacccttcttgctgacattggagccaccaggtccactgcccttggtgtcaggccgctcagcctcttctagcctggcgtcactgtcccgctacctctaccatcagcgctggctttggagtgtcccgtcaggactggcccctgcgctgcctctcagtgccattgcccagctcctctccatcctcactgaagtccgactttctgaaggattccacttcgcctgcagtggggaaggaatcatcaacatggttctggagcttccaattcagaatgaaccaccagggcaggctgcagctgaagagaagcacacctgtgttgtccagtacatcctcttccccccacactctacctccaccaaagacagcttctcgacagatgatgacaatgatgtggaagtggaggccctggagggagactcagagctcaatctggtcactgaggtgtgggtggagccacagtatgggcgagtgggacctggccctggaatctggaagcacctccaggacctgacgtattctgagatcccgcaagctctccacccacgggatgctgcctgcataggctccatgctgagctttgaatacctgatacagctgtgtcagagcaaggaatggggtcctctgcccccagagccgagggtctctgatggattggatcagggaggagacacctgcgtccatgagatccctttccattttgacctaatgggattgctgccacagtgccagcagctccagatgttcttcctcttgcttgccagagctgcctggggcaggagctgagtgaccgggagatcccactgacccccgttgaccaggctgccttcttgagtgaggtgctgcggcggacctgccacgttccaggtgccgaggggccactgctgggggttcatgggatcccgaaggagcaagcagtcggcagcacccaggccacaggagactccgcttttacttccctgagtgtaggtcttcctgaaactctcaagcctctcatctctgcccagccccctcagtggcgctgctatgcaaggcttgtgaacccccagcatgtgtttctgacttttctcccagctaccttctcagatgtccagcgtctggctgcctgtggcctggagggaccccctcaagaggagacaaagcctaagtttggggattggagtggggctcccagtctgaaagatctaggaggaactgggatcaaagctacaaagtcccacgtccctgtcctcagtgtgaccctggctagtgacaatgcccagaatcaaggagagctaagtccaccattccgtcgagacttacaggcttacgctgggcgtcaggcttcccagacagagagtgcggatgggccccggacccggtgtcctgtctacatctacagctgttcactggaagcgctgagggaacaaatggttggcatgcagccccctcaggcgccccgagacctcatcttccggtgagtgccttcagtgttgacctaagtcctcgccgggccatggctcccagccaagaaataagtacacactaataggcgtgggcaggtaagttgctgccatatcctgctggctccttgcttgatttccctcagcaaacccttgaacttgctaggccatgaatacacttgatatgtgtctatagatgatccattggagtgtggatggctaatgagtgtgaggtatcacttaagggagttggtcaagttccattttcccttcgtttcctaggactcagttcctcgaccacccctccccatcctcagcctggatggaaccccggtacaaggaggcagctaaccactgtgccctgctgcaggagcatgcacagcggtgctatgtccgtgggctattccgcagcttgcagcaagcacagagtgtgacctcccaggatttgctgacagcggtagatgcctgtgaggagctactacaagaaatagacatcaccccatttctccttgcattgtgtggccacacttggggtttgcctcatgcacccccaagtcctggtcctctcagccctgggcccttcagcagcagcatggaggagggtgctgaacctcgggaacgagctatcctagcttctgaatccaggttaggattatacttgaatgatggataagggggtacacagaccaagtccctataaacaaggaccttccagtccaggggaatgactgtgcaaggtagtatctaagcacctgagaagcagtagtgctttgtcgccggctcacggactcccatgcagccttcctcaccaatttggcacaggcagcagtctccctcccaggctctccccatctcccctgctttggtgttgagtgatgagctgagtcagggatagggagtcccctggtgctaaccgtgaacgtagagacttgttctgaggacatccacacaatagtaggaatctccccaaccaatctgtgaatttcatgggggccaaaactgtattttgctcactgctaagtccccagctcaccttaggggctcagcaggtccctgttgaagggaggaaggggaggagagaaggagaaaggcaagcaggcagacagctatgggtctagcatctgcagtgtgttagcgttggggaaacagaagaactagaaggatggatatgctgatgactcctagattggaactccggtccggttctttctctggagctctagatactcactttttgtgccccccaaatgaatgcattttcttcccactaacccttgatttttcttcattcatggtgaaaaatatcaccctcaatctagtgatccaagtcagaaaactgggagttatcgctactctgtttcatagaaatccccatccatcaagaaatatgaaagttaaggctgtaatatgaaatattacagtcactcactcctgtaatcccaacactttgggaggctgaggcgggaggatcacttgagcccaggagttcaagaccagcctgagcaaccaggggagaccttgtttctacaaaagaatttaaaaattagctgggcgtggtggcatatgcctgtggtcccagctactcagaaggcaagtggtgatggcgccactgcactcctacctcagcaacagagtaagactctgtccc

SEQ ID NO: 1231 - DNA, 3042 bp, Homo sapiens
gttctctcgctcaggtctctgcatgtagttgtcacttgcagctccatttccatcacgtggtaaaatgccctttctcttctttcctgcagatggatggtttctagtgtgcttccaaaccccacctcggctgagtgttgggcagcacttctacatgatcctatgactcttgatatggacgcagtcctgtcagactttgttcggtccacgggggcagaacctggtctggccagagacctgctggaaggcaaaaactgggacctgacagccgctctgagcgactatgagcagctccgccaggtgcacacagccaatctgccacatgtgttcaatgaagggcggggtcccaagcagccagagcgagagccacagcccgggcacaaggtggagcgaccctgcctgcagaggcaggacgacattgcccaagaaaagcggctttcccgggggatttcccacgccagctcagccatcgtctccctggcccggtcccacgtggcaagtgaatgcaacaacgagcagttccccctggagatgccaatctacacattccagttgccagacctgagcgtgtacagcgaggatttcaggagcttcatcgagcgggacttgatcgagcaggcaacaatggtggctttggagcaggcaggtcgcctgaactggtggtccactgtgtgcacgagctgtaaacggcttcttcctctggccacaacaggggatgggaactgccttttacatgctgcttcactgggaatgtgggggtttcacgaccgggacctggtgttacggaaagctctctataccatgatgaggacgggagctgagagggaagccctgaagcggaggtggaggtggcagcagacgcagcagaataaggaggaggagtgggagcgggagtggacggagctgctgaagctggcctccagcgagccgcgcacacacttcagcaagaatggcggcacgggcgggggtgtggacaactctgaggaccccgtgtacgagagcctggaagagttccacgtttttgtcctagcccatatattaagaaggcccatcgttgttgtggcagatacaatgttaagagactcaggtggagaagcgttcgcacccatcccattcggagggatctacctgcccttggaggtccctcccaacagatgccactgctcgcctctggttctggcctatgatcaagcccatttctctgcccttgtgtccatggaacagagagaccagcaaagagaacaagccgtgatccccctgacggattctgagcacaagctgctgcctctgcactttgcagtggaccctggcaaggactgggagtgggggaaagacgacaacgataacgcccggctggcccaccttatcctgtcgctagaagccaagctgaaccttctgcacagctacatgaacgtgacgtggatccggatcccctccgagacacgggcgcccctggcacagccggagtctcccacggcctcggcaggggaggacgtgcagtccctggccgactcgctggactcggaccgcgattcggtgtgcagcaattctaacagcaataacggcaagaacggcaaggacaaggagaaggagaagcagcgcaaggagaaggacaagacgcgcgccgactccgtggccaacaagctgggcagcttcagcaagacgctgggcatcaagctgaagaaaaacatgggcggcctcggcggcctggtgcacggcaagatgggccgcgccaactccgccaatggcaagaacggggactcggccgagcggggcaaggagaagaaggccaagtcgcgcaagggcagcaaggaggagtctggtgcgtcggccagcacgtcgccgtcggaaaagaccacgccgtcgcccacagacaaggcagcgggcgcgtcgccggcggagaagggcggtgggccgcggggcgacgcctggaagtacagcacggatgtgaagctgagcctcaacatcctgcgcgccgccatgcagggggagcgcaagttcatcttcgccggcctgctgctcaccagccaccggcaccagttccacgaggagatgatcggctactacctgacgagcgcgcaggagcgcttcagcgccgagcaggagcagcggcgccgcgacgccgctactgcggccgccgctgccgccgccgccgccgccgccacggccaagcggccgccgcgcagaccggagacggagggcgtgccggtcccggagcgcgcctctccgggcccacccacgcagctggtgctcaagctcaaggagcggccgagccccgggcccgcggcagggcgtgcggcgcgggcggcggcgggcggcacggcctccccggggggaggcgcgcggcgtgcgagcgccagcggaccagtgcctggccgcagccccccggcgccagcgcgccagagcgtcatccacgtgcaggcgtcgggcgcgcgggacgaggcgtgcgcgccggccgtgggggcgctgcggccgtgcgccacgtacccgcagcagaaccgctcgctgtcgtcgcagagctacagcccggcgcgcgccgccgccctgcgcaccgtcaacacggtcgagtcgctggcgcgcgcggtgcccggggccctaccgggcgcggcggggacggcgggggcggccgagcacaagtcgcagacctacaccaacggcttcggcgccctgcgcgacggcctggagttcgccgacgccgacgcgccgaccgcgcgctcgaacggtgagtgcggccgtggcggcccggggccggtgcagcggcgctgccagcgcgagaactgtgcgttctacgggcgcgccgagaccgagcactactgctcctactgctaccgcgaggagctgcggcggcggcgcgaggcgcgcggggcccggccctgagcggcgcggcgcggcgcgggcggcgaggttctaccttcgaggatttcttttccattgtgtcggtgtcttttttacatgccctggtccaccggaaggccggcgcctcctctgtcagtgccgtgtacgtgtttggtcaaacgttcctaatggtgcctgaacctacactga

SEQ ID NO: 1232 - DNA, 1979 bp, Homo sapiens
ggaggccctgggaccgcggaagaggcttcagacgctgcagcgatgcctcgcccacggcggatgcctttggtgcttcatgaagaatatttccagatatctcacagacattaagcctttgcctcccaacaaaaagacagactgattaaaataatgagtatgcagggacagataacagattcaaatataagtgagattttacatcctgaagtccaaactctagatctacggagctgcgatatatcagatgctgctctcctgcacctgtctaactgtagaaaactgaagaaattaaatttaaatgcttcaaaagggaaccgagtttctgtaacttcagaaggaataaaagctgtggcttcatcttgttcatacctacacgaagcttctttgaaaagatgctgcaatctcactgacgaaggagtcgttgctcttgcactcaattgccagctgctaaagatcatcgatttaggtggctgcttaagtattactgatgtgtccttacatgcattaggaaaaaactgcccatttttgcagtgtgtcgacttttcagctactcaggtatctgacagtggtgtgattgcacttgttagtggaccttgtgcgaagaaattagaggagattcatatgggacattgtgtaaatctgactgatggggctgtcgaagctgtccttacttactgtcctcaaatacgtatattactcttccatggatgccccttgataacagatcattcccgagaagtgttggagcaattagtaggcccaaacaaactaaagcaagtgacatggactgtttattgatgcttttttgaagatgatcaatgctaggaaagcttatcaaaactactttcccaggaaaccatctatagagatttgcattctacttaatgttaacactatttttaattattttattgtgttaagttataactctcagagaattagctaagtcttggtatatacatggtttgtgctttactcttaaacatctttaaagtgctattattctatatctgttggatgagtcattatttttgaaatgataatcctagcatgaactctgatctatggtgttggattctgtttcttaaataactttaaaattaactgttttcccttgagatttccttctcctatgtaggtatttgagctattgttctaagtttacctgtaagtataaaccttgggagaatctaagtaaacatatttctaaaagcatagttaccttcctattttctggctcttaccttcttggagtatttaaatgcccatttgccaaaagcagacctgaacatcaagcctgttaattcttcaaagaatttaggtatttgtttcaccgaaatgaagtgacttattagccattcagcgtattagtattacagaggctcttgctcagccacatccattcattgatttttatggctactcttcccagttacattttatgcatctgtaagctttccttccttagcaaaattgcattcaaaaatgtgtaaaaatgagtaaatacagaatatcactacagagacttgtatcctcaggtttattgatttcacattgtgaaataaacagcaaaggtcttagttttcaagtgaaaactttttggtaatcacaaaattacctgacacataccacgcttaaaccaacccccaaatttagcatattcattttgccatgagccagtcttgagattttcttaaaagatttcttattttgcctctgatgtagtgaaaaacggggtaagtatgctaactttcttgtatatgttggggggtacttattcaactccatttcttgtccttacaagatttataaatgtggtatgtttatagtgtggatatatatgttgccactgcaaaggtggtgcatatgtatatatgtgcaaaatgggtaaggcctgttctaactatgaaatttttctaaagacaaattcaataaaatttaatactgaatatttaaccaagtcaaaaaaaaaaaaaaaa

SEQ ID NO: 1233 - DNA, 1631 bp, Homo sapiens
gggacagggtttcaccatgttaaccagtctggtcttgaattcctgacctcaagtgatctgcctaccttggcctcccaaagtgctgggattacaggcatgagctgtcgcactcagccaacattcctgtttttgaaaatcctccaatccctgaagtctgtattacaagaccaattctgcattgctgagagagactgtgctttacagagagtaagatccttgatactggctcagcatggaacatctggcacacagtatgcactgaggaaatacttgttggaataatcagtgaatcatagatgaaaacttaaccttggaatttattatgagactgctcagaggaagagaatgggagacaaaggacctggtgattagacccccaagacactgggctgtctgcttgtgtctcgggtggaacaggcccagcgagagtctttagggccagaactcaagaatttattgagcccttgttctaggcacttgggattcaccagtatacaatggagacaaaaatccctgccctggagcagcttacattctagcatggcaaacaggcagtaaacagcccattctggctgctgtattgagaagagaatgtggtggacagatatagaagcatggaaacctgatagggctattgcaatcactcagaaaagaggcgatggcagcttggacctgttggaagcagtagagtgcttccagggaggagaaaggacctgaaggttaatttgatcaccaatggccaatgatgtaatcagttatgcctatgtaatgaagcttccgtaaaaaccaaaaggattgggtttgattgagcttctggatagctaaacatgtggaagttccttgaggatggtggtcctaaacaggggttaccagaaaatttaaagttacgccagtcactcccattctattgctgagagaaaatacagagcggtgaagagcttacagtcgggtgagcaagatacgcccccaatgttagctaatgatgtaaggcatcaacaagaaatgtgggggttcaggaaagtggaaggtggggtcgtccaaagcctgggaaagtcttcagttgaaggcgagacagatgggactattagtgagtttcgagagatccaacgcctcgccgccttcgcttcatttttgtctcacgccccacccttgaacgcgcggcgccttttgaccccgccgccgcgccgtagaccgcgctgcacgccggcggcagccatggcggatgtgtcagagaggacactgcagttgtccgtgctagtagccttcgcttctggagtactcctgggctggcaggcgaaccgactgcggaggcgctacttggactggaggaaaaggaggctgcaggacaagctggcggcgacgcagaagaagctggacctggcctgagactctgcgccttccgccccattctgtccccctcatggccaccttgccatgtccgcgccggagccccggtccgccggcgcccagaaccaggcttgccacacagtccccgcctgccatggccggctcttcctggagtgttgcttgttgaagatgcatatagactaccggaaagaaatgacttcttcttgcactttatgaatcaattttatttttaaaataaaaaaattaaacatcaaaaaaaaaaa

SEQ ID NO: 1234 - DNA, 732 bp, Homo sapiens
atgggccagacggcaggcgaccttggctggcgtctcagcctgttgctgcttcccttgctcctggttcaagctggtgtctggggattcccaaggcccccagggaggccccagctgagcctgcaggagctgcggagggagttcacagtcagcctgcatctcgccaggaagctgctctccgaggttcggggccaggcccaccgctttgcggaatctcacctgccaggagtgaacctgtacctcctgcccctgggagagcagctccctgatgtttccctgaccttccaggcctggcgccgcctctctgacccggagcgtctctgcttcatctccaccacgcttcagcccttccatgccctgctgggagggctggggacccagggccgctggaccaacatggagaggatgcagctgtgggccatgaggctggacctccgcgatctgcagcggcacctccgcttccaggtgctggctgcaggattcaacctcccggaggaggaggaggaggaagaggaggaggaggaggaggagaggaaggggctgctcccaggggcactgggcagcgccttacagggcccggcccaggtgtcctggccccagctcctctccacctaccgcctgctgcactccttggagctcgtcttatctcgggccgtgcgggagttgctgctgctgtccaaggctgggcactcagtctggcccttggggttcccaacattgagcccccagccctga

SEQ ID NO: 1235 - DNA, 1319 bp, Homo sapiens
gattccgagcgcctccactgctggtccgttggccagatcaactcgccgcgtgggccggccgttccctgagagtctgagcgctcgccgcacccccttccgagcttctattggccgtagcagacgtccgtctgccgctatctccgccccaatacggaagcggcctagtcctccggctccgacagctgggtgtccaggccatggggcagccctgggcggctgggagcacggacggggcgcccgcgcagctgcctctcgtgctcaccgcgctgtgggccgcggccgtgggcctggagctggcttacgtgctggtgctcggtcccgggccgccgccgctgggacccctggcccgggccttgcagctggcgctggccgccttccagctgctcaacctgctgggcaacgtggggctcttcctgcgctcggatcccagcatccgtggcgtgatgctggccggccgcggtctgggccagggctgggcttactgctaccaatgccaaagccaggtgccgccacgcagcggacactgctctgcctgccgcgtctgcatcctgcgtcgggaccaccactgccgcctgctgggccgctgcgtgggcttcggcaactaccggcccttcctgtgcctgctgcttcatgccgccggcgtcctgctccacgtctctgtgctgctgggccctgcactgtcggccctgctgcgagcccacacgcccctccacatggctgccctcctcctgcttccctggctcatgttgctcacaggcagagtgtctctggcacagtttgccttggccttcgtgacggacacgtgcgtggcgggtgcgctgctgtgcggggctgggctgctcttccatgggatgctgctgctgcggggccagaccacatgggagtgggctcggggccagcactcctatgacctgggtccctgccacaacctgcaggcagccctggggccccgctgggccctcgtctggctctggcccttcctggcctccccattgcctggggatgggatcaccttccagaccacagcagatgtgggacacacagcctcctgactccaggaagagccagagctgtgcagggaggaaggggtgagaggggggcccccacacctagactcagtaaggaagtcgggttggaccttaacatctgcattggacaactccaccccttccttggccttgcccctgcccgcctacactcctacgtgtccagggcttgggccgtgacttaggcagaggagtgcagaggagggtctggcaggggctgctcaggccgcctagctgcccctttgccaggttaataaagcactgacttgttaa

SEQ ID NO: 1236 - DNA, 2997 bp, Homo sapiens
cctggccagcgctgctggcgggcgttaggcggccaccatgctgccactgggctcagagcccgccctgaatgagctgctgcttcgcaaggaggaggagtggagggcgctgcaggcacaccgcacccagctgcaggaggcggctctgcaggacacacggagccagctggaggaggcgcaggggaaactgcggtgcctgcaggaggactttgtctacaaccttcaggtgctggaggagcgggacctcgagctggagcgctatgacgccgccttcgcccaggccagggagtgggaagaggccaggcgggcagaggtgagcgagctcaagatagaggcagctaagctgaggcaggcgctagccagagaggccaggaaggtggaggagctgcagcagcagcagcagctggcattccaggagcatcgcctggagctggagcgcgtccacagtgacaagaatggtgagattgaccaccaccgggaacagtatgaaaatctaaaatggacactggagagaaaacttgaggagctcgacggtgagcttgctctgcagagacaggaactgctgctggagtttgaatcgaaaatgcggaagagggagcacgaattccgtctgcaggctgacaacatgagcaacacagccttgtcccgggagcttaaggttaaactactgcacaaagagctggaggctctgaaggaagccggggcaaaggctgcagagagtctgcagagggcagaggccaccaacgccgagctggagaggaagctccagagccgagccggggagctccaggacctggaggccatgagccgcgcccgggtaaaggatttagaggataaacttcactctgtgcagctaaccaggaagaaggaagaggaaacatttaagaggaagcatgaggagctcgaccgtctggccagggagaaggatgcagtgctggtggcggtgaagggagcccacgtggagcagctgcaggagctgcagaccagggttctggagctgcaggcccactgcgagaccctcgaggcgcagctccgcagggcagagtggagacaggctgacaccgccaaggagaaggacgctgccattgaccaacttcgtgaagatgcatcaactgtaaaatctgcctgggatgctcaaattgctcaactatctaaggagatggtctccagagaccttcagattcagacgctgcaggaagaagaggtgaagctcaaggcacaggtggcccgatcccagcaggacattgaaaggtacaagcaacagctgtccctggcagtggaaagggagcggagcctggagcgtgatcaggtgcagctgggcctggactggcagcgccgctgtgatgacattgaaagggaccagatccaaaagtcagaggccctgattcagggtctgagcatggcaaaaagtcaggttgctgccaagctgcaggagacagagcaggcgctacaggagcaggaggtggtgctgaaggccgtgaccctggaacgagaccaggccgtgcaggccctgaggatgcatgggctccccagaccaggggcacagatgcttctcaggcagcatgaagaagaaataagtaaagactttccatccagtgagatccagcggctccgagagcagaacacgagcttgcgaaacgcgattgcccagatgaggaaagaaatggaggctctaagccatcagattcctcctcccatccagacagcggcagagagcacagatgcaaaccagcctgacccagaggctgggggagatgccgccactcctgattatgttctggcccttgaagcagaaatacgaactctaaagcataagtttaaaactctggaaaagcatctagaagatgtgttggatcctttaaagatgtcctcacctcatgctgagtctcagcccagcgtccgcacctcgacagagacgactggagggtctgcccaagctggtcaagccggagggtctgtccaagctggtcaagcaggaggatctgtccaagctggcccagtatcctctggactggcactcaggaagctcggggacagagtgcagctcctaaacctgctggtgacacgactcagacagaaggtgctgcgggaacccctggagccggccgctctccagcgtgagcttccccgtgaggtggaccaggtacacctggaggttttggagctgcggaagcaggtggctgagctggggaagcatctcaggatagcccagcacgggggagcggagccttcaggcaggaagcagcccccagcctcggacgccgtggcccttgggagagaggacgccaagagtgccgaggatgaggctccttccagacacttgggaaagcaccagccccgctcagcacaggtgggcagcagacttgacgccctgcaaggcccgaagacacaacacagcatccacacggtgacctgtaaatcacctcggcagaaagaagacaggtccccaaagccaccccaggctccccagcaccctgaggagcatggtcgccaatcccacagctcctcctcctttgccagtggcaccctccaggacatgtggaggttgctagacctgggatccagcccttctggtgtcacctcccagggtgactcaactccagagctcccagctcctccagcagccgacaggaggcccgtcaagatgcaggcaggcattgccaccccagggatgaagacagcagcccaggcaaaggccaagaccacaggagcctcccggtctcatcctgcaaaagctaaaggctgccagaggccccccaagatccgtaactacaacattatggactgacttcctccccccaccccgccccactaaggggtgctcggggcctccgcatggtgcctgtgctttcacctacgtgttgtgggggggtgtgggcacagcgtgcagggtggaggcagggagctgcagggcaggctcccaaatgctgctgaggcgaccctgctgactgaaggcctccctgagcacagggcccattaaaaccaggttcctccctgggg

SEQ ID NO: 1237 - DNA, 789 bp, Homo sapiens
tgcggccgcccttccgcaatcggagccctcacagaggccaaactgatataaatctgcttaggaggcctgattcacagacgctacaggatggagcggggcgcaggagccaagctgctgccgctgctgctgcttctgcgggcgactggtttcacatgtgcacagacagatggccggaacggctacacggcggtcatcgaagtgaccagcgggggtccctggggcgactgggcctggcctgagatgtgtcccgatggattcttcgccagcgggttctcgctcaaggtggagcctccccaaggcattcctggcgacgacactgcactgaatgggatcaggctgcactgcgcgcgcgggaacgtcctaggcaatacgcacgtggtagagtcccagtctggaagctggggcgaatggagtgagccgctgtggtgtcgcggcggcgcctacctagtggctttctcgcttcgcgtggaggcacccacgaccctcggtgacaacacagcagcgaacaacgtgcgcttccgctgttcagacggcgaggaactgcaggggcctgggctgagctggggagactttggagactggagtgaccattgccccaagggcgcgtgcggcctgcagaccaagatccagggacctagaggcctcggcgatgacactgcgctgaacgacgcgcgcttattctgctgccgcagttgaacggcgccgccgccgccgctctctcccgggccaggaggctagtcccacctcttgctattaaagcttctctgagttgaaaaaaaaaaaaaaaaa

SEQ ID NO: 1238 - DNA, 1331 bp, Homo sapiens
accactgtggttctactatgccttctgaccccgtcttggacttcaactgggagaatgtggagccatttgaacaggctcctcttctggagcatattttcttctgtcacttgtagaaaagctgtattggattgtgaggcaatgaaaacaaatgaattcccttctccatgtttggactcaaagactaaggtggttatgaagggtcaaaatgtatctatgttttgttcccataagaacaaatcactgcagatcacctattcattgtttcgacgtaagacacacctgggaacccaggatggaaaaggtgaacctgcgatttttaacctaagcatcacagaagcccatgaatcaggcccctacaaatgcaaagcccaagttaccagctgttcaaaatacagtcgtgacttcagcttcacgattgtcgacccggtgacttccccagtgctgaacattatggtcattcaaacagaaacagaccgacatataacattacattgcctctcagtcaatggctcgctgcccatcaattacactttctttgaaaaccatgttgccatatcaccagctatttccaagtatgacagggagcctgctgaatttaacttaaccaagaagaatcctggagaagaggaagagtataggtgtgaagctaaaaacagattgcctaactatgcaacatacagtcaccctgtcaccatgccctcaacaggcggagacagctgtcctttctgtctgaagctactacttccagggttattactgttgctggtggtgataatcctaattctggctttttgggtactgcccaaatacaaaacaagaaaagctatgagaaataatgtgcccagggaccgtggagacacagccatggaagttggaatctatgcaaatatccttgaaaaacaagcaaaggaggaatctgtgccagaagtgggatccaggccgtgtgtttccacagcccaagatgaggccaaacactcccaggagctacagtatgccacccccgtgttccaggaggtggcaccaagagagcaagaagcctgtgattcttataaatctggatatgtctattctgaactcaacttctgaaatttacagaaacaaactacatctcaggtagagacagggttttgccatgttggccaggctggtcttcaactcctgacctcaagtgatccgcccacctcggactcccaaagtgctgggattacaggcgtgagccacctcgcctggccctccatttcctgatctagtcttatatccacgctcaccacctcagcacgctcagacccacgctgctgtgggctcctctggctcctggaagagtgcgtccg

SEQ ID NO: 1239 - DNA, 1403 bp, Homo sapiens
gagagcggtaggcgcgggagcgcggcccctccgaggtccgcccgcggccggggagctgcctggcacccgcggcttccaaaggggaaagaaagttgcgcccgcgccaggcgcagcgcgctcggcggacgcggcctttcgggcgaaagttaggaggggccgggctggcgggcgggcgggttccgggggctcctttccgcaccagcggcggtcgctccccgtgggcgggacctcgggcgtgatcgtcgaggagaccgcggctccctcacctgccggcttgttcctcggggtccgcggagcgagcccagctctcggcgcgtgtcggagtctcccagccccgcggccccgagcgcacgatgcgcggacccgggcaccccctcctcctggggctgctgctggtgctgggggcggcggggcgcggccgggggggcgcggagccccgggagccggcggacggacaggcgctgctgcggctggtggtggaactcgtccaggagctgcggaagcaccactcggcggagcacaagggcctgcagctcctcgggcgggactgcgccctgggccgcgcggaggcggcggggctggggccttcgccggagcagcgagtggaaattgttcctcgagatctgaggatgaaggacaagtttctaaaacaccttacaggccctctttattttagtccaaagtgcagcaaacacttccatagactttatcacaacaccagagactgcaccattcctgcatactataaaagatgcgccaggcttcttacccggctggctgtcagtccagtgtgcatggaggataagcagtgagcagaccgtacaggagcagcacaccaggagccatgagaagtgccttggaaaccaacagggaaacagaactatctttatacacatcccctcatggacaagagatttatttttgcagacagactcttccataagtcctttgagttttgtatgttgttgacagtttgcagatatatattcgataaatcagtgtacttgacagtgttatctgtcacttatttaaaaaaaaaacacaaaaggaatgctccacatttgacgtgtagtgctataaaacacagaatatttcattgtcttcattaggtgaaatcgcaaaaaatatttctttagaaacataagcagaatcttaaagtatattttcatataacataatttgatattctgtattactttcactgttaaattctcagagtattatttggaacggcatgaaaaattaaaatttcggtcatgttttagagacagtggagtgtaaatctgtggctaattctgttggtcgtttgtattataaatgtaaaatagtattccagctattgtgcaatatgtaaatagtgtaaataaacacaagtaataaatgaagtgtttgttataaaaaaa

SEQ ID NO: 1240 - DNA, 5721 bp, Homo sapiens
agtcgtaactcggaagccggagcccagacgggcccgcggcgggggggtgggggctgcgcgggggcgggagtggcggaggtggccgcccctggcggcgggtttgtttatcccggggaagaagtttaggagcgggagatagggaaggagggcgggtcggggaggaaggatgcggttcggcggaggcggccgccacagggacttgccgccatcacccctgctgccaccaccgcagcctcgggctcccagggcggacacggccaccgcctcagcgggagaggagtctccaccaggactgaccgctgccgcccagcacgtccaggtaaggtactcaactgtgtggggtactacataaatcctgaaagactacaataaagtggtgatgtctcgggaacccaccccacctctacctggagatatgtctactggtcccatagcagaaagctggtgttacacacaggttaaagtagtaaaattttcctatatgtggaccattaataacttcagtttttgtcgagaggaaatgggtgaagtgttaaaaagttcaacattttcatctggcccaagtgacaaaatgaaatggtgcctgagggtaaacccaaagggattagatgatgaaagtaaagactacttgtccttatatttgcttttagtcagctgccccaaaagtgaagttcgagcaaaattcaaattttcccttctgaatgctaaaagggaagaaacaaaagcaatggaaagccaaagagcatatcgatttgtgcaagggaaggactggggttttaaaaaattcattagaagggactttttgcttgatgaagctaatggtcttttaccagatgacaagcttacattattttgtgaggtgagtgtggtccaagattcagtaaacatatcaggacatactaatacaaatactttgaaggtgcctgagtgtcgtctagcagaagatttaggtaatctctgggaaaacacaagatttacagactgcagttttttcgtgagaggacaagaatttaaagctcataaatctgtgcttgcagctcgatctccagtttttaacgccatgtttgaacatgaaatggaagaaagcaaaaagaatcgagtggaaataaatgatttagaccctgaagtttttaaagaaatgatgagattcatttacacagggagagcaccaaaccttgacaaaatggctgacaacttgttggcagctgcagacaaatatgcactggaacggctgaaggtcatgtgcgaagaagctttgtgtagtaacctctcagtagagaatgttgcagatacccttgtccttgcagatttgcacagtgcagaacagttgaaagcacaagccatagactttattaataggtgcagtgtacttcgacaacttgggtgtaaagatgggaaaaactggaacagcaaccaagcaaccgacataatggaaacatcagggtggaagtccatgattcagtctcaccctcatttagtagcagaagcctttcgagcactagcatctgcacagtgtccacagtttggcattccacgcaaacggctaaaacagtcctgaaatcttccatgaacagttgaaaaatggaattgactttcactcctccaggtccagaaggattctaatacacaaaccataagcaagagttgtttctgttattttgtccacagaacagaagctgaaaaagcatattgcttgcatttcaggtggataatttatggtttattcttcagctttaaattagactgattaattcacttcaaggccttaaattatcttcaatgacttctcttgttcatataatactttaattttttttattgtgccttgtcattttgaccaaggctatgcaggattgcactagctccataatgcagtaatattgataactgaagatactaagtttcaaaaggatcttccattattttgcaaaaagaaaaatgaattttatagggtttgtcctatgctatctcaaagtttaagttctctttaaaagcacttgtattggagattaccagtaatatctccaatctaagttctataaatatgggagaaccctcttaccttcaaggtaagttatggcaatacactgcttcaattctaatttatttttcatttcagggggcaaatatgcaatgagttggcctagatttttagtgacatttatgatgtttgtcttgtatgttaactgtccaacaaactgtgggtttattctaagtttacaattattgagaactgattgaggttaagatttcatgaagaaagcatgtattgtgtggaagtaatttttttttaatttatactgacctacatttatacgaagaattctgtacatgttaaaagtaaggatgaccaaatgcaaatttaatgagtgggccaattaagaaagatacatatgcacttttactgtgtaacttttgtatgctgaatggtacatatatttttttgcttttgagggaattaataaggtataattaattgtgtcttaacttttcaaagaaatttttagatggaggcaactgggatgtttgtgataatagatgagaaagacatccttgattgtagttaaattggtttggattacagatattcattattgaattgactcctattttctcacactttggaaaagacacctgaacaataaatgaatcctggatagtctactctccttcaaacaattaactgatacttgcctttgggagatgcatacaaaaggagagaacccttagactatgtcaggtcacactaggaacctcccctcactccccgtttttcttcattgtgtttcagttactgtactaacattgtggatgatactgaaattctgcataatgtgaacaggataaactatttataaactgcttttcatgggccagttctttattataaatgaattttagctttaaatgcatatacacgttcagtgtttgatagttgtgttcttaagggaggtttgttctggtgcattgtcctggagaagcagaagcagtcagtgtcggggtaccacatctgacttactgtggtggtgaccagtgtgcttcttaagggcaagatttatatttgaccacaagggaaaaagtgtgtcactggaaaaaaacgcatatacctatgtttgcaaacataactattcttcagattaaaatttgtataatttgtttatttaatgtttgaattcaggacaaaagaaaaaatgaagcttgaggtgttttcaaatagaccttatttttgctatctctttgttaggtgttaactgaagcaattcgaatatgtccagattcatttggattcatatttacattgaaaaaactcaactaagcatttgttatccacaacaacctagagtttaaaaagatcgtattttcacctgtcttcattactttctatgtagtttcattctttgtcgtggtaacttaaatttgaaattggaagaatctcttgggatagaagaaagattcttacctggtgatggaacttcatacttcatcctgtgtaagagtattatgggaagtagaaattcacttccttaaatccatcgtaagattgagcctcaagtttgcaatatacaattttaaaaatacacatacatacatacatatgtatacatttccagttttaagattttgcgagggtcttataagaaaacaaaaattccctcaggctatagaattatgttgtcatatatcagaaaagtactgatgtatccatttatatccaatgcgcaccaccggcacattgtgatttaattcaccgcttgaatctatatttctaaccacagtgacttcagtaaaaataccgtataatgaacatttcagcttcttcttacttactcgagagtttattgcaaatcttaaggattttattataaagattttttttttagtttggtagcacattttgtaccaaaaatgtcaaacactgtgctgtaagaatatccatgtttgtagaaatgtccacttttcagataatataatgcctaccattatactaacagaatcatatggtagttgatttatttttttatttattatgtatatttttggtattgtgggttcttgaggcaatgataaaaacacttaatgtattctgacatgagtgctctaatagcctccttctcctcatttttaaactgcatacattactttcaaaataggtatagatattctgtcccgccttttgagctattagcctgttcctgtttccctttgtcacctaagcaaggctttttctgagaaggtagtgaatggtttcaaatgttgcatactataagaataatcattgggtaactgttgtttagaccaacacttagaaatactatatttgtgccttttcatttttaattttaatgtgtgttgatatttggagcacaaataatgaaggtgccataatatggcttgccaatgttacctccttgaatagtcatgtgtcattgtcttgaattggtaattggagaaccttgcatgaaatatgtgatcgtgtgtgtgtgtgtgtatgcgcgtgtgtgtctgtgtgtttgtgtacatacctgtatttgcttggggcttgtgtgtggtatgttacaaagagtgaatttctggaaatagaaatcagttaaatgttgaaagttcaggttagcagaaatatttcatttaaatatgctttactttggaggacaattgattaacagaggaaatgataattttcaaaaatgtgatcaatttactgcatgatgaaatgtgaaaacagtgcctttttaggacatcaattataataaaattgttttaaaatattaacaaagatctcaaaaagttgtcatgaacattattcatttatttttaaactggatctaaataagagcttagatggccaaaattagaattaataatatacccatttaaattttgttcataaatttaaaatcttaatcagaattctttataaaatgtgggtcatagatatgacccagtgttactaaaatagaacagggattgtgaaaatccagctcaacatacttaagtatacttggcttagagccaagtatacttgaagaggtgaattattctgacttggacatgcatgctctttgatggataaaataaaaatattcaatttattcttacaaaagaaggtgggtgggtgagtgggttcgttttagtgttctcagattataaagacagctataaagacagcactttccgcacacaaagtgtattttacaaaccttttttatacaaattaatgagctctactttatttaagtgttcatggaatgatgtaaattttaggtccagttgaacaaatattgagtgcctatcatatgcaagactaactccttactaggaatgaaatcacacagtgtcttctgtttgcagtatgtgaactttatgtttgaaaagaaattattatatttaaatttttttgttgtcagagtttatcattgtatactgtaacccagtaaattttgcattcagttttaaaaaatgaagatgtaacttacctgagtctcatttttgaaaatgaaattctgcaaaaattatttaaaaattagttcttggggaaattgattttcaagattcaagtgtataaaaacttatattgaacttttcagcctcgtttttaattagctgatgttaatgataagatacataatacatgtatcttgttgctgaaaatattttttgcatttcaacacattgagttaaaataaagttgttactacttattcaagaaaaaaaaaaaaaaaa

SEQ ID NO: 1241 - DNA, 2662 bp, Homo sapiens
caggaacacgaaggcaaggacagtagccttcagtctcgaccccagagcttggcaccccagaacctgggctccccaaagcaagaccagggcccccacattgtgcgccaaagtgcggggtggagaatgcccacagcccaagggcccccaggctgaaggcaggagactggggctgctggagaagttgcccaggctgaggggccgtgcctggcagggacatggggctgctgctgctgctgctcccaggctggggctgtgctgcaggctccgagctggccttcgtgcaggagctgggggacacagtggctgtgtgggagcacccactggtgctgccctgccaggtggagggtgagccgcctgtgtccatttcctggcagcgggataggctggccttagccaatgagagtggtgtcaccctgatgccagatggctccctgcacctggccgccctgccttcccgccggagcctcccttcccgtgcccacgagtaccactgcgtggcccagaaccgctacgggcggctggtgagccgacgggcccgggtacagctggcaagtctgtcccgcttccaccaacatccagaatccattgaggtggagcggggtggagttgcttgcttccagtgcctgatccagggggtgcctgagccatccatttcctgggagcacaatggcacagccctgaatactgccaaccaccgggtcacactgctgcctagtggcatcctccacatcaccagtgtgagccagactgacatgggaacctaccgctgcgtggcatggaatgtggccagtacccgccacagccaggatgcccagctgaccctgagtgtgggacccctgaggctgctgcaggagccagagatcctgtctgggcctcagaacctgaccctcacagtgcaccagacggcagtgctggagtgcattgccaccagtcacccttggccgcttgtctcctggagccgcctggatggccgctccatcggcgtagagggcatccaagttctggacattctggacacagggaatctcatgatctccgacgtctcagtccagcactcaggtgtctatgtctgcgccgccaatcggccaggcacccatgtccggcgcacagcgcagggcgtcctgctcgtgcagggtgagccccaagggcccaactgggtggggagagtgctggagcaccccagctccctgacaggagcctggatctggagagggtccagggcaggaggcaagaggctgggtctcacggcaccttcctccatgctattgcctgcccagctccccgagtttgtccagtggccacagtccttgtccaagcctccgggcagcagtgccatcttcacctgcgtggcccagggcgtccctgagtcccgtctggtctggctgaagaatgggaaggtgttgagtcctgggaataacatcaggctgactcacaacaatagtacgctgatgctggcaggggtttcagttgaggatgaggccatctatcaatgcgtggcagagaacagcacgggctccaaccaggccagtgcccgcctggttgtgacagggggcccagagccaccccgtccccaggggcctgcatgccatggctctctctacttctgccattcgagtgtcctgggagccacccccccctccagcagggacatcattggctacgtgctgcacctccggcctgtgggagagccatctggcccggagctccaagaggccataagcaaaggcacttctgagcacgtcttctccaacctggagcctgccacagcctacaccatccatttgcgggcctactcagcagagggtgccagtcaggactctgctcccatctttgcctccaccatgggcagcaacctgggtgaggctctgaaccttcctgtgccactcaaggcctgcctttctcagtgtgatcttgccccagaaccggctgctctctatgacatcaagctgcaggcgttcaatggcaatggggatggaaatagcagtgcccgctgtgtctcattgcgtgatgtgcccctggccactcctgatggcacagtgtccacagagtccaagactgggtgctcttgcagccagggtgagagcagcccactgcctggggttgtggtgggcatccacgtgggcctggctgccctcatcatttgcctcctctgcctcttcctgggctggagacatagctaagggccaggtaagggctaatgtgggaaatctgccagggagacagtctgcatcactgtggcacagggccaaagagagcaaaaaagccccaatctacaaccaatcaattttaccaatgaggagactcaggcagagagaggaagccaattcttttcagagctgtgtggtaccaggggcaggagaaggcctgccatgagccgggaagagagaactggggctcccaaagcaaagaacaagggcagcagaaatgagctagagccagttccctgccatccagcagcatgaagaggggtccaccctctccatctctggggagcatggagcaggaggaggggttgggagccatgcgaggcagagggaggcaccagacagaccacactgctgacccttcctacccgggcagcctcctctgcaaacaggagtcccaggaatgctgggcagtgcctcggactgcctcggacagaactgggggccatcaaggccag

SEQ ID NO: 1242 - DNA, 2662 bp, Homo sapiens
caggaacacgaaggcaaggacagtagccttcagtctcgaccccagagcttggcaccccagaacctgggctccccaaagcaagaccagggcccccacattgtgcgccaaagtgcggggtggagaatgcccacagcccaagggcccccaggctgaaggcaggagactggggctgctggagaagttgcccaggctgaggggccgtgcctggcagggacatggggctgctgctgctgctgctcccaggctggggctgtgctgcaggctccgagctggccttcgtgcaggagctgggggacacagtggctgtgtgggagcacccactggtgctgccctgccaggtggagggtgagccgcctgtgtccatttcctggcagcgggataggctggccttagccaatgagagtggtgtcaccctgatgccagatggctccctgcacctggccgccctgccttcccgccggagcctcccttcccgtgcccacgagtaccactgcgtggcccagaaccgctacgggcggctggtgagccgacaggcccgggtacagctggcaagtctgtcccgcttccaccaacatccagaatccattgaggtggagcggggtggagttgctcgcttccagtgcctgatccagggggtgcctgagccatccatttcctgggagcacaatggcacagccctgaatactgccaaccaccgggtcacactgctgcctagtggcatcctccacatcaccagtgtgagccagactgacatgggaacctaccgctgcgtggcatggaatgtggccagtacccgccacagccaggatgcccagctgaccctgagtgtgggacccctgaggctgctgcaggagccagagatcctgtctgggcctcagaacctgaccctcacagtgcaccagacggcagtgctggagtgcattgccaccagtcacccttggccgcttgtctcctggagccgcctggatggccgctccatcggcgtagagggcatccaagttctggacattctggacacagggaatctcatgatctccgacgtctcagtccagcactcaggtgtctatgtctgcgccgccaatcggccaggcacccatgtccggcgcacagcgcagggcgtcctgctcgtgcagggtgagccccaagggcccaactgggtggggagagtgctggagcaccccagctccctgacaggagcctggatctggagagggtccagggcaggaggcaagaggctgggtctcacggcaccttcctccatgctattgcctgcccagctccccgagtttgtccagtggccacagtccttgtccaagcctccgggcagcagtgccatcttcacctgcgtggcccagggcgtccctgagtcccgtctggtctggctgaagaatgggaaggtgttgagtcctgggaataacatcaggctgactcacaacaatagtacgctgatgctggcaggggtttcagttgaggatgaggccatctatcaatgcgtggcagagaacagcacgggctccaaccaggccagtgcccgcctggttgtgacagggggcccagagccaccccgtccccaggggcctgcatgccatggctctctctacttctgccattcgagtgtcctgggagccacccccccctccagcagggacatcattggctacgtgctgcacctccggcctgtgggagagccatctggcccggagctccaagaggccataagcaaaggcacttctgagcacgtcttctccaacctggagcctgccacagcctacaccatccatttgcgggcctactcagcagagggtgccagtcaggactctgctcccatctttgcctccaccatgggcagcaacctgggtgaggctctgaaccttcctgtgccactcaaggcctgcctttctcagtgtgatcttgccccagaaccggctgctctctatgacatcaagctgcaggcgttcaatggcaatggggatggaaatagcagtgcccgctgtgtctcattgtgtgatgtgcccctggccactcctgatggcacagtgtccacagagtccaagactgggtgctcttgcagccagggtgagagcagcccactgcctggggttgtggtgggcatccacgtgggcctggctgccctcatcatttgcctcctctgcctcttcctgggctggagacatagctaagggccaggtaagggctaatgtgggaaatctgccagggagacagtctgcatcactgtggcacagggccaaagagagcaaaaaagccccaatctacaaccaatcaattttaccaatgaggagactcaggcagagagaggaagccaattcttttcagagctgtgtggtaccaggggcaggagaaggcctgccatgagccgggaagagagaactggggctcccaaagcaaagaacaagggcagcagaaatgagctagagccagttccctgccatccagcagcatgaagaggggtccaccctctccatctctggggagcatggagcaggaggaggggttgggagccatgcgaggcagagggaggcaccagacagaccacactgctgacccttcctacccgggcagcctcctctgcaaacaggagtcccaggaatgctgggcagtgcctcggactgcctcggacagaactgggggccatcaaggccag

SEQ ID NO: 1243 - DNA, 1911 bp, Homo sapiens
atggcgccctaggagaacgcggggacagaactcttgctgcagagtttcgagcgccacttcctggcggcgcgctcactgcgctccttcccctggcaggtgggcggcggggcgagcggagaggcccgcggggctcgcgggagtccaggggcagacgggatgtgtctccgtgctgaagcccccggcgctcccgccacacgcgcgctcgttgtggggtacagttcacgatcattttcacgactttttaaaggcagtaatcgttctggtcactgcgacacagctgccctcgcccattctaaaaagtcagcgccctcaggaccgcagagcttagaagcaaagttaagagactcatcagattctgagctgcggcgggatattttgcagaagggacagacgctccaagagagcagttgccgagtgggccttcccgcctcttccatagagccagacagttggcgactgtccttactgcaaaccctggttcacactggctcccctgggagggaggtgactgtgaagcatcctgtgtgtgtgaagcacccgccgtcagtcaagtatgcccggtgctttctctcagaactcatgaaaaagtcctccccaaaaggctgcatctgtggtcaccagcaggtctgccctgtgccaccaggagagggcagcggtcatccagtgtaccctgttgctgccctattagaacgaaagcaaacaagctctcactcagcctgcccccagcacgaggctgtccacacagagcctttggacgagctgtacgaggtgctggcggagactttgatggccaaggagtccacccagggccactggagctatttgctgccctcgggaggctcggtcacactctccaagagcacagccatcatctcccacggcaccacaggcctggtcacatgggacgctgccctctaccttgcagaatgggccgagaacccagcagccttcactcacaggactgtcctaaagcttggcagtggcgccggcctcacaggcctggccatctgcaagatgtgccgcccccgggcgtacatcttcagcgactgtcacagccgggtcctcgagcagctccgagggaatgtccttctcaatggcctctcattagaggcagacatcactgccaacttagacggccccagggtgacagtggcccagctggactgggacgtcgcgacggtctgtcagctctctgccgtccagccagatgttgtcattgcagcagatttcaccgtagacgtgctgtattgcccagaagccatcgtgtcgctagtcggggtcctgcggaggctggctgcctgccgggagcaccagcgggctcctgaggtctacgtggcctttaccgtccacaacccacagacgtgccagctgttcaccactgagctagttgagtccccacgcccacccgggcctgcatggtccccgagctgtccctgcaggactccagtggaagtgaaagaactgggcgccggcgtaaagctagcatgccccacactcccacaccatgcggggaactcgggcagaggccgtgacaaatacactaggacacacggaggccaagtgacccccgagctcccgcacactgcagcccggccacctggctcgcaggtctccacactacatccaagccccccattgccaccagcctttgccccagctccccctgagcacagcccctcctggcagccatgtgcacagatgcacgcacagcagcctctgcctgcacacagagacacggacgacccagtgactgtccacgtggggcagcccgttaactacagagtaaacaaacaagccggcacacgaaggcgccaggccaggatcagatgggaagtggaagcttgtcatgaccagaaactgtttccctacaaagagcacttggagatggcaatgctgaacctaatactgtag

SEQ ID NO: 1244 - DNA, 1557 bp, Homo sapiens
atggcgcctgaggagaacgcgggtaccaaactcttgctgcagagtttcgagcgccgcttcctagcggcgcgcacactgcgctccttcccctggcagggccacgagacccggtccccgtccctggggcctggccagagtcgctctcacccctcctgccccgcgagctggcggcggaagctgggggcgtctccacagtcttggggggcagacgcgcgctcggtgtggggtacagttcacgatcattttcatgactttttaaaggcagtaatcgttctggtcactgggacacagctgccctcgcccattctaaaaagtcagcaccctcaggcccgcgggtgcaccctgcgacatctgaaggtcaggctttcagccgctgtggcttccacttccaactggctccgcgtccccagggagggatcacatagcgctttgccaacacattctattgcgtgttttaatgttcctgtgaatgcgcccttgagatttctctctctcccgtccacacggagcttagaagcaaaattaagagactcatcagattctgagctgctgcgggatattttgcagaagactgtgaagcatcctgtgtgtgtgaagcacccgccatcagtcaagtgtgcccagtgctttctctcagaactcatcaaaaatcacgaggctgtccacacggagcttttggacgagctgtacgaggcgctggcagagaccctgatggccaaggagtccacccagggccactggagctatttgctggtgacacacactacctgcttcacaaggacctgccctcggaaggctcggtcacactctccgagcacagccatcatctcccacggtaccacaggcctggtcacatgggacgctgcccgctaccttgcagaatgggccatcaagaacctggcagccttcactaacaggactgtcctagagcttggcagtggcgccggccttacaggcctgtccatctgcaagatgtgccacccccggacatacatcttcagcgactgtcacagccgggtcctcgagcagctccgagggaatgtccttctcaatggcctctcattagaggcagacatcactgccaacttagatagccccagggtgacagtggcccagctggactgggatgtagcgacggtccatcagctctctgccttccagccagatgttgtcattacagcagagctctgcctgtggtcctgggtcccagccctgaaacccacaggtccagcggtggccagggacagaggcccacccctgcaagccagcagaccaatcggcagacacctgaaacacgaagttcacgacgtgctgtattgcccagaagccatcgtgtccctggtcggggtcctgcggaggctggctgcctgctgggagcaccagcgggctcctgaggtctacatggcctttaccgtccgcaacccagagacgtgccaggtgttcaccaccgagctaggctgggctgggatcagatgggaagcggaagctcatcatgaccagaaactgtttccctatggagagcacttggagatggcaatgctgaacctcacactgtag

SEQ ID NO: 1245 - DNA, 2895 bp, Homo sapiens
atgtcgtgggggactggtgactcctcggtggaaaatcggggactgtcattggagaggagcgatagaagaaaggctgaagcagtgaaatgtatctcctgcaccagcctgggcctcgatgtcttgagtactgatgacccactcctgctgtggggctgggtcatctgccagctctccaaggagctggcgggaaaccgctgcaatcagagcgaacccagggcccgggcagcctgtgtggagattgctgcattcacctttaatatggctaaaatgttttccttcaatgacagtaatgctgccagaatccatcaagacacccaggaactgatgtgctttggcagatggtgctggaaagatgggattcccggcagcctttgcatcccttgctcacagcccacgagcatctccactgtccagcaggggaagaaagcagcatcatcccactattccaggggaggtgctaaatacgagggtgaggctgtcaagcggtccctggtggagtcctacactcacccaaacagcaacgagacagagcggagggagaacatcgataccgtcatgaactgcttcagcacagaagactttgactttgtgactctgtactacagagagccagataacgtgggacatcgattcgggccagaggcagagaagaggaagttgatgattcagcaaatcggcaggaccatcgtgtatctgttcagggtctgggtcaagtttgatattgcgggctacggtggctttgggctgcccctacccaaattggggcaagaggaagccctttaccaggcactgaagaatgcgcaccctcacctccaggtctacaagaaggaggagtttccagaacacttccatctcgctaaacatgaccgggttctgccaatcgtgatttttcagagaattataatgtgtttcagcaaaggcagccatggctttgataatgtcctcatggacatgaacatcatattcagagctttcgggccagatttcaagaggaatcgcctggccgatccttttaacagcatccacatctacccattcgtgtctttggagccccaggaacaagatgtcaacagctccatacagatagcacgggaggtagggaatccctcgacctgctggcggaggaactgcgagagtgcctacgttggcccaaggcctgaccggacgatcccggggaccctcgccctaaccggccccgactcccgggccccaaacccggactcggccccgcctgaagctccggatcctggggcccgtccctggctccgcgtcggcagaccgtgggctcgctcctgggcctgcctcaaactctccgcagagtccgagcagcgcctggccacgtgctacgacatagtcaacgccccgccctggccccgcctcctgagccgttctccgggccccgccccctctctgcccccgcgcactgccctgggcccgcccccttttcagtccaggctcggcttccgcccggtctcccggcaacgctgcggccccgcccccgtcatggtgcccgaggagaacgcggggaccgaactcttgctgcagagtttcgagcgccgcttcctggcggcgcgcgcactgcgttccttcccctggcagagcttagaagcaaagttaagagactcatcagattctgagcttctgcgggatattttgcagaagactgtgaagcatcctgtgtgtgtgaagcaccggctgtcagtcaagtatgcccggtgctttctctcagaactcaccaaaaagcacgaggctgtccacacagagcttttggacaagctgtacgaggacctggcagagaccctgatggccaaggagtccacccagggccacccgagctatttgctgccctcgggaggctcagtcacactctccgagagcacagccatcatctcccatggcatcacaggcctggtcacatgagatgctgccctctacctggcagaatgggccatcgagaacccggcagccttctctcataggactgtcctagagcttggcagtggcgccagcctcacaggcctggccatctgcaagatgtgccgcctccaggcatacatcttcagcgactgtcacagccaggtcctcgagaagctccgagggaatgtccttctcaatggcctctcattagaggcagacatctctgccaacttagacagccccagggtgacagtggcccagctggactgggacgtcgcgacggtccatcagctctctgccatccagccagatgttgtcattgcagcagacgtgctgtattgcccagaatccatcgtgtcgctggtcgcggtcctgcggaggctggctgcctaccgggagcaccagcgggctcctcaagtctacgtggcccttatcgtccgcaacccagagacgtgccagctgttcaccaccgagctatgccgggccgggatcagatgggaagtggaacctcgtcatgaccagaaactgtttccctacgaagagcacttggagatggcaatgctgaacctcacactgtaggactcacacacgactccaacgggattgtgagaatcaagtcactctcgtgggaagagtttttatatgggaaagcggataaaactttcattggactggaatgtttggagaatgttaatttccaaatcaggaaccacaaactgccctctgataagacatcggctatctaagcttgtgggtgctccctttctgccagcagttctggttcttaagaaaatcgccatcaatcagacatgaaaactctggctccaaaaatagcattttctttgtgcaaataaaaacgtgtgtatcaagtatgatgttccccccaacgtggacacactcggttcctcacaaagccaagcccgctgcagctgccacatccctgggcttatggtgcagcaggtgcttttttcaagacag

SEQ ID NO: 1246 - DNA, 2041 bp, Homo sapiens
ctcgcccacgttatggcgcccgaggagaacgcggggaccgaactcttgctgcagggttttgagcgccgcttcctggcggtgcgcacactgcgctccttcccctggcagagcttagaggcaaagttaagagactcatcatattctgagctgctgcgggatattttgcagaagactgtgaggcatcctgtgtgtgtgaagcacccgccgtcagtcaagtatgcctggtgctttctctcagaactcatcaaaaagtcctcaggaggctcggtcacactctccaagagcacagccatcatctcccacggtaccacaggcctggtcacatgggatgccgccctctaccttgcagaatgggccatcgagaacccggcagccttcattaacagacgtgctgtattgcccagaagccatcgtgtcgctggtcggggtcctgcagaggctggctgcctgccgggagcacaagcgggctcctgaggtctacgtggcctttaccgtccgcaacccagagacatgccagctgttcaccaccgagctaggccgggatgggatcagatgggaagcagaagctcatcatgaccagaaactgtttccctatggagagcacttggagatggcaatgctgaacctcacactgtaggactcacacatgactccaaagggattgtgagaatcaagtcactctcgtgggaagaatttttatatgggaaagtggataaaactttcattggactggaatgtttggagattattaaattccaaatcaggaatcaaaactgccctctaataagacattagctgtctaggcgtgtgggtgccccctttctgccagcagttctggttctcaagaaaatcatcataaatcagacatgaaaattctggctccaaaaatagcattttctttctgcaaataaaaacgtgtgtatcaaggatgacgttcccccaacgtggacacactcggttcctcagaaagccaagcccgctgcagctgccacatccctggacacactcggttcctcacaaagccaagcccgctgcagctgccacatcccagggcttatggtgcagcaggcgcttttttcaagacaggaatgaaagtgttaggaacatggcagaaaggtgacacctggagaccaaatgcaggatgaggagtactgcagaggtcacagggaagtcacagaacagtaatacgctagcaggggcatggggcatgaagaacagaagacaggaagcatttcagagactccaaagaagaaatcagggccaaccacagcttcccgggtcattcaccaggtgacaccactgccgtcatttcagcttctggccactgggaggcgctgctcgaaaggctttgccctgagactccaagaagctgcgggaaggacagcaggggccctggggttttagcctctggcccaggagttatgtgtccataaccaaagggagcacagtctgcacccagctctcatcccatcagagctgctgagactcttgcaggtacttccagaactggtttagcttgcctgcaggatcagaaaagtttgagaaaagcatctgcaaaatgctaaagagcagagcttaactcattgcctgtccccaccccatcccaggtcaccacttggatgaccccaggtccccgacccaacaacaacccctcccaagtccctaactccctcacttggacttgagacccttcacaacccccctcacttggacttgagacccttcacaacccagcagcgctccacctccaacttgacatcatgctttctggaaacttccccgtatgtcccactttcccacacttggtgccctggagcaccttccggcctctacatgctgtacgttcccctgtgagcaccctcctctcggcctctggccaacacagtcccacccatctgtgggtaacaagggggtgtgggtgttcttttcagccttgctaaactgtctgaatcaaggatcacaaactacagcctgcaggccaaatccagcccacagcctgtgtttgtgaataaagctttgttggaacaaagccacacccctt

SEQ ID NO: 1247 - DNA, 1330 bp, Homo sapiens
tccgcccggtctgccggcaacgctgcggccccgcccacgtcatggcgcccgaggagaacgcggggaccgaactcttgctgcagagtttcgagcgccgcttcctggcggcacgcacactgcgctccttcccctggcagagcttagaagcaaagttaagagactcatcagattctgagctgctgcgggatattttgcacaagactgtgaagcatcctgtgtgtgtgaagcacccgccgtccgtcaaatatgcccggtgctttctctcagaactcatcaaaaagccctcgggaggctcggtcacactctccgagagcacggccatcatctcctacggtaccacaggcctggtcacatgggacgccgccctctaccttgcagaatgggccatcgagaacccggcagtcttcactaacaggactgtcctagagcttggcagtggtgctggcctcacaggcctggccatctgcaagatgtgccgcccccgggcatacatcttcagcgactgtcacagccgggtccttgagcagctccgagggaatgtccttctcaatggcctctcattagaggcagacatcactgccaagttagacagccccagggtgacagtggcccagctggactgggacgtcgcgacggtccatcagctctctgccttccagccagatgttgtcattgcagcagatgtgctgtattgcccagaagccatcatgtcgctggtcggcgtcctgcggaggctggctgcctgccgggagcaccagcgggctcctgaggtctacgtggcctttaccgtccgcaacccagagacgtgccagctgttcaccaccgagctaggccgggccgggatcagatgggaagtggaacctcgtcatgagcagaaactgtttccctacgaagagcacttggagatggcaatgctgaatctcaccctgtaggactcacacacgactccaacgggattgtgagaatcaagtcactctcatgggaagaatttttatatgggaaagcggataaaactttcattggactggaatgtttggagaatgttaatttccaaatcaggaaccacaaactgccctctaataagacatcggctatctaagcgtgtgggtgccccctttctgccagcagttctggttcttaagaaaatcaccataaatcagacatgaaaattctggctccaaaaatagcattttctttgtgcaaataaaaacgtgtgtatcaagtatgatgttcccccaacgtggacacactcagttcctcacaaagccaagcccactgcagctgccacatccctgggcttacggtgcagcaggtgcttttttcaagacag

SEQ ID NO: 1248 - DNA, 1602 bp, Homo sapiens
atgagaccgtgggatgaccaccgtgaagaagagacccaatgtcaacaagatcccttgtccaactacatgaagttcagggacttggtcaagtttgatattgtgggctacagtggctttgggatgcccctgcccaaattggggcaagaggaaaccctttaccaggcactgaagaatgcataccctcgcctccacacctacaagaaggaggagcttccagaacacttccatcttgctaaacatgaccgggttctgccaattgtgatgtatgccaactctggttacagtatcaataggcttgttgcgactccagagtgtaacagacaccctcaaagccagaagttgaatcttgactgtagttcttgcacatacacgcacactctcgcaattgaaaccactcagattgtcctaatgctgctacccatagcaacaccacctggaattttacgtttgtttttaagcatccgtcgtaatcttcacttgctcctgaacacatcgcacctgcggaggaactgcgagagtgcctacgttagcccaagacctgacccgtcgatcccagggaccctcaccctaactggccccgcctcccgggccccaaactcggactccgccccgcccgaagctccggatcctggggcccgcccctggccccgcgtaggcagaccgtgggctcgctcctgggcctgcctcaaaccctccgcaggtctcccggcaacgctgcggccccgcccacgtcatggcgcccgaggagaacgcgggatcgaactcttgctgcagggtttcgatcgccgcttcctggcggcgcgcacactgcgctccttcccctggctgagcttagaagcaaagttaagagactcatcagattctgagctgctgcgggatattttgcagaagccctcgggaggctcggtcacaatctccgagagcacagccatcatctctcacggtaccacaggcctggtcacatgggacgccaccctctgccttgcagaatgggccatcgagaacccagcagccttcactaacaggactgtcctagaacttggcagtggtgccggcctcacaggccttgccatctgcaagatgtgccgcccccgggcatacatcttcagcgaccctcacagccgggtcctcgagcagctccaagggaatgtctttctcaatggcctctcattagaggcagacatcactgccaacttagacagccccagggtgacagtggcccagctggactgggacgtagcgacggtccatcagctctctgccttccagccagatgttgtcattgcagcagacgtgctgtattgcccagaagccatcgtgtcgctggtcggggtcctgcggaggctggctgcctgccaggagcacaagcgggctcctgaggtctacgtggcctttaccgtccgcaacccagagacgtgccagctgttcaccaccgagctaggctgggccgggatcagatgggaagcagaagctcatcatgaccagaaactgtttccctacggagagcacttggagatggcaatgctgaacctcacactgtaggactcacacacgactctaacgggattgtaagaatcaagtcactctcatgggaagaatttt

SEQ ID NO: 1249 - DNA, 2142 bp, Homo sapiens
atggaccatctggccggggagggcgtcaaggccaagtacctcatgccgccccttgtcacaatgacctccccgttccacttcactgccatgccagatgtagacaactcgagctttgctgattgtgagaaaggtatgagaaatggccctgatggaattttcttattgtacgtgaaggggaagaaagcagcatcatcccactattccaggggaggtgctaaatacgagggtgaggctgtcaagcggtccctggtggagtcctacactcaccaaaataacaacgagacagagcagagggagaacatcgataccgtcatgaactgcttcaccaaggaagactttgactttgtgactctgtactacagacagccagataacgtaggacatcgattcaagccagaggcagagaataggaagttgatgattcagcaactcgacaggaccatctggtatctggtgggagccactgagaagcacagcctgcagagcacctcaggtcatcatcacatgagaccatgggatgatgaccgtgaagaagagacccaatgtcaacaagatcccttgtccaactacatcaagttcagggactgggtcaagtttgatattgtgggctatggtggctttgggctgcccctacccaaactggggcaagaagaagccctttaccaggcactgaagaatgcgcaccctcacctccacatctacaagaaggaggagtttccagaacacttccatctcgctaaacatgaccgggttctgccaatcgtgatgcggaggaactgcgagagtgcctacgttggcccaaggcctgacccgacgatcccggggaccctcgccctaaccggccccgcctcccgggcccctaacccggactcggccccgcccaaagctccggatcctggggcccgcccctggccccgcttcggcagaccgcctggcttccgcccggtctccgggcaacgctgcggccccgcccacgtcatggcgcccgaggagaacgcggggaccgaactcttgctgcagagtttggagcgccgcttcctggcggcgcgtgcactgcgctccttcccctggcaggtgcaccctgcaacatctgaaggtcaggctttcagctgctgtggcttccacttccaactggctccacgtccccggggagagatcacacagcgctttgccaacacattctattgcgtgcttaatgttcctgtgaatgcacccttgagatttctctctctcccctccacacagagcttagaagcaaagttaagagactcatcagattctgagctgctgcgggatattttgcagaagactgtgaagcatcctgtgtgtgtgaagcaccggccatcagtcaagtatgcctggtgctttctctcagaactcatcaaaaagcacgaggctgtccacacagagcctttggacgagctgtacgaggtgctggcggagaccctgatggccaaggagtccacccagggccaccggagctatttgctgccctcaggaggctcagtcacactcttcaagaacacagccatcatctcccacggcatcacaggcctggtcacatgagatgctgccctctaccttgcagaatgggccatcgagaacccggcagccttctctcataggatggtcctagagcttggcagtggcgccggcctcacaggcctggccatctgcaagatgtgccgcccctgggcatacatcttcagcgactgtcacagccgggtccttgagaagctctgagggaatgtccttctcagtggcctctcattagaggcagatatctctgccaacttagacagccccagggtgacagtggcccagctggactgggacgtcgcgacggtccgtcagcaatctgcaatccagccagatgttgtcattgcagcagacgtgctgtatagcccagaagccatcgtgtcgctggtcggggtcctgcggaggctggctgcctgccgggagcaccagcgggctcctcaagtctatgtggcccttaccatctgcaacccagagacgtgccagctgttcaccactgagctatgccgggctgggatcagatgggaagtggaacctcgtcatgaccagaaactgtttccctacgaagagcacttggagatggcaatgctgaacctcacactgtag

SEQ ID NO: 1250 - DNA, 1432 bp, Homo sapiens
tccgcccggtctgccggcaacgctgcggccccgcccacgtcatggcgcccgaggagaacgcggggaccgaactcttgctgcagagtttcgagcgccgcttcctggcggcacgcacactgcgctccttcccctggcagagcttagaagcaaagttaagagactcatcagattctgagctgctgcgggatattttgcacaagactgtgaagcatcctgtgtgtgtgaagcacccgccgtccgtcaaatatgcccggtgctttctctcagaactcatcaaaaagcacgaggctgtccacacagagcctttggacgagctgtatgaagcgctggcggagaccctgatggccaaggagtccacccagggccaccggagctatttgctgccctcgggaggctcggtcacactctccgagagcacggccatcatctcctacggtaccacaggcctggtcacatgggacgccgccctctaccttgcagaatgggccatcgagaacccggcagtcttcactaacaggactgtcctagagcttggcagtggtgctggcctcacaggcctggccatctgcaagatgtgccgcccccgggcatacatcttcagcgactgtcacagccgggtccttgagcagctccgagggaatgtccttctcaatggcctctcattagaggcagacatcactgccaagttagacagccccagggtgacagtggcccagctggactgggacgtcgcgacggtccatcagctctctgccttccagccagatgttgtcattgcagcagatgtgctgtattgcccagaagccatcatgtcgctggtcggcgtcctgcggaggctggctgcctgccgggagcaccagcgggctcctgaggtctacgtggcctttaccgtccgcaacccagagacgtgccagctgttcaccaccgagctaggccgggccgggatcagatgggaagtggaacctcgtcatgagcagaaactgtttccctacgaagagcacttggagatggcaatgctgaatctcaccctgtaggactcacacacgactccaacgggattgtgagaatcaagtcactctcatgggaagaatttttatatgggaaagcggataaaactttcattggactggaatgtttggagaatgttaatttccaaatcaggaaccacaaactgccctctaataagacatcggctatctaagcgtgtgggtgccccctttctgccagcagttctggttcttaagaaaatcaccataaatcagacatgaaaattctggctccaaaaatagcattttctttgtgcaaataaaaacgtgtgtatcaagtatgatgttcccccaacgtggacacactcagttcctcacaaagccaagcccactgcagctgccacatccctgggcttacggtgcagcaggtgcttttttcaagacag

SEQ ID NO: 1251 - DNA, 921 bp, Homo sapiens
atgcccaattctcagaacccagtgacctctcctttagagaacaaagggcctgggcattctggagactctgattggctgggcagatgggctgactggctgggcagatgggtgggtgagttccctctccccagagccatcggccaggtaccaaagctcagctgtatggattcccaacaggaggacctgcgcttccctgggatgtgggtctcattgtactttggaatcctggggctgtgttctgtgataactggagggtgcattatctttctgcactggaggaagaacttgaggcgggaagagcatgcccagcagtgggtggaggtgatgagagctgccacattcacctacagcccattgttgtactggattaacaagcgacggcgctacggcatgaatgcagccatcaacacgggccctgcccctgctgtcaccaagactgagactgaggtccagaatccagatgttctgtgggatttggacatccccgaaggcaggagccatgctgaccaagacagcaaccccaaggcggaagcccctgctcccctgcaacctgcactgcagctggctccacagcagccccaggccagatccccattcccacttcccatctttcaggaggtgccctttgccccacccttgtgcaacctaccccccctgctgaaccactctgtctcctatcctttggccacctgtcctgaaaggaatgttctcttccattccctcctgaatctggcccaggaagaccatagcttcaatgccaagccttttccttcagaactgtagcctcctctcactgaaggtgggagctgcaggaatcaggtgcagagtaggaaatggaactaacctcaggaaggtggtattgacagaggtcaggacccacctggatgtcatgctatgaaacattaaaagaaaaaaaaaaaa

SEQ ID NO: 1252 - DNA, 1258 bp, Homo sapiens
tcttccgcggccgcggtgggaatggaaacatctgccccacgtgcaggaagccgggtggtggccacgacagcgcgccactccgcagcgtaacctcgcagatcccctgcgtgtgtcctcgcaagactagctcaccgaaatggccgcgtccagtcaaggaaactttgagggagatattgagtcagtggaccttgcagaatttgctaagcagcagccgtggtggcgtaagctgtttgggccagaatctggactctcagccgaaaagtatagcgtggcaacccacctgttcattggaggtgtcactggatggtgcacgggttttatattccagaaggttggaaagttggctgcaacagctgtgggaggtggattttttctccttcagcttgcaaaccattctgggtacatcaaagttgattggcaacgagtggagaaggacatgaagaaagccaaagagcagctgaagatccctaagagcactcagatacctaaccaggtcaggagcaaagctgaggaggtggtgtcatttgtgaagaaaaatgttctagtgactgggggatttttcggaggctttctgcttggcatggcatcctaaagaagatacctcattttcattgttcctggttttttccagccagcagcctctacactccatcacaggacattgagtccctcctcctcttctcccatgccttcctccctgctgtggcaaatccgagtggcttctataagcatccgttggtacaagttaatgtggcaccatgagcctgactggcttctataagcatctgttggcacaagttaatgtggcaccatgagcttgatggcggcagaagagacaatagtccttagctcttcttccagtacgccccctacttagtcagtctgtaggtcatcaagaaggtccctctacccctatgcaagacacttacaagaacacattgcaagatagctgaccgtggaggatgagtggatcctgaaatgttgtcccgaactgttgatttggaaaagaaataagcacatagataaccttattgtgtgctgcatggaaaggaactgaacacaattgcctttaagcattaaaaaaaaaaggatgaaaaattggggtgtcacatttgcaaaatggatggacaaatgtggtcagggcagatcaaggaagtaccttccactctgagagtcagaatgctctgcatgtgtgctaaggcattaaatgaagattgaaagtcaaaaaaaaaaaaaaaaaagaaaaaaaaaaaaaaaa

SEQ ID NO: 1253 - DNA, 5592 bp, Homo sapiens
ggtgagagaggccgggggcggggccgtgcggccggggacctgttgatcgcaggtatagccggctggcccgggctccctcgggactggggcgactgcgcatgctcgctggccgcgctgggccagtagccgagccgcggtgacgaaccggctccgcggttgcggtgtttgcggttgctgtgatggcgatgtgagggggcccggggcgggatggtgctgacccgggtcgggccgtcttcttgcagctggacaacgagctcctccgttcgacaggcgggggaagaggccgagccgggcgagagggggaacggtgtatttttaacaacgggaatcagtaactggaagtacaagattggttatttaataatgttaaaaatgaggctttgaaaagcagaggtgctgttatcagaatagtcttctgggtataaattaaaaatgactgaagttcaagcaatggtagaattctctgtggagctaaacaagttctacaatgtggatttgtttcagagaggtaaaacatttcaaattttgtacaaaaatgaagaggttgttttaaatgatgttatgatcttcaaagtaaaaatgctattggatgaaagaaagattgaagaaacccttgaggaaatgaattttctattatccttggatctacacttcacagatggagattattcggcagatgatctgaatgccttgcaactaataagtagccgaacattgaagctgcactttagcccccatagaggccttcatcatcatgttaatgttatgtttgattacttccacctttctgttgtgtctgttacagttcatgcatcattggttgcactacaccagccactaataagctttcctcgccctgtgaagacaacttggttaaatagaaatgcaccagcacaaaacaaagattccgtgattcctactcttgaaagtgtggtctttggtattaactacacaaaacagttatcaccagatggttgtagcttcatcattgcagactccttcctacatcatgcgtatcgttttcattatacactttgtgccactttgctgctagccttcaagggattgcacagctacttcattacagtaacagaagagattccttcttgtcagaaactagaactggccaaggccaacatgcagctcctatatgagcgtcttctcagaagaaaacagctacgaacacagaaagacaaccatctagaggaaatggatgtagaagctcgacttactgaactatgtgaagaagttaagaaaatagagaatcctgatgaactggcagaacttataaatatgaatcttgcgcaactttgctcacttttgatggctttatggggacagtttctggaagttataacgctacacgaagaactaagaatattattagcacaagagcaccatactttgagggtacgcagattttctgaggcattcttttgttttgagcatccaagagaagctgccattgcataccaggaacttcatgctcagagtcatctacagatgtgcaccgctatcaaaaatacttccttctgcagttctcttccacccttacctattgaatgtagtgaattagatggagatctcaattcattacctataatctttgaagataggtatttagattcagttactgaaggtaaacttgatatctcccaggacgatagtgaaattacacaaatggaacacaatctggcatccagaaggtcatcagacgattgccatgatcatcaaacaaccccatctttgggagttagaacaattgaaataaagcccagtaataaagatcctttcagtggagagaatataactgtcaaactaggaccttggacagagcttcgacaagaggaaatacttgtggataatttactacccaactttgagtccttagaatctaatggtaaatctaaatctatagaaataacatttgaaaaggaagctttgcaagaagcaaagtgtctttctattggagaatcattaactaaattacgaagtaatctacctgccccttctacaaaagaatatcatgttgtagtaagtggagatacaattaagttaccagatattagtgccacatatgcctcatctagattttcagattcaggtgttgaaagtgaaccgagttcttttgcgacacatccaaacactgatttagtctttgaaactgtgcaagggcaaggtccttgcaatagtgaaagattatttcctcagcttttgatgaaacctgattataatgtaaaattttcattaggaaatcattgtactgagagtacaagtgctataagtgaaatacagtcatctttgacatccataaactctctaccctccgatgatgaactgtcacctgatgaaaattctaagaaatctgttgtacctgaatgccatctaaatgatagcaaaactgtattaaatctaggaacgactgatttgccaaaatgtgatgatactaaaaagtcaagtatcactttgcaacagcagagtgttgtattttcagggaacttggacaatgaaactgtagcaatacattccttaaattcaagcattaaagaccctttacaatttgttttttcagatgaagagacttccagtgatgtgaaaagtagttgcagctccaaacctaacttggatactatgtgtaaaggcttccagagtcctgataaatctaataactctacagggacagcaattacattaaattcaaaactgatttgtttaggcactccttgtgtcatttcaggttccatttctagtaatacagatgttagtgaagatagaactatgaaaaaaaatagtgatgtattaaatctcacacagatgtattcagaaatccctacagttgaaagtgaaactcatctgggtacaagtgatcctttttcagccagtactgatatagtaaagcaagggcttgtggaaaattattttggttctcaaagcagtacggatatttctgacacatgtgctgttagctacagcaatgcacttagccctcagaaggaaacttctgaaaaagaaattagtaatcttcagcaggaacaggataaagaggatgaggaggaagagcaggatcaacaaatggttcaaaatgggtactatgaagaaacagattattcagctttggatggaacaataaatgctcactatacaagcagagatgaactaatggaagaaagacttacaaaatctgaaaaaataaacagtgactatctgagagatggtataaacatgcctactgtctgtacttctggttgtttgtccttcccgtctgcaccacgagagtctccttgtaatgttaaatattcttccaaaagtaaatttgatgccattacaaagcagccaagcagtacttcttacaacttcacttcttcgatttcctggtatgaaagttcaccaaaacctcaaatacaagccttccttcaggcaaaagaagaactgaagctactaaaacttcctgggttcatgtacagtgaagttcctctgctggcatcctcagtaccttattttagtgtagaagaagaggatggttctgaagatggagtacatctgattgtctgtgtgcacggtttagatggaaacagtgcagatctccgattagtaaaaacttacattgaacttggattgcctgggggaagaattgattttcttatgtctgagagaaatcagaatgatacttttgctgattttgatagcatgactgatcgtcttttggatgagataatacagtatattcagatatatagtctaacagtctcaaaaataagctttattggacattcgttgggcaatttaataattcgttcagtgcttacaaggccaaggtttaaatattacctcaacaaacttcatacctttctgtctctttctggacctcaccttggtacactctacaacagcagtgctcttgttaatacaggtctctggtttatgcagaaatggaaaaaatcaggttcgcttttgcagctgacatgtcgagatcactcagaccctcgccaaacttttttatataagcttagtaacaaagcagggcttcattatttcaaaaatgttgtgctagtgggatccctacaggatcgctatgttccttatcactctgcccgcattgaaatgtgtaaaacagctttaaaggacaaacagtcaggacagatctattcagaaatgatccacaacttgcttcgacccgttctgcaaagcaaggactgtaatttggttcgctataatgtcatcaatgcattgcccaatacagctgattcactcattgggagagctgcacatatagctgttcttgattcggaaatatttttagagaaattctttctggttgctgccctcaaatatttccaatagtataaaagcattgttagcgactggacaattacctcattcaacaatgtttcaaataatgtattatattaaaatgtagatgctgataagttctaagaaatatttatacctttttatatggaagataatttatatcatccatgtttagtgctttttaaacatcaactttactttctaggtaatgtggctgtgcaatatttttttaattttatctttttacttttctattactttttcatatattttgctacctaagtatttcagtgaaactttaagcccatacctgtgtctgattgtttattattggctttccacaattcttacatcagactacattatattagagaccattattgctagaatagcatgggatttaaaattttctaatactgggggtattatttagttaattataaatttttcttttcacattttactgtgttttaactggaaataaaattatggctgctacaatatattttttgaaatcaacttctgtagttctaaaatacaactttatcatacaatcaaaccaggtagttcatataaaacagtgtaatacaagttttctataaagtcattactgttgcttaaacatatttcatgcctattaaaatatattttctactggtgatttcaacattatttctcatactgacttttattactggaaatgttcctgtacatgttggcagcagataaagatttttgaatgtttgaatgccctctgccttgatttggttggaatttttgctaaattggtaatgttgcttgaactttatgactacattttcttttaacttttttcatggacttccttatatgtacataataattaaatgttgaaatttatgaaatacttttatgaatttagataatttttaaatattgttaaaatttattgaactaaaaagtaatgtaaataaaataattcatgttaaagatggaacaaaataattaactttacatgtttggtgatacagatgcaaatgtttttgatatatggagatgttgagtcttttgactttactaaaggtgctgaatagcattaaattcactattttccttttctgttttacttgtgaaaataaaaatgcactaaggttgggtagaagttctgtttgcactcactaattgtgacagacagaggtttttgtaagtatttattgtacaattgatgcatgtttatttttagcgttgttattgcctctggtgttaataaatgaacaaatggctatctggaggaacagctac

SEQ ID NO: 1254 - DNA, 1597 bp, Homo sapiens
agttactcattttgactcgtttggacaagtgagttactacagcgctgatttggaaaaatgactagaaagctacctccaatttctcggcctcaaccccagcctcattttctttctgttccttcccgctctcgtcttccagccctccttccccccgttactcctcaaacttcctgccgtcagcctcctctccagagccgtccaagttgttcgattttctgccctacccgtttgcccaagctgactaatgtcgccccttcccagtaccctacctcaaggaacttcctgcccggcccttcctctgttactaccagggcgtccgtgtgccgccgccctgttcgtcaggcacccctttcccggtgtccccctatctttccccctcaccctcctcatagcccttctttctagtcccctgtactctagtccccactccctatccagccacccccaaccagacctgacggcttgcaaatctcaccctggagaaatggtttccctcctactggggcagttcccaggcggtccagaattgccaggacttgtggattcccagcagcgacctggcagacacggggaatccaagaccatggcaagcgaacattcggcctggcctgcgcctttcctctcctgcctgggcagccagactgcacaagcctctgcatttgaactggcttctccgtggaacttggtttgtaaccacggagcaaactgcaggaccaggggcagagaagttgatggcgagcctttttcctggcagtatccagaggcggttctagtaaagaggctggattccgagaggccagagcggtatcatacgaacgccgttgcctggagacggagtggggtgccattgcctagagactgcagaaggcccgcagccaagcgagtggtaagaggacgccgagagagccccggacccacggagcagccccaaggctatggcgggacacccgaaagagagggtggtcacagatgaggtccatcagaaccagatcttgcgggagctgtacctcaaagagttacgaacccagaaactccacacgcagtaccatgtgaatcccctgcgcaaggttcacaggattacgaggaagcctatgtcttggcatgataacctggaggaacccgcagacgccaggtttctgaatctcattcaccatgctgcccaggggccaacgaagaagtacccggaggcacagactgaaaaccaggaaattgggtgggactcagaagccttggtcgacccagaacgccgtgaccacaggatgaaccacttcagggtctacagtgacatcactctgtacaaagctaaaatgtggagcttgggagaagatgatcgccacaagtagcatctcagctgtggagtcaggccctggatttaatgccctaaatatccactgcctagaagactaaacattattttaaccccccgtcccccatccataattcatggataatggcaaaaattaggaagcataaaaaatatgcggaagaaggaaataaaaattgcccattatctcaccatatggaagtgactaatgttagcattttaaaccatttgtttttaaaattaataataaattgcatatatttattgtgtaca

SEQ ID NO: 1255 - DNA, 674 bp, Homo sapiens
ggagcccgggggatccaggcagacatgcaaaccctcaggcaagaggctgcacggccctgtatcccctcggggaccctcgaggccagcttcccagcaccgctgtacagcgatgactacctgtccctggagggttcccgctggccaccagccatcaggcaggccacacgctggaagtacacgcccatgggacgggacgcagccggccagctgtggtacacaggcctgaccaactcggacgcctgggaagcctggtacaacctgccacgggccccggccagccccttccgcgaggcctacaaccgctggcacagctgctaccaacaccgtgagtgcagcatgccatcggcctacacccagcacctgcgggagaccgcctggcatgaccccatcgtccctgcccagtaccaggcccccagcacccggtgggggagcgcgctgtggaaagacaggccaatccggggcaaggaatacgtgctcaacaggaaccggtacggggtggagccactgtggagggcatcagactacgtgccctccctgtcggcaccccagcgcccgcccggcaccacccagaactaccgggagtgggtcctggaaccatactgcccctccacctgccagcggtccccgccttccctcacacccactccccgataaaggcatgctaccaggatgca

SEQ ID NO: 1256 - DNA, 6404 bp, Homo sapiens
tacgcttctagcttgagggaaagaggccgaggcctgggccaagcccggagccgccgctcgccggagcctcctggagcctccgcgccggctcagcctgggggcgggctccggtccggcccgccgccgcacccaggacggaggctgcatgcccgaggaccaggccggcgcagccatggaggaggcgtctccctattccttacttgatatctgcttgaatttcttgactactcaccttgagaagttctgttcagccagacaagatggaacattgtgtctgcaggaacctggagtattcccacaggaggtggctgatcgactgcttcggaccatggcttttcatggtctattgaatgatggaactgtgggtatttttaggggcaaccagatgcgcttaaagcgagcctgcattcgcaaagcaaagatctctgctgttgctttccggaaagctttctgccaccacaagttagtggaacttgatgccacaggtgtgaatgctgatatcacgattacagacattatcagtgggcttggcagtaacaaatggatccagcagaatctccagtgcctggtgctgaattcattaactctctccctcgaggatccttacgagcgctgcttcagccggctttctggccttcgagctttaagcatcacgaatgttctcttttacaatgaagacctggctgaagttgcctcattgccaagattagagagcttggatatttctaacacctcaatcacagacatcactgctctactggcctgcaaagaccgactcaagtctctaaccatgcaccacttgaaatgtttaaaaatgacaactacccagatactggatgtagttcgggaactcaaacatctgaatcatcttgatatctcagatgataaacagtttacatcagacatagctcttcgcttactagaacaaaaagacatcctacctaaccttgtttctctggatgtttctgggagaaagcacgtgacagataaagccgttgaagcctttatacaacaacgtccaagcatgcaatttgtaggtttgctggctactgatgctggttactctgaattcctcacaggcgaaggacatttgaaggtgtctggggaagccaatgaaactcagattgcagaagcactgaagcgttacagtgaacgggcattctttgttcgggaagctctatttcatctttttagtctgactcatgtgatggaaaaaacaaagccagaaattttaaagcttgtggttactgggatgagaaaccaccctatgaatttgccagtgcaactggctgcaagcgcctgtgtatttaacttaaccaagcaggatcttgctgcagggatgcctgtccgactcctggctgatgtgacccatttgctgctcaaagccatggaacattttcccaatcaccagcagttacagaagaattgcctcctttcactttgcagtgaccggatccttcaagatgttccatttaacaggtttgaagcagccaagcttgtcatgcagtggctttgcaaccatgaggatcaaaacatgcaaaggatggcagttgctatcatttctatcctggctgccaagctttctacagaacaaactgcacagcttggtactgagctcttcattgtcaggcaacttcttcaaatagtgaagcagaaaaccaatcaaaattcagtggacactacattgaaatttactttgagtgcactttggaacctcacagatgaatctccaaccacttgtagacactttattgaaaaccaagggttagaactcttcatgagggttctagagtctttcccaactgagtcatccattcagcagaaagttctaggacttttgaacaatatagctgaagtacaagaattacattctgaattaatgtggaaagattttatagaccacatcagtagtctcctacacagtgtggaagtggaagtcagttactttgcagctggaattattgcccatttaatatccagaggtgaacaagcttggacattgagtcgtagccagaggaattctctgctggatgatttgcattcagctattttgaaatggccaactccagagtgtgagatggtagcatacaggtcctttaatccatttttcccattacttggctgtttcacaacaccaggagttcagctatgggcagtttgggccatgcaacatgtctgcagcaagaatccttcaaggtattgcagcatgctgattgaagaaggaggattgcagcatttatacaacatcaaagatcatgaacatactgatccccatgtccaacagattgctgtggccattctggatagcttagaaaaacacattgtgcgccatgggaggccacctccctgtaaaaaacagccccaagccagactaaattgatagccataagtattggatagttgaatcacaggaatcctttttgtgattggtccatttggaatatcttaccctccctgatgttttgggggtttctatgacaagagtcataaaatcagtttgggattgataatgtgtagtactgcccatgtgaacagtctctaatttgtcttgtgattttaaacttatgagtcaagaagggtctcttcctttatcattgccttttaggaaattttccacatctttcagtgtttgaacttacttgtgcttgagattctacagttttatggtaaagtttgcacgaacccttaggccagacttttctgatctcagagtcccttccaatcaatttgcagcttcacataagctgttgacctgatttctgacactgcttcagttgtaaattttatactgcttctgtataaaatgcctttcttctctatctgtgtatattttataagatgtccttcttagtgtgaaagaagggaaatgtggatcatcttgtggaagctaatcactggcaggagcctggatggctggcggaaagatatatgagaaagaaaaattatgaaggtagaacagagtgtaggaactgggaattggtttcatggtataggttttaaaatgagacaggctacccttcgggagtccacctctcttgaggcggtgagcagaagcttgtcctccatatttatacctagaagtgtggactgctggttcctgcacagactgccggttattcactaggaatatttccccaagcaccacagtataaaatactacagcactctgtgttaaagactaactgtctacatctccatatgttgtagtgttgtgaaaatgtgattttaaaaaattatcgccagttaaaactggctattcttttcctctatttcaaagtcatttttgttcagtggaatagagacagcaacatggtgttaacctctcaattaaaatacaattgacaccagtaaattttgccataaaaagttaaaatctcttgttcaaaatatgtgtatcttcttaatgtgttcatgttagagaaagtgtccccatctcactgccaaaaatgaaagaaaataattaaactctttaaatgattaaatgtaatgattctactcgcagtgcataacagcacatatttttgacagattattttttaggcaattacctttccttaaggtatctgatacagtatagtaaagaatcacttatatcagtaatagcacttgagagatagcaagtcaccaagaaacttaattttcatttaaaattttattttgtgaataaggtcaatctacaatcccagataactacattttttttcatagatggccagtgttttcaacagagatttaaaatggaatattaaaattatagtgattattcagaagcattttaatttagaaaggagctggtttgttagttcactgatgacattttttgacaaacattttataccattatcacaataatcagacttgaattttttttggagttccttcatgtgaatgaaaactgagttaaaagaaagtaggcatttaggtctggatgcagtggctcgtgcttgtgatcccagcactttgggaagctgaagcaggaggattgcttgagcccggaagttcgagactagcctgggcaacatagtgagactcggtctctaccaaaaaaaaaaatttttttttttttaaattagctgggtgtggtggcacctgggaaacagagcgagacgctgactcaaataaatatctaaatagatatttagaatcactgaaaaccatattaaatgctgggttaatgctgacttaattggcttaaggaatttttataggcgtaagataaattttcacagactaagtttatttcagacaaaatagagaattcttttaaaagtttttttttttttttcctttttcgaatgttaatgtctaagacaaagttcagaaaacgagatggcctgtggtagtttggaaattgctagatatgttgaccgtttccaggtcttttatctagtgtagttaagggaaagcctatttaagaagtttggcttcaagtttctgttttataagacaaaagtgcatatttctttacaggctaatgctaggtttttgtctttacaaattattttcagaaatggctaaaagtgtacagaaaacagtaaatcccttctttactcagaataacttcttaatagttgaagcatccaaaatatgtaaaagcaagggtgggcgtagtggctcttgcctgtgatcccagcattctgggaggccggggcgggcagatcacttgagatcaggagttcgagaccaccctggccaacgtggtgaaaccccgtctctactaaaaatacaaaaactagctgggcatggtggcttttttgcacgcctgtggtcccagctactcgggaggctgaggcacgagaatcacttgaacccaggaagtggaggttgcagtgagctaggatcgtgccactgcactccagcctggacaacggagtgagactctggggaaaaaaaaaattaaacttcctactttttttctttttgtagagacggagtttcactctgtcgcccaagctggagtgcagtggcacaatcatacctcactgcagcctcttgggcttatgtgatcttaccccctcagcctctggagtagctggaactacaggctaaatttcctactttgtaaacatcagtagtggccagatacttctgagtcttaaaagcataataggccgggcgcggtggctcacgcctgtaatcccagcactttgggaggccgaggtgggtggatcacaaggtcaggagttcaagaccagcctggcccaaatggtgaaaccctgtctctactaaatatacaaaaattagctgggtgtggtggcgggcacctgtaatcccagctactcaggaggctgaggcaggagaatcgcttgaacctgggaggtggaggttgtggtgagccaatatcatgccactgcactccagcctgggtgacggagtgagactccgtctcaaaaaaaaaaaaagcataataatttattacatcccaaatatataaaaatttgagtgcctttgcagttgggatggttcctaaaattgcgtatagaattaaggcacagaattgtgtgtaaggtcctgaatctggctaaaatacagtggatgtatgtattggaattatgaggcataagtagccagtatctatagttagaatctacaaggcctcctttttgcacctgtagactagaatataactgttattggtgcctttgagtgttatctctcagtggctagaggtgctgtttcaagcacaatttagactagggttgaaccactcattgttcaaatcattggtgggctccaatgtaaaatatcactacatcagtccacaagcaacattaaggaaatctaaaggaaatggaatttgactttttagagtataatgatgttctagggcataatgaggaaaatttttaaaaaatagattataatgatacatattggtatcattaagacaacagatttgagcaaatacaattaaggtgtcttattttttgcatcaagtaattattgctgtggtctttctactccacaaaataattttttctttttgcagttgaaaattaactgcattattaactaattaataaaataaatcaagtggtataagggattagtttaccctcaagccgatgactccatggctactgatattagttagtttaggatttttaaaaagcatatcagacccccagtttcaggaattgagtataaatattgcttcttgtcaccctgggacagtaatgccttatagtggcactagtcaccttaagtagattacacatggttgaggtgaataaagctgcatgggaatttgctttcgtgatatatttcatttgcaaacttctacataatcaagttttatgtttaaaaccatcggttctatatatctagctttaggaagttgcccttacaggtgggaccttttgtgttaatctgttttctccccagtcatcttatttggctatgtt

SEQ ID NO: 1257 - DNA, 1398 bp, Homo sapiens
aggctgctgagacttccctctagaatcctccaacatggagcctcttgcagcttacccgctaaaatgttccgggcccagagcaaaggtatttgcagttttgctgtctatagttctatgcacagtaacgctatttcttctacaactaaaattcctcaaacctaaaatcaacagcttttatgcctttgaagtgaaggatgcaaaaggaagaactgtttctctggaaaagtataaaggcaaagtttcactagttgtaaacgtggccagtgactgccaactcacagacagaaattacttagggctgaaggaactgcacaaagagtttggaccatcccacttcagcgtgttggcttttccctgcaatcagtttggagaatcggagccccgcccaagcaaggaagtagaatcttttgcaagaaaaaactacggagtaactttccccatcttccacaagattaagattctaggatctgaaggagaacctgcatttagatttcttgttgattcttcaaagaaggaaccaaggtggaatttttggaagtatcttgtcaaccctgagggtcaagttgtgaagttctggaggccagaggagcccattgaagtcatcaggcctgacatagcagctctggttagacaagtgatcataaaaaagaaagaggatctatgagaatgccattgcgtttctaatagaacagagaaatgtctccatgagggtttggtctcattttaaacattttttttttggagacagtgtctcactctgtcacccaggctggagtgcagtagtgcgttctcagctcattgcaacctctgcctttttaaacatgctattaaatgtggcaatgaaggatttttttttaatgttatcttgctattaagtggtaatgaatgttcccaggatgaggatgttacccaaagcaaaaatcaagagtagccaaagaatcaacatgaaatatattaactacttcctctgaccatactaaagaattcagaatacacagtgaccaatgtgcctcaatatcttattgttcaacttgacattttctaggactgtacttgatgaaaatgccaacacactagaccactctttggattcaagagcactgtgtatgactgaaatttctggaataactgtaaatggttatgttaatggaataaaacacaaatgttgaaaaatgtaaaatatatatacatagattcaaatccttatatatgtatgcttgttttgtgtacaggattttgttttttctttttaagtacaggttcctagtgttttactataactgtcactatgtatgtaactgacatatataaatagtcatttataaatgaccgtattataacatttgaaaaagtcttcatcattttcagtaaaaaaaaaaaaaaaaaaaaaaaaaaaaa

SEQ ID NO: 1258 - DNA, 1143 bp, Homo sapiens
gtcagctgcgtttccgcggtcgcgggtgagtgtgcccgggctagcggcctgggttgggctttgtagctgctccgcaggcccagcccgggccgcgctcgcagagtcctaggcggtgcgcggcctcctgcctcctccctcctcggcggtcgcggcccgccggcctccgcggtgcctgccttcgctctcaggttgaggagctcaagcttgggaaaatggtgtgcattccttgtatcgtcattccagttctgctctggatctacaaaaaattcctggagccatatatataccctctggtttcccccttcgttagtcgtatatggcctaagaaagcaatacaagaatccaatgatacaaacaaaggcaaagtaaactttaagggtgcagacatgaatggattaccaacaaaaggaccaacagaaatctgtgataaaaagaaagactaaagaaattttcctaaaggaccccatcatttaaaaaatggacctgataatatgaagcatcttccttgtaattgtctctgacctttttatctgagaccggaattcaggataggagtctagatatttacctgatactaatcaggaaatatatgatatccgtatttaaaatgtagttagttatatttaatgacctcattcctaagttcctttttcgttaatgtagctttcatttctgttattgctgtttgaataatatgattaaatagaaggtttgtgccagtagacattatgttactaaatcagcactttaaaatctttggttctctaattcatatgaatttgctgtttgctctaatttctttgggctcttctaatttgagtggagtacaattttgttgtgaaacagtccagtgaaactgtgcagggaaatgaaggtagaattttgggaggtaataatgatgtgaaacataaagatttaataattactgtccaacacagtggagcagcttgtccacaaatatagtaattactatttattgctctaaggaagattaaaaaaagatagggaaaagggggaaacttctttgaaaaatgaaacatctgttacattaatgtctaattataaaattttaatccttactgcatttcttctgttcctacaaatgtattaaacattcagtttaactggaaaaaaaaaaaaaaa

SEQ ID NO: 1259 - DNA, 3114 bp, Homo sapiens; identical to SEQ ID NO: 393

SEQ ID NO: 1260 - DNA, 2342 bp, Homo sapiens
gagagctccgggggccgctgcagccgcccaagcgcccgccatgcgcgctgcccgcgccgcgccgctgctccagctgctgctcctgctggggccgtggctggaggctgcgggcgttgcggagtcgccgctgcccgccgtggtccttgccatcctggcccgcaatgccgaacactcgctgccccactacctgggcgctctggagcggctggactacccccgggccaggatggccctctggtgtgccacggaccacaatgtggacaacaccacagagatgctgcaggagtggctggcggctgtgggcgatgactatgctgctgtggtctggaggcctgagggcgagcccaggttctacccagatgaagagggtcccaagcactggaccaaagaaaggcaccagtttctgatggagctgaagcaggaagccctcacctttgccaggaactggggggccgactatatcctgtttgcagacacagacaacattctgaccaacaatcagactctgcggcttctcatggggcaggggcttccagtggtggccccaatgctggactcccagacctactactccaacttctggtgtgggatcaccccccagggctactaccgccgcacagccgagtacttccccaccaagaaccgccagcgccggggctgcttccgtgtccccatggtccactccaccttccttgcatccctgcgggctgaaggggcagaccagcttgctttctacccgccacatcccaactacacttggcctttcgacgacatcatcgtcttcgcctatgcctgccaggctgctggggtctccgtccacgtgtgcaatgagcaccgttatgggtacatgaatgtgccggtgaaatcccaccaggggctggaagacgagagggtcaacttcatccacctgatcttagaagcactagtggacggcccccgcatgcaggcctcagctcatgtgactcggccctctaagaggcccagcaagatagggtttgacgaggtctttgtcatcagcctggctcgcaggcctgaccgtcgggaacgcatgctcgcctcgctctgggagatggagatctctgggagggtggtggacgctgtggatggctggatgctcaacagcagtgccatcaggaacctcggcgtagacctgctcccgggctaccaggacccttactcgggccgcactctgaccaagggcgaggtgggctgcttcctcagccattactccatctgggaagaggtggttgccaggggcctggcccgggtcctggtgtttgaggatgacgtgcgctttgagagcaacttcagggggcggctggagcggctgatggaggatgtggaggcagagaaactgtcttgggacctgatctacctcggacggaagcaggtgaaccctgagaaggagacggccgtggaggggctgccgggcctggtggtggctgggtactcctactggacgctggcctatgccctgcgtctggcgggtgcccgcaagctgctggcctcacagcctctgcgccgcatgctgcccgtggacgagttcctgcccatcatgttcgaccagcaccccaacgagcagtacaaggcacacttctggccacgggacctggtggccttctccgcccagcccctgctcgctgcccctacccactatgccggggacgccgagtggctcagtgacacggagacatcctctccatgggatgatgacagcggccgcctcatcagctggagcggctcccaaaagaccctgcgcagcccccgcctggacctgactggcagcagcgggcacagcctccaaccccagccccgagatgagctctaggtccaggtgatgactgcaaagcagtgtccaggagcaggccactactgcccagagagcagaggaggaggttgttggcagggactgcagatcctgtcagacctggccaccaccttgggcatggccactctgccctctggacctgtctttcatcgggagaaaccactcagagatggatcccattccctaaaggtctcacagcaaaggagcaggactcccaggcccctgtaccctgcctggcctgattcagggccttgtggcccccagcttctgtttcaagctgggcagaccccaggatcccttccctccctaaggactcagctgaggggcccctctgcccccttctacctccacctcagcaccctcccccagcttgatgtttgggtctccccagcaccctcctccctggccggtgcaaagtacagggaggtaaagcaggacccttgcagacatgttgcccagcacacagtaggccctcaataaaagccatttgcactttaaaaaaaaaaaaaaaaaa

SEQ ID NO: 1261 - DNA, 1731 bp, Homo sapiens
ggagcgcgcacgtcggcgcgcgcaggccggcgcggtgggaaggggagggtcagctcgttgcaccctggcccggcctcttttcgaccctgcggagcatccgcttccggttcccagactgaattgtcagtgagcggagtctgaggtcgctgtggactgcccactgggccttgcccgagatggacagccggattccttatgatgactacccggtggttttcttgcctgcctatgagaatcctccagcatggattcctcctcatgagagggtacaccacccggactacaacaatgagttgacccagtttctgccccgaaccatcacactgaagaagcctcctggagctcagttgggatttaacatccgaggaggaaaggcctcccagctaggcatcttcatctccaaggtgattcctgactctgatgcacatagagcaggactgcaggaaggggaccaagttctagctgtgaatgatgtggatttccaagatattgagcacagcaaggctgttgagatcctgaagacagctcgtgaaatcagcatgcgtgtgcgcttctttccctacaattatcatcgccaaaaagagaggactgtgcactagaaagttgcagcccacagcccttcatgtggactctgtcatgacatgctaactagacttcaggggagccacttctgttttcagcccctccctggaatagtgagttgggaggatggggagacagctaaccaactgcattacccaaaccatattgcacttttagttccctagttttctaggtgagcttcattccctgaaaggaggatgatgatatctaggcataacctagcctgtgaggaacctagttaggaaagacaactgacatttattgaatatcatgcactagtcccttacatatgtcatattttaattatagaaatcagtagcaaaaagaatcttggggattttccatctgacttccctggccatcttatcccatccttgcactaccagaagattcatacacttttgagactccagtgagacgctgttttcaccccttcctcctcctagcctctctcccaaaaagtaaaacacaatgctgaagaaatattggtgtgacttttgaatgttaccgattggatgtaaaatgctatcgagggaagaaaaagctcttccaaagagaggagccactggaaggaacagagcaatactataccttcctcgcaactacctgtgatgtctgaccagaacattagcaaggccaaggaactttaaccacagtataactaagaaatggcatagagtgaggggcactgaaagaaactgcccgttcccctaggagctttgagcatttctctgcaggggacagtagtaatataattctctcttctcctttcccacattctttgatctggaacataaactaaggaaggggcttagatgcatttcctttctgaggcagcagtaagaaattggttcacagtttccaacttgtaagttgagtagtgctaactgctgacttctcccttttcttcaccccagccccaaataacattctgccatgttcctagatctttagttaccaatccaccgtgctcagcccagtttttcatattttttagataagtttaatataaaagcgatggctccagctactcgggaggctgaggtaggaggattgcttgtggctgggaattcaagacctctctaggcaacatagtgagacccacctctaaaaaaaaaaaaaaaaaaa

SEQ ID NO: 1262 - DNA, 716 bp, Homo sapiens
aggccgctatcgagcagggtccgagggctgtgtcagaaggctgggcagccatggcgtcctatttcgatgaacacgactgcgagccgtcggaccctgagcaggagacgcgaaccaacatgctgctggagctcgcaaggtcacttttcaataggatggactttgaagacttggggttggtagtagattgggaccaccacctgcctccaccagctgccaagactgtggttgagaacctccccaggacagtcatcagaggctctcaggctgagctcaagtgccccgtgtgtcttttggaatttgaggaggaggagactgccattgagatgccttgccatcaccttttccattccagctgcattctgccctggctaagcaagacaaattcctgtcccttgtgccgctatgagctgcccactgatgacgacacttatgaggagcacagacgagataaggctcgaaaacagcagcagcaacaccgactggagaacctccatggagccatgtacacgtgaggaggttggggctgagtgctggccctctgcgtcttccttattaaccttgaatcctcattaaaggtttctttacccaccctgaggctgtattgatcacagacctggccaggggctctgcatcctccatcaggtctctacttctgttggggaaggtgatcctaaatcgcagaaggcaccaggctgcggttttcctccctgctggcc

SEQ ID NO: 1263 - DNA, 1745 bp, Homo sapiens
catttatccagcagtgaactgtcctagcgcaagagttagtaattgctcccctgttccttcacctccccactttggagctcagatttgtttttttgtttgtttgtttgcttgctttcttttgttctgttttagagactggagactgggtcttgctctgttacccaggctggagtgcagtggtgtgatcatagctcactacagccttgaactcctgggctcaagaggttgaggctccctcctcagcctcccaagtagctgggactacaggctttcagcaccatgcctggctaattcaaaaaaaccttcagagagatagggtctctctatgttgccctagctcgtctcaaactcctggcctcaagtgatcctcctgcttggacctcccaaagcgctgggattacaggctcctggaaccatgggcctcaggccctgaggatacggggctcccggtggccatgacgacgggtgactgctgccacctccccggctccctgtgtgactgctccggcagccctgccttctccaaggtcgtggaggctacgggcctcggaccgccccagtatgtggcacaggtgacttcaagggatggccggctcctctccaccgtcatccgtaccttggacacaccgagtgatggtcctttctgccggatctgccatgagggagcgaacggggagtgcttgctgtccccgtgtggctgcaccggcacgctgggtgccgtgcataagagctgtctggagaagtggctttcctcatctaacaccagctactgcgagctgtgccacacggagtttgcagtggagaaacggcctcgacccctcacagagtggctgaaggacccggggccgcggacggagaagcggacactgtgctgcgacatggtgtgtttcctgttcatcacaccgctggccgccatctcaggctggttgtgcctgcgcggggcccaggaccacctccggctccacagccagctggaggccgtgggtctcattgccctcaccatcgccctcttcaccatctatgtcctctggacgctggtctccttccgctaccactgccagctgtactccgagtggagaaagaccaaccagaaagttcgcctgaagatccgggaggcggacagccccgagggcccccagcattctccactggcagctggactcctgaagaaggtggcagaggagacaccagtatgaatgctgggctctccggaccctgcagcagagaggccagaggtagctggtgataccctgtcctgtggaaggacttccacttcaacacttccacttcaacagttcccgcacggcctgaacgcttcttaggccaagagacaccatgcggagcctagtctgtgatcctgtgtgaagatattttcagggttttttttttttttttttttgcatatggaggacaggtggacatggtcctgagctctggacggagcaggcaccctgatctcattctgaggtccacatggcaccttctgggccagcagctgtggccggtgtatcaagggcgcccttaaagctggaacattccagcaagcttcttgcgcttctctgcacccggcaggcccactttcctggcaccctcgactttatataaaagttgcactgcgtttcaaaaacccaccctgaatgaataaaaggagccctggctggacaaaaaaaaaaaaaaaaaaaaaaaaaaaaaaaaaaaaaaaaaaaaaaaaaaaaaaaaaaaaaaaaaaaaaaaaaaaaaaaaaa

SEQ ID NO: 1264 - DNA, 1791 bp, Homo sapiens
ccttgcttcctgaactagctcacagtagcccggcggcccagggcaatccgaccacatttcactctcaccgctgtaggaatccagatgcaggccaagtacagcagcacgagggacatgctggatgatgatggggacaccaccatgagcctgcattctcaaggctctgccacaactcggcatccagagccccggcgcacagagcacagggctccctcttcaacgtggcgaccagtggccctgaccctgctgactttgtgcttggtgctgctgatagggctggcagccctggggcttttgttttttcagtactaccagctctccaatactggtcaagacaccatttctcaaatggaagaaagattaggaaatacgtcccaagagttgcaatctcttcaagtccagaatataaagcttgcaggaagtctgcagcatgtggctgaaaaactctgtcgtgagctgtataacaaagctggagcacacaggtgcagcccttgtacagaacaatggaaatggcatggagacaattgctaccagttctataaagacagcaaaagttgggaggactgtaaatatttctgccttagtgaaaactctaccatgctgaagataaacaaacaagaagacctggaatttgccgcgtctcagagctactctgagtttttctactcttattggacagggcttttgcgccctgacagtggcaaggcctggctgtggatggatggaacccctttcacttctgaactgttccatattataatagatgtcaccagcccaagaagcagagactgtgtggccatccttaatgggatgatcttctcaaaggactgcaaagaattgaagcgttgtgtctgtgagagaagggcaggaatggtgaagccagagagcctccatgtcccccctgaaacattaggcgaaggtgactgattcgccctctgcaactacaaatagcagagtgagccaggcggtgccaaagcaagggctagttgagacattgggaaatggaacataatcaggaaagactatctctctgactagtacaaaatgggttctcgtgtttcctgttcaggatcaccagcatttctgagcttgggtttatgcacgtatttaacagtcacaagaagtcttatttacatgccaccaaccaacctcagaaacccataatgtcatctgccttcttggcttagagataacttttagctctctttcttctcaatgtctaatatcacctccctgttttcatgtcttccttacacttggtggaataagaaactttttgaagtagaggaaatacattgaggtaacatccttttctctgacagtcaagtagtccatcagaaattggcagtcacttcccagattgtaccagcaaatacacaaggaattctttttgtttgtttcagttcatactagtcccttcccaatccatcagtaaagaccccatctgccttgtccatgccgtttcccaacagggatgtcacttgatatgagaatctcaaatctcaatgccttataagcattccttcctgtgtccattaagactctgataattgtctcccctccataggaatttctcccaggaaagaaatatatccccatctccgtttcatatcagaactaccgtccccgatattcccttcagagagattaaagaccagaaaaaagtgagcctcttcatctgcacctgtaatagtttcagttcctattttcttccattgacccatatttatacctttcaggtactgaagatttaataataataaatgtaaatactgtgaaaaaaaaaaaaaa

SEQ ID NO: 1265 - DNA, 1798 bp, Homo sapiens
gccgcccggccgagcgcggagcgcagccactcgccgctgcccagggagcgcccaagatgtggggggaccggggcggcagcggccgtagcagcgccagggacgggggcacgcagcagcctccgctcgcccgcctgtcctgacctgcctcgcttgcccccaaagaatgtcagccaagtccaaggggaacccctcctcgtcctgtccagccgagggaccgccggcagcctccaaaaccaaggtgaaggaacagatcaagatcatcgtggaggatttggaattagtcctgggcgacctgaaggacgtggccaaggaacttaaggagatgaagtcccactctgttgcccaggctagagtgcaatggcacaatctgggctcactgcaacctctgcctcccaggttcaagctattctcctgcctcagcctgcctcagtgcgccactacgcctgggtggttgaccagattgacaccctgacctctgacctacagctggaggatgagatgactgacagctccaaaacggacacgctgaatagtagctcaagtggcacaacagcctccagcctagagaagatcaaagtgcaggctaatgcaccgcttattaaacccccagcacacccatctgctatcctcacggtcctgagaaagccaaaccctccaccacctcctccaaggttgacacctgtgaagtgtgaagaccccaaaagggtggttccaactgccaatcctgtaaaaaccaatggcacccttctacgaaatggaggcttaccaggtggacctaacaaaattccaaatggagatatctgctgcatacccaacagtaacttggacaaggctccagtccagcttctgatgcatagacctgaaaaagacagatgtccccaggcagggcctcgagaacgagttcggtttaatgaaaaagtacagtaccatggctattgtcctgactgtgatacccggtataacataaaaaacagggaggtccacttacacagtgaacctgtccacccaccgggaaagattcctcaccaaggccctcccctccctcctacaccccatctccctcctttcccactagaaaatgggggaatgggaataagccacagtaacagcttcccccctatcagacctgcaactgtgcctcctcccactgcaccaaaaccacagaagacgatcttgaggaagtcaaccactacaaccgtgtgatgtatgccattaaaaaaattgtttttttaattttctatattataaacataaaataagtaatgagcactttctactcaagcaataaaaagcccaaatatattaatcctgcattcagcaaagtggcataaaaatcacctggtaagtatgcagcacattgcttatatcctgggtatgcattattttaaatgttgtatcattaaaaacctcagaatgatgaaaaatatgaatgatgcattgtttttgcaattgacctatgacaaactgtgaacctgcagatttcacctattttgatttactataagagctgggatttgattcattttatttatgcctaagtcatctatgcattaacatgtcatattcttaactttgatctaatgctttttactaggaaattttaatactgaaggactattttattatttttttctaaagatgtttgtcactagtttttcattattaaatgctgaggccaataccaagaagtttattttctatattatacaattatgaattacatgctcagctatatatgtaataaaatactttggtctgtggaaaaaaaaaaaaaaaaaaaaaaaaaaaaaaaaaaaaa

SEQ ID NO: 1266 - DNA, 2264 bp, Homo sapiens
ctcggccgccctcgcgctgtggttcgctccgggcgcgctgcgctcgtgagttcccaggaggcctggcgggcaccgtaaccagcgccgcggacaccggcaccggcgccacggactccgcaggaccccgcgcccgccgccgccgctatgctggggctgctggtggcgttgctggccctggggctcgctgtctttgcgctgctggacgtctggtacctggtgcgccttccgtgcgccgtgctgcgcgcgcgcctgctgcagccgcgcgtccgtgacctgctagctgagcagcgcttcccgggccgcgtgctgccctcggacttggacctgctgctgcacatgaacaacgcgcgctacctgcgcgaggccgactttgcgcgcgtcgcgcacctgacccgctgcggggtgctcggggcgctgagggagttgcgggcgcacacggtgctggcggcctcgtgcgcgcgccaccgccgctcgctgcgcctgctggagcccttcgaggtgcgcacccgcctgctgggctgggacgaccgcgcgttctacctggaggcgcgctttgtcagcctgcgggacggcttcgtgtgcgcgctgctgcgcttccggcagcacctgctgggcacctcacccgagcgcgtcgtgcagcacctgtgccagcgcagggtggagccccctgagctgcccgctgatctgcagcactggatctcctacaacgaggccagcagccagctgctccgcatggagagtgggctcagtgatgtcaccaaggaccagtgaccgccaccttcacaccgtctgccctggccaccatcctgggcctgggggctgcccacagatgggcagtctcagccatactctgttccagctggagtagcctcctgaccagcctggcccaccctgctccacccactgggcccccccagttattgatacccctctgtgctgggctccacgctaggcagaaggaggagtggcattggcatcctgacccagctctgccctcaaggtggggatggatgggcaaaggagagtcctgcctggccctacgatgaggccactcatgtgggcctaggtaggggaggatggtgcctggagcagagggacccacaagtgcctcccgagcctagatcctggctcggaccactgcaagggccgaggcagggccagaccagagcatcctgggtacaggcctgggctctccagggcctgggcctgattcaggtgcagtgggcactcctgaagggtcagagcggcatctgccaggcagcccctctggcttccgctgaggtggttgcaggcctggggcagagcctgggtggtcagaggccggggctagaggcagatggaagggaggcatttgctgacagaggacggggcacccgggctccccactgcagtcggccttgcctcctcctcctcctctacctccagtcaggctggacgggagggtagccttgtggctgagaggggtcagactaggtggcacaggggctcctggaaagacagcaggcttcctgctgggcgttcccttgttggagggaatagagtgggggtgggactctgcaggggtgtccttgtccactcgcacccctcgccgcccaccagggccatgctctgtgacttgggctgatccccaccctttctgggcctacagcaccacaggccgctgtacccccttagagctgcccctctctggcctggccggcaggcgtcttcttaactcctctgtcctctatattcagcatgttccttgtcagctgctgggccggccctgccttgcgctagcagagcctctcctggcagcttctcaggtctccctaatggagacaccaggctactaggacactggctggggccaccccctcctgcctaatgcctcaccttacagctggggaaactgaggcctggaatggcccagagtcaccaaggcaaagttggggctggtcccagcctgaggctccagctgatgccctcagctcccagagagggggtgccccatctagctgggtgcaggggtcactgcttgtcagctcagggccctgtgcccgcttgcctgttcccctacatctgtgcctgcacatccagaactgcctccttgccgctgcctccaggaagcccaccttgagccagagtcaagggctgcagcactgcccgatagaacacgcccgccctcactgctgttcttgccttacagccaccatgggaaagctgcaacctttctgttttatttaaagaaagcccaacattaaagggttttcattgcaagcgtg

SEQ ID NO: 1267 - DNA, 1240 bp, Homo sapiens
acatacatcgggtgtgagcacggaatagctgggcggcggctggtccacagacactgggagacagaaggggccggtccccaggcgcccgtgctgcagcagtgggatccactggggagaggctggagaccaccggtgtgaaggcctcgcgggtaaattcactgcagctggacttgccaaagatgacctgggagagtggattcatgagggacccatgggggatgccctaccccccttccctggggcacagccactgaccggcagagcctggctggggtcctcgcctgtcatgtactgcactcgcacggcaaggttgcgcacggagccctggcggctgctgaagttgaggctgttataccttagaccctcagtcatgccagtgcctgctctgtgcctgctctgggccctggcaatggtgacccggcctgcctcagcggcccccatgggcggcccagaactggcacagcatgaggagctgaccctgctcttccatgggaccctgcagctgggccaggccctcaacggtgtgtacaggaccacggagggacggctgacaaaggccaggaacagcctgggtctctatggccgcacaatagaactcctggggcaggaggtcagccggggccgggatgcagcccaggaacttcgggcaagcctgttggagactcagatggaggaggatattctgcagctgcaggcagaggccacagctgaggtgctgggggaggtggcccaggcacagaaggtgctacgggacagcgtgcagcggctagaagtccagctgaggagcgcctggctgggccctgcctaccgagaatttgaggtcttaaaggctcacgctgacaagcagagccacatcctatgggccctcacaggccacgtgcagcggcagaggcgggagatggtggcacagcagcatcggctgcgacagatccaggagagactccacacagcggcgctcccagcctgaatctgcctggatggaactgaggaccaatcatgctgcaaggaacacttccacgccccgtgaggcccctgtgcagggaggagctgcctgttcactgggatcagccagggcgccgggccccacttctgagcacagagcagagacagacgcaggcggggacaaaggcagaggatgtagccccattggggaggggtggaggaaggacatgtaccctttcatgcctacacacccctcattaaagcagagtcgtggcatctcaaaaaaaaaaaaaaaaaa

SEQ ID NO: 1268 - DNA, 442 bp, Homo sapiens
tgggggcgccagagcaggaccggagcgcgggccaagctggagatggatgatgctgaccctgaggaaagaaactatgacaacatgctgaaaatgctgtcagatctgaataaggacttggaaaagctattagaagagatggagaaaatctcagtgcaggcgacctggatggcctatgacatggtggtgatgcgcaccaaccctacgctggccgagtccatgcgtcggctggaggatgccttcgtcaactgcaaggaggagatggagaagaactggcaagagctgctgcatgagaccaagcaaaggctgtaggccccactggcccaccacagctgccatgccaccctctgcccgtatgaagaggtcactgggggatggagctggcacccacatgaatagctgtatgcactgtacttgtttcttaataaacttatttttaagcaca

SEQ ID NO: 1269 - DNA, 442 bp, Homo sapiens; identical to SEQ ID NO: 1268

SEQ ID NO: 1270 - DNA, 2120 bp, Homo sapiens
cagtttgaacttggcgggccagatgtgggcggcggggcgctgggggcctacttttccctcttcctacgccggtttctctgctgactgcagacccaggtctcggccctcctcggactcctgctcagtccctatgacgggcgcacgtgggcaggggctggaggtggtgcgctcgccgtcgccgccgctgccgctgagctgcagcaattccaccaggtcgctgttgtctccccttggccaccagagcttccagtttgacgaggacgacggtgacggggaggatgaggaagacgtggatgatgaggaagacgtggatgaagatgcccatgattcagaggccaaagtggcgagcctgagaggaatggagttacaggggtgcgccagcactcaggttgaatcagaaaataaccaagaagaacagaaacaggtgcgcttaccagaaagccgcctgacaccatgggaggtgtggtttattggcaaagaaaaagaagaacgtgaccggctgcaactgaaagctctagaggaattaaatcaacaactagaaaaaagaaaagaaatggaagaacgtgaaaaaagaaagataattgctgaagaaaagcacaaggaatgggttcagaaaaagaatgagcaagtaaggaggggaaaatggatacacacattgacatctcttttgcaaaatatttcttcctattatacttcattacctaggttttaaaaaatacttctcttagagtctttcttctttggcttgttttgtttttctatcctggtggacatttatcaagtctctatcttctgccctttgccctctacttttctcccttttccctcctgtggcttgcactaatatttgcctgcaggcagtcaccaagtctgtatttctaggcctgaccttttggatccttatggcaagtgcctccaagtctgcaaatctaaaacaacccattttgcccatttctccttcgtaaatccatcctcccatttctctgtttcattcagctgtcttctcggtcatcaaggcttaattagaattcttctgttgttcctaatcatctcctccttttctttacaattactactcccctgtttgtgatctctttccattatatctttcaacttgttgtttacttcttatactggattgtaagctacataagggcagggatttttgcctcttttgttcagttttccaggagctagatgaatacctgcgcatgatatatgtccaaaaatagtttaattgagtgaagatgttcattgaatggctgcattttttccttttaattttaatatattcttctatggatcacacacattcgaaattttaaaaatacttattctgtggtcaatttgtcttctgttgtgatttttacatatttagagtggtactgcttttattattataatccagttttacaaatgtggaaaaatgtttaaattgtaggacaatattttaaattttaattctaactttttatctttattgttgaatctaatgcctaatggtattaataagagtactaagtaaataatttcagtaaattgaagatgatataaccttcttcatccaagtattataagaaggaaattggttagatgtatgtgtgttataaccatatttgtttagaagtcaattactttgtttttttaaaaaagtttacttcatcccatgatataacatgaaagagatctttgtgaataaattcaaaaatcaaaataaatctctgtgactgttataaaactttgggtaatatctttttgaaatttgtaactataaaacaaaattattttacacatgcagaatagtttgctctttcctctaaaagtccttcttatcttctaactccattaagctaattttaccatgccaatcaaacctagttgttgtttgtctaggaatgtaagatacttctgggagacaatatattcactgttttaattagtggcagtagacctaatccaattatttgaagaaaaaaaaaattatttcttttggagggaagtggcttgccctgacataaatcactagttattgaaggcaaaattccgtaatgttgagaattatttaaaaataaaactgagacgttatatataaaaaaaaaaaaaaaaaaaaaaaaaaaaaa

SEQ ID NO: 1271 - DNA, 2169 bp, Homo sapiens
gtccgtagccacggcaacaggttgcttctgcagtctgagctgagcgcctttcgcacgacttggagttacggtttatctgataccgcggtacccctacgcaagcaagcccacatcgacacacattcacacacgcccttcagcaccccctcccagcaccacgaccatggacgacgactatgaagcgtaccacagtctgttcttgtcgctgctcggactctgcccgtctaagactcccatcaatgaaaatgctcccgtctttgatcctgaaccggtcattgcccactgcttcaagcagttccagcagaaggacttccgcctgcctcagacccgccggcgaatcatcatggtgcctcgcaaggaggatcagacaccccttaatcctgcatcccaacctcaggctcccccaaagcccatccccagcttcaaagttctggaagctagagatatccaagagcagccagaggacaggaagacctggctgagccagaggtcgaagctgcggcaggagctagagtcctttggtgatgtaaagaggtggctggagaacaagcccagcatcacgccttcagaggccaaggtcttacacatgatccacgaggagcagagtgcccagccaaatgcctcccaggcaactaccaggaccaccaggaagaaagcccccaggctctcccggctgtcccgccagatggtgccccagctccagctgcccgagccccctgccctgtcggtcatgtactcctacctgcatagccgcaagatcaagatcctggagatatttcacaaggtgggccagggtgagaaccagagaatcaccagggaggagttcatcgcggctgtaaaggcagtcggagtccctctgaagaaccaagaggtggaggatatagtgatctacctcagctctcttgggaagcacaacaccatcaccatggatatcctggccaatacctacaagcagtggtctatggctcagcaaaggagcagcctggccactgcaagggagcattatatcttggccaagcacagagattccctgaagggtccgctcaagaagcaggaggtggattcagccccacagcttcccaaagtggacctactgacggtgcctgcagtcgacacgcagatggagacgcggcccatgaccctggaggagatggaggaagtgggcaagcggtaccgcgagcggcagcgacagcacaagctcacgatcccctccatccagtacacggagcaatgtcacctggtgcgctgtgggaatcggcactttgatgagcactgcctcccgtccaccatccacggggatatgagggagctcattgactcggcccgcaggcacaactttctggtctacctgcaatgctggaagctctgtaagtcctatggcctcccgctgacagaggacatcctcatgaaagccttgctgtacccaggagacaagatcattttccagatggacaaagtgtgccccatccggcagccgggaggctactactctgactggaaggtcttttctccgaatctggctctgctccggtcccagggccctggcaagtctaagaggactgacaagaaaacgccaaagaaaagcaagaaaatgcgctttaaggagtttgaggaatttaccaggaagctgaaggtgaagaggtccagtggtctgcagcaaacacaccccaattccttctggccgggtcatcttctggataagctgcagctctacctgcccactgtggccacagaccggagcctggcgctcttcagttgtgttcaacaccagccccatgtctacccagccacctaccaccctgaccactggtggccccttaggaacaagaactacatgacccacgcccattatgatgccgccaaggtgtactacatcaactagagctagccaggtgttgccggacccagccttcctgggccaggggccagtgcagccagcggcccagagcccagacacaagaggagtgtcaaagagtcaaactaaagaaatcctttcaaagagggatggaccgggggccagttccctctggactcaaagtgtccagtgtctcagagggtagatgtgtccaaggaatgacgtgcagtttttgactatttccctcccctgacctctgccctttctacataaagcaggttggagtttttctcatttcaaaaaaaaaaaaaaaa

SEQ ID NO: 1272 - DNA, 2285 bp, Homo sapiens
gggctcggtgcgactgcgcagctcctcggcgcttcctcggtggcttccccgggtcgagcaaacaggtaagttcggggagacttcaggccagggcagtctcctgtcttctcttggaaaccacagcagcccatgcacacagaatggcagccacattccagcttccagggcaccaggagatgccgctgaccttccaggatgtggccgtgtacttctctcaggcggaggggcggcagctgggcccccagcagcgggcgctctaccgggatgtgatgctggagaactatgggaacgtggcctctctgggattccctgtccctaagccggagttgatctcccagctggagcaggggaaggaactttgggtcctgaatcttctgggagctgaggaaccagatatcttgaaaagctgccagaaagattctgaggttgggaccaagaaggaactatctattttaaaccaaaaattttccgaagaagtaaaaaccccagaatttgtatcaagaagactcttaagggataatgcacaggccgctgagtttcgggaagcatggggccgtgagggcaaactcaaagagcgcgtgggaaattctgccgggcagagtttgaacaaacccaatattcacaagagagttttaacagaagctaccgtgggcagggaaagatctttgggagaaagaacccaagagtgtagtgcatttgatagaaacttgaatctggaccaaaatgttgttagacttcaaagaaataaaacaggagagagggtctttaaatgtgatatatgcagcaaaaccttcaaatataattcagacctaagtagacaccagagaagtcacactggggagaagccgtacgaatgtggccggtgtgggcgagcctttactcacagctcaaatcttgttctgcaccatcacattcacactggaaataaaccatttaaatgtgatgaatgtgggaaaacttttggactcaattctcacctccgtcttcatcggagaattcacactggagaaaaaccctttggctgtggtgagtgtgggaaggctttcagtcgaagctcaactcttattcaacatcggatcattcacacaggagagaaaccctacaagtgtaatgaatgtggaagaggctttagccagagcccccagttaactcagcatcagagaattcacactggagagaagccgcatgaatgcagtcactgtgggaaggccttcagtcgaagctccagccttattcagcatgagagaattcacactggagagaagccccataaatgcaatcagtgtgggaaggccttcagtcagagctcaagccttttcctccatcatcgggttcatactggagagaaaccctatgtatgtaatgaatgcggcagagcctttggttttaactctcatcttactgaacacgtaaggattcacacaggagaaaaaccctatgtttgtaatgagtgcggcaaagcctttcgtcggagttccactcttgttcagcatcgaagagttcacactggggagaagccctaccagtgcgttgaatgtgggaaagctttcagccagagctcccagctcaccctacatcagcgagttcacactggagagaagccctatgactgtggtgactgtgggaaggccttcagccggaggtcaaccctcattcagcatcagaaagttcacagcggagagactcgtaagtgcagaaaacatggtccagcctttgttcatggctccagcctcacagcagatggacagattcccactggagagaagcacggcagagcctttaaccatggtgcaaatctcattctgcgctggacagttcacactggtgagaaatcctttggatgtaatgaatatggaaaagctttcagtcccacctcacgacccactgaagatcagataatgcatgctggggaaaagccctataaatgtcaagaatgtggaaacgccttcagtggaaagtcaacccttattcaacatcaggtaactcacactggtcagaaaccatgtcattgcagtgtgtatgggaaagccttcagccagagttcacagctcacaccacctcagcagactcgtgttggagagaaacctgctttaaatgatggctctaaaagatactttattcatatcaagaagattttccaagaaagacatttttaatgtgataaatgcagaagacagtttagcaactgttcacttgacattagaagataagatggcataatgaaagatatataaggtctaaatattactggcaaagtaaaataaatagttcagatgactactaaa

SEQ ID NO: 1273 - DNA, 1611 bp, Homo sapiens
atactggagatctaggtgtaactgtctctagggctggaatgacagacatcaccatccactcagttgtccaagccagaagcctggggcttatctttgactctgacttgtctttaattttcatccagtcactaagtcttgttgatttttgaatcagactgccaccctccattcccattgccaaatttcaattcaaatcactgtcagctttgtctccattattgcagttgcctcttgttttatcctgccatgccatcagccttgttcctctccaaacctttctccacaggaaaggagaatttttcaaagtgaaagtataattgtatcatcttcttatttaaaatctttcagtggctttccaccgttttcagagtaagattcagtctgttaaaatggcttacaacagaacagagaaccaaatacagcatgttcttgttaccggaaggggtcctgatccagaccccaagagacacaagaaataattcaagctgtgcagacgttcttgcagaggaaggagaagtccacgtggcattatgtagaggacaaggtggaactcctgcggataagccccagagagaatggcacaacagttggcaagtggttgccatggcagccctgggggggctcattttaagcgacgtgtatccattcagctgtaaggctgtggcagggtacaagtgcactggatataggagtcaagataagtcctttcatgtagaaggtgctttgaaccatatcttcaccaggagcttaccttttgaaggttctcaacccagaatcttcaggatcaaactgggtaaccagtggttttcctttccagaaccagaagcacttgtaggaaagttgaacaggggtttcctggaagcaccttcatgtcatcctatcaaaaccataaatgagaaactcattgctgaattaggcaaagttttcccgctaaaaaggctgaagtgttcctaccctttgctgccacaggaaggtaccagtgttcttcctttctggaattgtgactttctgtcagctgctttttggattagtctccatgaagataactcaaattctgagtccctgactggtgggacatcacaagatgtggaagactttctagtgtcattttcagaacttagccttctcaagaatcctggaagagatggtaaagaagaagcttgtgaaggaacctgtggccaggccaagatctgccttagaccttctctcctagtgcatgttcaggatgtcatcgaagtaccagacttcctctcaggttctctgcacatcctcagtggacctgtctttcagaagtgccacattttgcctttcacaatgccagcatttcatgaaactttatttatccttggggttaatcaaaatctgaaggatggctgtcttcaatcactgctggatcatctgaagggcattctagatagcctgctgacccagacattgccggagagctctaagctgagcagtttagtcaaatttgtccttcagtcaaatggaaaggattatatgattcgtgtgaagactcataattttagcccagattgtactgaggatctaattattgggtctgttatcacatctgccactagtgttatacataaagaccagtgttttgtg

SEQ ID NO: 1274 - DNA, 1964 bp, Homo sapiens
cgtaaaacgagcgccacagagaacgcgagccgggagtccgtggaggccatggcccctcggcgcctcctgttggttggggaggggaatttctccttcgccgccgctctgagcgaaaccctggatcagagcactcaacttaccgccacctgcctccagcgcccggccgagttggctcgggatccactggcctgggagaatctgcagtgcctgcgcgagcgaggtatcgatgtacgtttcggtgtggactgcacccagctggcagatgtctttgaactgcacgagagagaatttgatcaaatttatttcaacttcccgcattgtggacgcaaagctggcgtagctaagaacagggaactgcttgccaaatttttccaaagctgtgcagacgttcttgcagaggaaggagaagtccacgtggcattatgtagaggacaaggtggaactcctgcggataagccccagagagaatggcacaacagttggcaagtggttgccatggcagccctgggggggctcattttaagcgacgtgtatccattcagctgtaaggctgtggcagggtacaagtgcactggatataggagtcaagataagtcctttcatgtagaaggtgctttgaaccatatcttcaccaggagcttaccttttgaaggttctcaacccagaatcttcaggatcaaactgggtaaccagtggttttcctttccagaaccagaagcacttgtaggaaagttgaacaggggtttcctggaagcaccttcatgtcatcctatcaaaaccataaatgagaaactcattgctgaattaggcaaagttttcccgctaaaaaggctgaagtgttcctaccctttgctgccacaggaaggtaccagtgttcttcctttctggaattgtgactttctgtcagctgctttttggattagtctccatgaagataactcaaattctgagtccctgactggtgggacatcacaagatgtggaagactttctagtgtcattttcagaacttagccttctcaagaatcctggaagagatggtaaagaagaagcttgtgaaggaacctgtggccaggccaagatctgccttagaccttctctcctagtgcatgttcaggatgtcatcgaagtaccagacttcctctcaggttctctgcacatcctcagtggacctgtctttcagaagtgccacattttgcctttcacaatgccagcatttcatgaaactttatttatccttggggttaatcaaaatctgaaggatggctgtcttcaatcactgctggatcatctgaagggcattctagatagcctgctgacccagacattgccggagagctctaagctgagcagtttagtcaaatttgtccttcagtcaaatggaaaggattatatgattcgtgtgaagactcataattttagcccagattgtactgaggatctaattattgggtctgttatcacatctgccactagtgttatacataaagaccagtgttttgtgtttgtgtctatgaacttggacttattagccatgcttgtctggtgtatctctgactggagaatgttgtggacgtttgataaccgtttcctgaaaaattttgtccctggcaaaatagaaccctttaaaagtcattctctgtatcctccatgttatgtgcatgatgttagtttttggatagatcagaagaaaggatttgatgaactagagtttcacactgtggcccgagcagtgtctcaggacactattatatccatacagtttcttagccgtttccagcatccaaagactcaacaggtcagtctctgctatagattgacctaccagacctgtgacaaggccctcacccagcagcaagtagcatcaatgcagtcccagtttaggaaggagattcaacaacacctatatgttatacctcggtagtttggtaaatccttttctgcagtgtgatccttcattgcggg

SEQ ID NO: 1275 - DNA, 2665 bp, Homo sapiens
ggccatggcccctcggcgcctcctgttggttggggaggggaatttctccttcgccgccgctctgagcgaaaccctggatcagagcactcaacttaccgccacctgcctccagcgcccggccgagttggctcgggatccactggcctgggagaatctgcagtgcctgcgcgagcgaggtatcgatgtacgtttcggtgtggactgcacccagctggcagatgtctttgaactgcacgagagagaatttgatcaaatttatttcaacttcccgcattgtggacgcaaagctggcgtagctaagaacagggaactgcttgccaaatttttccaaagctgtgcagacgttcttgcagaggaaggagaagtccacgtggcattatgtagaggacaaggtggaactcctgcggataagccccagagagaatggcacaacagttggcaagtggttgccatggcagccctgggggggctcattttaagcgacgtgtatccattcagctgtaaggctgtggcagggtacaagtgcactggatataggagtcaagataagtcctttcatgtagaaggtgctttgaaccatatcttcaccaggagcttaccttttgaaggttctcaacccagaatcttcaggatcaaactgggtaaccagtggttttcctttccagaaccagaagcacttgtaggaaagttgaacaggggtttcctggaagcaccttcatgtcatcctatcaaaaccataaatgagaaactcattgctgaattaggcaaagttttcccgctaaaaaggctgaagtgttcctaccctttgctgccacaggaaggtaccagtgttcttcctttctggaattgtgactttctgtcagctgctttttggattagtctccatgaagataactcaaattctgagtccctgactggtgggacatcacaagatgtggaagactttctagtgtcattttcagaacttagccttctcaagaatcctggaagagatggtaaagaagaagcttgtgaaggaacctgtggccaggccaagatctgccttagaccttctctcctagtgcatgttcaggatgtcatcgaagtaccagacttcctctcaggttctctgcacatcctcagtggacctgtctttcagaagtgccacattttgcctttcacaatgccagcatttcatgaaactttatttatccttggggttaatcaaaatctgaaggatggctgtcttcaatcactgctggatcatctgaagggcattctagatagcctgctgacccagacattgccggagagctctaagctgagcagtttagtcaaatttgtccttcagtcaaatggaaaggattatatgattcgtgtgaagactcataattttagcccagattgtactgaggatctaattattgggtctgttatcacatctgccactagtgttatacataaagaccagtgttttgtgtttgtgtctatgaacttggacttattagccatgcttgtctggtgtatctctgactggagaatgttgtggacgtttgataaccgtttcctgaaaaattttgtccctggcaaaatagaaccctttaaaagtcattctctgtatcctccatgttatgtgcatgatgttagtttttggatagatcagaagaaaggatttgatgaactagagtttcacactgtggcccgagcagtgtctcaggacactattatatccatacagtttcttagccgtttccagcatccaaagactcaacaggtcagtctctgctatagattgacctaccagacctgtgacaaggccctcacccagcagcaagtagcatcaatgcagtcccagtttaggaaggagattcaacaacacctatatgttatacctcggtagtttggtaaatccttttctgcagtgtgatccttcattgcgggggatgtggaggaaaattaccaacttgcaaccagtagtcctttctggatttttgtttttgtaaaatcttttactttgtgaccatagctactgttcgttgatctttttttttttttttttttgagacggagtcttgctctgccgcccaggcgggagtgcagtggcagtggcatgatatcagctcactataagctccacctcccaggttcatgccattctcctgcctcagcctcccgagtagctgggactacaggcacctgccaccacgcctggctaattttttttttttgtatttttagtagagacgaggtttcaccgtgttagccaggatggtctcaatctcccggcctcgtgatctgcctgcgtcggcctcccaaagtgctgggattatagatgtgagccaccgcgcccggcctactgttagttgatcttaaagataccttgactctattactgaaacttatagattataatgtgattggtgacatttggagttgtgtaatattttggtcccgagaagtgactaaaacaataaacaaaacagcatcttgtactttagatgctctattgttgaacaggcagtagaacttaagtgtctcatcaaatataaatatgttttccacactgtcaattactcttcccttaactttgttgtatcatttcattaaatcaccttatgagagtaaaaaaaaaaaaaaaaaaaaaaaaaaaaaaaaaaaaaaaaaaaaaaaaaaaaaaaaaaaaaac

SEQ ID NO: 1276 - DNA, 1807 bp, Homo sapiens
cccgcaatgaaggatcacactgcagaaaaggatttaccaaactaccgaggtataacatataggtgttgttgaatctccttcctaaactgggactgcattgatgctacttgctgctgggtgagggccttgtcacaggtctggtaggtcaatctatagcagagactgacctgttgagtctttggatgctggaaacggctaagaaactgtatggatataatagtgtcctgagacactgctcgggccacagtgtgaaactctagttcatcaaatcctttcttctgatctatccaaaaactaacatcatgcacataacatggaggatacagagaatgacttttaaagggttctattttgccagggacaaaatttttcaggaaacggttatcaaacgtccacaacattctccagtcagagatacaccagacaagcatggctaataagtccaagttcatagacacaaacacaaaacactggtctttatgtataacactagtggcagatgtgataacagacccaataattagatcctcagtacaatctgggctaaaattatgagtcttcacacgaatcatataatcctttccatttgactgaaggacaaatttgactaaactgctcagcttagagctctccggcaatgtctgggtcagcaggctatctagaatgcccttcagatgatccagcagtgattgaagacagccatccttcagattttgattaaccccaaggataaataaagtttcatgaaatgctggcattgtgaaaggcaaaatgtggcacttctgaaagacaggtccactgaggatgtgcagagaacctgagaggaagtctggtacttcgatgacatcctgaacatgcactaggagagaaggtctaaggcagatcttggcctggccacaggttccttcacaagcttcttctttaccatctcttccaggattcttgagaaggctaagttctgaaaatgacactagaaagtcttccacatcttgtgatgtcccaccagtcagggactcagaatttgagttatcttcatggagactaatccaaaaagcagctgacagaaagtcacaattccagaaaggaagaacactggtaccttcctgtggcagcaaagggtaggaacacttcagcctttttagcgggaaaactttgcctaattcagcaatgagtttctcatttatggttttgataggatgacatgaaggtgcttccaggaaacccctgttcaactttcctacaagtgcttctggttctggaaaggaaaaccactggttacccagtttgatcctgaagattctgggttgagaaccttcgaaaggtaagctcctggtgaagatatggttcaaagcaccttctacatgaaaggacttatcttgactcctatatccagtgcacttgtaccctgccacagccttacagctgaatggatacacgtcgcttaaaatgagcccccccagggctgccatggcaaccacttgccaactgttgtgccattctctctggggcttatccgcaggagttccaccttgtcctctacataatgccacgtggacttctccttcctctgcaagaacgtctgcacagctcgctcgcgcaggcactgcagattctcccaggccagtggatcccgagccaactcggccgggcgctggaggcaggtggcggtaagttgagtgctctgatccagggtttcgctcagagcggcggcgaaggagaaattcccctccccaaccaacaggaggcgccgaggggccatggcctccacggactcccggctcgcgttctctgtggcgctcgttttacg

SEQ ID NO: 1277 - DNA, 2279 bp, Homo sapiens
gcattctagtgcgaccttgtttacacctcccctggctcagtcacacagctgtgtggtaggctactagaagtgtttagtagttgtcactgggatcatgctgatgtggccccatccccgcctctccctgccctgtgatatcggaggaaacctgacagagcaaattggccatggccaagaaaaaggaaaagaaagagtgccaccaaaagcagggagccctaagggagcagttacaggtcctctttggattccagcacgacgcatcaaaccataccatgacgtgactaggacccaacctagaaatgaaggaactgaccctacaggactcacaaccctggataatgcagtgtcctcggacggcaacaagctctggacattacctgggggatgctgaaggcggcaactgaggaggctgaatgaatcctgctccagacacagacaccattcactccagataatttgttgcttgctatgctctctgttgtacattgcaactcgcatagggatgcaaagccggaataagagcaatgaccaccatgcctgacagacctgttgctgcgcacacctgtactctccaatgaacaagactgaatgcaaaaaaaacagaaaatggggagatttaggggatcagtcagtgtggttggaaaattgtaagatgaagttacaggatatagacacaaaccttcttggaaggccagaaggtttgcatagcttcagtaaaggatttggctgaaatcctttttacctctaatcccctttaccttgagttgatagcaatagagcaaataacatgggaatgtgggggagtttatctgaatagcttgtttactcatgtggtcctaagaccaacctttgattatccgcaggtgcatgattgctctctacctgggggcagggggagttaattacccacaggtggagctgaagagccaggaggctcagagtctgcagcagcagcaggaccagtacctgggtcatctgcagcagtatgtggccacctatcagcagcaggtggtcacctatcagcagctgacctctgaggaggaggagctgcacaaccagttactgctgcagacccagctcgtggaccggctgcagcagcagaaagctcaaagcaaagctgtggccaagatgggctgccaagagttgcgggagacccaggagcacctggaagctatcagccagcagaaccagcagcctcaggcccagttgagcctcatggctctccctggggaaggagatggacagtgaggaggaggaggaggtgcctcagcccatgccaagcatcccggaggatctagagagccagaaggccatggtggcatttttcaactcagctgtagctagtgccgaggaggagcaggcacggctatgtgggcagctgaaggagtgcactgccagcgcctggctcatctgttggcctcggcccagaaggaacctgaggcagcagccccagccccaagaactgggggtgatcccatgtgtggggagacccaccaggccctgcagggggccatggagaagctgtgggagagtacatcgcactgtaccagagccagagggcagtgcggaaggaggaggagtgcatcagcaggctggcccaggacaagggagaggtgaaggtgaagctgctggagctggcgtggcttgtggacgactgcaacaagtggcatagcagattcctggcagctgcccagaaccctgctgatgagcccactccaggggcccccgccccccagtagcttggggctactgacaagccagggtagtgagtagagtcctcaggcacagtgggcacgcaggagcaggggagggctcccacagcaccctgcctccctctctccaaagatctttgtgaggtgagccttgccagcagtggggagtctgcacaaggagaggcggggaagcattctccctgtgacaaccccactgagcagcagatcatgcaactgcttcatgagatgcagaacctccaggagcacccaggcttgggcagcagcccttgcattccttttttgtaccagactgatgagaacaatgaggtgaagatcaccatcatctaaaagccggccactgtcagcaaaacctggggaagtggggctggaggctctgcccctaccatgtccctaccaccccttcccagtcaaccctttaccctcacagtagcaagcataagacccctgtctaatgtggggagacaggtggagatgaggtgaagatcaccataatctaaaaggccactaaataaaaaaataaaaaattttaaaaaaaaaaaaaaaaaa

SEQ ID NO: 1278 - DNA, 768 bp, Homo sapiens
atgcccagcggggaagggtggccgccccgccagcagagagctgaaggtgttccgtggtcagtgagggctggcactggctctgcacgaagatctcctcacctccccagcggctcctggccagctccccacggagagcccaggacacttgtccctggacacagtggtgcagccatgcttgggccaaaccatgaggccaccagaaccgcgaaaggctactgtactgagagggatactgcgagagaggcccacaggtttccaagcatccctctcactccgcacactcatctccacgaccggctttaagtgcggccttgaggcctggctccctgtttggacttctctgcacctccaggagctcacttcccgtcacagctggatgcctcctcccgcaggcacctcccgggcatcctcccgccccaggctgcaccttctgtgggactggcccccgcaggcacctcccgggcaccctcccgccccaggctgcagcttctgtgggactgaccttaagaccccatcggttcctcctgagagcagcagatctcagccagatgctgccgggagggaggtgctagcgtccacacccagacgggtccagtccagccctgctctccctggtctccaggcagggccctcccagggtggacattgcccatctctgcctggccaggggctgctgacccactggttccagagtctgagcctgtcctgcacaagtaccatggacaggggtcagccgggcactgaagaggcgtggcagaattgggcagg

SEQ ID NO: 1279 - DNA, 3307 bp, Homo sapiens
agaaccgctccccgccggctgtccgcaacctccgccagcgtcggtccctgggcaggtgtggaatgcatccttgggacatctttgcatagccccatctaggaagaagttctgtgatgtgtgaactgtgagtttactcaaacaagtccaactctttataagacataggtagacgtcaggtctggaatggaagagccaacagcagtagaaggccaggtccagcttccaagcccccaccagggctctctcaggaaggctgtggctgctgccctggcgctggatggggaatccacaatggggcacaggaaaaagaagaggaaagagtcacgcccagaatccatcatcatctaccgctcagacaatgagaaaacagatgaggagcccggagaatcagaaggtggagatcagcctaaagaggaggagggagatgatttcctagactatcctgtggatgatgatatgtggaacctgcctctggacagccgctacgtcaccttaactgggaccatcacacgagggaagaaaaagggtcagatggtggacatccatgtcacattgacagagaaagagctgcaggaactgaccaaacctaaagagtcatcaagggaaacgacgcctgaaggaagaatggcctgccagatgggagctgaccgtgggccccatgtggtcctctggacgctgatctgcctgcctgtggttttcatcctttcttttgttgtctctttctactacggcactatcacctggtacaacatcttcctcgtgtataatgaggaaaggaccttctggcacaagatctcgtattgcccttgcctcgttctcttctatccagtgctcatcatggccatggcttcttccctcggcctctacgctgctgtggtccagctctcgtggtcctgggaagcatggtggcaagctgcccgggacatggagaaaggcttctgtggctggctctgcagcaagctgggtctggaggactgttctccctacagcattgtggagttgcttgaatccgacaatatctcaagcactctctccaacaaggaccccatccaagaagtagaaacctccacggtctaaactcccaacaacttactccctcctctggccccagtagcctatatatcatcttaaaattccagcagattatttctttaaattaccccctactctccgcggttcttctgggaaatcagagtccatactgatcagttttaccatcttgagggttccaggagggcatggagcagacaagcaattgtgccaaagcagttcacccaatggacaaactctttttgattccctgccctaaaatcaccatttatttaggacaatggaactctgctgtgtgtcgttttgggagcctggaagtgttactggtgcctggaactgaggggagtatgtgactaaatgtgtcagggagaataaagaacctcggggtaaccaaatccaccaagataatagacagggatggagtgagacatttaggaagctggactaccacagtgtagcagaaggtaaagatttgtgtgtatcatttagatttagatttagctgcatagaattaaaaccctaaaatatcagtggcttaaacaagatagaagtgtatttctttcttgtgcagaagaagtctggaggcagaccatcctgggaccctgtgaagtaatccaggtcccaggcttcttctatttctctaccattagtaggatgtgacccttctcacccttatccccaacatcccagtgctgattacatcttcagccatcacatccatgtttctgataaaatagaggaaagggcagagaagcacacacccttcctgttcaaggagacttcccagaagtcccactcgattcttcttatatctcattggcaagacctcagtcacatgatgtcatgagcaaaagaggctggaaatgtagttgtttggctgggtagctatattctcagctaaatactgggttcacgctaattggcaagaaaaaggaagaatggttatttgggttttgttttgttttgttttgtttcgctttagagacggagtctcactctgttgccgaggctggagtgcagtggcactatctcggctcactgcaaccttcgcctcctgggttcaagcaattcttgtgccttggcctccccagtagctgggattacaggtgcgtgccaccatacccggctaatttttgtattttttttttagtagagatggggtttcaccatgtgcccaggctggtcttgaactcctgacctcaggtgatccgcctgcctcggcctcccaaaatgctgggattgtaggcaagaatggttatcttggtaggcaagtcagaatctttgcctcacaatgatcatttaaatacattcagaacccccaaactgctaatatggttttatttatttatttattcattcatttgtttattcatttatttatttaggcctgaatcttacacagagaatttatatatagatattagctacatatactttgaatatgctatacatcgatattagcacctcacgtactttgcaattaagcttctgtaatgtcatgtgatttgtttttggaaaggaatagtggacaggagagtacaatttataatagtagcataactctttgtcctggtggtggaggtgggacgaggtggtgatatttaacctagattaaagaccaggaagggaggaattgcatctgccaaagtttcctccaacagcgatcagtagccctaagtacaaagaagccagatttagccttctgttgtttggcaaaacctcactcagagctttactccctcagacctttctgagtttaaccacagacatgatctttgctgtgctgagaaacttgtgtctacctggcctgtagggagtgtaaactagattaatacagattaacagactctgaacttaaaaaaaaaaatcactcctaagggtgtccttctaatttcaaaatatcaactcctaagaggtcagcagaatttggagatttgggtccttataagaatagctggtgctcttttcttgttcatgtctcaaaacaaagctgttgagagaactgctgcgatgaatcaaaccagaggagtttgtcatgctccccacagagagcccaggacatttgcctgatgtatggtgctgagctccaccttcagaggaactctctctttttttttttttttaaataactattattagcttgacaagaaaaaaaaagtgcccaacagttttagtgttaatcttggtgctctatggtgcattagcagagatatgaacaattaaatgaagacaaagaaaataaaaataaagtctgatt

SEQ ID NO: 1280 - DNA, 1216 bp, Homo sapiens
ccgcgaccccgccttcggcgctcggctcgcaggatggatcccgtacccgggacagactcggcgccgctggctggcctggcctggtcgtcggcctctgcacccccgccgcgggggttcagcgcgatctcctgcaccgtcgagggggcacccgccagctttggcaagagcttcgcgcagaaatctggctacttcctgtgccttagttctctgggcagcctagagaacccgcaggagaacgtggtggccgatatccagatcgtggtggacaagagccccctgccgctgggcttctcccccgtctgcgaccccatggattccaaggcctctgtgtccaagaagaaacgcatgtgtgtgaagctgttgcccctgggagccacggacacggctgtgtttgatgtccggctgagtgggaagaccaagacagtgcctggataccttcgaataggggacatgggcggctttgccatctggtgcaagaaggccaaggccccgaggccagtgcccaagccccgaggtctcagccgggacatgcagggcctctctctggatgcagccagccagccaagtaagggcggcctcctggagcggacagcgtcaaggctgggctctcgggcatccactctgcggaggaatgactccatctacgaggcctccagcctctatggcatctcagccatggatggggttcccttcacactccacccacgatttgagggcaagagctgcagccccctggccttctctgcttttggggacctgaccatcaagtctctggcggacattgaggaggagtataactacggcttcgtggtggagaagaccgcggctgcccgcctgccccccagcgtctcatagtccctcacccttccgcggaaagagcccccttactccacctccccgccagcctggggccaccccccctcactgcatcctggggccacccccactcactgcatcctgggaaccttcgccctgcaaggcgtttgctatcttcagccactgggcggagctgcagccctggaggagggggcgggtcgaggctgcgtggtgatggggtctccgcccccacgccctgccgggcagggctggagctggacagaagccagtgcctttaagtcatttgtgtcaaaaccctctggggtccggaggctgtgcgggtgtcctcctggcaataaacactacccggttctcgcaaaaaaaaaaaaaaaaaaaaaaa

SEQ ID NO: 1281 - DNA, 3121 bp, Homo sapiens
taggactgatctccaggaccagcactcttctcccagcccttagggtcctgctcggccaaggccttccctgccatgcgacctgtcagtgtctggcagtggagcccctgggggctgctgctgtgcctgctgtgcagttcgtgcttggggtctccgtccccttccacgggccctgagaagaaggccgggagccaggggcttcggttccggctggctggcttccccaggaagccctacgagggccgcgtggagatacagcgagctggtgaatggggcaccatctgcgatgatgacttcacgctgcaggctgcccacatcctctgccgggagctgggcttcacagaggccacaggctggacccacagtgccaaatatggccctggaacaggccgcatctggctggacaacttgagctgcagtgggaccgagcagagtgtgactgaatgtgcctcccggggctgggggaacagtgactgtacgcacgatgaggatgctggggtcatctgcaaagaccagcgcctccctggcttctcggactccaatgtcattgaggtagagcatcacctgcaagtggaggaggtgcgaattcgacccgccgttgggtggggcagacgacccctgcccgtgacggaggggctggtggaagtcaggcttcctgacggctggtcgcaagtgtgcgacaaaggctggagcgcccacaacagccacgtggtctgcgggatgctgggcttccccagcgaaaagagggtcaacgcggccttctacaggctgctagcccaacggcagcaacactcctttggtctgcatggggtggcgtgcgtgggcacggaggcccacctctccctctgttccctggagttctatcgtgccaatgacaccgccaggtgccctggggggggccctgcagtggtgagctgtgtgccaggccctgtctacgcggcatccagtggccagaagaagcaacaacagtcgaagcctcagggggaggcccgtgtccgtctaaagggcggcgcccaccctggagagggccgggtagaagtcctgaaggccagcacatggggcacagtctgtgaccgcaagtgggacctgcatgcagccagcgtggtgtgtcgggagctgggcttcgggagtgctcgagaagctctgagtggcgctcgcatggggcagggcatgggtgctatccacctgagtgaagttcgctgctctggacaggagctctccctctggaagtgcccccacaagaacatcacagctgaggattgttcacatagccaggatgccggggtccggtgcaacctaccttacactggggcagagaccaggatccgactcagtgggggccgcagccaacatgaggggcgagtcgaggtgcaaatagggggacctgggccccttcgctggggcctcatctgtggggatgactgggggaccctggaggccatggtggcctgtaggcaactgggtctgggctacgccaaccacggcctgcaggagacctggtactgggactctgggaatataacagaggtggtgatgagtggagtgcgctgcacagggactgagctgtccctggatcagtgtgcccatcatggcacccacatcacctgcaagaggacagggacccgcttcactgctggagtcatctgttctgagactgcatcagatctgttgctgcactcagcactggtgcaggagaccgcctacatcgaagaccggcccctgcatatgttgtactgtgctgcggaagagaactgcctggccagctcagcccgctcagccaactggccctatggtcaccggcgtctgctccgattctcctcccagatccacaacctgggacgagctgacttcaggcccaaggctgggcgccactcctgggtgtggcacgagtgccatgggcattaccacagcatggacatcttcactcactatgatatcctcaccccaaatggcaccaaggtggctgagggccacaaagctagtttctgtctcgaagacactgagtgtcaggaggatgtctccaagcggtatgagtgtgccaactttggagagcaaggcatcactgtgggttgctgggatctctaccggcatgacattgactgtcagtggattgacatcacggatgtgaagccaggaaactacattctccaggttgtcatcaacccaaactttgaagtagcagagagtgactttaccaacaatgcaatgaaatgtaactgcaaatatgatggacatagaatctgggtgcacaactgccacattggtgatgccttcagtgaagaggccaacaggaggtttgaacgctaccctggccagaccagcaaccagattatctaagtgccactgccctctgcaaaccaccactggcccctaatggcaggggtctgaggctgccattacctcaggagcttaccaagaaacccatgtcagcaaccgcactcatcagaccatgcactatggatgtggaactgtcaagcagaagttttcaccctccttcagaggccagctgtcagtatctgtagccaagcatgggaatctttgctcccaggcccagcaccgagcagaacagaccagagcccaccacaccacaaagagcagcacctgactaactgcccacaaaagatggcagcagctcattttctttaataggaggtcaggatggtcagctccagtatctcccctaagtttagggggatacagctttacctctagccttttggtgggggaaaagatccagccctcccacctcattttttactataatatgttgctaggtataattttattttatataaaaagtgtttctgtgattcttcagagcccaggagtcagtgctggtggttggagggacctgcccccactggttcatttaaccctctgtctcggtgccctcagaacctcagccagaaaggcaaggaggaaatcagagcaggagcctcatactcttggtgatctattcattctgtgacctcaggggtcacatataaggtcagtgtttctcgtccccgccggatctgcactgccaactgggattgggttcgaacagcttcataaacatcttcagcattttgtaccatctgctccccaatggccaaaatcacatcaccaggccgcagaccagccc

SEQ ID NO: 1282 - DNA, 6245 bp, Homo sapiens
gagaagaagtggcaggtgatgctgaagcgggggagaagcggcagagccggccacacagtgcaggggatggagacaggtgctgggctggtcctcctgcagcatcctcagttgttggagggcagtcatcctcaggccgtacccagccagagaagaaaaagaacagtgtgaagccacgtgtgatagccgtccaacatcggctcttccctccaattacattgtagttgattgtgtctcaaaccatgaattatgtgggacagctggctgggcaggtgattgtcactgtgaaggaactctacaagggcattaaccaggccaccctctctgggtgcattgatgtcatcgtggtacagcagcaggatggcagctatcagtgttcaccttttcacgttcggtttggaaagctgggagtcctgagatccaaagagaaagtgattgatatagaaatcaacggcagtgcagtggatcttcacatgaagttgggtgataacggagaagctttctttgttgaggagactgaagaagaatatgaaaagcttcctgcttaccttgccacctcaccaattcctactgaagatcagttctttaaagatattgacacccctttggtgaaatcgggtggagatgaaacaccatctcagagttcagacatctcacacgtcttggaaacagagacaatttttactccaagttctgtgaaaaagaaaaaacgaaggagaaagaaatacaaacaggacagtaagaaggaagagcaggccgcatctgctgctgcagaagacacatgtgatgtaggcgtgagctccgatgatgacaagggggcccaggcagcacgaggatcttcaaatgcttccttgaaagaagaagaatgtaaagagcctttgctcttccattctggggatcattaccccttatctgatggagattggtcccctttagagaccacctatccccagacagcgtgtcctaagagtgattcagagctggaggtgaaacctgcggagagcctgctcagatcagagtctcacatggagtggacgtggggcggattcccagagtccaccaaggtcagcaaaagagaacgatctgaccatcatcctaggacagctacaattacaccatcagaaaatactcattttcgggtaattcccagtgaggacaacctcatcagtgaagttgagaaggatgcttccatggaagacactgtctgtaccatagtgaagcccaaacccagagccctgggtacacagatgagcgacccaacatctgtggcagagcttctcgaacctcctcttgagagtactcagatttcatctatgttagatgctgaccaccttcccaacgcagccttagcggaggcgccctcagaatccaaaccggcagctaaagtagactcgccgtcaaagaagaaaggtgttcacaaaagaagccaacaccagggacctgatgatatttaccttgatgacttaaagggtctagaacctgaagttgcagctctttatttccctaaaagtgaatcggagcccggttccaggcagtggcccgagtctgacacactctctggctcccagtccccacagtccgtgggaagcgcagctgcagatagcggcaccgagtgcctctcagattctgccatggacttgcctgacgttaccctctccctttgcgggggcctcagtgaaaatggagaaatttcaaaagaaaaattcatggagcatatcattacttatcacgaatttgcagaaaaccctggacttatagacaatcctaaccttgtaataaggatatataatcgttactataactgggctttggcagctcccatgatccttagcttgcaagtattccagaagagcttgcctaaggccacagttgagtcctgggtgaaagacaagatgccaaagaaatctggtcgctggtggttttggcgaaagagagaaagcatgaccaaacagctgccagaatccaaggagggaaaatctgaggcaccgccagccagtgacctgccatccagctccaaggagccggccggtgccaggccggccgagaatgactcctcgagtgacgagggatcacaggagctcgaagaatccatcacagtggaccccatccccacagagcccctgagccacggcagcacaacttcatataagaagtctctccgcctctcctcagaccagatcgcaaaactgaagctccacgatggcccaaatgatgttgtgtttagtattacaacccagtatcaaggcacctgtcgctgtgcagggaccatttacctgtggaactggaatgacaagatcatcatttctgatattgatgggacaataaccaagtcggatgctttgggacagattctcccacagctgggcaaagactggacccaccagggtatagcaaagctctaccattccatcaatgagaatggctacaagtttctgtactgctcggctcgtgccatcggcatggccgacatgacccgtggctacctgcactgggtcaatgacaagggcacaatcttgccccggggccccctgatgctgtcccccagcagcttgttctccgccttccacagagaagtgatagaaaagaaaccagagaagttcaaaattgagtgtctaaatgatatcaagaatctgtttgccccgtctaagcagcccttctatgctgcctttggaaaccgtccaaatgatgtctatgcctacacacaagttggagttccagactgtagaatattcaccgtgaaccccaagggtgaattaatacaagaaagaaccaaaggaaacaagtcatcgtatcacaggctgagtgagctcgtggagcatgtgttcccccttctcagtaaggagcagaattccgcttttccctgcccggagttcagctccttctgctactggcgagacccgatccctgaagtggacctggatgacctgtcttgaggcggcacctcagtgggtgggcagggcttggtccccctccccacagcaagggaaggcagctggctcttctgctgacctcagataccagccttccccagcggggacgggtgcttctggagctggtcccgccatcctcctttgccttcccaggccagctgctcaggctcggcaggtctgcagctcagctcctggaaggagaagggaggaactgggcctggggctggaggcctgggatccctcctttgtgggtcgcacacatgtttcctgctgtgagctggggcctccttccattgcatcattttaaaggaagaaaaaagcagctaaaaaagagtggaccaaaacactgcacacagtgaagtgttccagtttccactgggcagttgaggtggcttctgtaaccagggctgtcttcagatgtcagggtccctgaactgctgcgggcccagtcagtgatgctggctgaagctgcctgtgcacgtttcttctctggtcgcctcatttcctgctacactgaaggggtcagctgctccagtgggccaagttgggcaggacccccgcccctgcagggcccatgcaccagagccactgagcccagtcccataaacctggccctctttggggaaagatccccacagagcatcctcctctcatctgtgacaactccacgagcccttaatttcttagtcctcaccagaagaacaggtctcacaagtatatatttgatgtctgtaataaaagtgggaaggtgggtcttaaaacagaccaaaccccgccccgcccccaacaactctgcttttagggaggcctccgaaatgcagataggcggttgagtggggtcctgggaagagcgctgaatccctctgcttgctgcctggtgtgggcctttggaaagcatcttgccttgggacaggatttctaaaattctgtgattcagatttgtcagggaagcacagtgaagcttgcttaaaggcactggccagcagtgtgtgactttggcttttgggatcacaccctgtaatcgggcccgtggaagcagcgtcaaagaggggtcttggagctcctatggagcagactgccccccgagcagtgtccccagcctagccctgtgagaccccatggggacacgggtgcctatgtattttcactaaaatatacatggtagctccatttactgatgcggttgtaatgagctcacatcgtgtctgaagagatggcaccagggaaaggtgtgccataagctgctccagagcttttggtatgctgagtgttgacagagctgcactcttaacatcaagagaactgtcaggagcccagaaccaaccccaggtcttggtctccattggcgagaacacaggacgtggtggttcctgagcagagagggatctgcagatacaggcttggcgctcggggtggtctcgtggccaactcttcatgcccctgccgttgtagtggaacctctacatgttttagtttgcttcacctaaaataatgctgatctagagatagagaaataggggtggttatttttccagattggagagttgaaagtccctgactgatttcagccattttcctagtgcttgtcggatgcagagacaatgttgaaatcccctaaacacagttctcagtggcaaaacctaggaaggctcatgttcccagagaagggaccacatgagccttctcccatgcaaagcttcccccagcttaaatagttgataaggactaattgtttaatgagtttatttatctacagtaggttagggatcctgggttctgtttatatgaagttcttcccagtttgtgaattctagtacagcagccatgcagccaccttatttcatagatgccatctgtgtgtcctcttgactaccttctatttagaggaagaatgagagctttgtgtgtttaactgagcttatagtaggacttctttgcatatgtatggtactgaaaaatcttaatatacatctttaatcctttttaggttgtcctttaaagagtttttgactagtttctttttcttgacagctcttctctttggacacatgggccttcttagagggttcagtctaggacccggctctcctggccctgtgttgagggtagctggtccctctgtccctgtgtctgctagcactagactttgttgctgcagattgatccagtgggtacataggctaattaatgtgagtctttttccttgtttaaaggagtccctcttgctgaaagtagatgattactattgctgtagtgttaggaaagtattaagtttgtgctgaaaatccattgccatttggtacaaatgacatttgttctttctgtgaaagagatgccctcgagtgtgtttgtacacaaacccttaggatggtgagttgaagcatcaccctcgcgctatcttcagtgacgggtgacggctcagggagatggcaggcagattgggctctaagtcattattctctcagttactccattggtgaaatggccctttccctctttgcagttcagtctaagtctcgtatttgctttgctgtctgtgtgctgaagctcgtcccgtgtgagttgctgtctgccccttgtcaggctgtgaggtgctcgtgtagacctggagcatgcaggctgcctccgtttttgggtactgtgttgtgttttgctctgtctaaaaacatctgcatagttttcaactggaaaaagaaaaaacttaaaaatgggatgtcctaaaatgaaagctgctcaaagtcacagaacaaccgagggacaaaggagattggatgactgggaagcgctggcccggaacagcccctgcaactgtggggcctgcacacagcccttccacagttggcactgcaggtgcaggccaaccctttaaagaataaacaaggaagtcagctctttcactttttacaagttggcaaaaacagacttccggggaatttcgatgttttcccgtgttgtagagcttccagggtttaataaaactggttaaaaattgagtctttccctgaagtaagtgctctttccagatgaaaactactcttttggttttgtttgaaagtaagaaagggaggggaaactttgctcttttaataattatgttcagcctatgatgaagtatttgattattagacagcaatgtcactaataagttttaagttgtccaaagttaattgtaaacatcatcagtacagtactcttagttacagtaaagcaattgttgcaagatgaatggctaatattttggtgcagtgtttgatgttcaaaacaaaatgttacaacaataaacgaacataacataaactgaaaaaaaaaaaaaaaaaa

SEQ ID NO: 1283 - DNA, 3747 bp, Homo sapiens
aaatttttccgtctgccctttccccctcttctcgttggcagggttgatcctcattactgtttgctcaaacgtttagaagtgaatttaggtccctccccccaacttatgattttatagccaataggtgatgaggtttatttgcatatttccagtcacataagcagccttggcgtgaaaacagtgtcagactcgattccccctcttcctcctcctcaagggaaagctgcccacttctagctgccctgccatcccctttaaagggcgacttgctcagcgccaaaccgcggctccagccctctccagcctccggctcagccggctcatcagtcggtccgcgccttgcagctcctccagagggacgcgccccgagatggagagcaaagccctgctcgtgctgactctggccgtgtggctccagagtctgaccgcctcccgcggaggggtggccgccgccgaccaaagaagagattttatcgacatcgaaagtaaatttgccctaaggacccctgaagacacagctgaggacacttgccacctcattcccggagtagcagagtccgtggctacctgtcatttcaatcacagcagcaaaaccttcatggtgatccatggctggacggtaacaggaatgtatgagagttgggtgccaaaacttgtggccgccctgtacaagagagaaccagactccaatgtcattgtggtggactggctgtcacgggctcaggagcattacccagtgtccgcgggctacaccaaactggtgggacaggatgtggcccggtttatcaactggatggaggaggagtttaactaccctctggacaatgtccatctcttgggatacagccttggagcccatgctgctggcattgcaggaagtctgaccaataagaaagtcaacagaattactggcctcgatccagctggacctaactttgagtatgcagaagccccgagtcgtctttctcctgatgatgcagattttgtagacgtcttacacacattcaccagagggtcccctggtcgaagcattggaatccagaaaccagttgggcatgttgacatttacccgaatggaggtacttttcagccaggatgtaacattggagaagctatccgcgtgattgcagagagaggacttggagatgtggaccagctagtgaagtgctcccacgagcgctccattcatctcttcatcgactctctgttgaatgaagaaaatccaagtaaggcctacaggtgcagttccaaggaagcctttgagaaagggctctgcttgagttgtagaaagaaccgctgcaacaatctgggctatgagatcaataaagtcagagccaaaagaagcagcaaaatgtacctgaagactcgttctcagatgccctacaaagtcttccattaccaagtaaagattcatttttctgggactgagagtgaaacccataccaatcaggcctttgagatttctctgtatggcaccgtggccgagagtgagaacatcccattcactctgcctgaagtttccacaaataagacctactccttcctaatttacacagaggtagatattggagaactactcatgttgaagctcaaatggaagagtgattcatactttagctggtcagactggtggagcagtcccggcttcgccattcagaagatcagagtaaaagcaggagagactcagaaaaaggtgatcttctgttctagggagaaagtgtctcatttgcagaaaggaaaggcacctgcggtatttgtgaaatgccatgacaagtctctgaataagaagtcaggctgaaactgggcgaatctacagaacaaagaacggcatgtgaattctgtgaagaatgaagtggaggaagtaacttttacaaaacatacccagtgtttggggtgtttcaaaagtggattttcctgaatattaatcccagccctacccttgttagttattttaggagacagtctcaagcactaaaaagtggctaattcaatttatggggtatagtggccaaatagcacatcctccaacgttaaaagacagtggatcatgaaaagtgctgttttgtcctttgagaaagaaataattgtttgagcgcagagtaaaataaggctccttcatgtggcgtattgggccatagcctataattggttagaacctcctattttaattggaattctggatctttcggactgaggccttctcaaactttactctaagtctccaagaatacagaaaatgcttttccgcggcacgaatcagactcatctacacagcagtatgaatgatgttttagaatgattccctcttgctattggaatgtggtccagacgtcaaccaggaacatgtaacttggagagggacgaagaaagggtctgataaacacagaggttttaaacagtccctaccattggcctgcatcatgacaaagttacaaattcaaggagatataaaatctagatcaattaattcttaataggctttatcgtttattgcttaatccctctctcccccttcttttttgtctcaagattatattataataatgttctctgggtaggtgttgaaaatgagcctgtaatcctcagctgacacataatttgaatggtgcagaaaaaaaaaaagaaaccgtaattttattattagattctccaaatgattttcatcaatttaaaatcattcaatatctgacagttactcttcagttttaggcttaccttggtcatgcttcagttgtacttccagtgcgtctcttttgttcctggctttgacatgaaaagataggtttgagttcaaattttgcattgtgtgagcttctacagattttagacaaggaccgtttttactaagtaaaagggtggagaggttcctggggtggattcctaagcagtgcttgtaaaccatcgcgtgcaatgagccagatggagtaccatgagggttgctatttgttgtttttaacaactaatcaagagtgagtgaacaactatttataaactagatctcctatttttcagaatgctcttctacgtataaatatgaaatgataaagatgtcaaatatctcagaggctatagctgggaacccgactgtgaaagtatgtgatatctgaacacatactagaaagctctgcatgtgtgttgtccttcagcataattcggaagggaaaacagtcgatcaagggatgtattggaacatgtcggagtagaaattgttcctgatgtgccagaacttcgaccctttctctgagagagatgatcgtgcctataaatagtaggaccaatgttgtgattaacatcatcaggcttggaatgaattctctctaaaaataaaatgatgtatgatttgttgttggcatcccctttattaattcattaaatttctggatttgggttgtgacccagggtgcattaacttaaaagattcactaaagcagcacatagcactgggaactctggctccgaaaaactttgttatatatatcaaggatgttctggctttacattttatttattagctgtaaatacatgtgtggatgtgtaaatggagcttgtacatattggaaaggtcattgtggctatctgcatttataaatgtgtggtgctaactgtatgtgtctttatcagtgatggtctcacagagccaactcactcttatgaaatgggctttaacaaaacaagaaagaaacgtacttaactgtgtgaagaaatggaatcagcttttaataaaattgacaacattttattaccaca

SEQ ID NO: 1284 - DNA, 10346 bp, Homo sapiens
agcactcggcgctgtcatggcggccgggagcagcttcagtgggcacacgacagccgcgcgacccgtggcggggcgagctgtggcagtagcatcctcaccactcgcagcagcctcagccgcggcgcccgtagcgccagcagcggctgcttttgcaaaggctgagcgcaggggcggggcgggccaggaagccatggagttctgtgcagccgcggactcccggggagcggactagggaaacttggaggctgcgaccagggtttggcgttgttgtcagcctcggggagagagattggacaaatattctccaagaggaggagggcgacgccaaggactttccacatcaactgctttggggtatctccacaagttggaagagggaccctttcgttttgcattgcgtgtgttgtgctcattaccagtgcagcgactgccgtcccagggtgactctgagttgtcctttatcgtgagctagcaatggctagcgaagacaatcgtgtcccttccccgccaccaacaggtgatgacgggggaggtggagggagagaagaaacccctactgaagggggtgcattgtctctgaaaccagggctccccatcaggggcatcagaatgaaatttgccgtgttgaccggtttggttgaagttggagaagtatccaatagggatattgtagaaactgtctttaacctgttggtaggaggacagtttgatctggaaatgaatttcattatccaagaaggtgagagtattaactgcatggtggacctactggaaaaatgtgacattacgtgccaagcagaagtctggagcatgtttacagccattctgaagaaaagcatacggaatcttcaagtctgcactgaagtaggccttgttgaaaaagtgcttgggaaaattgaaaaagttgacaatatgatagcagatcttttggttgacatgttgggagtgctggctagctataatttgacagttcgcgagctaaagcttttcttcagtaaacttcaaggagataaaggacgatggcctccacatgctgggaagttgctgtctgtgttaaagcatatgcctcagaagtatggtcctgatgccttttttaactttccaggaaagagtgctgcagctattgcattacctcctatagccaaatggccataccagaatggttttacatttcatacatggcttagaatggatcctgtaaataacatcaatgtagataaggataaaccatatttgtattgtttcagaaccagcaaaggtcttggctattctgctcattttgttggaggctgtttgattgtaacatcaataaagtcaaaaggaaaaggctttcaacactgtgtgaaatttgatttcaagccacaaaagtggtatatggttaccatagtacacatctataaccgatggaagaatagtgaacttcgatgttatgtgaatggtgagctggcttcctatggagagataacatggtttgtcaacactagcgatacctttgacaaatgtttcctgggctcatcagaaacagcagatgctaatagagtattctgtggtcagatgactgcagtttaccttttcagtgaagctctaaatgcagctcagatatttgctatttatcagttgggcctgggatacaagggtacatttaaattcaaagcagaaagcgaccttttccttgctgagcatcacaaacttttattgtacgatgggaaactctctagtgccattgcattcacgtacaatccacgggctacagatgcccagctttgtcttgaatcatctcctaaggacaacccttcaatttttgttcattcaccacatgcactcatgctccaggatgtaaaggcagttttaacacattccatccaaagtgcaatgcattcaattggaggagtacaagtactatttccactttttgcacagttggattacaggcaatatttgtctgatgagattgatttgactatatgttcaaccttgctggcctttatcatggaattgttgaagaactcaattgctatgcaggaacagatgcttgcctgtaagggcttcttggtaataggatatagccttgaaaagtcttccaaatctcatgttagcagagcagtacttgaactttgccttgcattttcaaaatatctgagtaatctgcagaatgggatgcccctgctcaagcaattgtgtgatcacgttcttcttaatcctgccatatggattcataccccagccaaggttcaactgatgctctatacttatctgtccacggaattcattggtacagtcaacatatataacaccattcggagagttggaacagtgcttctcatcatgcacacgctgaagtactactactgggcagtgaatcctcaggatcgaagtggtatcaccccaaaaggattagatggaccgcgacctaatcaaaaagaaatgctttctctacgagcattcttgttgatgttcattaagcaattagtgatgaaggattctggagtaaaggaagatgaattacaggccattcttaattacctactgactatgcatgaggatgacaatctaatggatgtcctacagctgcttgttgcattaatgtcagaacaccctaactctatgattcctgcttttgaccaaaggaatgggttacgtgttatctacaaacttctggcatcgaaaagtgaaggaatcagggtacaagctcttaaggcaatgggttattttttaaaacatctggccccaaagaggaaagcagaagtcatgcttggacatggattgttttcattgctagctgaaaggctcatgcttcagacaaatttaatcacaatgaccacatataatgtgctgtttgagattcttatagaacagattggtactcaggtgatacataaacagcatccagatcctgattcttcagtgaagatacaaaaccctcagatactaaaagtaattgcgaccctacttcgaaattctccccagtgcccagagagcatggaggttcgcagagcctttctttctgacatgattaaactttttaataacagtagagaaaacaggaggagcttgctacaatgctctgtgtggcaagaatggatgctttctctctgctattttaatcctaagaattcagatgagcaaaagataacagaaatggtatacgccatattcagaatcctgctttaccatgcagtcaaatatgagtggggtggctggcgtgtatgggtagacactttatcaatcactcattcaaaggtcacttttgaaatacacaaagaaaaccttgccaatatatttagggaacagcaaggaaaagttgatgaagaaatagggctgtgttcttcaacttcagttcaagcagcctctggcattagaagggatattaatgtttcagtaggatcccagcaaccagatacgaaggattctcctgtctgtcctcatttcaccacaaatggtaatgaaaattcaagtatagagaagacaagttcactagaatctgcatctaatattgaactgcaaactactaatacatcttatgaagaaatgaaagctgagcaagaaaatcaggagttaccagatgaaggcactttggaagaaacactgacaaatgagacaaggaatgcagatgatttagaagtatcttctgacataatagaagctgtggctatttcctctaattcttttataacaactggcaaagattcaatgactgtcagtgaagtaactgcttctataagttctccttcagaagaggatgcctcagagatgccagaattcttggataaatctatagtagaggaagaggaagatgatgattatgtggaactgaaagtagaaggcagtcctactgaggaagctaatctacccacagagctccaagataacagtttgtctccagctgcatctgaagccggtgaaaaactggacatgtttggtaatgatgacaaattaatatttcaagaaggaaaacctgttactgaaaagcaaactgatactgaaactcaagattctaaagattctggaattcagactatgacagcatcagggtcttcagctatgtcaccagaaactactgtttcccaaatagctgtagaatcagaccttggtcagatgctggaggaagggaagaaagcaactaacctcactagagaaaccaaattaattaatgattgtcatggtagtgtctctgaggcttcttctgagcaaaagattgcgaagttggatgtttccaatgttgctacagatactgagaggctggagttgaaggccagtcccaacgtggaagcacctcaacctcatcgacatgtgcttgagatatcaaggcaacatgagcagccagggcaaggaatagcaccagatgcagttaatggacaaaggagggattccagatctactgtgtttcgtattcctgagttcaactggtctcagatgcatcaacgtttgctcactgatctattattttcaatagaaacagatatacagatgtggagaagccattcaacaaagacagttatggacttcgtgaatagcagtgataatgtcatctttgtacacaacacaattcatctcatctctcaagtgatggacaatatggtcatggcttgtgggggtatactgccattgctttcagctgctacatcggctacacatgaactggaaaatattgaacctactcaaggcctttcaatagaagcctctgtgacatttttgcagaggctaattagccttgtggatgtgcttatatttgcaagttctcttggctttactgaaattgaagctgaaaaaagtatgtcatctggaggaattttgcggcagtgtctccgactagtttgtgcagtcgcagtaaggaattgcttggagtgtcaacagcattcacaactgaaaactaggggagataaagccttgaaaccaatgcatagccttattcctttagggaaatctgcagcgaagagcccagtggacattgtgactggcggtatatctccagtaagagatcttgacaggcttctacaggacatggatattaatcggcttagggcagttgttttcagagacatagaggatagcaaacaagctcaatttttagccttggcagtagtatactttatctctgttcttatggtctccaagtacagagacattttggaaccccaaaatgaaaggcatagccagtcatgtacagaaactggcagtgaaaatgagaatgtatcactctctgaaatcacaccagcagcattcagcactttaactacggcatcagtggaagaatctgaaagcacatcatctgctcgaaggagggactcaggcattggggaagaaacagccactggtttaggaagccatgtggaagtaactcctcacacagcacctcctggtgtcagtgcaggcccagatgcaatcagcgaggtgctatctactctttctttagaagtcaataagtctccggaaaccaaaaatgatagaggaaatgacttggacactaaggctacaccgtcagtttcagtttcaaaaaacgtcaatgtgaaagacattctccgaagcttggttaacataccagcagatggagtcacagtggatcctgcccttctgccaccagcctgccttggagcccttggtgatctatctgtggaacaacccgtgcagttcagatcttttgacagaagtgtcattgttgcagcaaaaaagtcagcagtctcaccttccacctttaatacaagcatacctaccaatgctgtcagtgtggtttcctcagtagattcagcccaagcctcagatatgggaggagaatcaccaggcagtagatcatctaatgcaaaattgccctcagttccaacagttgattcagtttcacaagatccggtttcaaatatgagtattacagagaggcttgaacacgctttggaaaaggcagctcctctccttcgtgagatttttgtggattttgcaccttttctttctcggacacttttgggtagccatggacaagaactgcttatagaaggaacaagtctggtttgcatgaagtcgagtagttcagttgtggaattggttatgctactgtgttctcaggagtggcaaaattctattcagaagaatgcaggccttgcttttatcgaacttgtcaatgaaggaaggttgcttagccagacaatgaaggatcatctagtaagagtagcaaatgaagctgaatttatcctgagcaggcagagagcagaagatattcacagacatgcggaatttgagtcactgtgtgcccagtattctgcagacaaacgagaagatgagaagatgtgtgatcatttgataagagcagcaaaatatcgtgaccacgtgacagcaactcaactaatccagaaaattatcaacattctcacagacaagcatggagcctggggaaattctgcagtgagtcgtcctcttgagttctggcgccttgactactgggaagatgacttgcggcgccggcgacgatttgtgcgtaaccctctaggatcgacacatcctgaagcgacactaaaaacagccgtggaacatgtgtgcatttttaaattgagagagaacagcaaagccacagatgaagatatccttgctaaaggaaaacagtccatcaggagtcaggctttaggaaatcagaactcagaaaacgagatcctcctggaaggcgatgatgatactctgtcatccgtggatgagaaagatttagagaatcttgccggtcctgttagcctgagcacaccagctcagcttgtggccccctctgttgtagtaaagggcactctttctgtcacctcctccgaactctattttgaggtggatgaagaggatcctaacttcaaaaaaatcgaccccaagatcttggcatatacagaagggctgcatggaaaatggctgttcacagagatacgatcaatcttttctcgtcgttatcttttgcaaaatacagccctggagatctttatggcaaacagagttgctgtgatgttcaacttcccagaccctgcaacagtaaagaaagtggttaactatctacctcgtgttggcgttggaacaagttttggattgcctcaaaccagacgtatttcattagctagtccacgtcagctttttaaggcttctaatatgacccagcgatggcaacacagagagatatctaattttgagtacttgatgtttctcaacacgatagcaggacggagttataatgacttaaatcagtatccagtgtttccttgggtcatcactaattatgaatcagaagaactggatcttaccttgcccaccaacttcagagatttgtccaagccaataggagctctgaacccaaaaagagcagcattcttcgctgagcgttatgaatcatgggaagatgatcaagttccaaagtttcactatggtactcattactcaactgcaagttttgttcttgcatggctgctaagaatagaaccctttacaacttatttcctaaatttgcaaggaggcaaatttgatcatgcagatcgaactttttcatcaatttccagagcttggcgaaacagtcagcgtgatacctctgatattaaggagttgatccctgaattttattatctccctgagatgtttgtcaacttcaataattataatcttggagtgatggatgatgggacagtagtgtctgatgtcgaacttcctccttgggccaaaacctcagaagaatttgttcacataaacagattggccctggagagtgaatttgtttcctgccagcttcaccaatggattgatctcatttttggctataaacagcaaggaccagaagctgtccgagccctcaatgtgttctattacttgacctatgaaggagctgtcaatctgaattcaataactgatcctgtgttgagagaggctgttgaagctcaaatccgaagttttggacagactccttctcaactactcatagagccccatcctcccagaggttctgccatgcaagtgagtccattgatgttcacagacaaagcccagcaggatgttatcatggtcctcaagtttccctccaactcccctgttactcacgtggcagccaacacccagcctggtttggcaactcccgctgtgatcacagtcactgctaacaggttatttgcggtgaacaaatggcacaaccttcctgctcatcaaggtgctgtacaagaccagccataccagctgccagtggaaatcgatcctctcatagccagcaatacaggaatgcacaggaggcaaatcactgaccttttagaccaaagtattcaagtgcattcccagtgctttgtcatcacttcagacaaccgctatattctcgtctgtggcttctgggataaaagtttcagagtctattctacagacacaggaagattgatccaagtggtgtttggccattgggatgtcgtcacttgccttgctcgttctgagtcatatattgggggaaattgctacattctctcagggtcacgtgatgcaactcttttgctgtggtattggaatggaaaatgcagtgggattggagataacccaggcagtgagactgctgctcctcgggccattttgaccggccatgactatgaggtcacatgtgctgcggtgtgtgcggagctaggcctggtgttgagtggttcacaagaaggaccatgtctcatacattccatgaatggagacttgttgaggaccttggagggtcctgaaaactgcctgaaaccaaaactcattcaggcttcaagagagggtcattgtgtcatattctatgaaaacggcctcttctgtacattcagtgtgaatggaaaactccaggccacgatggaaacagatgataacataagagccatccagctgagccgagatgggcagtacctgctcacaggaggagacagaggagtggtcgtggtccggcaggtgtcggacctcaagcagctctttgcctatccaggatgtgacgctggaatccgggccatggcgctgtcttacgaccagaggtgcatcatttctggcatggcttcaggaagcattgtgctattttacaacgactttaaccggtggcatcatgaataccaaacccgctactgatggtgacagctgtacatcaactctgcccctaggatgagcagaagtacctggagcatcattctcttctaccacatctgaatgtaacttaaatttgctcaaagaagcaaaatattttttaaagttattaataattgctatttttgtagtctttgcttgacttttttgggggggattagcaaagcagaaaactggctgctgggttctgtagttttaaaaaatctatatttttagtcataatgagaagtctattttcaccaattatggaaacatacagtggagcaagtaaaccacttattccagctataatattatgaagaacatttcccatgcatctacaagcttgagaaataggattttcacagtggggaagtgggttacaatattggaataggaaaatttgatgctgtaatttgggtcctgtatttttccaaacaactgtgcttcttcagcactaatatttctgggatttaaatagtaatgtttaaattatggtaaatgtaatttaaaacatctcaattaagtctgtctatcaatattgttcttcaagcatgttttagacctagaaaagtatggtttgggggaggctattttattgtgtggttagcacaaggaatctaatttatagcaagtgtgaaatagttaccattttttcctgatctgtcatcttcatagcacaacaaaacgaaatgatggaaatgctcttgagctcacaacatttgtttttcttttaaagtaaatgcaagtaccaaagctcactactgcggtttgcctgtgcctggacaatgaggcggagccactgttgttttgttggggcacccccttccctccccgggtttgcaaatagaggctaccgggtgctgtattcagcaacacctgttttactatttgttattaaactatcatctccaccttccttttgattagcaatttgtactaagaaacgaaacaatgttatttggtggtgtataattctacttttctagtagattactgtgtggaattctgtgaaaaatatttgagaaaaggcctgtattgcataaataaattctttgtatgttgtgaactttgatctctatttctcttgcaacagacttcaagtggtccctctttttttcctacacactcagctcttctctaaaagcaaggatttggaatgaacaattcagtttgacagaaaaagctgaataaaatggcatctgtaattgaattgttggaaatgccttttttgctcctaaattttaaacatcattaataaaataatgattcacaaagaaagaaaa

SEQ ID NO: 1285 - DNA, 4941 bp, Homo sapiens
attgtcgggggctattctctctcccaggaacatggcggcgagtcagggaggaggcggtaacagtgggggcggcggttgtggtggaggtggaagtagcggtggctgtggcacggctggagggggaggtggcggggctggagggggaggcggcggcggcggcgggaccctggtggtccccatcccggtaccgactcttttcggtcagccgttccccaacgggccgccgtggaacccggggagcctgcagcctcagcacaccgtgaggagcctggaccgggccctggaagaggcgggcagctccggcatcctgagcctcagtggtcggaaactccgagacttcccgggcagcggctacgacctgacggacaccacccaagcagatctttccagaaatcgttttacagaaattccttctgatgtctggttatttgcaccccttgaaacattaaatttatatcataattgcatcaaaaccattcctgaagccattaaaaatctgcagatgttaacataccttaacattagccgaaatcttttatcaacattgccaaaatacctatttgatcttccccttaaagttttggtcgtcagtaataataaactggtatccattccagaagaaattgggaagttaaaagatttaatggaattggatattagctgcaatgagattcaagtccttccccaacaaatgggaaaattacattcacttagagagctaaatataagaagaaataatcttcatgttttgccagatgaattaggagaccttcccttagtcaagctggatttctcttgtaataaagtgaccgaaattccagtttgttacagaaagctgcatcatttacaagtaataattttggataacaatccattgcaagtaccaccagcacagatatgtttaaagggtaaggtgcacatatttaagtacttaaatattcaagcatgttgcagaatggataagaaaccagattccctggatcttccatcattgagtaaacgaatgccctcacagcctctcacagacagtatggaagatttttatccaaataaaaatcatggccctgactctggaattggaagtgataatggagagaaacgattatccacaacagaaccatcagatgatgacacagtcagccttcattctcaagtctcagaatcaaatagagagcagacatcaagaaatgacagtcacataataggaagtaagactgattctcagaaagaccaggaggtatatgattttgttgaccccaacacagaagatgtagcagttcctgaacagggaaatgcacatattggatcatttgtatcattctttaagggaaaagaaaaatgttctgaaaaatctcggaaaaatgaagaattaggagatgaaaaaagacttgagaaagaacagttactggcagaggaagaggatgatgatttgaaggaagtaactgatttgaggaaaatagctgctcagttattgcagcaagaacagaagaacaggattcttaatcattcaacttctgtgatgagaaacaagccaaaacaaactgtggaatgtgaaaagagtgtctcagcagatgaagttaattcaccattatcacccctcacctggcagcccttagaaaatcagaaggatcaaatagatgaacaaccgtggccagaatctcaccctataatctggcagagtgaagaaaggaggcggagcaaacagattagaaaagaatatttcaagtataaatcaatgaggaagagttcaagtggcaatgaaaatgatgagcaagacagtgataatgctaatatgtcaacacaatctccagtatcatctgaggaatatgacagaactgatggtttttcacacagtccctttggcttgaagcctagatcagcttttagccgctcatctcgccaagaatatggggcagcagatccaggatttacaatgagaagaaagatggaacatttacgggaagagcgagagcaaatacgacaacttcgcaacaatcttgaatccaggttaaaagtaattttgcctgatgacattggagctgcactgatggatggggttgttctttgccatttagccaatcatataaggccacgttctgttgctagtattcatgtaccatcaccagcagtgcccaaactgagcatggcaaaatgtcgaagaaatgtagaaaattttcttgatgcttgtaaaaagttgggtgtctcacaggaaagactttgtttgcctcatcatattttggaagaacgaggacttgtgaaagttggtgtcacagttcaggcgctccttgaattaccaacaaccaaggcatctcagctttctgtggcttaatataacattttaaaattctaagtgtatagtttcatttatttgaagtgatttcaaatatttcaaattcatgaataagaatattccgtcaaaaatagtttgccttaggtcacgccttaggattttaaaaaaattacattgaaacatcaaacttaaacattgaattgcccgaacttctttgggggaaaactggattaacttaataagagtatttgataaactcaaattctctttttactaagtcagttgataatcttgattatttttcagaaagcagactgatactaaatttaaaatgtagtttcaatttaataatcacattaggtttaatttttttacatcatagcatattagtaaacatctggataaaggtaattttttttagcaatttagagcaattctatatttgagttatttaatacacttctaattctagtttatacacaatttcttcaatctttggtcttagttttctagaaaaaaggagtagaaaaaacaattctggctttatattaaattcttttagtattataggttggtgccaaaatattttcagttgtactgtagattgtttacatgtgaagtgcctgtgtaattgatgactcttacatagtcttaagcatttttgcaattttttaaatgtattaatagagtcaatggaactttaaaatattttagtagattttgtaaagtcagtaatatgtgaggatttaaatgagcctcacattgtgacatttgtggttttttagttagtccattgcagtttcccttaaattggttatttcatgttgtcaaaaataccaatgttaatatgattaatttatgctatttaattttgtgaaacttaatcatcttttaaaatgtattatttgaagagtattttatttctgtattgaaaatgttacacaaagcagtaaagtttttgagaactagtgaagtactaattatcaaggacattttgataaaactgccaaagtttgggtttatatcttccctttgagcagcattctatcagtgctgcctttagctatactcagagagcagcagttgaggaataggtttttactcaaaatctggccatttgtgaatcctgtaaaccttgtgatcttcaattactttgatgttaaattaaacacagactcttctataaatattttcatgagatactgtgttacacaaagtccttgttttaacttaggtatgggtaaatttacattggtggtattgcaggaatttttcaaaaacattactgtaatgaataactgagtttcctatagaagaacctgaataattacttttgtagtaaccaagcaagcatcatatcttaagtatgtgatcatttgcacttgttacctcttaatatggatgcaacttattaaaaatgttggcctgggtatttcaaagggtatatataaaaggtaaaaaactagtgtgccaaatggtataggaacaactgtactttttttgatcagttggcatgaagccatagaattaaattttggctttagaatacagatgtgttcattacattccccaagggtcaaattggagcttttaaagaattaaagcttctatgagtatatggtttaagaattaaattattagtaatttattattttaaatatttgacctcattagttgttaattttttagttggataaaaaaaaaactcgctgacataatctccctagtgaaaacttgggtaatatatgtaagaaatggcaaataaataccttagttaatgactttttatgtagaaatttgacagcattacaaattaagtgaccattaaaaacacagcaatcattcatactgctttcataggtgttatgatagtctctgattaatcaatctagtatgaattattttacaagtgttgtcctgtttcatatctttgaagtagtagtgaaattgtaggccattttcttataacatttcagttacttttcagttaattattcctttaaaaagaaaatacagcagaacctcactgtagcattctttactgcagagcaaaattcaatttaagatgggcttctctgaggtccacatcatggcagttcatttactcttgtgccaaatggcaacaccacgtctaaagcagtttcacagcatggtcccctacaatgttataccaaggctctgatgtatttcttttagtagtttctaagtgtaaaatttattctaaatgtttttatggctattatctatttcatcagttattgaattaagaatgattttcattacttgagtgggatttgtgatttaatgacagttgaataatcaaaaatattttattaggcccccaaaatttaatagatatctatttctgttacattttattactgtatggcacaagaaagaagtgacattgggtatgttagaaatgaaataaggagtaaaaatgcattaccatttgtttaataattatctttacagaatgctagtttaatgacttttttaactgaattttttgaataaatcagaaatgtttgtattggtcacagatctatcataattgcttttctgatgcatttaaaaataaatggaacacttaaatgtatattaccgatgcaaactgtggataaagttgaaagaaaaaaaaaaaaaaaaaa

SEQ ID NO: 1286 - DNA, 14896 bp, Homo sapiens
cagcggtgcgagctccaggcccatgcactgaggaggcggaaacaaggggagcccccagagctccatcaagccccctccaaaggctcccctacccggtccacgccccccaccccccctccccgcctcctcccaattgtgcatttttgcagccggaggcggctccgagatggggctgtgagcttcgcccggggagggggaaagagcagcgaggagtgaagcgggggggtggggtgaagggtttggatttcggggcagggggcgcacccccgtcagcaggccctccccaaggggctcggaactctacctcttcacccacgcccctggtgcgctttgccgaaggaaagaataagaacagagaaggaggagggggaaaggaggaaaagggggaccccccaactggggggggtgaaggagagaagtagcaggaccagaggggaaggggctgctgcttgcatcagcccacaccatgctgaccccgccgttgctcctgctgctgcccctgctctcagctctggtcgcggcggctatcgacgcccctaagacttgcagccccaagcagtttgcctgcagagatcaaataacctgtatctcaaagggctggcggtgcgacggtgagagggactgcccagacggatctgacgaggcccctgagatttgtccacagagtaaggcccagcgatgccagccaaacgagcataactgcctgggtactgagctgtgtgttcccatgtcccgcctctgcaatggggtccaggactgcatggacggctcagatgaggggccccactgccgagagctccaaggcaactgctctcgcctgggctgccagcaccattgtgtccccacactcgatgggcccacctgctactgcaacagcagctttcagcttcaggcagatggcaagacctgcaaagattttgatgagtgctcagtgtacggcacctgcagccagctatgcaccaacacagacggctccttcatatgtggctgtgttgaaggatacctcctgcagccggataaccgctcctgcaaggccaagaacgagccagtagaccggccccctgtgctgttgatagccaactcccagaacatcttggccacgtacctgagtggggcccaggtgtctaccatcacacctacgagcacgcggcagaccacagccatggacttcagctatgccaacgagaccgtatgctgggtgcatgttggggacagtgctgctcagacgcagctcaagtgtgcccgcatgcctggcctaaagggcttcgtggatgagcacaccatcaacatctccctcagtctgcaccacgtggaacagatggccatcgactggctgacaggcaacttctactttgtggatgacatcgatgataggatctttgtctgcaacagaaatggggacacatgtgtcacattgctagacctggaactctacaaccccaagggcattgccctggaccctgccatggggaaggtgtttttcactgactatgggcagatcccaaaggtggaacgctgtgacatggatgggcagaaccgcaccaagctcgtcgacagcaagattgtgtttcctcatggcatcacgctggacctggtcagccgccttgtctactgggcagatgcctatctggactatattgaagtggtggactatgagggcaagggccgccagaccatcatccagggcatcctgattgagcacctgtacggcctgactgtgtttgagaattatctctatgccaccaactcggacaatgccaatgcccagcagaagacgagtgtgatccgtgtgaaccgctttaacagcaccgagtaccaggttgtcacccgggtggacaagggtggtgccctccacatctaccaccagaggcgtcagccccgagtgaggagccatgcctgtgaaaacgaccagtatgggaagccgggtggctgctctgacatctgcctgctggccaacagccacaaggcgcggacctgccgctgccgttccggcttcagcctgggcagtgacgggaagtcatgcaagaagccggagcatgagctgttcctcgtgtatggcaagggccggccaggcatcatccggggcatggatatgggggccaaggtcccggatgagcacatgatccccattgaaaacctcatgaacccccgagccctggacttccacgctgagaccggcttcatctactttgccgacaccaccagctacctcattggccgccagaagattgatggcactgagcgggagaccatcctgaaggacggcatccacaatgtggagggtgtggccgtggactggatgggagacaatctgtactggacggacgatgggcccaaaaagacaatcagcgtggccaggctggagaaagctgctcagacccgcaagactttaatcgagggcaaaatgacacaccccagggctattgtggtggatccactcaatgggtggatgtactggacagactgggaggaggaccccaaggacagtcggcgtgggcggctggagagggcgtggatggatggctcacaccgagacatctttgtcacctccaagacagtgctttggcccaatgggctaagcctggacatcccggctgggcgcctctactgggtggatgccttctacgaccgcatcgagacgatactgctcaatggcacagaccggaagattgtgtatgaaggtcctgagctgaaccacgcctttggcctgtgtcaccatggcaactacctcttctggactgagtatcggagtggcagtgtctaccgcttggaacggggtgtaggaggcgcaccccccactgtgacccttctgcgcagtgagcggccccccatctttgagatccgaatgtatgatgcccagcagcagcaagttggcaccaacaaatgccgggtgaacaatggcggctgcagcagcctgtgcttggccacccctgggagccgccagtgcgcctgtgctgaggaccaggtgttggacgcagacggcgtcacttgcttggcgaacccatcctacgtgcctccaccccagtgccagccaggcgagtttgcctgtgccaacagccgctgcatccaggagcgctggaagtgtgacggagacaacgattgcctggacaacagtgatgaggccccagccctctgccatcagcacacctgcccctcggaccgattcaagtgcgagaacaaccggtgcatccccaaccgctggctctgcgacggggacaatgactgtgggaacagtgaagatgagtccaatgccacttgttcagcccgcacctgcccccccaaccagttctcctgtgccagtggccgctgcatccccatctcctggacgtgtgatctggatgacgactgtggggaccgctctgatgagtctgcttcgtgtgcctatcccacctgcttccccctgactcagtttacctgcaacaatggcagatgtatcaacatcaactggagatgcgacaatgacaatgactgtggggacaacagtgacgaagccggctgcagccactcctgttctagcacccagttcaagtgcaacagcgggcgttgcatccccgagcactggacctgcgatggggacaatgactgcggagactacagtgatgagacacacgccaactgcaccaaccaggccacgaggccccctggtggctgccacactgatgagttccagtgccggctggatggactatgcatccccctgcggtggcgctgcgatggggacactgactgcatggactccagcgatgagaagagctgtgagggagtgacccacgtctgcgatcccagtgtcaagtttggctgcaaggactcagctcggtgcatcagcaaagcgtgggtgtgtgatggcgacaatgactgtgaggataactcggacgaggagaactgcgagtccctggcctgcaggccaccctcgcacccttgtgccaacaacacctcagtctgcctgccccctgacaagctgtgtgatggcaacgacgactgtggcgacggctcagatgagggcgagctctgcgaccagtgctctctgaataacggtggctgcagccacaactgctcagtggcacctggcgaaggcattgtgtgttcctgccctctgggcatggagctggggcccgacaaccacacctgccagatccagagctactgtgccaagcatctcaaatgcagccaaaagtgcgaccagaacaagttcagcgtgaagtgctcctgctacgagggctgggtcctggaacctgacggcgagagctgccgcagcctggaccccttcaagccgttcatcattttctccaaccgccatgaaatccggcgcatcgatcttcacaaaggagactacagcgtcctggtgcccggcctgcgcaacaccatcgccctggacttccacctcagccagagcgccctctactggaccgacgtggtggaggacaagatctaccgcgggaagctgctggacaacggagccctgactagtttcgaggtggtgattcagtatggcctggccacacccgagggcctggctgtagactggattgcaggcaacatctactgggtggagagtaacctggatcagatcgaggtggccaagctggatgggaccctccggaccaccctgctggccggtgacattgagcacccaagggcaatcgcactggatccccgggatgggatcctgttttggacagactgggatgccagcctgccccgcattgaggcagcctccatgagtggggctgggcgccgcaccgtgcaccgggagaccggctctgggggctggcccaacgggctcaccgtggactacctggagaagcgcatcctttggattgacgccaggtcagatgccatttactcagcccgttacgacggctctggccacatggaggtgcttcggggacacgagttcctgtcgcacccgtttgcagtgacgctgtacgggggggaggtctactggactgactggcgaacaaacacactggctaaggccaacaagtggaccggccacaatgtcaccgtggtacagaggaccaacacccagccctttgacctgcaggtgtaccacccctcccgccagcccatggctcccaatccctgtgaggccaatgggggccagggcccctgctcccacctgtgtctcatcaactacaaccggaccgtgtcctgcgcctgcccccacctcatgaagctccacaaggacaacaccacctgctatgagtttaagaagttcctgctgtacgcacgtcagatggagatccgaggtgtggacctggatgctccctactacaactacatcatctccttcacggtgcccgacatcgacaacgtcacagtgctagactacgatgcccgcgagcagcgtgtgtactggtctgacgtgcggacacaggccatcaagcgggccttcatcaacggcacaggcgtggagacagtcgtctctgcagacttgccaaatgcccacgggctggctgtggactgggtctcccgaaacctgttctggacaagctatgacaccaataagaagcagatcaatgtggcccggctggatggctccttcaagaacgcagtggtgcagggcctggagcagccccatggccttgtcgtccaccctctgcgtgggaagctctactggaccgatggtgacaacatcagcatggccaacatggatggcagcaatcgcaccctgctcttcagtggccagaagggccccgtgggcctggctattgacttccctgaaagcaaactctactggatcagctccgggaaccataccatcaaccgctgcaacctggatgggagtgggctggaggtcatcgatgccatgcggagccagctgggcaaggccaccgccctggccatcatgggggacaagctgtggtgggctgatcaggtgtcggaaaagatgggcacatgcagcaaggctgacggctcgggctccgtggtccttcggaacagcaccaccctggtgatgcacatgaaggtctatgacgagagcatccagctggaccataagggcaccaacccctgcagtgtcaacaacggtgactgctcccagctctgcctgcccacgtcagagacgacccgctcctgcatgtgcacagccggctatagcctccggagtggccagcaggcctgcgagggcgtaggttcctttctcctgtactctgtgcatgagggaatcaggggaattcccctggatcccaatgacaagtcagatgccctggtcccagtgtccgggacctcgctggctgtcggcatcgacttccacgctgaaaatgacaccatctactgggtggacatgggcctgagcacgatcagccgggccaagcgggaccagacgtggcgtgaagacgtggtgaccaatggcattggccgtgtggagggcattgcagtggactggatcgcaggcaacatctactggacagaccagggctttgatgtcatcgaggtcgcccggctcaatggctccttccgctacgtggtgatctcccagggtctagacaagccccgggccatcaccgtccacccggagaaagggtacttgttctggactgagtggggtcagtatccgcgtattgagcggtctcggctagatggcacggagcgtgtggtgctggtcaacgtcagcatcagctggcccaacggcatctcagtggactaccaggatgggaagctgtactggtgcgatgcacggacagacaagattgaacggatcgacctggagacaggtgagaaccgcgaggtggttctgtccagcaacaacatggacatgttttcagtgtctgtgtttgaggatttcatctactggagtgacaggactcatgccaacggctctatcaagcgcgggagcaaagacaatgccacagactccgtgcccctgcgaaccggcatcggcgtccagcttaaagacatcaaagtcttcaaccgggaccggcagaaaggcaccaacgtgtgcgcggtggccaatggcgggtgccagcagctgtgcctgtaccggggccgtgggcagcgggcctgcgcctgtgcccacgggatgctggctgaagacggagcatcgtgccgcgagtatgccggctacctgctctactcagagcgcaccattctcaagagtatccacctgtcggatgagcgcaacctcaatgcgcccgtgcagcccttcgaggaccctgagcacatgaagaacgtcatcgccctggcctttgactaccgggcaggcacctctccgggcacccccaatcgcatcttcttcagcgacatccactttgggaacatccaacagatcaacgacgatggctccaggaggatcaccattgtggaaaacgtgggctccgtggaaggcctggcctatcaccgtggctgggacactctctattggacaagctacacgacatccaccatcacgcgccacacagtggaccagacccgcccaggggccttcgagcgtgagaccgtcatcactatgtctggagatgaccacccacgggccttcgttttggacgagtgccagaacctcatgttctggaccaactggaatgagcagcatcccagcatcatgcgggcggcgctctcgggagccaatgtcctgacccttatcgagaaggacatccgtacccccaatggcctggccatcgaccaccgtgccgagaagctctacttctctgacgccaccctggacaagatcgagcggtgcgagtatgacggctcccaccgctatgtgatcctaaagtcagagcctgtccaccccttcgggctggccgtgtatggggagcacattttctggactgactgggtgcggcgggcagtgcagcgggccaacaagcacgtgggcagcaacatgaagctgctgcgcgtggacatcccccagcagcccatgggcatcatcgccgtggccaacgacaccaacagctgtgaactctctccatgccgaatcaacaacggtggctgccaggacctgtgtctgctcactcaccagggccatgtcaactgctcatgccgagggggccgaatcctccaggatgacctcacctgccgagcggtgaattcctcttgccgagcacaagatgagtttgagtgtgccaatggcgagtgcatcaacttcagcctgacctgcgacggcgtcccccactgcaaggacaagtccgatgagaagccatcctactgcaactcccgccgctgcaagaagactttccggcagtgcagcaatgggcgctgtgtgtccaacatgctgtggtgcaacggggccgacgactgtggggatggctctgacgagatcccttgcaacaagacagcctgtggtgtgggcgagttccgctgccgggacgggacctgcatcgggaactccagccgctgcaaccagtttgtggattgtgaggacgcctcagatgagatgaactgcagtgccaccgactgcagcagctacttccgcctgggcgtgaagggcgtgctcttccagccctgcgagcggacctcactctgctacgcacccagctgggtgtgtgatggcgccaatgactgtggggactacagtgatgagcgcgactgcccaggtgtgaaacgccccagatgccctctgaattacttcgcctgccctagtgggcgctgcatccccatgagctggacgtgtgacaaagaggatgactgtgaacatggcgaggacgagacccactgcaacaagttctgctcagaggcccagtttgagtgccagaaccatcgctgcatctccaagcagtggctgtgtgacggcagcgatgactgtggggatggctcagacgaggctgctcactgtgaaggcaagacgtgcggcccctcctccttctcctgccctggcacccacgtgtgcgtccccgagcgctggctctgtgacggtgacaaagactgtgctgatggtgcagacgagagcatcgcagctggttgcttgtacaacagcacttgtgacgaccgtgagttcatgtgccagaaccgccagtgcatccccaagcacttcgtgtgtgaccacgaccgtgactgtgcagatggctctgatgagtcccccgagtgtgagtacccgacctgcggccccagtgagttccgctgtgccaatgggcgctgtctgagctcccgccagtgggagtgtgatggcgagaatgactgccacgaccagagtgacgaggctcccaagaacccacactgcaccagcccagagcacaagtgcaatgcctcgtcacagttcctgtgcagcagtgggcgctgtgtggctgaggcactgctctgcaacggccaggatgactgtggcgacagctcggacgagcgtggctgccacatcaatgagtgtctcagccgcaagctcagtggctgcagccaggactgtgaggacctcaagatcggcttcaagtgccgctgtcgccctggcttccggctgaaggatgacggccggacgtgtgctgatgtggacgagtgcagcaccaccttcccctgcagccagcgctgcatcaacacccatggcagctataagtgtctgtgtgtggagggctatgcaccccgcggcggcgacccccacagctgcaaggctgtgactgacgaggaaccgtttctgatcttcgccaaccggtactacctgcgcaagctcaacctggacgggtccaactacacgttacttaagcagggcctgaacaacgccgttgccttggattttgactaccgagagcagatgatctactggacagatgtgaccacccagggcagcatgatccgaaggatgcaccttaacgggagcaatgtgcaggtcctacaccgtacaggcctcagcaaccccgatgggctggctgtggactgggtgggtggcaacctgtactggtgcgacaaaggccgggacaccatcgaggtgtccaagctcaatggggcctatcggacggtgctggtcagctctggcctccgtgagcccagggctctggtggtggatgtgcagaatgggtacctgtactggacagactggggtgaccattcactgatcggccgcatcggcatggatgggtccagccgcagcgtcatcgtggacaccaagatcacatggcccaatggcctgacgctggactatgtcactgagcgcatctactgggccgacgcccgcgaggactacattgaatttgccagcctggatggctccaatcgccacgttgtgctgagccaggacatcccgcacatctttgcactgaccctgtttgaggactacgtctactggaccgactgggaaacaaagtccattaaccgagcccacaagaccacgggcaccaacaaaacgctcctcatcagcacgctgcaccggcccatggacctgcatgtcttccatgccctgcgccagccagacgtgcccaatcacccctgcaaggtcaacaatggtggctgcagcaacctgtgcctgctgtcccccgggggagggcacaaatgtgcctgccccaccaacttctacctgggcagcgatgggcgcacctgtgtgtccaactgcacggctagccagtttgtatgcaagaacgacaagtgcatccccttctggtggaagtgtgacaccgaggacgactgcggggaccactcagacgagcccccggactgccctgagttcaagtgccggcccggacagttccagtgctccacaggtatctgcacaaaccctgccttcatctgcgatggcgacaatgactgccaggacaacagtgacgaggccaactgtgacatccacgtctgcttgcccagtcagttcaaatgcaccaacaccaaccgctgtattcccggcatcttccgctgcaatgggcaggacaactgcggagatggggaggatgagagggactgccccgaggtgacctgcgcccccaaccagttccagtgctccattaccaaacggtgcatcccccgggtctgggtctgcgaccgggacaatgactgtgtggatggcagtgatgagcccgccaactgcacccagatgacctgtggtgtggacgagttccgctgcaaggattcgggccgctgcatcccagcgcgttggaagtgtgacggagaggatgactgtggggatggctcggatgagcccaaggaagagtgtgatgaacgcacctgtgagccataccagttccgctgcaagaacaaccgctgcgtgcccggccgctggcagtgcgactacgacaacgattgcggtgacaactccgatgaagagagctgcacccctcggccctgctccgagagtgagttctcctgtgccaacggccgctgcatcgcggggcgctggaaatgcgatggagaccacgactgcgcggacggctcggacgagaaagactgcaccccccgctgtgacatggaccagttccagtgcaagagcggccactgcatccccctgcgctggcgctgtgacgcagacgccgactgcatggacggcagcgacgaggaggcctgcggcactggcgtgcggacctgccccctggacgagttccagtgcaacaacaccttgtgcaagccgctggcctggaagtgcgatggcgaggatgactgtggggacaactcagatgagaaccccgaggagtgtgcccggttcgtgtgccctcccaaccggcccttccgttgcaagaatgaccgcgtctgtctgtggatcgggcgccaatgcgatggcacggacaactgtggggatgggactgatgaagaggactgtgagccccccacagcccacaccacccactgcaaagacaagaaggagtttctgtgccggaaccagcgctgcctctcctcctccctgcgctgcaacatgttcgatgactgcggggacggctctgacgaggaggactgcagcatcgaccccaagctgaccagctgcgccaccaatgccagcatctgtggggacgaggcacgctgcgtgcgcaccgagaaagcggcctactgtgcctgccgctcgggcttccacaccgtgcccggccagcccggatgccaagacatcaacgagtgcctgcgcttcggcacctgctcccagctctgcaacaacaccaagggcggccacctctgcagctgcgctcggaacttcatgaagacgcacaacacctgcaaggccgaaggctctgagtaccaggtcctgtacatcgctgatgacaatgagatccgcagcctgttccccggccacccccattcggcttacgagcaggcattccagggtgacgagagtgtccgcattgatgctatggatgtccatgtcaaggctggccgtgtctattggaccaactggcacacgggcaccatctcctaccgcagcctgccacctgctgcgcctcctaccacttccaaccgccaccggcgacagattgaccggggtgtcacccacctcaacatttcagggctgaagatgcccagaggcatcgccatcgactgggtggccggaaacgtgtactggaccgactcgggccgagatgtgattgaggtggcgcagatgaagggcgagaaccgcaagacgctcatctcgggcatgattgacgagccccacgccattgtggtggacccactgagggggaccatgtactggtcagactggggcaaccaccccaagattgagacggcagcgatggatgggacgcttcgggagacactggtgcaggacaacattcagtggcccacaggcctggccgtggattatcacaatgagcggctgtactgggcagacgccaagctttcagtcatcggcagcatccggctcaatggcacggaccccattgtggctgctgacagcaaacgaggcctaagtcaccccttcagcatcgacgtctttgaggattacatctatggtgtcacctacatcaataatcgtgtcttcaagatccataagtttggccacagccccttggtcaacctgacagggggcctgagccacgcctctgacgtggtcctttaccatcagcacaagcagcccgaagtgaccaacccatgtgaccgcaagaaatgcgagtggctctgcctgctgagccccagtgggcctgtctgcacctgtcccaatgggaagcggctggacaacggcacatgcgtgcctgtgccctctccaacgccccccccagatgctccccggcctggaacctgtaacctgcagtgcttcaacggtggcagctgtttcctcaatgcacggaggcagcccaagtgccgctgccaaccccgctacacgggtgacaagtgtgaactggaccagtgctgggagcactgtcgcaatgggggcacctgtgctgcctccccctctggcatgcccacgtgccggtgccccacgggcttcacgggccccaaatgcacccagcaggtgtgtgcgggctactgtgccaacaacagcacctgcactgtcaaccagggcaaccagccccagtgccgatgcctacccggcttcctgggcgaccgctgccagtaccggcagtgctctggctactgtgagaactttggcacatgccagatggctgctgatggctcccgacaatgccgctgcactgcctactttgagggatcgaggtgtgaggtgaacaagtgcagccgctgtctcgaaggggcctgtgtggtcaacaagcagagtggggatgtcacctgcaactgcacggatggccgggtggcccccagctgtctgacctgcgtcggccactgcagcaatggcggctcctgtaccatgaacagcaaaatgatgcctgagtgccagtgcccaccccacatgacagggccccggtgtgaggagcacgtcttcagccagcagcagccaggacatatagcctccatcctaatccctctgctgttgctgctgctgctggttctggtggccggagtggtattctggtataagcggcgagtccaaggggctaagggcttccagcaccaacggatgaccaacggggccatgaacgtggagattggaaaccccacctacaagatgtacgaaggcggagagcctgatgatgtgggaggcctactggacgctgactttgccctggaccctgacaagcccaccaacttcaccaaccccgtgtatgccacactctacatggggggccatggcagtcgccactccctggccagcacggacgagaagcgagaactcctgggccggggccctgaggacgagataggggaccccttggcatagggccctgccccgtcggactgcccccagaaagcctcctgccccctgccggtgaagtccttcagtgagcccctccccagccagcccttccctggccccgccggatgtataaatgtaaaaatgaaggaattacattttatatgtgagcgagcaagccggcaagcgagcacagtattatttctccatcccctccctgcctgctccttggcacccccatgctgccttcagggagacaggcagggagggcttggggctgcacctcctaccctcccaccagaacgcaccccactgggagagctggtggtgcagccttcccctccctgtataagacactttgccaaggctctcccctctcgccccatccctgcttgcccgctcccacagcttcctgagggctaattctgggaagggagagttctttgctgcccctgtctggaagacgtggctctgggtgaggtaggcgggaaaggatggagtgttttagttcttgggggaggccaccccaaaccccagccccaactccaggggcacctatgagatggccatgctcaacccccctcccagacaggccctccctgtctccagggcccccaccgaggttcccagggctggagacttcctctggtaaacattcctccagcctcccctcccctggggacgccaaggaggtgggccacacccaggaagggaaagcgggcagccccgttttggggacgtgaacgttttaataatttttgctgaattctttacaactaaataacacagatattcttataaataaaattgtaaaaaaaaaaa

SEQ ID NO: 1287 - DNA, 3180 bp, Homo sapiens
ggaagctccgcgcggcggcgggggcggcgacggcgactggcgggtgggagtggaggcaccggctggcgggcgggggtacagggacggggcaggggctcccgctccaggttccttgaagcacttccgaccgcgaagcccggcgcgagaagcgagctaacccaagagccaacaacgagcgcggagagggcagcggactgagcggagccgccggccagagcgggctcggagcccgggtctccgccgctcgggacccggctaggcggcggcgggggcggcgatgttccactgcatccccctgtggcggtgcaaccgtcatgtggagagcatcgacaagcgccactgctcgctggtctacgtccccgaggagatctaccgctatgcccggagcctggaggagctgctgctggacgccaaccagctccgcgagctgcccgagcaatttttccagctagtcaaattacgaaagcttggacttagtgataatgaaattcagcggctccctccagaaatagcaaacttcatgcagctggtggaactagatgtgtctcgaaatgagattcctgaaattccagaaagcatttcattctgtaaagcactgcaggtagctgacttcagcggaaacccactgactaggttgccagaaagctttcctgaattacagaatttaacatgtctttctgtaaatgacatctcactacagtctctacctgaaaatattggcaatctttataacctggcttcactggaactgagagagaatcttcttacatatcttcctgactctcttacccagctgcgaagactagaagaacttgatttaggaaacaatgaaatatataatttgccagaatcaattggagccctcttacatctaaaagatctctggttggatggaaatcaactgtcagaattacctcaggaaataggaaatctgaagaacctgctgtgtttagatgtctctgaaaacaggttggaaagacttcctgaagaaatcagtggcctgacttcattaacggatttagtcatttcccagaacttattagaaacgattccggatggcattggaaaactaaagaaactgtcaatcttgaaggtggatcagaatagactcacacagttgcctgaagcagttggggaatgtgaaagtctcactgagttagttcttacagaaaatcagctcctgaccctgcctaaaagcattggaaaactaaagaagttgagcaacttgaatgcagacagaaataaattagtgtccttaccaaaagagatcggcgggtgctgcagcctcactgtgttctgtgtacgtgacaacagactaactcggatacctgcagaggtgtcacaggcaacagaacttcatgtcctggatgtggcagggaacaggttgctgcatctacctttatccctgactgccttgaagttgaaggctctgtggctatctgacaaccagtcccagcccctgcttacattccagacagacacagactacaccacaggagagaagattttaacctgtgtcttacttcctcagctgccttctgaacctacttgtcaagagaatctgcctcgctgtggtgcactggagaacttggtaaatgatgtctctgatgaagcctggaacgagcgtgctgtcaacagagtcagtgcgatccgatttgtggaggatgagaaagatgaagaagacaatgagacgagaacacttctaaggcgagccactccacacccaggggagttaaagcacatgaaaaagacagtggagaatttacggaatgacatgaatgctgctaaaggactggactcaaacaaaaacgaggtcaatcatgccattgaccgagtgaccacttctgtgtagagtttcacctccaagttttacctcctgtgtcttcctctgctgtcgagacgttcctgtctgcttcccgggagcctcacgtgctccttgtcctaaccagcccccgcgcgccatcttcccgtggagtgtggggaagctgctgtctcccaggaagtgccttactcatcccgcaaccagtcagcgcaccagtggtctcccggtgtgattttttttttttttaatttcagttgtttgtaataagtagaatacactactgtaaacatacgacctttgtttttgtcttatgttggggtaaaggaaagcaggaaggggaatttttatcctcctcccttccgtaaagtgctgggatattttgaatcccccaagttcccttggacctactgatgagagatagttttatgtatggggaaaaatggatactttttaaaccttttttggcagctcagatggtgtaaattttaaaattttgtataggtatttcataacaaaaatatgtatttcttttttgttattttatcttgaaaacggtacatattttagtatttgtgcagaaaaacaagtcctaaagtatttgtttttatttgtaccatccacttgtgccttactgtatcctgtgtcatgtccaatcagttgtaaacaatggcatctttgaacagtgtgatgagaataggaatgtggtgttttaaagcagtgttgcattttaatcagtaatctacctggtggatttgtttttaaccaaaaagatgaattatcaatgatttgtaattatatcagttgattttttttgaaaagatgaaccaaaggatttgactgctaatattttattccttacactttttttctgaataagtctctcataatgagtgcagtgtcagactgtgcctactctgatggtatgtgccatttgtaaaataaaatagagcagaaaaacacaaaaagagaacactggttcagacattcagtgggcaagtaaattatggactgcaaaataatgatttttattcaagaaagctttaaaagttttatatccagatatacaaccacaataaagcaaaataacctactatcaaaatagaaatgttgctatctttataagtgcaatttaatttgtaaatagagtttgaatcaaagtatcacaaaatactgcttcaagatttaattttaaatctgctaatttaagggatattgggaaaagttttggtgtgtttctgttgatttcttttttgtatgctgtgataaaagagaaatgaaaagtgccagtcactgtgtggtgtctaggaaaatcatatatatttttttctccaagaaataaattcatcctggacattggc

SEQ ID NO: 1288 - DNA, 869 bp, Homo sapiens
ggacagagcggcccggtcgccggcatggtttctccgtcctgctgcagccggcgggaggcagccagtccaggcgcccgctagcttcggcggcgacccagacggggaaagcggaaggaatgtcgcgtgcaagcaggcagctggtgtggaagaatggcggtgagccattcagtgaaggagcggaccatctctgagaacagcctgatcatcctactgcagggcctccagggccgggtaaccactgtggacctgcgggatgagagcgtggcccacggacgcatagacaatgtcgatgctttcatgaacatccgcctggccaaagtcacctacacggaccgttgggggcatcaggtcaagctggatgacctctttgtgacaggccgcaatgtccgctacgtccacatcccagatgacgtgaacatcacctcgaccattgagcagcagctgcagattatccatcgggtgcgaaactttggtggcaagggccaaggccggtgggaatttcccccaaaaaactgtaagtgaggccctcagcaagccctggccccaactcggagtcctccagtgatctccagagctagttccctgccctcacaccctgtctggtacccgagaagaaagcagggccaggccagaagctggtgtccaacagacaccacctgtcaaagctgcctttcacagggttccacctcccagactcactctgggacccagaatcctatatgtggccttggggtaggtgacaatccccctttttgatgatctgaatctctgacttattgattatggaacctgtcaagtagttttcaactctcccagtgaggataattaaacatgctcagcctgagccaccaaaaaaaaaaaaaaaaaaa

SEQ ID NO: 1289 - DNA, 1130 bp, Homo sapiens
gcacgagggtgctgactggcttgcgtctctgccactttctttcagcttagtggcgcgcggcgcgcgacgaccgccgggagcgtgtgcagcggcggcggcggaagtggccggcgagcccggtccccgccggcaccatgcttcccttgtcactgctgaagacggctcagaatcaccccatgttggtggagctgaaaaatggggagacgtacaatggacacctggtgagctgcgacaactggatgaacattaacctgcgagaagtcatctgcacgtccagggacggggacaagttctggcggatgcccgagtgctacatccgcggcagcaccatcaagtacctgcgcatccccgacgagatcatcgacatggtcaaggaggaggtggtggccaagggccgcggccgcggaggcttgcagcagcagaagcagcagaaaggccgcggcatgggcggcgctggccgaggtgtgtttggtggccggggccgaggtgggatcccgggcacaggcagaggccagccagagaagaagcctggcagacaggcgggcaaacagtgagcgcccacccagaccggctgctgcgccccctcctgccagggtggcgattccgctccacagtctcggacggatctgctcagaaaggaagaggcaggcgccagggggaacccccttcgtgttttgtgaccctcccttttaggtgaagcccctttttcttgctaaaaccggcaattctccggttagaaatgttacttggtgttttttggttttgtgaaacggccgtcccaaagctggctggattcctagaagagtctgtgttgaaggcatctttcaagccctcgctctggttctcagggcagcattttccaggcgggtttgttttgcatttcttggagcctctccgagcagcaaccagacgggagatttttattttaagctgttcatgctgggactgacagcctgcagggtttccttgggcgcggccccaaaattgccttcaaaacaaacccgggacggttgaaagccttcgaaccgtgcaggggatgcctcgggccctggcccttcgcttcctctcttgtgttatggaaataaaaacaaataaaactacacactgcacaaaaaaaaaaaaaaaaaaaa

SEQ ID NO: 1290 - DNA, 789 bp, Homo sapiens
gagaagagcactgattggctgaggcagaaaagtgcccctgcctcggcgctttcggttttggctgggatcatccgcggcggccgggctcgtggggcgcctggagtgagggttctggttcccgccggcgaggattgttaaaatgagtcttcggaagcaaacccctagtgacttcttaaagcaaatcatcggacgaccagttgtggtaaaattaaattctggagtggattatcgaggggtcctggcttgcctggatggctacatgaatatagccctggagcagacagaagaatatgtaaatggacaactgaagaataagtatggggatgcatttatccgaggaaacaatgtgttgtacatcagtacacagaagagacggatgtgaagacaccaagagagcaacgcttttcatagttggatatatttttttatgaattttttctaatttttgcttcttttgtgatacaatttgtcctctttttataatagttggtgatttttcactgacatgtgagtaagataaatgtatacaattgtggatttaattgtgaaatgttctttcacttgtaagtttcagtcattttcttttacctcgttgtcagtgtacagaatgctaaaataattaaaaaaagacaaaatatacctcttcctacaagattatttaacttaagtttcgagaagtgtcatttcatttgacttgcttttcttatccagctaaaatgatgcatatattttatatattgtatggacatataattaaaacattttggaggaatcctcctttattgcaaa

SEQ ID NO: 1291 - DNA, 1386 bp, Homo sapiens
gccccatctccttgggctgcccgtgcttcgtgctttggactaccgcccagcagtgtcctgccctctgcctgggcctcggtccctcctgcacctgctgcctggatccccggcctgcctgggcctgggccttggttctccccatgacaccacctgaacgtctcttcctcccaagggtgtgtggcaccaccctacacctcctccttctggggctgctgctggttctgctgcctggggcccaggggctccctggtgttggcctcacaccttcagctgcccagactgcccgtcagcaccccaagatgcatcttgcccacagcaccctcaaacctgctgctcacctcattggagaccccagcaagcagaactcactgctctggagagcaaacacggaccgtgccttcctccaggatggtttctccttgagcaacaattctctcctggtccccaccagtggcatctacttcgtctactcccaggtggtcttctctgggaaagcctactctcccaaggccacctcctccccactctacctggcccatgaggtccagctcttctcctcccagtaccccttccatgtgcctctcctcagctcccagaagatggtgtatccagggctgcaggaaccctggctgcactcgatgtaccacggggctgcgttccagctcacccagggagaccagctatccacccacacagatggcatcccccacctagtcctcagccctagtactgtcttctttggagccttcgctctgtagaacttggaaaaatccagaaagaaaaaataattgatttcaagaccttctccccattctgcctccattctgaccatttcaggggtcgtcaccacctctcctttggccattccaacagctcaagtcttccctgatcaagtcaccggagctttcaaagaaggaattctaggcatcccaggggaccacacctccctgaaccatccctgatgtctgtctggctgaggatttcaagcctgcctaggaattcccagcccaaagctgttggtctgtcccaccagctaggtggggcctagatccacacacagaggaagagcaggcacatggaggagcttgggggatgactagaggcagggaggggactatttatgaaggcaaaaaaattaaattatttatttatggaggatggagagaggggaataatagaagaacatccaaggagaaacagagacaggcccaagagatgaagagtgagagggcatgcgcacaaggctgaccaagagagaaagaagtaggcatgagggatcacagggccccagaaggcagggaaaggctctgaaagccagctgccgaccagagccccacacggaggcatctgcaccctcgatgaagcccaataaacctcttttctctg

SEQ ID NO: 1292 - DNA, 2060 bp, Homo sapiens
ctctatcgacgagtctggtagctgagcgttgggctgtaggtcgctgtgctgtgtgatcccccagagccatgcccgagatagtggatacctgttcgttggcctctccggcttccgtctgccggaccaagcacctgcacctgcgctgcagcgtcgactttactcgccggacgctgaccgggactgctgctctcacggtccagtctcaggaggacaatctgcgcagcctggttttggatacaaaggaccttacaatagaaaaagtagtgatcaatggacaagaagtcaaatatgctcttggagaaagacaaagttacaagggatcgccaatggaaatctctcttcctatcgctttgagcaaaaatcaagaaattgttatagaaatttcttttgagacctctccaaaatcttctgctctccagtggctcactcctgaacagacttctgggaaggaacacccatatctctttagtcagtgccaggccatccactgcagagcaatccttccttgtcaggacactccttctgtgaaattaacctatactgcagaggtgtctgtccctaaagaactggtggcacttatgagtgctattcgtgatggagaaacacctgacccagaagacccaagcaggaaaatatacaaattcatccaaaaagttccaataccctgctacctgattgctttagttgttggagctttagaaagcaggcaaattggcccaagaactttggtgtggtctgagaaagagcaggtggaaaagtctgcttatgagttttctgagactgaatctatgcttaaaatagcagaagatctgggaggaccgtatgtatggggacagtatgacctattggtcctgccaccatccttcccttatggtggcatggagaatccttgccttacttttgtaactcctactctactggcaggcgacaagtcactctccaatgtcattgcacatgaaatatctcatagctggacagggaatctagtgaccaacaaaacttgggatcacttttggttaaatgagggacatactgtgtacttggaacgccacatttgcggacgattgtttggtgaaaagttcagacattttaatgctctgggaggatggggagaactacagaattcggtaaagacatttggggagacacatcctttcaccaaacttgtggttgatctgacagatatagaccctgatgtagcttattcttcagttccctatgagaagggctttgctttacttttttaccttgaacaactgcttggaggaccagagattttcctaggattcttaaaagcttatgttgagaagttttcctataagagcataactactgatgactggaaggatttcctgtattcctattttaaagataaggttgatgttctcaatcaagttgattggaatgcctggctctactctcctggactgcctcccataaagcccaattatgatatgactctgacaaatgcttgtattgccttaagtcaaagatggattactgccaaagaagatgatttaaattcattcaatgccacagacctgaaggatctctcttctcatcaattgaatgagtttttagcacagacgctccagagggcacctcttccattggggcacataaagcgaatgcaagaggtgtacaacttcaatgccattaacaattctgaaatacgattcagatggctgcggctctgcattcaatccaagtgggaggacgcaattcctttggcgctaaagatggcaactgaacaaggaagaatgaagtttacccggcccttattcaaggatcttgctgcctttgacaaatcccatgatcaagctgtccgaacctaccaagagcacaaagcaagcatgcatcccgtgactgcaatgctggtggggaaagacttaaaagtggattaaagacctgcgtattgatgattttagagatttctcttttttaaatggaattcgtaaagaaatataaaacttcagctcacaattaaaactgtctttttagttttggctttttattgttttgttggtgattttactgaaataaagatgagctacttcttc

SEQ ID NO: 1293 - DNA, 894 bp, Homo sapiens
cagtctcaatgggggcactggggctggagggcaggggtgggaggctccaggggaggggttccctcctgctagctgtggcaggagccacttctctggtgaccttgttgctggcggtgcctatcactgtcctggctgtgctggccttagtgccccaggatcagggaggactggtaacggagacggccgaccccggggcacaggcccagcaaggactggggtttcagaagctgccagaggaggagccagaaacagatctcagccccgggctcccagctgcccacctcataggcgctccgctgaaggggcaggggctaggctgggagacgacgaaggaacaggcgtttctgacgagcgggacgcagttctcggacgccgaggggctggcgctcccgcaggacggcctctattacctctactgtctcgtcggctaccggggccgggcgccccctggcggcggggacccccagggccgctcggtcacgctgcgcagctctctgtaccgggcggggggcgcctacgggccgggcactcccgagctgctgctcgagggcgccgagacggtgactccagtgctggacccggccaggagacaagggtacgggcctctctggtacacgagcgtggggttcggcggcctggtgcagctccggaggggcgagagggtgtacgtcaacatcagtcaccccgatatggtggacttcgcgagagggaagaccttctttggggccgtgatggtggggtgagggaatatgagtgcgtggtgcgagtgcgtgaatattgggggcccggacgcccaggaccccatggcagtgggaaaaatgtaggagactgtttggaaattgattttgaacctgatgaaaataaagaatggaaagcttcagtgctgccgataaa

SEQ ID NO: 1294 - DNA, 848 bp, Homo sapiens
cagtctcaatgggggcactggggctggagggcaggggtgggaggctccaggggaggggttccctcctgctagctgtggcaggagccacttctctggtgaccttgttgctggcggtgcctatcactgtcctggctgtgctggccttagtgccccaggatcagggaggactgggtttcagaagctgccagaggaggagccagaaacagatctcagccccgggctcccagctgcccacctcataggcgctccgctgaaggggcaggggctaggctgggagacgacgaaggaacaggcgtttctgacgagcgggacgcagttctcggacgccgaggggctggcgctcccgcaggacggcctctattacctctactgtctcgtcggctaccggggccgggcgccccctggcggcggggacccccagggccgctcggtcacgctgcgcagctctctgtaccgggcggggggcgcctacgggccgggcactcccgagctgctgctcgagggcgccgagacggtgactccagtgctggacccggccaggagacaagggtacgggcctctctggtacacgagcgtggggttcggcggcctggtgcagctccggaggggcgagagggtgtacgtcaacatcagtcaccccgatatggtggacttcgcgagagggaagaccttctttggggccgtgatggtggggtgagggaatatgagtgcgtggtgcgagtgcgtgaatattgggggcccggacgcccaggaccccatggcagtgggaaaaatgtaggagactgtttggaaattgattttgaacctgatgaaaataaagaatggaaagcttcagtgctgccgataaa

SEQ ID NO: 1295 - DNA, 6148 bp, Homo sapiens
atggcgggggcctggctcaggtgggggctcctgctctgggcagggctcctcgcgtcctcggcgcacggccggctgcggaggatcacctacgtggtgcacccgggccccggcctggcagccggcgccttgcccctgagcgggcccccgcgttcgcggacattcaacgtcgcgctcaacgccaggtacagccgcagctcggcggctgccggcgcccccagccgtgcctcccccggggtcccctcggagaggacccggcgcacgagcaagccgggcggcgcggccctgcaggggctcagaccgccgccgccgccgccgccggagcctgcgcgtcccgcggtccccggcgggcagctccaccccaatcccggcggccacccggcagccgccccgttcaccaaacaaggcaggcaagttgtgcgctccaaggtgccgcaggagacccagagcggcggaggctctaggctgcaggttcaccagaagcagcagctgcagggggtcaatgtctgtggagggcggtgctgtcatggctggagtaaggcccctggctcccagaggtgcaccaaacctagctgtgttccgccatgtcagaatggagggatgtgtctccggccacaactctgtgtgtgtaaaccagggaccaagggcaaagcctgtgaaacaatagctgcccaggacacctcgtcaccagtctttggagggcagagtcctggggctgcttcctcgtggggccctcctgagcaagcagcaaagcatacttcatctaagaaggcagacactctaccaagagtcagccctgtggcccagatgaccttaaccctcaagccgaagccttcagtgggactcccccagcagatacattctcaagtgactcctctttcttcccagagtgtggtgattcaccatggccagacccaggaatacgtgctcaagcccaagtactttccagcccagaaggggatttcaggagagcagtccactgaaggttctttccctttaagatatgtgcaggatcaagttgcggcaccttttcagctgagtaaccacactggccgcatcaaggtggtctttactccgagcatctgtaaagtgacctgcaccaagggcagctgtcagaacagctgtgagaaggggaacaccaccactctcattagtgagaatggtcatgctgccgacaccctgacggccacgaacttccgagtggtaatttgccatcttccatgtatgaatggtggccagtgcagttcaagggacaaatgtcagtgccctccaaatttcacaggaaaactttgtcagatcccagtccatggtgccagcgtgcctaaactttatcagcattcccagcagccaggcaaggcgttggggacgcatgtcatccattcaacacataccttgcctctgaccgtgactagccagcaaggagtcaaagtgaaatttcctcctaacatagtcaatatccatgtgaaacatcctcctgaagcttccgtccagatacatcaggtttcaagaattgatggcccaacaggccagaagacaaaagaagctcaaccaggccaatcccaagtctcgtaccaagggcttcctgtccagaagacccagaccatacattccacatactcccaccagcaggtcattcctcacgtctaccccgtggctgctaagacacagcttggccggtgcttccaggaaaccattgggtcacagtgtggcaaagcgctccctggcctttcaaagcaagaggactgctgtggaactgtgggtacctcctggggctttaacaaatgccagaaatgccccaagaaaccatcttatcatggatacaaccaaatgatggaatgcctaccgggttataagcgggttaacaacaccttttgccaagatattaatgaatgtcagctacaaggtgtatgccctaatggtgagtgtttgaataccatgggcagctatcgatgtacctgcaaaataggatttgggccggatcctaccttttcaagttgtgttcctgatccccctgtgatctcggaagagaaagggccctgttaccgacttgtcagttctggaagacagtgtatgcaccctctgtctgttcacctcaccaagcagctctgctgttgtagtgtgggcaaggcctggggcccacactgtgagaaatgtccccttccaggcacagctgcttttaaggaaatctgtcctggtggaatgggttatacggtttctggcgttcatagacgcaggccaatccatcaccatgtaggtaaaggacctgtatttgtcaagccaaagaacactcaacctgttgctaaaagtactcatcctccacctctcccagccaaggaagagccagtggaggccctgaccttctcccgggaacacgggccaggagtggcggagccagaagtggcaactgcaccccctgaaaaggaaataccttcattggatcaagagaaaaccaaacttgagcctggtcaaccccagctgtctccaggcatttccactattcatctgcatccacagtttccaggtatagtgattgaaaaaacatcacctcctgtgcctgttgaagtagctcctgaagcttctacgtctagtgccagccaagtgattgctcctactcaagtgacagaaatcaatgaatgtactgtgaaccctgatatctgtggagcaggacactgcattaacctaccagtgagatatacctgtatatgctacgagggctacaggttcagtgaacaacagaggaaatgtgtggatattgatgagtgtactcaggtccaacacctctgctcccagggccgctgtgaaaacaccgagggaagtttcttgtgcatttgcccagcaggatttatggccagtgaggagggtactaactgcatagatgttgacgaatgcctgaggccggacgtctgtggggaggggcactgtgtcaatactgtgggggccttccggtgtgaatactgtgacagcgggtaccgcatgactcagagaggccgttgtgaggatattgatgaatgtttgaatccaagcacttgtccagatgagcagtgtgtgaattctcctggatcttaccagtgcgttccctgcacagaaggattccgaggctggaatggacagtgccttgatgtggacgagtgcctggaaccaaacgtctgcgcaaatggtgattgttccaaccttgaaggctcctacatgtgttcatgccacaaaggctatacccggactccggaccacaagcactgtagagatattgatgaatgtcagcaagggaatctatgtgtaaacgggcagtgcaaaaataccgagggctccttcaggtgcacctgtggacaggggtaccagctgtcggcagctaaagaccagtgtgaagacattgatgaatgccagcaccgtcatctctgtgctcatgggcagtgcaggaacactgagggctcttttcaatgtgtgtgtgaccagggttacagagcatctgggcttggagaccactgtgaagatatcaatgaatgcttggaggacaagagtgtttgccagagaggagactgcattaatactgcagggtcctatgattgtacttgtccggatggatttcagctagatgacaataaaacatgtcaagatattaatgaatgtgaacatccagggctctgtggtccgcaaggggagtgcctaaacacagagggttctttccattgtgtctgccagcagggtttctcaatctctgcagatggccgtacgtgtgaagatattgatgaatgtgtaaacaacactgtttgtgacagtcacgggttttgtgacaatacagctggctccttccgctgcctctgttatcagggctttcaagccccacaggatgggcaagggtgtgtggatgtgaatgaatgtgaactgctcagtggggtgtgtggtgaagccttctgtgaaaacgtggaagggtccttcctgtgcgtgtgtgctgatgaaaaccaagagtacagccccatgactgggcagtgccgctcccggacctccacagatttagatgtagatgtagatcaacccaaagaagaaaagaaagaatgctactataatctcaatgacgccagtctctgtgataatgtgttggcccccaatgtcacgaaacaagaatgctgctgtacatcaggcgcgggatggggagataactgcgaaatcttcccctgcccggtcttgggaactgctgagttcactgaaatgtgtcccaaagggaaaggttttgtgcctgctggagaatcatcttctgaagctggtggtgagaactataaagatgcagatgaatgcctactttttggacaagaaatctgcaaaaatggtttctgtttgaacactcggcctgggtatgaatgctactgtaagcaagggacgtactatgatcctgtgaaactgcagtgctttgatatggatgaatgtcaagaccccagtagttgtattgatggccagtgtgttaatacagagggctcttacaactgcttctgtactcaccccatggtcctggatgcgtcagaaaaaagatgtatacgaccggctgagtcaaacgaacaaatagaagaaactgatgtctaccaagatttgtgctgggaacatctgagtgatgaatacgtgtgtagccggcctcttgtgggcaagcagacaacgtacactgagtgctgctgtctgtatggagaggcctggggcatgcagtgtgccctctgccccctgaaggattcagatgactatgctcagctgtgtaacatccccgtgacgggacgccggcagccatatggacgggacgccttggttgacttcagtgaacagtatactccagaagccgatccctacttcatccaagaccgttttctaaatagctttgaggagttacaggctgaggaatgcggcatcctcaatggatgtgaaaatggtcgctgtgtgagggtccaggaaggttacacctgcgattgctttgatgggtatcacttggatacggccaagatgacctgtgtcgatgtaaatgaatgcgatgagttgaacaaccggatgtctctctgcaagaatgccaagtgcattaacaccgatggttcctacaagtgtttgtgtctgccaggctacgtgccttctgacaagccaaactactgcactccgttgaataccgccttgaatttagagaaagacagtgacctggagtgaaacagaatctacataacctaagcccatatactctgcactgtgtaaaggaaaagggagaaatgtattatacttgagacattgcacctaccccggaaggctggaaatacagaaacagcatggagttgcaagtcctctgaagacaatgagaggatttaggatgagcccgataggtgtggcagaccaaatggacatttctctaaaaaaccagtatatatagtctgttcatatgtaaaattcaatggaagagaggtggaacagtgctgttattttaaacagaaggttgtattattatgttgttttgtttttttactattgcttgattaaatttggcatttaaatagtggtggaaatattttatataattttcattttttggttgtgcagttccttggctactgtttttcttttacttcagttttttaaaaatctcaaatgaaaaagtcttcgatacaatattgttaagctgtattataagtattgttacacagggttatgcaattcccggcctggagcatttttgaaattcaaattgtctgtcctgtggagcaggcagtgattttgttccaaaactttgtatacacatttggagaaaagtactttatattttcagtgttttgtctgattttaatgtccgttcttagccaagctgctagcaggtgttaattggatccctttccttcactgaaatggaagagtttataagcttacgttagtattgtaatatgtaaagtaagcccaacaaaaatttttaaaaatttgatgatccccaatatatctaccattgtatgttaaataaatcaccatttttgtagaaaaaattctacctgagagtaattgtcaatgagtacatgtgtataagttgtatcccactctccccacttttatcttttccagtggtcttctgttaatgtagtgtcttttacaagttaatcattaaatttgttagatcttgttatgggctaaaaaaaaaaaaaaaaaa

SEQ ID NO: 1296 - DNA, 4064 bp, Homo sapiens
atgcccgggccccgaggggctgctggcggcctggcccctgagatgcgcggggcgggggcggcggggctgctggcgctgctgctgctgctgctgctgctgctgctgggcctgggcggcagggtcgagggggggccggccggcgagcggggcgcaggcgggggcggggcgctggcccgcgagcgcttcaaggtggtctttgcgccggtgatctgcaagcggacctgtctcaagggccagtgtcgggacagttgtcagcagggctccaacatgacgctcatcggagagaacggccacagcacagacacgctcacgggctccggcttccgcgtggtggtgtgccctctcccctgcatgaatggcggccagtgctcctcgcgaaaccagtgcctgtgtcccccggacttcactgggcgcttctgccaggtgcccgcaggaggagccggtgggggtaccggcggctcaggccccggcctgagcaggacaggggccctgtccacaggggcgctgccgcccctggctccggagggcgactctgtggccagcaagcacgccatctacgccgtccaggtgatcgctgaccctcctgggcccggggaggggcctcctgcccagcacgcagccttcctggtgcccctaggcccgggacagatctcagcagaagtgcaggccccgccccccgtggtgaatgtgcgcgtccatcacccgcccgaggcctcagtccaggtgcaccgcattgagagctcgaacgccgagagcgcagccccctcccagcacctgctgccgcaccccaagccctcgcacccccggccgcccacccagaagcccctgggccgctgctttcaggacactctgcccaagcagccgtgtggcagcaaccccctccccggcctcaccaagcaggaagactgctgcggtagcatcggcactgcctggggccagagcaagtgccacaagtgtccccagctgcagtacacaggagtgcagaagccagggcctgtacgtggggaagtgggcgctgactgtccccagggctacaagaggcttaacagcacccactgccaggacatcaacgagtgcgcaatgccgggcgtgtgtcgccatggtgactgcctcaacaaccctggctcctatcgctgtgtctgcccacctggccatagtttaggcccctcccgtacacagtgcattgcagacaaaccggaggagaagagcctgtgtttccgcctggtgagccctgagcaccagtgccagcacccactgaccacccgcctgacccgccagctctgctgctgcagtgtcggcaaggcctggggcgcgcggtgtcagcgctgcccaacagatggcaccgctgcgttcaaggagatctgcccagctgggaagggataccacattctcacctcccaccagacgctcaccattcagggcgagagtgacttttcccttttcctgcaccctgacgggccacccaagccccagcagcttccggagagccctagccaggctccaccacctgaggacacagaggaagagagaggggtgaccacggactcaccggtgagtgaggagaggtcagtgcagcagagccacccaactgccaccacgactcctgcccggccctaccccgagctgatctcccgtccctcgcccccgaccatgcgctggttcctgccggacttgcctccttcccgcagcgccgtagagatcgctcccactcaggtcacagagactgatgagtgccgactgaaccagaacatctgtggccacggagagtgcgtgccgggcccccctgactactcctgccactgcaaccccggctaccggtcacatccccagcaccgctactgcgtggatgtgaacgagtgcgaggcagagccctgtggcccggggaggggcatctgcatgaacaccggcggctcctacaattgccactgcaaccgcggctaccgcctgcacgtgggcgccggggggcgctcgtgcgtggacctgaacgaatgcgccaagccccacctgtgcggcgacggcggcttctgcatcaactttcccggtcactacaagtgcaactgctaccccggctaccggctcaaagcctcccggcctcctgtgtgcgaagacatcgacgagtgccgggacccaagctcttgcccggatggcaaatgcgagaacaagcccgggagcttcaagtgcatcgcctgtcagcctggctaccgcagccaggggggcggggcctgtcgcgacgtgaacgagtgcgccgagggcagcccctgctcgcctggctggtgcgagaacctcccgggctccttccgctgcacctgtgcccagggctacgcgcccgcgcccgacggccgcagttgcttggatgtggacgagtgtgaggctggggacgtgtgtgacaatggcatctgcagcaacacgccaggatctttccagtgtcagtgcctctctggctaccatctgtccagggaccggagccactgcgaggacattgatgagtgtgacttccctgcagcctgcattgggggtgactgcatcaataccaatggctcctacagatgtctttgcccccaggggcatcggctggtgggtggcaggaaatgccaagacatagatgagtgcagccaggacccgagcctgtgccttccccatggggcctgcaagaaccttcagggctcctatgtgtgtgtctgcgatgagggcttcactcccacccaggaccagcacggttgtgaggaggtggagcagccccaccacaagaaggagtgctacctgaacttcgatgacacagtgttctgcgacagcgtattggccaccaacgtgacccagcaggagtgctgctgctctctgggggccggctggggcgaccactgcgaaatctacccctgcccagtctacagctcagccgagttccacagcctctgcccagacggaaagggctacacccaggacaacaacatcgtcaactacggcatcccagcccaccgtgacatcgacgagtgcatgttgttcgggtcggagatttgcaaggagggcaagtgcgtgaacacgcagcctggctacgagtgctactgcaagcagggcttctactacgacgggaacctgctggaatgcgtggacgtggacgagtgcctggacgagtccaactgccggaacggagtgtgtgagaacacgcgcggcggctaccgctgtgcctgcacgccccctgccgagtacagtcccgcgcagcgccagtgcctgagcccggaagagatggagcgtgccccggagcggcgcgacgtgtgctggagccagcgcggagaggacggcatgtgcgctggccccctggccgggcctgccctcaccttcgacgactgctgctgccgccagggccgcggctggggcgcccaatgccgaccgtgcccgccgcgcggcgcggggtcccattgcccgacatcgcagagcgagagcaattccttctgggacacaagccccctgctgttggggaagcccccaagagatgaggacagttcagaggaggattcagacgagtgtcgctgcgtgagtggccgctgcgtgccgcggccgggcggcgccgtgtgcgagtgtcccggcggcttccagctcgacgcctcccgcgcccgctgcgtggatatcgacgagtgccgagagctgaaccagcgcgggctgctgtgcaagagcgagcgctgcgtgaacaccagcggctccttccgctgcgtctgcaaagccggcttcgcgcgcagccgcccgcacggggcctgcgttccccagcgccgccgctgacgccgccgacgccgccctcggcccagacctcggtgatcactgagggatttccgcgagctcggcctcacttctgccccgacttgtggctcggacccagggaccttcagggcccgcagaccctcccggcgccttgagacccgaggcgcccctaccggcccccctccccggttagcgggcggttgtaaggtctccggcgggcgctgcctgccttcctcccagagggtgtttcctagaaactgataaatcagatcgtgcctctttacccttggctttcgaaaaaaaaaaaaaaaaaa

SEQ ID NO: 1297 - DNA, 3541 bp, Homo sapiens
ccaggtttctgggagtagcaatgaggttcagccttgcagtcacaaaggcaccactaaaaggcacaagtaatggcaggtaatgaggccttacttggagcagtttagagtacttcccacgtgtggtgacgcatgccacacactcaccaccaccaccactgccacaaatgaagtgcacactccactgctcctgtcctcaggaacctggaagcccccacctggtgtccgaggtgtggctcccactttaagcgtggggcacctcctctccggcctcaaacctaccggagctcccagcaggctgcggcacatctgacggctggaaactagaacccctgggtggggactccttaaggctcctcccggaagcgtagggacctcgctgcccacacgcccctccctttcctcctctggcgtcctggggtctgaggtgggcgtggccagaccagctttaggtccggggagtgtctcgccagcggcagcacacccctgtaagtggtggccagggctgccgtggcaaaatgagctgtcaactttaggttgacaggggtgtggccgcgaccgcaagggcttttgttgccgggtggacccaacagggatgggctgctggggacagctgctggtgtggttcggagccgcgggcgccattctctgctctagcccggggtcccaggagacttttctgcggtcctcgcccctgccgctggcaagtcccagcccccgggacccgaaagtcagcgccccgcctagtatcttggagccagcctccccgctgaattctccgggcaccgaggggtcttggctgttttctacctgcggggccagcggccggcatgggcccacacagacacaatgtgacggggcgtacgcggggaccagcgtggtggtgaccgtgggggccgccgggcagctgagaggcgtgcagctgtggcgcgtgccgggccctggccagtatctgatctcagcctacggagccgcgggcggcaaaggcgccaagaaccacctgtcgcgggcgcatggcgtcttcgtctcagcaatcttctccctcggtctcggggagtcgctgtacatcctggtggggcagcagggagaggacgcctgtcccggaggtagcccggagagccagctcgtctgcctcggggagtctcgagccgttgaagagcacgcggcgatggatgggagcgaaggggtcccggggtcgcggcgctgggcgggaggtggcgggggtggcgggggcgccacctacgttttccgggtgcgcgctggcgagctggaaccgttgctggtggcggccggaggcggcggtcgggcctacctgaggccgcgggaccgaggccggactcaggcctcccccgagaaactggagaaccgctcggaggcgcccgggagcggcgggagaggcggggcggcaggtggtgggggcggctggacgtcgcgggctccctctccgcaggccggccgctcactgcaggagggggcggagggcggccagggctgctccgaggcttgggcgacccttggctgggccgcggccggcggcttcgggggcggcggcggggcctgcactgcgggcggaggcggcggcggctacagggggggcgacgcttcagagactgacaacctctgggctgatggggaagatggagtatccttcatacaccccagcagcgagctcttcctgcagcctctggcagtcaccgagaaccacggagaggtagagatccgaaggcacctcaactgcagtcactgccctttgagagactgccaatggcaggcagagctccagctggctgaatgcctgtgcccagaaggcatggagctagctgtggataacgtcacctgcatggacctgcacaagcccccaggccctctggttctgatggtggctgtggtggcaacctcaacactgagcctccttatggtgtgtggggtcctgattctggtgaagcagaagaagtggcagggcctgcaggagatgaggctgccgagccctgagcttgagctgagcaagcttcgaacctctgccatcaggacagcccccaatccctattattgccaggtggggcttggcccggcccagtcctggcctctgccaccaggtgtcaccgaggtttccccagccaatgttactctgctcagagccctgggccatggtgcctttggggaggtgtatgagggactggtaattggccttcctggggactccagtcccctgcaggtagctatcaagaccctgccagaactctgctcgcctcaggatgagctggatttcctcatggaggccctcatcatcagcaagtttcgccatcagaacattgtgcggtgtgtggggctcagcctcagggccacccctcgcctcattctgctggaactgatgtctggaggggacatgaagagtttcctgaggcacagtcggccacacctgggccagccatcacctctggtcatgcgggacctgctgcaactggcccaggacatagcccagggctgccactacctggaggaaaatcacttcatccacagggatattgccgcccggaactgcctgctgagctgcgctggacccagccgagtggccaagattggggactttgggatggcacgagatatctaccgggccagttattaccgcaggggggaccgggccttgctcccagtcaagtggatgcccccagaggccttcctggagggcatcttcacatccaagacagattcctggtcttttggggtgctgctctgggagatcttctcactgggctacatgccctatcctgggcgcaccaaccaggaggtgctggacttcgtcgttggaggaggccggatggaccctcctaggggctgcccagggcctgtgtaccgcatcatgacccagtgttggcagcacgagcctgagctccgccctagctttgccagcatcttggagcgtctgcagtactgcactcaggacccggatgtgctgaattcactcctgccaatggagctggggcccaccccagaggaggaagggacttctgggctggggaacagatctttggagtgcctaagacccccacagccccaggaactgagtccagagaagttgaaaagctggggaggtagccctcttggcccctggctgtcctctggcctcaagcccctcaaatccaggggcctccaacctcagaacctttggaatcccacttatcgctcctgagccccaaggggccctgagggtaaggactgaggcactgagggtccctccctatactcctcaggctcctgggtggcctgttatgccagcggcctctgttccctgcagtctgtgctgtgtgtctgggcctgtctcggggctggcctggcagcgctgcacttgccatgctggaaaccagcccaggcctcccagggaagggcccagccacttccagcttttgatcttggggccagaggccgccttacacacaccccaggtgtccatggggagcactggattgctctcccattatgagcatccttcatctgggcagaccccccaccctgcagatgcttctaataaaaagctcttctcatc

SEQ ID NO: 1298 - DNA, 3358 bp, Homo sapiens
ccaggtttctgggagtagcaatgaggttcagccttgcagtcacaaaggcaccactaaaaggcacaagtaatggcaggtaatgaggccttacttggagcagtttagagtacttcccacgtgtggtgacgcatgccacacactcaccaccaccaccactgccacaaatgaagtgcacactccactgctcctgtcctcaggaacctggaagcccccacctggtgtccgaggtgtggctcccactttaagcgtggggcacctcctctccggcctcaaacctaccggagctcccagcaggctgcggcacatctgacggctggaaactagaacccctgggtggggactccttaaggctcctcccggaagcgtagggacctcgctgcccacacgcccctccctttcctcctctggcgtcctggggtctgaggtgggcgtggccagaccagctttaggtccggggagtgtctcgccagcggcagcacacccctgtaagtggtggccagggctgccgtggcaaaatgagctgtcaactttaggttgacaggggtgtggccgcgaccgcaagggcttttgttgccgggtggacccaacagggatgggctgctggggacagctgctggtgtggttcggagccgcgggcgccattctctgctctagcccggggtcccaggagacttttctgcggtcctcgcccctgccgctggcaagtcccagcccccgggacccgaaagtcagcgccccgcctagtatcttggagccagcctccccgctgaattctccgggcaccgaggggtcttggctgttttctacctgcggggccagcggccggcatgggcccacacagacacaatgtgacggggcgtacgcggggaccagcgtggtggtgaccgtgggggccgccgggcagctgagaggcgtgcagctgtggcgcgtgccgggccctggccagtatctgatctcagcctacggagccgcgggcggcaaaggcgccaagaaccacctgtcgcgggcgcatggcgtcttcgtctcagcaatcttctccctcggtctcggggagtcgctgtacatcctggtggggcagcagggagaggacgcctgtcccggaggtagcccggagagccagctcgtctgcctcggggagtctcgagccgttgaagagcacgcggcgatggatgggagcgaaggggtcccggggtcgcggcgctgggcgggaggtggcgggggtggcgggggcgccacctacgttttccgggtgcgcgctggcgagctggaaccgttgctggtggcggccggaggcggcggtcgggcctacctgaggccgcgggaccgaggccggactcaggcctcccccgagaaactggagaaccgctcggaggcgcccgggagcggcgggagaggcggggcggcagggggcgacgcttcagagactgacaacctctgggctgatggggaagatggagtatccttcatacaccccagcagcgagctcttcctgcagcctctggcagtcaccgagaaccacggagaggtagagatccgaaggcacctcaactgcagtcactgccctttgagagactgccaatggcaggcagagctccagctggctgaatgcctgtgcccagaaggcatggagctagctgtggataacgtcacctgcatggacctgcacaagcccccaggccctctggttctgatggtggctgtggtggcaacctcaacactgagcctccttatggtgtgtggggtcctgattctggtgaagcagaagaagtggcagggcctgcaggagatgaggctgccgagccctgagcttgagctgagcaagcttcgaacctctgccatcaggacagcccccaatccctattattgccaggtggggcttggcccggcccagtcctggcctctgccaccaggtgtcaccgaggtttccccagccaatgttactctgctcagagccctgggccatggtgcctttggggaggtgtatgagggactggtaattggccttcctggggactccagtcccctgcaggtagctatcaagaccctgccagaactctgctcgcctcaggatgagctggatttcctcatggaggccctcatcatcagcaagtttcgccatcagaacattgtgcggtgtgtggggctcagcctcagggccacccctcgcctcattctgctggaactgatgtctggaggggacatgaagagtttcctgaggcacagtcggccacacctgggccagccatcacctctggtcatgcgggacctgctgcaactggcccaggacatagcccagggctgccactacctggaggaaaatcacttcatccacagggatattgccgcccggaactgcctgctgagctgcgctggacccagccgagtggccaagattggggactttgggatggcacgagatatctaccgggccagttattaccgcaggggggaccgggccttgctcccagtcaagtggatgcccccagaggccttcctggagggcatcttcacatccaagacagattcctggtcttttggggtgctgctctgggagatcttctcactgggctacatgccctatcctgggcgcaccaaccaggaggtgctggacttcgtcgttggaggaggccggatggaccctcctaggggctgcccagggcctgtgtaccgcatcatgacccagtgttggcagcacgagcctgagctccgccctagctttgccagcatcttggagcgtctgcagtactgcactcaggacccggatgtgctgaattcactcctgccaatggagctggggcccaccccagaggaggaagggacttctgggctggggaacagatctttggagtgcctaagacccccacagccccaggaactgagtccagagaagttgaaaagctggggaggtagccctcttggcccctggctgtcctctggcctcaagcccctcaaatccaggggcctccaacctcagaacctttggaatcccacttatcgctcctgagccccaaggggccctgagggtaaggactgaggcactgagggtccctccctatactcctcaggctcctgggtggcctgttatgccagcggcctctgttccctgcagtctgtgctgtgtgtctgggcctgtctcggggctggcctggcagcgctgcacttgccatgctggaaaccagcccaggcctcccagggaagggcccagccacttccagcttttgatcttggggccagaggccgccttacacacaccccaggtgtccatggggagcactggattgctctcccattatgagcatccttcatctgggcagaccccccaccctgcagatgcttctaataaaaagctcttctcatc

SEQ ID NO: 1299 - DNA, 589 bp, Homo sapiens
agcccgacctcaccaggagaacatgcagctcggcactgggctcctgctggccgccgtcctgagcctgcagctggctgcagccgaagccatatggtgtcaccagtgcacgggcttcggagggtgctcccatggatccagatgcctgagggactccacccactgtgtcaccactgccacccgggtcctcagcaacaccgaggatttgcctctggtcaccaagatgtgccacataggctgccccgatatccccagcctgggcctgggcccctacgtatccatcgcttgctgccagaccagcctctgcaaccatgactgacggctgccctcctccaggcccccggacgctcagcccccacagcccccacagcctggcgccagggctcacagctgcccctccctcgagactggccagcccacctctcccggcctctgcagccaccgtccagcaccgcttgtcctagggaagtcctgcgtggagtcttgcctcaatctgctgccgtccaagcctggggcccatcgtgcctgccgccccttcaggtcccgacctccccacaataaaatgtgattggatcgtgtggtacaaaaaaaa

SEQ ID NO: 1300 - DNA, 1352 bp, Homo sapiens
ttagggtagaagaaaaggttttatttttctttctcacattggaaaaaatgaaaactttcggacccatgaaattttattacattttgccaaaaacagaaccaataacataagtattcaaagttatgtaaagataattatttaatatgaacattatgatggtgagagggaccacggagcaaggggctgccttgcaggcctgccttccagctttgctacagggaccagaagcgggagctgagcgcaggggaggcaggcggaggccatgggcagcgaggcgggtgcgccaaagggcgccagttccggagctgctgggcctgggctgcaggagggcggagctggggccgcaaggctggtgccggccgacaaacgacgcggcgcgggcgagtgggcggaggcggctgcggggaaggctgggctgccgcgggacgcggtgaagatagcctgcggagtgtccgggctgaacacggttgcagcactcccagtagaccaggagctccgggaggcagggccggccccacgtcctctgcgcaccaccctgagttggatcctctgtgcgccacctgagttggatccagggctagctgctgttgacctccccactcccacgctgccctcctgcctgcagccatgacgcccctgctcaccctgatcctggtggtcctcatgggcttacctctggcccaggccttggactgccacgtgtgtgcctacaacggagacaactgcttcaaccccatgcgctgcccggctatggttgcctactgcatgaccacgcgcacctctgcagccgaagccatatggtgtcaccagtgcacgggcttcggagggtgctcccatggatccagatgcctgagggactccacccactgtgtcaccactgccacccgggtcctcagcaacaccgaggatttgcctctggtcaccaagatgtgccacataggctgccccgatatccccagcctgggcctgggcccctacgtatccatcgcttgctgccagaccagcctctgcaaccatgactgacggctgccctcctccaggcccccggacgctcagcccccacagcccccacagcctggcgccagggctcacagctgcccctccctcgagactggccagcccacctctcccggcctctgcagccaccgtccagcaccgcttgtcctagggaagtcctgcgtggagtcttgcctcaatctgctgccgtccaagcctggggcccatcgtgcctgccgccccttcaggtcccgacctccccacaataaaatgtgattggatcgtgtggtacaaaaaaaaaaaaaaaaaaaaaaaaaaaaaaaaaaaaaaaaaaaaaaaaaaaaaaaaaaaaaaaa

SEQ ID NO: 1301 - DNA, 4724 bp, Homo sapiens
ggggccggggcaggcctggggcggggcctgcggtgagctcgcgctgggcgggctgttccgggggcgggactgggctgggcctgcggtgagcatcaggcgatgcggcacgggtgctgcgggacacacagacacgcctacgattagactcaggcaggcacctaccggcgagcggccgcgggtgactcccaggcgcggcggtacctcacggtggtgaaggtcacagggttgcagcactcccagtagaccaggagctccgggaggcagggccggccccacgtcctctgcgcaccaccctgagttggatcctctgtgcgccacctgagttggatccagggctagctgctgttgacctccccactcccacgctgccctcctgcctgcagccatgacgcccctgctcaccctgatcctggtggtcctcatgggcttacctctggcccaggccttggactgccacgtgtgtgcctacaacggagacaactgcttcaaccccatgcgctgcccggctatggttgcctactgcatgaccacgcgcacctactacacccccaccaggatgaaggtcagtaagtcctgcgtgccccgctgcttcgagactgtgtatgatggctactccaagcacgcgtccaccacctcctgctgccagtacgacctctgcaacggcaccggccttgccaccccggccaccctggccctggcccccatcctcctggccaccctctggggtctcctctaaagcccccgaggcagacccactcaagaacaaagctctcgagacacactgctacaccctcgcacccagctcaccctgcctcaccctccacactccctgcgacctcctcagccatgcccagggtcaggactgtgggcaagaagacacccgacctcccccaaccaccacacgacctcacttcgaggccttgacctttcgatgctgtgtgggatcccaaaagtgtccggctttgatgggctgatcagcccctcgcctgtccagggctatttatggggaggggcccagtcaggcagggagcactgagcagatgggagctgtggccaagcccaccttctgggaagccctaggagaggcccctgcctcagtctgcccctggtgtgctggggcagggggaagacaaggaatgcccgcaggtggggtggtggggagactcttaggaggaaaggctcctccaggcctagtcacgcttcctactgaggccaggagctgccaggaccggtacgggatcagggctgtgggaggagggcctttggcaccggcccctgtgctaggaagtctgccaggcccgagttggagccaccccctgcaggggagggggcggctctgcctcagcaggccccagggcccccgaagtcacagaagctttttcgggtccagcaaggggtgtgtgtcctctcagtcaaaccccttgacgtttcccaccccctcacggggagggcaccaggcctgaagctggcaggagctagggccatgctatatttggtgggtcctggacgctgacccggccagcgctattctgggcagggagggaaaggggcagagcaggtggtcccccgagtcctggtccccaaccacagcaggacccagccgagcaaggcaaaagacgcaggactgggggatgcgcgcacaggctgggggttgggagcagcctggggccggcgcgggcctgggcgtgggaaggcggagcatgccaccctctcgtggccgtgcgggggcgggagtggggagggtggggtggggagggcggagacccagcccctcccccgcagcgggatgcgcacagtgagtgggtccctccatcaccttccacctggggatgcacccactgggagggcagggtggaagccccagctgggtgtgtggactcccagggaccccaccccaggcctgggaagcaggggtcagcccaacacgcaccaatccatccccgatgcaggtagcccagggagcacctgcccctgctgtgaatggggcattcgggggcgtgagaccttttggtgccagcggtcacgctgcacctgaggcccccacctgaccagtgctcccagctctggtgtcctgagaaacccttcaagccatcccgcatgggcaggatggtgacatatccatgtggtaggattgtcccggccccaaagtatggccctggtcaggggagcccctgctggaaattgcatctccagagctttgatgcaggacccctgggggatcagggaatgagggtctccaccccaggggtctccttgcagtgagtctatatgcaggcctgcgttctgctcctggggctggttctgagtgcccagcttcagtctcctgagaacatgaggatgggagggggcagagtcttgctgagggcacacccagttcccgctggaggaggacagtgccagtcttctgcaaagggaccttgggtgggaacgggcccggagcgggaggaacgtgactccccagagggaagatgggcatcatactgggcccagagctgggaaggagttgctgccagcacagggtgggcctggactcccctcgcccctacccccagtggttgtggctgtagccctaagcctggagagcaggaccggcccggggtgtctgggaggctgccaggtgcctcccagagctcccaagggcccccacctgcaagtgccagcctcagggcagtgcccaaatgaggccctctcagctgcagccagcgatgccttgggatgcttaccgggagggaggcggctttgggctcctaagtccttgggagaggctgggagcagtcactgcgcggcttgcgcaagcccattgtcgggttgggtggcttcctcagccagggctgggagggactccaggatcaggtcctccctgtctcgagtctcagtggggtgatggggaggagacctggccacccatggctcaggggcagctgagaacaaggacctgctggagctggaagtgctgtggtgttgaggggtggggtgggcagcttctcacacctgcctcctgcctccttctgtccacctttccaccaccctgacctgtcccagccccacacatggttctgcctggctggcctgcccttggcacctggcgtagagcacacagaaggcactcagctaatgctgggcaggcccactcatggggagtgcgtggctgtgcagcaccagggaaccggcacagcagcgccggcagaaatcacagcagtaaacttgtccgggttgtatgcatcaaggtggcgatggacgtgggtccccccactgcactgtggccctgagcactgtatagcagcccggcaatgggagccattatcttgcccctttgacagaggaggacacagaggcacagggaggtgaagtagctgccccacactagtgcctcctcgctcactcaccaccccctgcaccacagtgcagccgcttctcccaccagctggggttccttggacccccaagcctgggaagggggaggtgagtttacaaaatggaaagcttaaaaggagaaaagtggaaccagaggtttgagaagccctgagtggtagagtaaggcctccagcgctgcctctgggtgcagggcagagtggcagaggagagggggagaggcactgggcaccatgggggcccagttcccacttcggggatctctctcgcagaaccgagggtccccttcatgggggtagatgcccagggctagctgttgccactgtctgtgtggacctgagtcctggacatgcccgagtgactcaggagtggctgcttgggcgggctctgtcaccctaggatgttatacattctgggaactggacaggagtggctgcttgggcgggctctggcaccctgggatgttatacattctgggaactggacaggagtggctgcttgggtgggctctggcaccctgggatgttatacattctgggaactgcaatcagccactagagaagtcggagctacaggaagtgaccctggggtgggacctggggacatggccaggtcagcatggggacacccggctccagcaggagctctggtctgtcctggggtctttgggggcagggctgcggccctgggcaggcttcctccaggcggaggtcctggggaagtgggggagccaggccagctgccgcctcccccactatgtagcatctgattcgtcatctctcatgaaggcgatttggttcataactctgaaactctgaaaaaggtcaaaagaagcagagaggccctcggtggatatgccagcttttctgccggtgctttctcccactactctgggtggtctgctctcctcttcaaacctcagctcgcagggagggcctgaatctgccagcccctcaggatctccttccctctgggccctccccagccttaaggagcctcccagacagaagggtggacagagccacctgggcagcccgagagacacacgggggtcctccctgtggacagccctgccagcttccgcccagccctgagcttcatttgcatcttgaggagtaaggggtggtgaaatgggaatgctggtctggctcagctggtcgtgggcataagtgcccgctgaatggatggcatctctccctcctgtcttatgttctggggtccaggtgcttcccagggccatgcccctgctgctaatgcttgccctaacccttaccctaaccagcgtccagcgtcgtctcaccgagccgtaaataaatcaacagattcgcattgtcaaaaaaaaaaaaaaaaaa

SEQ ID NO: 1302 - DNA, 843 bp, Homo sapiens
ggggcatcagcgatggcggctgcgtcggggtcggttctgcagcgctgtatcgtgtcgccggcagggaggcatagcgcctctctgatcttcctgcatggctcaggtgattctggacaaggattaagaatgtggatcaagcaggttttaaatcaagatttaacattccaacacataaaaattatttatccaacagctcctcccagatcatatactcctatgaaaggaggaatctccaatgtatggtttgacagatttaaaataaccaatgactgcccagaacaccttgaatcaattgatgtcatgtgtcaagtgcttactgatttgattgatgaagaagtaaaaagtggcatcaagaagaacaggatattaataggaggattctctatgggaggatgcatggcaatgcatttagcatatagaaatcatcaagatgtggcaggagtatttgctctttctagttttctgaataaagcatctgctgtttaccaggctcttcagaagagtaatggtgtacttcctgaattatttcagtgtcatggtactgcagatgagttagttcttcattcttgggcagaagagacaaactcaatgttaaaatctctaggagtgaccacgaagtttcatagttttccaaatgtttaccatgagctaagcaaaactgagttagacatattgaagttatggattcttacaaagctgccaggagaaatggaaaaacaaaaatgaatgaatcaagagtgatttgttaatgtaagtgtaatgtctttgtgaaaagtgatttttactgccaaattataatgataattaaaatattaaaaaaaaaaaaaaaaaaaaaaaaaaaaa

SEQ ID NO: 1303 - DNA, 886 bp, Homo sapiens
agtggatgattaatgaagtagcatctgaaaaacccaaggaaccaaatgtaggtggagcaacttccctgcaacacacgtcgaagctgctgcagtggctgttcttcccctccccttggaaaggcaccaaaagccagcctttggaagggctggtggactgtgcccttctttcccttcagagaaccagtgtccctgtgactccacccactcatctggccaccgttgccctgacctgccaggagcctggagaagatgaaggcatccgtggttctctccctccttggctacctggtggttccaagtggtgcttacatcttggggcgttgcacagtggctaagaaactccacgatggaggcctggattattttgagggctatagccttgagaactgggtgtgcctggcctacttcgagagcaagttcaaccccatggccatctacgagaacacacgtgagggctacactggctttggcctctttcagatgcgtggcagtgactggtgtggcgaccatggcaggaaccgctgccatatgtcatgttccgctttactgaatcctaatttagagaagacaattaaatgtgccaagaccattgtaaaaggaaaagaagggatgggagcatggcccacctggtcccggtactgccagtactccgataccctggcacggtggctggatggttgcaagctgtagccgcctgcatggcccctgcagcactcaccagttgcatcttgtgaatgaaggtgcttttctgcttgctgcttcagtcaatccttttgatgatctcaccactttaagagttccagatggaaaaagacaaaagtttgcttcatccggggatgcaggatgcagaataaaccaaactagttactcaaaaaaaaaaaaaaaa

SEQ ID NO: 1304 - DNA, 4995 bp, Homo sapiens
ccaaggtcagaatcgccacctgaggcctgaatatcagcgtaagatagtgtccaaagcagtcttaagaagaggtcccattaccccactctttccgccctaatggaggtctccagtttaggtaaataaaaggattgttgggaggtggagggaaagaactactatttccaacatgcattgcggaacgaaaggccttggccacactgttccttggaaactgtagtcttatggagaggaacatccaataccaaagcgggcacaattctcacggaaatccagtggatagattggagacctccgcgggcttatacatgtcaacagtaatggattggagtgttgttatgttctcctatcttgagagcagagactaggccaaaaaaagatacctacaactcctaggaagactacgattcccatccagccccacgagtctcgggcaagtagtcctctaagcctcacagcatggaaccacaggttactctaaatgtgacttttaaaaatgaaattcaaagctttctggtttctgatccagaaaatacaacttgggctgatatcgaagctatggtaaaagtttcatttgatctgaatactattcaaataaaatacctggatgaggaaaatgaagaggtatccatcaacagtcaaggagaatatgaagaagcgcttaagatggcagttaaacagggaaaccaactgcagatgcaagtccacgaagggcaccatgtcgttgatgaagccccacccccagttgtaggagcaaaacgactagctgccagggcagggaagaagccacttgcacattactcttcactggtgagagtcttgggatcagacatgaagaccccagaggatcctgcagtgcagtcgtttccacttgttccatgtgacacagaccagcctcaagacaagcccccagactggttcacaagctacctggagacgttcagagaacaagtggttaacgaaacggttgagaagcttgaacagaaattacatgaaaagcttgtcctccagaacccatccttgggttcttgtccctcagaagtctcaatgcctacttcagaagaaacattgtttttgccagaaaaccagttcagctggcatattgcttgcaacaactgccaaagaaggattgttggtgtccgctaccagtgtagcctatgcccatcctacaatatctgtgaagattgtgaagcagggccatatggccatgacactaaccacgtcctgctgaagttgcggagacctgttgtgggctcctctgaaccgttctgtcactcaaagtactctactcctcgtcttcctgctgctctggaacaagtcaggctccagaaacaggttgataagaactttcttaaagcagaaaagcaaaggttgcgagctgagaagaaacaacgtaaagcagaggtcaaggaacttaaaaagcagcttaaactccataggaaaattcacctgtggaattcaatccatggactccagagccccaagtctcctttaggccgacctgagagcttgctccagtctaataccctgatgctccctttgcagccctgtacctccgttatgccaatgctcagtgcagcatttgtggatgagaatttgcctgatgggactcaccttcagccaggaaccaagtttatcaaacactggaggatgaaaaatacaggaaatgtaaagtggagtgcagacacaaagctcaagttcatgtggggaaacctgactttggcttccacagaaaagaaggatgttttggttccctgcctcaaggccggccatgtgggagttgtatctgtggagttcattgccccagccttggagggaacgtatacttcccattggcgtctttctcacaaaggccagcaatttgggcctcgggtctggtgcagtatcatagtagatcctttcccctccgaagagagccctgataacattgaaaagggcatgatcagctcaagcaaaactgatgatctcacctgccagcaagaggaaacttttcttctggctaaagaagaaagacagcttggtgaagtgactgagcagacagaagggacagcagcctgcatcccacagaaggcaaaaaatgttgccagtgagagggagctctacatcccatctgtggatcttctgactgcccaggacctgctgtcctttgagctgttggatataaacattgttcaagagttggagagagtgccccacaacacccctgtggatgtgactccctgcatgtctcctctgccacatgacagtcctttaatagagaagccaggcttggggcagatagaggaagagaatgaaggggcaggatttaaagcacttcctgattctatggtgtcagtaaagaggaaggctgagaacattgcttctgtggaggaagcagaagaagacctgagtgggacccagtttgtgtgtgagacagtaatccgatcccttaccttggatgctgccccagaccacaaccctccttgcagacagaagtccttgcagatgacatttgccttgcctgaaggaccacttggaaatgagaaggaggagattatccatatcgctgaggaagaagctgtcatggaggaggaggaggatgaggaggatgaggaggaggaggatgagctcaaagatgaagttcaaagtcagtcctctgcttcctcagaggattacatcatcatcctgcctgagtgctttgataccagccgccccctgggggattctatgtacagctctgcgctctcacagccaggcctggagcgaggtgctgaaggcaagcctggggttgaggctgggcaggaaccagctgaggctggggaaagactccctggaggggagaaccagccacaggagcacagcataagtgacatcctcacgacctcacagactctggaaacagtgcccctaatcccagaggtagtggagcttccaccgtcactgcccaggagctctccttgtgtacatcatcatggttccccaggagtggatttaccagttaccataccagaagtttcttcagtccctgatcagatcagaggagagcccagaggctcatcaggacttgtaaacagcagacagaagagctatgaccactcaaggcaccatcatgggagcagcattgctggaggactggtgaagggggctttgtctgttgctgcctctgcatacaaggccctgtttgctgggccaccagtcactgcacagccaataatttctgaagatcagacagcagccctgatggcccatctctttgaaatgggattctgtgacaggcagctgaacctacggctgctgaagaaacacaattacaatatcctgcaggttgtgacagaacttcttcagttaaacaacaacgactggtacagccaacgctattgaggagtgaccttgtattaaataactgcctgctgctcagagatgatctttattctgtcattggggtatgggatagaagcccttgcttatttttaatctgatgaatctgtatagagcccatcgttgagttaccaagacaatacctgctacagtattttggggagcaaactaaagaccagaacttaaattttcactttagacattggatgaatagtatgaagacagtttttcagttgatttggataaaactattttagtgcattgacaagtgtaacttcaacttcatatagaaccatttttctttctgcttttattgaaactgagtatttttctttggctaatgtggattttttatggggatatctgttaattttcaggttttgaaagacattaacctcggaagttgtttttaagaattattctcataattcttattctcataatttctgtaatccacctcaagcttcatagttatttggcattgaaataacacccagagcatgatagaaatgttgttactcttcctctctcaaggagaaagtaattttcctgcaatacttaataattggcaccgttgctttctaaagactccatggtgcattcaagagtatccaacttcaagggaatctccgcatttcaatgaaaggaggaagagtgtgctgataaacctaccagcacctattgagcaatgtctattatagtaattttgcatacatttttatttaagggaaaaaatataggtattgtgaaatattttgctaatcttatagaaaaggaaaaaatcccgttatttaaagggaaaagtaaatttaacagttgccttttttcttaatgtcagggcagatcttattttacagtacagtgggggaaatagaaacatgtgaaaggcaaaaggcaggctcctaaattaatgtcagtgaagttcagggtgggcaaatgagtgtgtgtgaggtataggaaatgctgatgacttctttaatgcttgaagtccgttcacaggtatctagccctagaatgcctagaacaggaagaggcagctggtgttctgcaaaacttggacaggggcaaagttgctgaaaaagttttggtttaacccgaagataagtggaaaagagcttgtccatgaacccaggttctcactctgtttacagaagtgtgttgagtacagttggtgaaggaagaggtaacaaaaaatgctaaatattttatccatgaaaatgacttccagaaaaggaagaatatgaaccccagaccgaaggggaaaagatagttaatagtattatctaacctggttggtatttgtaatgaatggtgattttaattagtcattagccataatgatgtttatttacagtataactcctgaatgctacttaaataaaccaggattcaaactgcaagccagccaggccgttcattatttaaaacgttttaatcggggcttccgggtagaaggtggagcggcagggtgtaattgggttgatgggtgggacctgtcttgaccatcggagttttataatcgagggccaggagggcccgggttgctctcctggttatgtatgtacttgtacataaccacctaaagaatggtgaaataaatgttcttggaaattcctaaaaaaaaaaaaaaaaaaaaaa

SEQ ID NO: 1305 - DNA, 2454 bp, Homo sapiens
ttccggttcccagagtggggcacagcgaggcgctagggggaacgctggcctctgaaactagctctgggaccggggtctgcggccggcccctagctggccccgtctcccatccccagaagggtattcactggggattctgagctttggctactccagtttcccacgacacgatgttccctttctacagctgctggaggactggactgctactactactcctggctgtggcagtgagagaatcctggcagacagaagaaaaaacttgcgacttggtaggagaaaagggtaaagagtcagagaaagagttggctctagtgaagaggctgaaaccactgtttaataaaagctttgagagcactgtgggccagggttcagacacatacatctacatcttcagggtgtgccgggaagctggcaaccacacttctggggcaggcctggtgcaaatcaacaaaagtaatgggaaggagacagtggtagggagactcaacgagactcacatcttcaacggaagtaattggatcatgctgatctataaagggggtgatgaatatgacaaccactgtggcaaggagcagcgtcgtgcagtggtgatgatctcctgcaatcgacacaccctagcggacaattttaaccctgtgtctgaggagcgtggcaaagtccaagattgtttctacctctttgagatggatagcagcctggcctgttcaccagagatctcccacctcagtgtgggttccatcttacttgtcacgtttgcatcactggttgctgtttatgttgttggggggttcctataccagcgactggtagtgggagccaaaggaatggagcagtttccccacttagccttctggcaggatcttggcaacctggtagcagatggctgtgactttgtctgccgttctaaacctcgaaatgtgcctgcagcatatcgtggtgtgggggatgaccagctgggggaggagtcagaagaaagggatgaccatttattaccaatgtagattgcactttatatgtccagcctcttcctcagtcccccaaaccaaagctacacagccagatttctcaagcagtctcaactccagtccctcatctcacccttactattgctcttgctttccagtttgcttttgatttgcatcttctcactagtaaaactgccttccctttgttccttattttctgttttttctctagagaggtacagttgtaagtcagagttaatataatagggcctgtgaaaacagaggcttttgcattgtctcttgacatcagaagttacaataggcatatgggcaaaatggtgtagcaggctcactggccgtttgttttttaaacacattttcacaagtttttgagacactggatttctttaattaaaaaaaaaatgccaagaaacattatttatacagggttgattgctttcatgttgttattctgtaccctatagtagcctccatgagaatctggtatttcttgctgcttggaactactttgcagtgattacttggttgcagtccaagtactctcgtttagtctgagcctggagatgttctagacttgcttctcccacctctgagattaggacaggaaaaatgtgaaatttcccaattacaggattatacggtaccatcacatcatttgtggaaattggggtgactgtatagctgggattgggctaaggactgtggtcttatctgtccacatacagccaaaatgcctatccagaaatccagttcgttggaaaggaaaattggtactcctgtgccacaggggttccagaaaagggaagtcactttaccttgcggtggtgggatcctgatgtctttcatccatttgtagtaaaagctggtaaagcttttcttactcctggttccctaccagtatttctaaacatgtcgcactttctccacaggcatgtggttttgacctttttttcaatcttctagaaagggaacggaagcagaagtgggacatcgagggctctgctgtcctctgcgctgggtgtggaatgctgctgcacctgtcccttctgctggctcagggaagtgtcttcttgcccacatttctgtggggaaaggtttttaatcctctgatgcttccatcttcctgtttaggccatgtgcccagaaacctggactgatctttctttaatagtgaacccctgggccactgaagagtaacatggctccactggacacaaaagagggatggaatcaacaggcagggggccttttataagccttaggaaaagaaaatgaaactatttcatctttggacttttcaatactattggagtgatttttttctttctaaacagggaaaataatgttacaaaagcatcttttttgttatttgtttgcatccctcccccacaccctggtgttttaaaatgaagaaaaaaaaccatcaccttttgtacaaaaactcttaatgattaaaaaacaaaca

SEQ ID NO: 1306 - DNA, 2133 bp, Homo sapiens
tggggttccagttgcctctctcgggtcctgcccatgcctcccccgctcctaacccaactttagttcggtgttttcctcgggctttgtctctatcccagccccttctcccaagcggcgggggcgaacgctttgtttcctttaaagtcacttcttccctgggtttaaggtttcccgcgattccacctctggccggttgtcagtgtctgagggaagtagtctggatgaagtggtgtccaaagtcacatgtcagcatggatccgcatcctttttatttgacaagtttagaaacctgctgaagtggtatgctaaggagttcaaagacccactgctacaggagcccccagcctggtttaagtcctttctgttttgcgagcttgtgtttcagctgcctttctttcccattgcaacgtatgccttcctcaaaggaagctgcaagtggattcgaactcctgcaatcatctactctgttcacaccatgacaaccttaattccgatactctccacatttctgtttgaggatttctccaaagccagtggtttcaagggacaaagacctgagactttgcatgaacggttaacccttgtgtctgtctatgccccctacttactcatcccattcatacttttaattttcatgttgcggagcccctactacaagtatgaagagaaaagaaaaaaaaaatgaaggaaacaaccactggcccagggtagagatgcctacagggtggttgcttgttggatacaatacaaggaacactgctcagaacccacgtcttcagcagcatttgaaacactggcagcaatgcacaagagcaagatggtgtcaggaaccatgtcaaaccctcaccttcttccatttttttttttttttttaagacagtctcactctgttgcccaggctggagtaaagggcagtggcatgatctcggctcactgcaacctccgcctcctgggctcaagccatcttccttagcctcccaagtagctagaactacaggtgtgtaccaacacgtatggctaatttgttttgttttttttgtgtgtgtggagacagggttttgccatgttgcccaggttggtctcgaacgcctaggctcaagtgatctgcccacctcagtctccctaagtgctgggattacagacgtgaaccactgggcccagcccaaaccttcaccttctaagggcactgggatgaacggaccgatcggcttgagggtgggcaaaggggtgtgggctaggttataaggaagtggtaccaaataactgtgtgcctgagttccaccgcaagattactaaaagcaggaccagaccagaaactgctaaagaacatggcctgtttgacatgttcatgagtcacctgacccacagcatatatgcttgtgactaaaccctccactcctgattctcaagagtgtatcacctgtcagcaaaatgaatagtgggatattttgggccattttaaatgtgaaattttgcctctttaatgttaattcaaaactatatcaatgttttcttgttcccacctctaacccaaggaaaaaagagaaaacatactatgcaaaggaagtttaaacttaagttttccttaagggtcagcccaacaatgactttcagtcaaatggattaaactggaaaatgtttttgtttctgttgtaaacagatcatcctaggcgaaagttttttttgtttgtttgcttttaaattagtttatttctaaatcttagtcttccacatttctagaggccacctgacacaagtccctgtatctgaagtctagcatctcaaggctgatctggaagtgtgctagtatgctccctagtggataacttaatcttttaatacagttccgtcattcccatcttgttttcagaagagaaggtggctacagccaggcataacatatccactgtgtgcatagagggtctcttcacgttgatgcttggcattccatcagctttctctaagtctttgctcaagttcaaccttaaaatgatgttagacaacaggtcccagtcagttccctctattttcacccattttgctcacaagccatattggcccgattagtggtactgtctgactcacgtgtgtgatccaaataaaggtagctgctgaccaaaaaaaaaaaaaaaa

SEQ ID NO: 1307 - DNA, 1519 bp, Homo sapiens
gagaagcgaggttctcgttctgagggacaggcttgagatcggctgaagagagcgggcccaggctctgtgaggaggcaagggaggtgagaaccttgctctcagagggtgactcaagtcaacacagggaacccctcttttctacagacacagtgggtcgcaggatctgacaagagtccaggttctcaggggacagggagagcaagaggtcaagagctgtgggacaccacagagcagcactgaaggagaagacctgcctgtgggtccccatcgcccaagtcctgcccacactcccacctgctaccctgatcagagtcatcatgcctcgagctccaaagcgtcagcgctgcatgcctgaagaagatcttcaatcccaaagtgagacacagggcctcgagggtgcacaggctcccctggctgtggaggaggatgcttcatcatccacttccaccagctcctcttttccatcctcttttccctcctcctcctcttcctcctcctcctcctgctatcctctaataccaagcaccccagaggaggtttctgctgatgatgagacaccaaatcctccccagagtgctcagatagcctgctcctccccctcggtcgttgcttcccttccattagatcaatctgatgagggctccagcagccaaaaggaggagagtccaagcaccctacaggtcctgccagacagtgagtctttacccagaagtgagatagatgaaaaggtgactgatttggtgcagtttctgctcttcaagtatcaaatgaaggagccgatcacaaaggcagaaatactggagagtgtcataaaaaattatgaagaccacttccctttgttgtttagtgaagcctccgagtgcatgctgctggtctttggcattgatgtaaaggaagtggatcccactggccactcctttgtccttgtcacctccctgggcctcacctatgatgggatgctgagtgatgtccagagcatgcccaagactggcattctcatacttatcctaagcataatcttcatagagggctactgcacccctgaggaggtcatctgggaagcactgaatatgatggggctgtatgatgggatggagcacctcatttatggggagcccaggaagctgctcacccaagattgggtgcaggaaaactacctggagtaccggcaggtgcctggcagtgatcctgcacggtatgagtttctgtggggtccaagggctcatgctgaaattaggaagatgagtctcctgaaatttttggccaaggtaaatgggagtgatccaagatccttcccactgtggtatgaggaggctttgaaagatgaggaagagagagcccaggacagaattgccaccacagatgatactactgccatggccagtgcaagttctagcgctacaggtagcttctcctaccctgaataaagtaagacagattcttcactgtgttttaaaaggcaagtcaaataccacatgattttactcatatgtggaatctaaaaaaaaaaaaaaaaaaa

SEQ ID NO: 1308 - DNA, 1824 bp, Homo sapiens
ctgggggtcagagagaagggagaggcctccttctgaggggcggcttgataccggtggaggagctccaggaagcaggcaggccttggtctgagacagtgtcctcaggtcgcagagcagaggagacccaggcagtgtcagcagtgaaggttctcgggacaggctaaccaggaggacaggagccccaagaggccccagagcagcactgacgaagacctgcctgtgggtctccatcgcccagctcctgcccacgctcctgactgctgccctgaccagagtcatcatgtctctcgagcagaggagtccgcactgcaagcctgatgaagaccttgaagcccaaggagaggacttgggcctgatgggtgcacaggaacccacaggcgaggaggaggagactacctcctcctctgacagcaaggaggaggaggtgtctgctgctgggtcatcaagtcctccccagagtcctcagggaggcgcttcctcctccatttccgtctactacactttatggagccaattcgatgagggctccagcagtcaagaagaggaagagccaagctcctcggtcgacccagctcagctggagttcatgttccaagaagcactgaaattgaaggtggctgagttggttcatttcctgctccacaaatatcgagtcaaggagccggtcacaaaggcagaaatgctggagagcgtcatcaaaaattacaagcgctactttcctgtgatcttcggcaaagcctccgagttcatgcaggtgatctttggcactgatgtgaaggaggtggaccccgccggccactcctacatccttgtcactgctcttggcctctcgtgcgatagcatgctgggtgatggtcatagcatgcccaaggccgccctcctgatcattgtcctgggtgtgatcctaaccaaagacaactgcgcccctgaagaggttatctgggaagcgttgagtgtgatgggggtgtatgttgggaaggagcacatgttctacggggagcccaggaagctgctcacccaagattgggtgcaggaaaactacctggagtaccggcaggtgcccggcagtgatcctgcgcactacgagttcctgtggggttccaaggcccacgctgaaaccagctatgagaaggtcataaattatttggtcatgctcaatgcaagagagcccatctgctacccatccctttatgaagaggttttgggagaggagcaagagggagtctgagcaccagccgcagccggggccaaagtttgtggggtcagggccccatccagcagctgccctgccccatgtgacatgaggcccattcttcgctctgtgtttgaagagagcaatcagtgttctcagtggcagtgggtggaagtgagcacactgtatgtcatctctgggttccttgtctattgggtgatttggagatttatccttgctcccttttggaattgttcaaatgttcttttaatggtcagtttaatgaacttcaccatcgaagttaatgaatgacagtagtcacacatattgctgtttatgttatttaggagtaagattcttgcttttgagtcacatggggaaatccctgttattttgtgaattgggacaagataacatagcagaggaattaataatttttttgaaacttgaacttagcagcaaaatagagctcataaagaaatagtgaaatgaaaatgtagttaattcttgccttatacctctttctctctcctgtaaaattaaaacatatacatgtatacctggatttgcttggcttctttgagcatgtaagagaaataaaaattgaaagaataaaaaaaaaaaaaaaaaaa

SEQ ID NO: 1309 - DNA, 1626 bp, Homo sapiens
acttccgctttggaggcgaggacccgagcgagtgtagggggtgcggcgtctggtcagccaggggtgaattctcaggactggtcggcagtcaagccatcatgcctcgtggtcagaagagtaagctccgtgcccgtgagaaacgccgcaaggcccgagatgagacccggggtctcaatgttcctcaggtcactgaagcagaggaagaagaggccccctgctgttcctcttctgtttctgggggtgctgcttcaagctctcctgctgctggcattccccagaagcctcagagagccccaaccactgccgctgctgcggctgcgggtgtttcatccacaaaatctaaaaaaggtgccaagagccaccaaggtgagaaaaatgcaagttcctcccaggcctcaacatctactaagagcccaagcgaagatcctctaaccaggaagtcagggtcgttggtgcagttcctgttgtacaagtataaaataaaaaagtccgttacaaagggagaaatgctgaaaattgttggcaaaaggttcagggagcacttccctgagatcctcaagaaagcctctgagggcctcagtgttgtctttggccttgagctgaataaagtcaaccccaacggccacacttacaccttcatcgacaaggtagacctcactgatgaggaatccctgctcagttcctgggactttcccaggagaaagcttctgatgcctctcctgggtgtgatcttcttaaatggcaactcagctactgaggaagagatctgggaattcctgaatatgttgggagtctatgatggagaggagcactcagtctttggggaaccctggaagctcatcaccaaagatctggtgcaggaaaaatatctggagtacaagcaggtgcccagcagtgatcccccacgctttcaattcctgtggggtccgagagcctatgctgaaaccagcaagatgaaagtcctggagtttttggccaaggtaaatggtaccaccccctgtgccttcccaacccattacgaagaagctttgaaagatgaagagaaagccggagtctgagccagagttgtagccaggccttgcactactgccatagccaatcaatctcccaaagccaagtttacctgctgttctcacccccaatgaggtcttaggcagattctttactttgtaattcaaaaggcctgttaacctttgttcttgttatgcatgaataacttgttgactttttttttttctctttttcaactagtgtttcaacaggtttatttagattcagaatgtaaatttacaaatgatatagatcaccctgttattgctgtttttcagggacagtagaaagtgttttgttttttgagtgaaacaacttattaataaaaatccttaaatcacttttgtaatccaggacaagaaaatgtggcattagagtagaaatatctttggaaatgtgaaagaccccatagtgaaatatttgggatcagaagccagaggggtaaaagtggtcaattcttggtttacttcatttaatctttcttttcataaagatacatacctggatttgtttatgttattcaagaatgtgtgagaaattaaaccatagttagttaaaaaaaaaaaaaaaaaaaaa

SEQ ID NO: 1310 - DNA, 1949 bp, Homo sapiens
aataaaggggtctgagccggtcgcctgagcctgaaaagtgctgtcacgtcagcggaaggaggcgtcccagatcttctcagctgtcttggtgccagccttcctagtcttcctacccacactcctacctgctgtcacaggccacagccatcatgcctcggggtcacaagagtaagctccgtacctgtgagaaacgccaagagaccaatggtcagccacagggtctcacgggtccccaggccactgcagagaagcaggaagagtcccactcttcctcatcctcttctcgcgcttgtctgggtgattgtcgtaggtcttctgatgcctccattcctcaggagtctcagggagtgtcacccactgggtctcctgatgcagttgtttcatattcaaaatccgatgtggctgccaacggccaagatgagaaaagtccaagcacctcccgtgatgcctccgttcctcaggagtctcagggagcttcacccactggctctcctgatgcaggtgtttcaggctcaaaatatgatgtggctgccaacggccaagatgagaaaagtccaagcacttcccatgatgtctccgttcctcaggagtctcagggagcttcacccactggctcgcctgatgcaggtgtttcaggctcaaaatatgatgtggctgccgagggtgaagatgaggaaagtgtaagcgcctcacagaaagccatcatttttaagcgcttaagcaaagatgctgtaaagaagaaggcgtgcacgttggcgcaattcctgcagaagaagtttgagaagaaagagtccattttgaaggcagacatgctgaagtgtgtccgcagagagtacaagccctacttccctcagatcctcaacagaacctcccaacatttggtggtggcctttggcgttgaattgaaagaaatggattccagcggcgagtcctacacccttgtcagcaagctaggcctccccagtgaaggaattctgagtggtgataatgcgctgccgaagtcgggtctcctgatgtcgctcctggttgtgatcttcatgaacggcaactgtgccactgaagaggaggtctgggagttcctgggtctgttggggatatatgatgggatcctgcattcaatctatggggatgctcggaagatcattactgaagatttggtgcaagataagtacgtggtttaccggcaggtgtgcaacagtgatcctccatgctatgagttcctgtggggtccacgagcctatgctgaaaccaccaagatgagagtcctgcgtgttttggccgacagcagtaacaccagtcccggtttatacccacatctgtatgaagacgctttgatagatgaggtagagagagcattgagactgagagcttaaggcagggctggcactatttccttggccagggtaccttatggggccatatcctacagatcctcccatttctagggaggtctgaagtagaattttcactttatgttagaagagagtagtgagctttctaagtagtgcagtatagtagaggctggagggaacaagatatgtatctttcttttgttacacatgagtaacttgcagatttatgttttatctctgtcagttatcaacattgttcctgttaagtgaaggtttattttgcttcagattatacaattatcaataacatagctctcacattcatggctgtttaaccaatctgaaagttacggtttgggaattaataaaacaaagtcatacaacacattttctttgtaattgagaactagataacatggtaacagagaattgattttcatatgaatcttaactccacagtaaaatagttgacatcataatatgaagagaaagaaaaggaaaaacagaaatgtaaaagttgtttaattcttggtttgcctaattcgttttcctatttcttttcatacaaataaaggatacctggatttatttaggtta

SEQ ID NO: 1311 - DNA, 698 bp, Homo sapiens
ggcgccgccgcaaacgtcagtgtacgaggcagacggcggcagtgcggcttgctcttggaagttcaggctcggttgtcttttgggagccatggagagtgacttttatctgcgttactacgtggggcacaagggcaagttcggccacgagttcctggagtttgagtttcgaccggacgggaagttaagatatgccaacaacagcaattacaagaatgatgtcatgatcagaaaagaggcttatgtacataaaagcgtgatggaggaactgaagagaataattgacgacagtgaaattaccaaagaggatgatgcattgtggcctcctcctgaccgagtgggccggcaggagcttgaaatcgtcattggagatgaacacatttcttttacaacatcaaaaattggttcccttattgatgtcaatcaatccaaggatccagaaggcttacgagtattttattatcttgtccaggacctgaagtgtttggtcttcagtcttattggattacacttcaagattaaaccaatctagactgaatattggtgtggacatggggggtgggtgggagtagaaaattttgtgtatatcagggcagtatttttttatgaactataaatgattgtctttaataaatatgtgataaaatccaatttttattattttataaagacctgaacatgtgaaaaaaaaaaaaaaaaaa

SEQ ID NO: 1312 - DNA, 3201 bp, Homo sapiens
aaggcgcgggccccggcgcggcggggagggctcggccggaggggaggctgcggcgcgcggccggtcgctgcgggcccgggccccaagccgtgccgctccgctcgcccgggccccgccgaggccgctgcgcccccgcctcctcgcgggaggactcgctccaaactccctgaacttcggggacagtcccccgaagcggcgaaactctcagggttggcaaccctgcccagggacccccatcccgggcggcgctccggacgccctcccctcaccgcgcccccgcagacacgtgcctggactccgagggcttctggagccaccggccgggccacgatgctcatgaggaaagtgcccggcttcgtcccggcctccccgtgggggctgcggctgccgcagaagttcctcttcctcctcttcctctcgggcctggtcaccctgtgcttcggggccctcttcctgctgccccactcctctcgcctcaagcgcctcttcctggccccccggacccagcagcctggtctggaagtggtggctgaaatcgccggccatgccccggcccgcgagcaggagccgcctcccaacccggcccccgccgcgccggccccgggcgaggatgaccccagcagctgggccagtccccgccgcaggaaaggggggctgcggcgcacccgccccactggaccccgcgaggaggccacggcggcccggggcaatagcatcccggcctccaggcccggggacgagggcgtccctttccgctttgacttcaacgcattccggagccgtctccgccacccggtcctgggaacgagggccgatgagagtcaggagccccagagccaagtgcgagcccagcgggagaaaatcaaggagatgatgcagtttgcttggcagagctataagcgttatgcaatggggaaaaacgaactccgtccactaacaaaagatggctacgagggtaacatgttcggaggcctcagcggggcaacagtcattgactccctcgataccctctacctcatggagctgaaggaggagttccaggaggccaaggcctgggtgggagagagcttccacctgaacgtgagcggagaagcatccttgtttgaggtgaacatccgctacatcgggggactcctctcagccttctacctgacaggagaagaggtgttccgaataaaggccatcaggctgggagagaagctcctgccggcgttcaacacccccacgggaatcccaaagggcgtggtgagcttcaaaagtgggaactggggctgggccacagccggcagcagcagcatcttggcggagtttggatccctgcacttggaattcttacacctcactgaactctctggcaaccaggtcttcgctgaaaaggtcaggaacatccgcaaggtcctcaggaagatcgaaaagccctttggcctctaccccaacttcctcagcccagtgagtgggaactgggtgcaacaccatgtctcagttggaggactcggggacagtttttatgaatatttgatcaaatcctggttgatgtcgggcaagacagatatggaggctaaaaatatgtactacgaagccttggaggcgatagagacctacttgctgaatgtctctcccggggggctgacctacattgccgagtggcgaggggggattctggaccacaagatggggcacctggcctgtttctccgggggcatgatcgcccttggcgccgaggatgccaaggaagaaaagagggcccactaccgagagctcgcagcccagatcaccaagacgtgtcacgagtcatacgcccgctcagacaccaaacttgggcctgaggccttctggtttaactccggcagagaggccgtggccacccagctgagcgagagctactacatcctccggccagaggtggtggagagctacatgtacctgtggcgacagacccacaaccccatctacagggagtggggctgggaggtggtgctggccttggagaaatactgtcggacagaagccggtttctctgggatccaagacgtgtacagtagcacccccaaccacgacaacaagcagcagagcttctttctagcggagacactaaagtatctctatcttctgttctctgaagatgacttgctctccctggaagactgggtgttcaacaccgaggcccacccactcccggtgaaccactcagacagctccggcagagcctggggcagacactgaccccatctcctgccgccgccctggggccgccgcagggatgccttgccttttcaggatttgagactgttctcaaagggattgggaacgaaggccccatctcgggcagacccccagcagatgtgtcggacaagcaacttcttttcctctgtgaggagacaagacttggagactcagcgatgtcaggccagggccatggccacactggcccacacattcctttctacagagaatttctatgaagcccactcacttgccattccagggccaaaggaccggaggtttgcatatccgccccttgtatttgatttgcttccttttggtttcttggtttttgtttttgcttgattttgtcttttctctacagtttagttttgtcacaattacacatatagttttcaaaatcatgcactttctaaaatggtgtcatcctgaaaaacaaaacccagtgtttgcacacacacaaaatcttgaccccgttatctatattttaaatgctttttgcccaacactgaccctatgttcaactttgtgtcatttaccttataatttgaggaggggtttccctttgggcctcagtgttacaaattactagtgctattttcattattattgtaatggaaaaatctgtggactagaataaaagagtttattgaataagaaatatgattgggctcattgcacatcagtgactcctagaaaaaccattgcaatgttaccatcagaaataataatcagccagcagttgatttaaggtataatttagtaaacgattccaacttctattacctcccctgaaatcggtcctgatatattcgagaagcatgaggccagcccttcagatgcagttgtttatttatactcaggtttagattgggaagaggcccagggaggagcagcaacttgcctgaggtcacacagcccaaaaaaggcaaaggagagtctcgcccctgccgtctcctggccaccccagttgagtgt

SEQ ID NO: 1313 - DNA, 6279 bp, Homo sapiens
gtgtgtgtggaggccagtatgaagctgaaaaagcaggtgacagtgtgtggggctgccatcttctgtgtggcagtcttctcgctctacctcatgctggaccgagtgcaacacgatcccacccgacaccagaatggtgggaacttcccccggagccaaatttctgtgctgcagaaccgcattgagcagctggagcagcttttggaggagaaccatgagattatcagccatatcaaggactccgtgctggagctgacagccaacgcagagggcccgcccgccatgctgccctactacacggtcaatggctcctgggtggtgccaccggagccccggcccagcttcttctccatctccccgcaggactgccagtttgctttggggggccggggtcagaagccagagctgcagatgctcactgtgtcggaggagctgccgtttgacaacgtggatggtggtgtgtggaggcaaggcttcgacatctcctacgacccgcacgactgggatgctgaagacctgcaggtgtttgtggtgccccactctcacaatgacccaggctggatcaagacctttgacaagtactacacagagcagacccaacacatcctcaatagcatggtgtctaagctgcaggaggacccccggcggcgcttcctctgggcagaggtctccttcttcgccaagtggtgggacaacatcaatgtccaaaagagagcggcagtccgaaggctggtgggaaacgggcagctggagattgcgacaggaggctgggtgatgccagatgaggccaattcccactactttgcattgattgaccagctcatcgaaggacaccagtggctggagagaaatcttggtgcaaccccccgctctggctgggcagtggacccctttggatacagctccaccatgccttacctgctgcgccgtgccaacctcaccagcatgctgattcagagagtgcactatgccatcaagaagcactttgctgccacccacagcctagagttcatgtggaggcagacatgggactcggactccagcacagacatcttctgtcacatgatgcccttctacagctatgacgtcccccatacctgtggcccagatcccaagatctgctgccaatttgatttcaaacgcctgcctggtgggcgcatcaactgcccttggaaggtgccaccccgggccatcacagaggccaacgtggcagagagggcagccctgcttctggaccaataccggaagaagtcccagctgttccgaagcaacgtcctcctggtgcctcttggagatgacttccgatatgacaagccccaggagtgggatgcccagttcttcaactaccaacggctctttgacttcttcaacagcaggcctaacctccatgtgcaggcccagtttggcactctttctgactattttgatgccctgtacaagaggacaggggtggagccaggggcccggcctccagggtttcctgtgctgagcggggatttcttctcctatgcggaccgggaggatcattactggacaggctattacacttcccggcccttctacaagagcttagaccgagtcctggaagcccacctgcggggggcagaggttctgtacagcctggctgcagctcacgctcgccgctctggtctggctggccggtacccactgtctgatttcaccctcctgacggaagctcggcgcacattggggctcttccagcatcacgatgccatcactggcacggccaaggaggctgtggtggtggactatggggtcaggcttctgcgctcccttgtcaacctgaagcaggtcatcattcatgcagcccactatctggtgctgggggacaaggagacctaccactttgaccctgaggcgcccttcctccaagtggatgacactcgcttaagtcacgacgccctcccagagcgcacggtgatccagctggattcctcgcccaggtttgtggtcctattcaacccactggaacaggagcgattcagcatggtgtccctgctggtcaactctccccgcgtgcgtgtcctttcggaggagggtcagcccctggccgtgcagatcagcgcacactggagctctgccaccgaggcggtccctgacgtctaccaggtgtctgtgcctgtccgcctgccagccctgggcctgggcgtgctgcagctacagctgggcctggatgggcaccgcacgctgccctcctctgtgcgcatctacctgcacggccggcagctgtccgtcagcaggcacgaagcgtttcctctccgtgtcattgactctggcaccagcgacttcgccctcagcaaccgctacatgcaggtctggttctcaggccttactgggctcctcaagagcatccgaagggtggatgaggagcacgagcagcaggtggacatgcaggtccttgtctatggcacccgtacgtccaaagacaagagtggagcctacctcttcctgcccgatggcgaggccaagccctacgtccccaaggagccccccgtgctgcgtgtcactgaaggccctttcttctcagaggtggttgcgtactatgagcacattcaccaggcggtccggctttacaatctgccaggggtggaggggctgtctctggacatatcatccctggtggacatccgggactacgtcaacaaggagctggccctgcacatccatacagacatcgacagccagggtatcttcttcacagacctcaatggctttcaggtgcagccccgacggtatctgaagaagctccccctccaggccaacttctaccccatgccagtcatggcctatatccaggacgcacagaagcgcctcacgctgcacactgcccaggccctgggtgtctctagcctcaaagatggccagctggaggtgatcttggaccggcggctgatgcaggatgacaaccggggcctaggccaagggctcaaggacaacaagagaacctgcaaccgtttccgcctcctgctagagcggcgaaccgtgggcagtgaggtccaagatagccactctaccagctacccatccctcctcagccacctgacctccatgtacctgaacgccccggcgctcgctctgcctgtagccaggatgcagctcccaggccctggtctgcgctcatttcatcctctggcttcctcactgccctgtgacttccacctgctcaacctacgtacgctccaggctgaggaggacaccctaccctcggcggagaccgcactcatcttacaccgcaagggttttgactgcggcctggaggccaagaacttgggcttcaactgcaccacaagccaaggcaaggtagccctgggcagccttttccatggcctggatgtggtattccttcagccaacctccttgacgttactgtaccctctggcctccccgtccaacagcactgacgtctatttggagcccatggagattgctacctttcgcctccgcttgggttagggcttcttgtggcctgaagagaaagttcattcacagagactgcctcttaacatgaagatcattggacaagccacacgggtatcccatcccgatctgcctcccagaactgtgacacactgggctctgccctcattttctgtttattgctgctgctgtgttttcggcgcaacccacaaacccagtgatgggtaaatagggcagacgccagtgagatcagggagagaaggcccttggtcagagtgggcagtgccaggctctgctttgggttgtgagtggacacccaactgggcacaggctcaggcacccatcctttttccaaacagggatatagaagtggtggaagcagacagaagaggtaagggaggctaagtgggtaacagcccagcatcagggtcactgtggcaacagcaggctctaggggaatcctgtggttatgtagagactccatgtcctggtgtgatgagcaggatcagagtgactctgggaggacaggggtggggacccagagttagcagtggggatggagcagtagaaggaatcactgtttctcctaggagtctgaaggcctcgctgctttctgtgatggctttgcagtaagtgccgcctggcctgcatgcattggctaacaggctgcagaatggcaggaaggactcgctagagattgtcatggccagagatcataggtcacttcaggtagcaagacccctggcaaactgggcacttggcctatgtactgatttgtgggatggtggcaggggtgtggggtccttcaccctgcctgaattctctttggcttctgtgctctgtatgctgctgtccccaagggctctttcttattatggcagggagtggggattggtcctactttctttctctggaaaggaaagcctccaagactccatgtgcttgggcagcttgagaaggcgttcagcaccacgcctagcaggcagaccttgaagcctcacctttagtctatctgcagaggtattcagttcctggcacaggggactaggggcatgtagagtatatgaggaggcagtatggctgtgcaggagccttcatttcagcttcaattaatagggaagaatttatgatagctctatagatgctgaaaaggtatttcgtaagatttaaaatccatcccttattaaaactcttagtaaattaagtctggaaagaaacaccctaatctagataaaggtctgtttcagaaaccaacagtgatggcattctaaagagtcagacgccacaggcattcccattaaagtcagaaactagccaagggcaagctattattcagcagtgtcccggcactactaacccctgcaacaagccagatgaggaacataaggaagaattataattgtcattatttgtagacaataaaactgcctacctgtaaaacctaagaatcaactgaagacctgttaagagtattctgtaagtcaacccaatgatacacatcatgttcctgtccacatactggttttccccaaatcagctgataaattcagtgtaattccaatgagattgaaactttggaattgacagttctaaagtgcatttgggagagtgaatgtgtgagaacactaagaccactctgaacgatgataatgagttggggggtggactgctcgggggtgatcctgccagattcccagaggattctcacgccaccattacctcactcagtgtgacctggagggggtcagacagacgggagagtccagaaacagacccagggctacaggaatttagtatatggtaagagggatgttttaagtggggaaaaaggtggattatttaataaacagcacttttagacaactagctatcaaagctagatctcagctgggtgcgatggctcacgcctgtaatcccggcactttgggaggccaaggtgggtggatcacttgaggtcaggagttcgagaccagcctggccaagatggcgaaaccctgtgtctactaaaaatacaaaaactagccaggaatggtggcgcgcgcctgtaatcccagttacttaggaggctgaggcaggagaatcacatcaacctgggaggcggaggttgcagtgagcttagatcatgccaccatgccactgcactccagcctgggtgacacagccaaaaaaaaaaccactaagttagatctctacctcacagtgtccatacaaattagttccagagggaagatataccacaaaattactcaaaaatttttatacctctggtgtgggacggtcttttctaaactttaacatgagacttaaaagatataataagggaaaagataagcagatttcgcaaccaaaaaatatcgaaagtctctgtgtgatggaaaacatcaaggttaaaacacaaatgacagatatggaagaaaatatttgcagcacataaaaaaatcaacgagtacaattactttaggagaaaagcttgcttcagggtccttagagaaagtcactggggcctgccaagctgccacctaaagacaagagtgagagggctgagttcttccaggtcatcagagttgttgctgcccgtattaggccacacagtggaaccccatttatatcatagcagaagaaataggattatcaatgtgaactgcttagcatggtgcctggtatatacgagagctccacaaatgtgagctataatcctactagtaaaggatgctaagcagttccactgtggcaggtgtcatttgctagtagaatttgtaatcaaacaataggaggggaatctgtgaacgcctagaaaatgagcagaataaaggatattatctttggaagtcttaaaaaaaaaaa

SEQ ID NO: 1314 - DNA, 6279 bp, Homo sapiens; identical to SEQ ID NO: 1313

SEQ ID NO: 1315 - DNA, 1550 bp, Homo sapiens
cagggctgcgactggccggctccagcgggcggggcggcgagcgagtgctcgcggccacgtgaccgacgccaacatggcggcgcccagtggcgtccacctgctcgtccgcagaggttctcatagaattttctcttcaccactcaatcatatctacttacacaagcagtcaagcagtcaacaaagaagaaatttcttttttcggagacaaagagatatttcacacagtatagttttgccggctgcagtttcttcagctcatccggttcctaagcacataaagaagccagactatgtgacgacaggcattgtaccagactggggagacagcatagaagttaagaatgaagatcagattcaagggcttcatcaggcttgtcagctggcccgccacgtcctcctcttggctgggaagagtttaaaggttgacatgacaactgaagagatagatgctcttgttcatcgggaaatcatcagtcataatgcctatccctcacctctaggctatggaggttttccaaaatctgtttgtacctctgtaaacaacgtgctctgtcatggtattcctgacagtcgacctcttcaggatggagatattatcaacattgatgtcacagtctattacaatggctaccatggagacacctctgaaacatttttggtgggcaatgtggacgaatgtggtaaaaagttagtggaggttgccaggaggtgtagagatgaagcaattgcagcttgcagagcaggggctcccttctctgtaattggaaacacaatcagccacataactcatcagaatggttttcaagtctgtccacattttgtgggacatggaataggatcttactttcatggacatccagaaatttggcatcatgcaaacgacagtgatctacccatggaggagggcatggcattcactatagagccaatcatcacggagggatcccctgaatttaaagtcctggaggatgcatggactgtggtctccctagacaatcaaaggtcggcgcagttcgagcacacggttctgatcacgtcgaggggcgcgcagatcctgaccaaactaccccatgaggcctgaggagccgcccgaaggtcgcggtgacctggtgcctttttaaataaattgctgaaatttggctggagaacttttagaagaaacagggaaatgaccggtggtgcggtaacctgcgtggctcctgatagcgtttggaagaacgcgggggagactgaagagcaactgggaactcggatctgaagccctgctggggtcgcgcggctttggaaaaacaaatcctggccctggactcggtttcccagcgcggtcaacgcatctggaggggactggaggaaacccccttgttggaagagattccaagagaagcacggttttctctttcccttgccctgactgttggagtaaaaaacctcttaaatccattgtatcagaggtccttacctctctgacagttacagtgatctttgtatctgaactttgcacgtctgccgaaaaatccgaacctgttgactgggaaaaaaaaaaaaaaaaa

SEQ ID NO: 1316 - DNA, 3752 bp, Homo sapiens
ggccgtgcgagaggccgagcttgctgcattgcagccgccgcggcgccgctcggctcttcactcccaacaatggcggctccgagcccgagcggcggcggcggctccgggggcggcagcggcagcggcacccccggccccgtagggtccccggcgccaggccacccggccgtcagcagcatgcagggtaaacgcaaagcactgaagttgaattttgcaaatccacctttcaaatctacagcaaggtttactctgaatcccaatcctacaggagttcaaaacccacacatagagagactgagaacacacagcattgagtcatcaggaaaactgaagatctcccctgaacaacactgggatttcactgcagaggacttgaaagaccttggagaaattggacgaggagcttatggttctgtcaacaaaatggtccacaaaccaagtgggcaaataatggcagttaaaagaattcggtcaacagtggatgaaaaagaacaaaaacaacttcttatggatttggatgtagtaatgcggagtagtgattgcccatacattgttcagttttatggtgcactcttcagagagggtgactgttggatctgtatggaactcatgtctacctcgtttgataagttttacaaatatgtatatagtgtattagatgatgttattccagaagaaattttaggcaaaatcactttagcaactgtgaaagcactaaaccacttaaaagaaaacttgaaaattattcacagagatatcaaaccttccaatattcttctggacagaagtggaaatattaagctctgtgacttcggcatcagtggacagcttgtggactctattgccaagacaagagatgctggctgtaggccatacatggcacctgaaagaatagacccaagcgcatcacgacaaggatatgatgtccgctctgatgtctggagtttggggatcacattgtatgagttggccacaggccgatttccttatccaaagtggaatagtgtatttgatcaactaacacaagtcgtgaaaggagatcctccgcagctgagtaattctgaggaaagggaattctccccgagtttcatcaactttgtcaacttgtgccttacgaaggatgaatccaaaaggccaaagtataaagagcttctgaaacatccctttattttgatgtatgaagaacgtgccgttgaggtcgcatgctatgtttgtaaaatcctggatcaaatgccagctactcccagctctcccatgtatgtcgattgatatcgctgctacatcagactctagaaaaaagggctgagaggaagcaagacgtaaagaattttcatcccgtatcacagtgtttttattgctcgcccagacaccatgtgcaataagattggtgttcgtttccatcatgtctgtatactcctgtcacctagaacgtgcatccttgtaatacctgattgatcacacagtgttagtgctggtcagagagacctcatcctgctcttttgtgatgaacatattcatgaaatgtggaagtcagtacgatcaagttgttgactgtgattagatcacatcttaaattcatttctagactcaaaacctggagatgcagctactggaatggtgttttgtcagacttccaaatcctggaaggacacagtgatgaatgtactatgtctgaacatagaaactcgggcttgagtgagaagagcttgcacagccaacgagacacattgccttctggagctgggagacaaaggaggaatttactttcttcaccaagtgcaatagattactgatgtgatattctgttgctttacagttacagttgatgtttggggatcgatgtgctcagccaaatttcctgtttgaaatatcatgttaaattagaatgaatttatctttaccaaaaaccatgttgcgttcaaagaggtgaacattaaaatatagagacaggacagaatgtgttcttttctcctttaccagtcctatttttcaatgggaagactcaggagtctgccacttgtcaaagaaggtgctgatcctaagaatttttcattctcagaattcggtgtgctgccaacttgatgttccacctgccacaaaccaccaggactgaaagaagaaaacagtacagaaggcaaagtttacagatgtttttaattctagtattttatctggaacaacttgtagcagctatatatttccccttggtcccaagcctgatactttagccatcataactcactaacagggagaagtagctagtagcaatgtgccttgattgattagataaagatttctagtaggcagcaaaagaccaaatctcagttgtttgcttcttgccatcactggtccaggtcttcagtttccgaatctctttcccttcccctgtggtctattgtcgctatgtgacttgcgcttaatccaatattttgccttttttctatatcaaaaaacctttacagttagcagggatgttccttaccaaggatttttagccccaaatctctcatattcgctagtgtttaaaaggctaagaatagtggggcccagccgatgtggtaggtgataaagaggcatcttttctagagacacattggaccagatgaggatccgaaacggcagcctttacgttcatcacctgctagaacctctcgtagtccatcaccatttcttggcattggaattctactggaaaaaaatacaaaaagcaaaacaaaaccctcagcactgttacaagaggccatttaagtatcttgtgcttcttcacttacccattagccaggttctcattaggttttgcttgggcctccctggcactgaaccttaggctttgtatgacagtgaagcagcactgtgagtggttcaagcacactggaatataaaacagtcatggcctgagatgcaggtgatgccattacagaaccaaatcgtggcacgtattgctgtgtctcctctcagagtgacagtcataaatactgtcaaacaataaagggagaatggtgctgtttaaagtcacatccctgtaaattgcagaattcaaaagtgattatctctttgatctacttgcctcatttccctatcttctcccccacggtatcctaaactttagacttcccactgttctgaaaggagacattgctctatgtctgccttcgaccacagcaagccatcatcctccattgctcccggggactcaagaggaatctgtttctctgctgtcaacttcccatctggctcagcatagggtcactttgccattatgcaaatggagataaaagcaattctgactgtccaggagctaatctgaccgttctattgtgtggatgaccacataagaaggcaattttagtgtattaatcatagattattataaactataaacttaagggcaaggagtttattacaatgtatctttattaaaacaaaagggtgtatagtgttcacaaactgtgaaaatagtgtaagaactgtacattgtgagctctggttatttttctcttgtaccatagaaaaatgtataaaaattatcaaaaagctaatgtgcagggatattgccttatttgtctgtaaaaaatggagctcagtaacataactgcttcttggagctttggaatattttatcctgtattcttgtttgaattcctcctctatttaagatatatacatggaatcgaagtgtttatgtaatagttctatccttttgcctgcaggtcagttgtaataaatctaggatgtgatgatgaaaaaaaaaa

SEQ ID NO: 1317 - DNA, 3428 bp, Homo sapiens
cgcgcggccaggccctcttagccctctgccgtttggggggcacgggtgaacctgccgccccactcccaccccgccccgccccgcccgtacagacaaatcggaagggacgagcctgccctttgaaagggttttttttcttgctcctgcggagggcgccccagccatggccctcaggagctccctagaccccgcagggactgccctccatcccggccgccggggcccgccctctgcatcccgcgggcagcctgtgtgaagcggcctcccgcagcccccggcccctcccccatggaggaggaggagggggcggtggccaaggagtggggcacgacccccgcggggcccgtctggaccgcggtgttcgactacgaggcggcgggcgacgaggagctgaccctgcggaggggcgatcgcgtccaggtgctttcccaagactgtgcggtgtccggcgacgagggctggtggaccgggcagctccccagcggccgcgtgggcgtcttccccagcaactacgtggcccccggcgcccccgctgcacccgcgggcctccagctgccccaggagatccccttccacgagctgcagctagaggagatcatcggtgtggggggctttggcaaggtctatcgggccctgtggcgtggcgaggaggtggcagtcaaggccgcccggctggaccctgagaaggacccggcagtgacagcggagcaggtgtgccaggaagcccggctctttggagccctgcagcaccccaacataattgcccttaggggcgcctgcctcaaccccccacacctctgcctagtgatggagtatgcccggggtggtgcactgagcagggtgctggcaggtcgccgggtgccacctcacgtgctggtcaactgggctgtgcaggtggcccggggcatgaactacctacacaatgatgcccctgtgcccatcatccaccgggacctcaagtccatcaacatcctgatcctggaggccatcgagaaccacaacctcgcagacacggtgctcaagatcacggacttcggcctcgcccgcgagtggcacaagaccaccaagatgagcgctgcggggacctacgcctggatggcgccggaggttatccgtctctccctcttctccaaaagcagtgatgtctggagcttcggggtgctgctgtgggagctgctgacgggggaggtcccctaccgtgagatcgacgccttggccgtggcgtatggcgtggctatgaataagctgacgctgcccattccctccacgtgccccgagccctttgcccgcctcctggaggaatgctgggacccagacccccacgggcggccagatttcggtagcatcttgaagcggcttgaagtcatcgaacagtcagccctgttccagatgccactggagtccttccactcgctgcaggaagactggaagctggagattcagcacatgtttgatgaccttcggaccaaggagaaggagcttcggagccgtgaggaggagctgctgcgggcggcacaggagcagcgcttccaggaggagcagctgcggcggcgggagcaggagctggcagaacgtgagatggacatcgtggaacgggagctgcacctgctcatgtgccagctgagccaggagaagccccgggtccgcaagcgcaagggcaacttcaagcgcagccgcctgctcaagctgcgggaaggcggcagccacatcagcctgccctctggctttgagcataagatcacagtccaggcctctccaactctggataagcggaaaggatccgatggggccagcccccctgcaagccccagcatcatcccccggctgagggccattcgcctgactcccgtggactgtggtggcagcagcagtggcagcagcagtggaggaagtgggacatggagccgcggtgggcccccaaagaaggaagaactggtcgggggcaagaagaagggacgaacgtgggggcccagctccaccctgcagaaggagcgggtgggaggagaggagaggctgaaggggctgggggaaggaagcaaacagtggtcatcaagtgcccccaacctgggcaagtcccccaaacacacacccatcgcccctggcttcgccagcctcaatgagatggaggagttcgcggaggcagaggatggaggcagcagcgtgcccccttccccctactcgaccccgtcctacctctcagtgccactgcctgccgagccctccccgggggcgcgggcgccgtgggagccgacgccgtccgcgccccccgctcggtggggacacggcgcccggcggcgctgcgacctggcgctgctaggctgcgccacgctgctgggggctgtgggcctgggcgccgacgtggccgaggcgcgcgcggccgacggtgaggagcagcggcgctggctcgacggcctcttctttccccgcgccggccgcttcccgcggggcctcagcccacccgcgcgtccccacggccgccgcgaagacgtgggccccggcctgggcctggcgccctcggccaccctcgtgtcgctgtcgtccgtgtccgactgcaactccacgcgttcactgctgcgctctgacagtgacgaggccgcaccggccgcgccctccccaccaccctccccgcccgcgcccacacccacgccctcgcccagcaccaaccccctggtggacctggagctggagagcttcaagaaggacccccgccagtcgctcacgcccacccacgtcacggctgcatgcgctgtgagccgcgggcaccggcggacgccatcggatggggcgctggggcagcgggggccgcccgagcccgcgggccatggccctggccctcgtgaccttctggacttcccccgcctgcccgacccccaggccctgttcccagcccgccgccggccccctgagttcccaggccgccccaccaccctgacctttgccccgagacctcggccggctgccagtcgcccccgcttggacccctggaaactggtctccttcggccggacactcaccatctcgcctcccagcaggccagacactccggagagccctgggccccccagcgtgcagcccacactgctggacatggacatggaggggcagaaccaagacagcacagtgcccctgtgcggggcccacggctcccactaaggcctgcccaccaccgcccgcctgggcagccatgaatgtagcgccccaggccctgccccagcccgccatgccacaaggtgggggaggccctgggcaggatgttcactctatttattggggaaggagggaggggggggacacttaacttattcctttgtaccccagggggtggagccctgtgcccaccctgcactggggggagggtgggcagggatactcagggacagggcatcatgggggatttggcacaaaatggagcattaaaggtaacccct

SEQ ID NO: 1318 - DNA, 3365 bp, Homo sapiens
agcatccggagcggagctgcagcagcgccgccttttgtgctgcggccgcggagcccccgagggcccagtgttcaccatcataccaggggccagaggcgatggcttgcctccatgagacccgaacaccctctccttcctttgggggctttgtgtctaccctaagtgaggcatccatgcgcaagctggacccagacacttctgactgcactcccgagaaggacctgacgcctacccatgtcctgcagctacatgagcaggatgcagggggcccagggggagcagctgggtcacctgagagtcgggcatccagagttcgagctgacgaggtgcgactgcagtgccagagtggcagtggcttccttgagggcctctttggctgcctgcgccctgtctggaccatgattggcaaagcctactccactgagcacaagcagcagcaggaagacctttgggaggtcccctttgaggaaatcctggacctgcagtgggtgggctcaggggcccagggtgctgtcttcctggggcgcttccacggggaggaggtggctgtgaagaaggtgcgagacctcaaagaaaccgacatcaagcacttgcgaaagctgaagcaccccaacatcatcactttcaagggtgtgtgcacccaggctccctgctactgcatcctcatggagttctgcgcccagggccagctgtatgaggtactgcgggctggccgccctgtcaccccctccttactggttgactggtccatgggcatcgctggtggcatgaactacctgcacctgcacaagattatccacagggatctcaagtcacccaacatgctaatcacctacgacgatgtggtgaagatctcagattttggcacttccaaggagctgagtgacaagagcaccaagatgtcctttgcagggacagtagcctggatggcccctgaggtgatccgcaatgaacctgtgtctgagaaggtcgacatctggtcctttggcgtggtgctatgggaactgctgactggtgagatcccctacaaagacgtagattcctcagccattatctggggtgtgggaagcaacagtctccatctgcccgtgccctccagttgcccagatggtttcaagatcctgcttcgccagtgctggaatagcaaaccacgaaatcgcccatcattccgacagatcctgctgcatctggacattgcctcagctgatgtactctccacaccccaggagacttactttaagtcccaggcagagtggcgggaagaagtaaaactgcactttgaaaagattaagtcagaagggacctgtctgcaccgcctagaagaggaactggtgatgaggaggagggaggagctcagacacgccctggacatcagggagcactatgaaaggaagctggagagagccaacaacctgtatatggaacttaatgccctcatgttgcagctggaactcaaggagagggagctgctcaggcgagagcaagctttagagcggaggtgcccaggcctgctgaagccacacccttcccggggcctcctgcatggaaacacaatggagaagcttatcaagaagaggaatgtgccacagaagctgtcaccccatagcaaaaggccagatatcctcaagacggagtctttgctccctaaactagatgcagccctgagtggggtggggcttcctgggtgtcctaaggcccccccctcaccaggacggagtcgccgtggcaagacccgtcaccgcaaggccagcgccaaggggagctgtggggacctgcctgggcttcgtacagctgtgccaccccatgaacctggaggaccaggaagcccagggggcctaggagggggaccctcagcctgggaggcctgccctcccgccctccgtgggcttcatcatgacctcctgctccgcaaaatgtcttcatcgtccccagacctgctgtcagcagcactagggtcccggggccggggggccacaggcggagctggggatcctggctcaccacctccggcccggggtgacaccccaccaagtgagggctcagcccctggctccaccagcccagattcacctgggggagccaaaggggaaccacctcctccagtagggcctggtgaaggtgtggggcttctgggaactggaagggaagggacctcaggccggggaggaagccgggctgggtcccagcacttgaccccagctgcactgctgtacagggctgccgtcacccgaagtcagaaacgtggcatctcatcggaagaggaggaaggagaggtagacagtgaagtagagctgacatcaagccagaggtggcctcagagcctgaacatgcgccagtcactatctaccttcagctcagagaatccatcagatggggaggaaggcacagctagtgaaccttcccccagtggcacacctgaagttggcagcaccaacactgatgagcggccagatgagcggtctgatgacatgtgctcccagggctcagaaatcccactggacccacctccttcagaggtcatccctggccctgaacccagctccctgcccattccacaccaggaacttctcagagagcggggccctcccaattctgaggactcagactgtgacagcactgaattggacaactccaacagcgttgatgccttgcggcccccagcttccctccctccatgaaagccactcgtattccttgtacatagagaaatatttatatggattatatatatatacatatatatatatatatgcgccacataatcaacagaaagatggggctgtcccagccgtaagtcaggctcgagggagactgatcccctgaccaattcacctgataaactctagggacactggcagctgtggaaatgaatgaggcacagccgtagagctgtggctaagggcaagccccttcctgccccaccccattccttatattcagcaagcaacaaggcaatagaaaagccagggttgtctttatattctttatccccaaataatagggggtggggggaggggcggtgggaggggcaggagagaaaaccacttagactgcacttttctgttccgtttactctgtttacacattttgcacttgggaggagggaggctaaggctgggtcctcccctctgaggtttctcaggtggcaatgtaactcatttttttgtcccaccatttatcttctctgcccaagccctgtcttaaggcccagggggaggttaggagactgatagcatgtgatggctcaggctgaagaaccggggtgctgtttaagtccctgcttttatcctggtgcctgattggggtggggactgtcctactgtaacccctgtgaaaaaccttgaaatataacactccatgcagga

SEQ ID NO: 1319 - DNA, 2912 bp, Homo sapiens
tccctccttttctttccaagtcacaaaattctcccctcccctaccccggagtttacggccctcctcctgtttccgatttcagcccggaaccggaagtgtagtgggcggggcccgtcggcggaaaacgcagcggagccagagccggacacggctgtggccgctgcctctacccccgccacggatcgccgggtagtaggactgcgcggctccaggctgagggtcggtccggaggcgggtgggcgcgggtctcacccggattgtccgggtggcaccgttcccggccccaccgggcgccgcgagggatcatgtctacagcctctgccgcctcctcctcctcctcgtcttcggccggtgagatgatcgaagccccttcccaggtcctcaactttgaagagatcgactacaaggagatcgaggtggaagaggttgttggaagaggagcctttggagttgtttgcaaagctaagtggagagcaaaagatgttgctattaaacaaatagaaagtgaatctgagaggaaagcgtttattgtagagcttcggcagttatcccgtgtgaaccatcctaatattgtaaagctttatggagcctgcttgaatccagtgtgtcttgtgatggaatatgctgaagggggctctttatataatgtgctgcatggtgctgaaccattgccatattatactgctgcccacgcaatgagttggtgtttacagtgttcccaaggagtggcttatcttcacagcatgcaacccaaagcgctaattcacagggacctgaaaccaccaaacttactgctggttgcaggggggacagttctaaaaatttgtgattttggtacagcctgtgacattcagacacacatgaccaataacaaggggagtgctgcttggatggcacctgaagtttttgaaggtagtaattacagtgaaaaatgtgacgtcttcagctggggtattattctttgggaagtgataacgcgtcggaaaccctttgatgagattggtggcccagctttccgaatcatgtgggctgttcataatggtactcgaccaccactgataaaaaatttacctaagcccattgagagcctgatgactcgttgttggtctaaagatccttcccagcgcccttcaatggaggaaattgtgaaaataatgactcacttgatgcggtactttccaggagcagatgagccattacagtatccttgtcagtattcagatgaaggacagagcaactctgccaccagtacaggctcattcatggacattgcttctacaaatacgagtaacaaaagtgacactaatatggagcaagttcctgccacaaatgatactattaagcgcttagaatcaaaattgttgaaaaatcaggcaaagcaacagagtgaatctggacgtttaagcttgggagcctcccgtgggagcagtgtggagagcttgcccccaacctctgagggcaagaggatgagtgctgacatgtctgaaatagaagctaggatcgccgcaaccacaggcaacggacagccaagacgtagatccatccaagacttgactgtaactggaacagaacctggtcaggtgagcagtaggtcatccagtcccagtgtcagaatgattactacctcaggaccaacctcagaaaagccaactcgaagtcatccatggacccctgatgattccacagataccaatggatcagataactccatcccaatggcttatcttacactggatcaccaactacagcctctagcaccgtgcccaaactccaaagaatctatggcagtgtttgaacagcattgtaaaatggcacaagaatatatgaaagttcaaacagaaattgcattgttattacagagaaagcaagaactagttgcagaactggaccaggatgaaaaggaccagcaaaatacatctcgcctggtacaggaacataaaaagcttttagatgaaaacaaaagcctttctacttactaccagcaatgcaaaaaacaactagaggtcatcagaagtcagcagcagaaacgacaaggcacttcatgattctctgggaccgttacattttgaaatatgcaaagaaagactttttttttaaggaaaggaaaaccttataatgacgattcatgagtgttagctttttggcgtgttctgaatgccaactgcctatatttgctgcatttttttcattgtttattttccttttctcatggtggacatacaattttactgtttcattgcataacatggtagcatctgtgacttgaatgagcagcactttgcaacttcaaaacagatgcagtgaactgtggctgtatatgcatgctcattgtgtgaaggctagcctaacagaacaggaggtatcaaactagctgctatgtgcaaacagcgtccattttttcatattagaggtggaacctcaagaatgactttattcttgtatctcatctcaaaatattaataatttttttcccaaaagatggtatataccaagttaaagacagggtattataaatttagagtgattggtggtatattacggaaatacggaacctttagggatagttccgtgtaagggctttgatgccagcatccttggatcagtactgaactcagttccatccgtaaaatatgtaaaggtaagtggcagctgctctatttaatgaaagcagttttaccggattttgttagactaaaatttgattgtgatacattgaacaaaatggaactcatttttttttaaggagtaaagatttttaattctgtgattgtgtgtatgtgtgttgaaactgtaaagcttttatgactctaatattaatctcttaaatgaaattaaaaggcaaaagaacatgattgagcttaaatgatcatttcttcctgcagtgattcttggattgttttctcatgtatttg

SEQ ID NO: 1320 - DNA, 2850 bp, Homo sapiens
ggacacggctgtggccgctgcctctacccccgccacggatcgccgggtagtaggactgcgcggctccaggctgagggtcggtccggaggcgggtgggcgcgggtctcacccggattgtccgggtggcaccgttcccggccccaccgggcgccgcgagggatcatgtctacagcctctgccgcctcctcctcctcctcgtcttcggccggtgagatgatcgaagccccttcccaggtcctcaactttgaagagatcgactacaaggagatcgaggtggaagaggttgttggaagaggagcctttggagttgtttgcaaagctaagtggagagcaaaagatgttgctattaaacaaatagaaagtgaatctgagaggaaagcgtttattgtagagcttcggcagttatcccgtgtgaaccatcctaatattgtaaagctttatggagcctgcttgaatccagtgtgtcttgtgatggaatatgctgaagggggctctttatataatgtgctgcatggtgctgaaccattgccatattatactgctgcccacgcaatgagttggtgtttacagtgttcccaaggagtggcttatcttcacagcatgcaacccaaagcgctaattcacagggacctgaaaccaccaaacttactgctggttgcaggggggacagttctaaaaatttgtgattttggtacagcctgtgacattcagacacacatgaccaataacaaggggagtgctgcttggatggcacctgaagtttttgaaggtagtaattacagtgaaaaatgtgacgtcttcagctggggtattattctttgggaagtgataacgcgtcggaaaccctttgatgagattggtggcccagctttccgaatcatgtgggctgttcataatggtactcgaccaccactgataaaaaatttacctaagcccattgagagcctgatgactcgttgttggtctaaagatccttcccagcgcccttcaatggaggaaattgtgaaaataatgactcacttgatgcggtactttccaggagcagatgagccattacagtatccttgtcagtattcagatgaaggacagagcaactctgccaccagtacaggctcattcatggacattgcttctacaaatacgagtaacaaaagtgacactaatatggagcaagttcctgccacaaatgatactattaagcgcttagaatcaaaattgttgaaaaatcaggcaaagcaacagagtgaatctggacgtttaagcttgggagcctcccgtgggagcagtgtggagagcttgcccccaacctctgagggcaagaggatgagtgctgacatgtctgaaatagaagctaggatcgccgcaaccacagcctattccaagcctaaacggggccaccgtaaaactgcttcatttggcaacattctggatgtccctgagatcgtcatatcaggcaacggacagccaagacgtagatccatccaagacttgactgtaactggaacagaacctggtcaggtgagcagtaggtcatccagtcccagtgtcagaatgattactacctcaggaccaacctcagaaaagccaactcgaagtcatccatggacccctgatgattccacagataccaatggatcagataactccatcccaatggcttatcttacactggatcaccaactacagcctctagcaccgtgcccaaactccaaagaatctatggcagtgtttgaacagcattgtaaaatggcacaagaatatatgaaagttcaaacagaaattgcattgttattacagagaaagcaagaactagttgcagaactggaccaggatgaaaaggaccagcaaaatacatctcgcctggtacaggaacataaaaagcttttagatgaaaacaaaagcctttctacttactaccagcaatgcaaaaaacaactagaggtcatcagaagtcagcagcagaaacgacaaggcacttcatgattctctgggaccgttacattttgaaatatgcaaagaaagactttttttttaaggaaaggaaaaccttataatgacgattcatgagtgttagctttttggcgtgttctgaatgccaactgcctatatttgctgcatttttttcattgtttattttccttttctcatggtggacatacaattttactgtttcattgcataacatggtagcatctgtgacttgaatgagcagcactttgcaacttcaaaacagatgcagtgaactgtggctgtatatgcatgctcattgtgtgaaggctagcctaacagaacaggaggtatcaaactagctgctatgtgcaaacagcgtccattttttcatattagaggtggaacctcaagaatgactttattcttgtatctcatctcaaaatattaataatttttttcccaaaagatggtatataccaagttaaagacagggtattataaatttagagtgattggtggtatattacggaaatacggaacctttagggatagttccgtgtaagggctttgatgccagcatccttggatcagtactgaactcagttccatccgtaaaatatgtaaaggtaagtggcagctgctctatttaatgaaagcagttttaccggattttgttagactaaaatttgattgtgatacattgaacaaaatggaactcatttttttttaaggagtaaagatttttaattctgtgattgtgtgtatgtgtgttgaaactgtaaagcttttatgactctaatattaatctcttaaatgaaattaaaaggcaaaagaacatgattgagcttaaatgatcatttcttcctgcagtgattcttggattgttttctcatgtatttg

SEQ ID NO: 1321 - DNA, 2877 bp, Homo sapiens
tccctccttttctttccaagtcacaaaattctcccctcccctaccccggagtttacggccctcctcctgtttccgatttcagcccggaaccggaagtgtagtgggcggggcccgtcggcggaaaacgcagcggagccagagccggacacggctgtggccgctgcctctacccccgccacggatcgccgggtagtaggactgcgcggctccaggctgagggtcggtccggaggcgggtgggcgcgggtctcacccggattgtccgggtggcaccgttcccggccccaccgggcgccgcgagggatcatgtctacagcctctgccgcctcctcctcctcctcgtcttcggccggtgagatgatcgaagccccttcccaggtcctcaactttgaagagatcgactacaaggagatcgaggtggaagaggttgttggaagaggagcctttggagttgtttgcaaagctaagtggagagcaaaagatgttgctattaaacaaatagaaagtgaatctgagaggaaagcgtttattgtagagcttcggcagttatcccgtgtgaaccatcctaatattgtaaagctttatggagcctgcttgaatccagtgtgtcttgtgatggaatatgctgaagggggctctttatataatgtgctgcatggtgctgaaccattgccatattatactgctgcccacgcaatgagttggtgtttacagtgttcccaaggagtggcttatcttcacagcatgcaacccaaagcgctaattcacagggacctgaaaccaccaaacttactgctggttgcaggggggacagttctaaaaatttgtgattttggtacagcctgtgacattcagacacacatgaccaataacaaggggagtgctgcttggatggcacctgaagtttttgaaggtagtaattacagtgaaaaatgtgacgtcttcagctggggtattattctttgggaagtgataacgcgtcggaaaccctttgatgagattggtggcccagctttccgaatcatgtgggctgttcataatggtactcgaccaccactgataaaaaatttacctaagcccattgagagcctgatgactcgttgttggtctaaagatccttcccagcgcccttcaatggaggaaattgtgaaaataatgactcacttgatgcggtactttccaggagcagatgagccattacagtatccttgtcagtattcagatgaaggacagagcaactctgccaccagtacaggctcattcatggacattgcttctacaaatacgagtaacaaaagtgacactaatatggagcaagttcctgccacaaatgatactattaagcgcttagaatcaaaattgttgaaaaatcaggcaaagcaacagagtgaatctggacgtttaagcttgggagcctcccgtgggagcagtgtggagagcttgcccccaacctctgagggcaagaggatgagtgctgacatgtctgaaatagaagctaggatcgccgcaaccacagcctattccaagcctaaacggggccaccgtaaaactgcttcatttggcaacattctggatgtccctgagatcgtcatatcaggcaacggacagccaagacgtagatccatccaagacttgactgtaactggaacagaacctggtcaggtgagcagtaggtcatccagtcccagtgtcagaatgattactacctcaggaccaacctcagaaaagccaactcgaagtcatccatggacccctgatgattccacagataccaatggatcagataactccatcccaatggcttatcttacactggatcaccaactacaggcaagaactagttgcagaactggaccaggatgaaaaggaccagcaaaatacatctcgcctggtacaggaacataaaaagcttttagatgaaaacaaaagcctttctacttactaccagcaatgcaaaaaacaactagaggtcatcagaagtcagcagcagaaacgacaaggcacttcatgattctctgggaccgttacattttgaaatatgcaaagaaagactttttttttaaggaaaggaaaaccttataatgacgattcatgagtgttagctttttggcgtgttctgaatgccaactgcctatatttgctgcatttttttcattgtttattttccttttctcatggtggacatacaattttactgtttcattgcataacatggtagcatctgtgacttgaatgagcagcactttgcaacttcaaaacagatgcagtgaactgtggctgtatatgcatgctcattgtgtgaaggctagcctaacagaacaggaggtatcaaactagctgctatgtgcaaacagcgtccattttttcatattagaggtggaacctcaagaatgactttattcttgtatctcatctcaaaatattaataatttttttcccaaaagatggtatataccaagttaaagacagggtattataaatttagagtgattggtggtatattacggaaatacggaacctttagggatagttccgtgtaagggctttgatgccagcatccttggatcagtactgaactcagttccatccgtaaaatatgtaaaggtaagtggcagctgctctatttaatgaaagcagttttaccggattttgttagactaaaatttgattgtgatacattgaacaaaatggaactcatttttttttaaggagtaaagatttttaattctgtgattgtgtgtatgtgtgttgaaactgtaaagcttttatgactctaatattaatctcttaaatgaaattaaaaggcaaaagaacatgattgagcttaaatgatcatttcttcctgcagtgattcttggattgttttctcatgtatttg

SEQ ID NO: 1322 - DNA, 2796 bp, Homo sapiens
tccctccttttctttccaagtcacaaaattctcccctcccctaccccggagtttacggccctcctcctgtttccgatttcagcccggaaccggaagtgtagtgggcggggcccgtcggcggaaaacgcagcggagccagagccggacacggctgtggccgctgcctctacccccgccacggatcgccgggtagtaggactgcgcggctccaggctgagggtcggtccggaggcgggtgggcgcgggtctcacccggattgtccgggtggcaccgttcccggccccaccgggcgccgcgagggatcatgtctacagcctctgccgcctcctcctcctcctcgtcttcggccggtgagatgatcgaagccccttcccaggtcctcaactttgaagagatcgactacaaggagatcgaggtggaagaggttgttggaagaggagcctttggagttgtttgcaaagctaagtggagagcaaaagatgttgctattaaacaaatagaaagtgaatctgagaggaaagcgtttattgtagagcttcggcagttatcccgtgtgaaccatcctaatattgtaaagctttatggagcctgcttgaatccagtgtgtcttgtgatggaatatgctgaagggggctctttatataatgtgctgcatggtgctgaaccattgccatattatactgctgcccacgcaatgagttggtgtttacagtgttcccaaggagtggcttatcttcacagcatgcaacccaaagcgctaattcacagggacctgaaaccaccaaacttactgctggttgcaggggggacagttctaaaaatttgtgattttggtacagcctgtgacattcagacacacatgaccaataacaaggggagtgctgcttggatggcacctgaagtttttgaaggtagtaattacagtgaaaaatgtgacgtcttcagctggggtattattctttgggaagtgataacgcgtcggaaaccctttgatgagattggtggcccagctttccgaatcatgtgggctgttcataatggtactcgaccaccactgataaaaaatttacctaagcccattgagagcctgatgactcgttgttggtctaaagatccttcccagcgcccttcaatggaggaaattgtgaaaataatgactcacttgatgcggtactttccaggagcagatgagccattacagtatccttgtcagtattcagatgaaggacagagcaactctgccaccagtacaggctcattcatggacattgcttctacaaatacgagtaacaaaagtgacactaatatggagcaagttcctgccacaaatgatactattaagcgcttagaatcaaaattgttgaaaaatcaggcaaagcaacagagtgaatctggacgtttaagcttgggagcctcccgtgggagcagtgtggagagcttgcccccaacctctgagggcaagaggatgagtgctgacatgtctgaaatagaagctaggatcgccgcaaccacaggcaacggacagccaagacgtagatccatccaagacttgactgtaactggaacagaacctggtcaggtgagcagtaggtcatccagtcccagtgtcagaatgattactacctcaggaccaacctcagaaaagccaactcgaagtcatccatggacccctgatgattccacagataccaatggatcagataactccatcccaatggcttatcttacactggatcaccaactacaggcaagaactagttgcagaactggaccaggatgaaaaggaccagcaaaatacatctcgcctggtacaggaacataaaaagcttttagatgaaaacaaaagcctttctacttactaccagcaatgcaaaaaacaactagaggtcatcagaagtcagcagcagaaacgacaaggcacttcatgattctctgggaccgttacattttgaaatatgcaaagaaagactttttttttaaggaaaggaaaaccttataatgacgattcatgagtgttagctttttggcgtgttctgaatgccaactgcctatatttgctgcatttttttcattgtttattttccttttctcatggtggacatacaattttactgtttcattgcataacatggtagcatctgtgacttgaatgagcagcactttgcaacttcaaaacagatgcagtgaactgtggctgtatatgcatgctcattgtgtgaaggctagcctaacagaacaggaggtatcaaactagctgctatgtgcaaacagcgtccattttttcatattagaggtggaacctcaagaatgactttattcttgtatctcatctcaaaatattaataatttttttcccaaaagatggtatataccaagttaaagacagggtattataaatttagagtgattggtggtatattacggaaatacggaacctttagggatagttccgtgtaagggctttgatgccagcatccttggatcagtactgaactcagttccatccgtaaaatatgtaaaggtaagtggcagctgctctatttaatgaaagcagttttaccggattttgttagactaaaatttgattgtgatacattgaacaaaatggaactcatttttttttaaggagtaaagatttttaattctgtgattgtgtgtatgtgtgttgaaactgtaaagcttttatgactctaatattaatctcttaaatgaaattaaaaggcaaaagaacatgattgagcttaaatgatcatttcttcctgcagtgattcttggattgttttctcatgtatttg

SEQ ID NO: 1323 - DNA, 7364 bp, Homo sapiens
gcggcggcggctgcggcggtggggccgggcgaggtccgctgcggtcccggcggctccgtggctgctccgctctgagcgcctggcgcgccccgcgccctccctgccggggccgctgggccggggatgcacgcggggcccgggagccatggtccgcttcggggacgagctgggcggccgctatggaggccccggcggcggagagcgggcccggggcggcggggccggcggggcggggggcccgggtcccggggggctgcagcccggccagcgggtcctctacaagcaatcgatcgcgcagcgcgcgcggaccatggcgctgtacaaccccatcccggtcaagcagaactgcttcaccgtcaaccgctcgctcttcgtcttcagcgaggacaacgtcgtccgcaaatacgcgaagcgcatcaccgagtggcctccattcgagtatatgatcctggccaccatcatcgccaactgcatcgtgctggccctggagcagcacctccctgatggggacaaaacgcccatgtccgagcggctggacgacacggagccctatttcatcgggatcttttgcttcgaggcagggatcaaaatcatcgctctgggctttgtcttccacaagggctcttacctgcggaacggctggaacgtcatggacttcgtggtcgtcctcacagggatccttgccacggctggaactgacttcgacctgcgaacactgagggctgtgcgtgtgctgaggcccctgaagctggtgtctgggattccaagtttgcaggtggtgctcaagtccatcatgaaggccatggttccactcctgcagattgggctgcttctcttctttgccatcctcatgtttgccatcattggcctggagttctacatgggcaagttccacaaggcctgtttccccaacagcacagatgcggagcccgtgggtgacttcccctgtggcaaggaggccccagcccggctgtgcgagggcgacactgagtgccgggagtactggccaggacccaactttggcatcaccaactttgacaatatcctgtttgccatcttgacggtgttccagtgcatcaccatggagggctggactgacatcctctataatacaaacgatgcggccggcaacacctggaactggctctacttcatccctctcatcatcatcggctccttcttcatgctcaacctggtgctgggcgtgctctcgggggagtttgccaaggagcgagagagggtggagaaccgccgcgccttcctgaagctgcgccggcagcagcagatcgagcgagagctcaacgggtacctggagtggatcttcaaggcggaggaagtcatgctggccgaggaggacaggaatgcagaggagaagtcccctttggacgtgctgaagagagcggccaccaagaagagcagaaatgacctgatccacgcagaggagggagaggaccggtttgcagatctctgtgctgttggatcccccttcgcccgcgccagcctcaagagcgggaagacagagagctcgtcatacttccggaggaaggagaagatgttccggttttttatccggcgcatggtgaaggctcagagcttctactgggtggtgctgtgcgtggtggccctgaacacactgtgtgtggccatggtgcattacaaccagccgcggcggcttaccacgaccctgtattttgcagagtttgttttcctgggtctcttcctcacagagatgtccctgaagatgtatggcctggggcccagaagctacttccggtcctccttcaactgcttcgactttggggtcatcgtggggagcgtctttgaagtggtctgggcggccatcaagccgggaagctcctttgggatcagtgtgctgcgggccctccgcctgctgaggatcttcaaagtcacgaagtactggagctccctgcggaacctggtggtgtccctgctgaactccatgaagtccatcatcagcctgctcttcttgctcttcctgttcattgtggtcttcgccctgctggggatgcagctgtttgggggacagttcaacttccaggatgagactcccacaaccaacttcgacaccttccctgccgccatcctcactgtcttccagatcctgacgggagaggactggaatgcagtgatgtatcacgggatcgaatcgcaaggcggcgtcagcaaaggcatgttctcgtccttttacttcattgtcctgacactgttcggaaactacactctgctgaatgtctttctggccatcgctgtggacaacctggccaacgcccaagagctgaccaaggatgaagaggagatggaagaagcagccaatcagaagcttgctctgcaaaaggccaaagaagtggctgaagtcagccccatgtctgccgcgaacatctccatcgccgccaggcagcagaactcggccaaggcgcgctcggtgtgggagcagcgggccagccagctacggctgcagaacctgcgggccagctgcgaggcgctgtacagcgagatggaccccgaggagcggctgcgcttcgccactacgcgccacctgcggcccgacatgaagacgcacctggaccggccgctggtggtggagctgggccgcgacggcgcgcgggggcccgtgggaggcaaagcccgacctgaggctgcggaggcccccgagggcgtcgaccctccgcgcaggcaccaccggcaccgcgacaaggacaagacccccgcggcgggggaccaggaccgagcagaggccccgaaggcggagagcggggagcccggtgcccgggaggagcggccgcggccgcaccgcagccacagcaaggaggccgcggggcccccggaggcgcggagcgagcgcggccgaggcccaggccccgagggcggccggcggcaccaccggcgcggctccccggaggaggcggccgagcgggagccccgacgccaccgcgcgcaccggcaccaggatccgagcaaggagtgcgccggcgccaagggcgagcggcgcgcgcggcaccgcggcggcccccgagcggggccccgggaggcggagagcggggaggagccggcgcggcggcaccgggcccggcacaaggcgcagcctgctcacgaggctgtggagaaggagaccacggagaaggaggccacggagaaggaggctgagatagtggaagccgacaaggaaaaggagctccggaaccaccagccccgggagccacactgtgacctggagaccagtgggactgtgactgtgggtcccatgcacacactgcccagcacctgtctccagaaggtggaggaacagccagaggatgcagacaatcagcggaacgtcactcgcatgggcagtcagcccccagacccgaacactattgtacatatcccagtgatgctgacgggccctcttggggaagccacggtcgttcccagtggtaacgtggacctggaaagccaagcagaggggaagaaggaggtggaagcggatgacgtgatgaggagcggcccccggcctatcgtcccatacagctccatgttctgtttaagccccaccaacctgctccgccgcttctgccactacatcgtgaccatgaggtacttcgaggtggtcattctcgtggtcatcgccttgagcagcatcgccctggctgctgaggacccagtgcgcacagactcgcccaggaacaacgctctgaaatacctggattacattttcactggtgtctttacctttgagatggtgataaagatgatcgacttgggactgctgcttcaccctggagcctatttccgggacttgtggaacattctggacttcattgtggtcagtggcgccctggtggcgtttgctttctcaggatccaaagggaaagacatcaataccatcaagtctctgagagtccttcgtgtcctgcggcccctcaagaccatcaaacggctgcccaagctcaaggctgtgtttgactgtgtggtgaactccctgaagaatgtcctcaacatcttgattgtctacatgctcttcatgttcatatttgccgtcattgcggtgcagctcttcaaagggaagtttttctactgcacagatgaatccaaggagctggagagggactgcaggggtcagtatttggattatgagaaggaggaagtggaagctcagcccaggcagtggaagaaatacgactttcactacgacaatgtgctctgggctctgctgacgctgttcacagtgtccacgggagaaggctggcccatggtgctgaaacactccgtggatgccacctatgaggagcagggtccaagccctgggtaccgcatggagctgtccatcttctacgtggtctactttgtggtctttcccttcttcttcgtcaacatctttgtggctttgatcatcatcaccttccaggagcagggggacaaggtgatgtctgaatgcagcctggagaagaacgagagggcttgcattgacttcgccatcagcgccaaacccctgacacggtacatgccccaaaaccggcagtcgttccagtataagacgtggacatttgtggtctccccgccctttgaatacttcatcatggccatgatagccctcaacactgtggtgctgatgatgaagttctatgatgcaccctatgagtacgagctgatgctgaaatgcctgaacatcgtgttcacatccatgttctccatggaatgcgtgctgaagatcatcgcctttggggtgctgaactatttcagagatgcctggaatgtctttgactttgtcactgtgttgggaagtattactgatattttagtaacagagattgcggaaacgaacaatttcatcaacctcagcttcctccgcctctttcgagctgcgcggctgatcaagctgctccgccagggctacaccatccgcatcctgctgtggacctttgtccagtccttcaaggccctgccctacgtgtgtctgctcattgccatgctgttcttcatctacgccatcatcggcatgcaggtgtttgggaatattgccctggatgatgacaccagcatcaaccgccacaacaacttccggacgtttttgcaagccctgatgctgctgttcaggagcgccacgggggaggcctggcacgagatcatgctgtcctgcctgagcaaccaggcctgtgatgagcaggccaatgccaccgagtgtggaagtgactttgcctacttctacttcgtctccttcatcttcctgtgctcctttctgatgttgaacctctttgtggctgtgatcatggacaattttgagtacctcacgcgggactcttccatcctaggtcctcaccacttggatgagttcatccgggtctgggctgaatacgacccggctgcgtgtgggcgcatcagttacaatgacatgtttgagatgctgaaacacatgtccccgcctctggggctggggaagaaatgccctgctcgagttgcttacaagcgcctggttcgcatgaacatgcccatctccaacgaggacatgactgttcacttcacgtccacgctgatggccctcatccggacggcactggagatcaagctggccccagctgggacaaagcagcatcagtgtgacgcggagttgaggaaggagatttccgttgtgtgggccaatctgccccagaagactttggacttgctggtaccaccccataagcctgatgagatgacagtggggaaggtttatgcagctctgatgatatttgacttctacaagcagaacaaaaccaccagagaccagatgcagcaggctcctggaggcctctcccagatgggtcctgtgtccctgttccaccctctgaaggccaccctggagcagacacagccggctgtgctccgaggagcccgggttttccttcgacagaagagttccacctccctcagcaatggcggggccatacaaaaccaagagagtggcatcaaagagtctgtctcctggggcactcaaaggacccaggatgcaccccatgaggccaggccacccctggagcgtggccactccacagagatccctgtggggcggtcaggagcactggctgtggacgttcagatgcagagcataacccggaggggccctgatggggagccccagcctgggctggagagccagggtcgagcggcctccatgccccgccttgcggccgagactcagcccgtcacagatgccagccccatgaagcgctccatctccacgctggcccagcggccccgtgggactcatctttgcagcaccaccccggaccgcccaccccctagccaggcgtcgtcgcaccaccaccaccaccgctgccaccgccgcagggacaggaagcagaggtccctggagaaggggcccagcctgtctgccgatatggatggcgcaccaagcagtgctgtggggccggggctgcccccgggagaggggcctacaggctgccggcgggaacgagagcgccggcaggagcggggccggtcccaggagcggaggcagccctcatcctcctcctcggagaagcagcgcttctactcctgcgaccgctttgggggccgtgagcccccgaagcccaagccctccctcagcagccacccaacgtcgccaacagctggccaggagccgggaccccacccacagggcagtggttccgtgaatgggagccccttgctgtcaacatctggtgctagcacccccggccgcggtgggcggaggcagctcccccagacgcccctgactccccgccccagcatcacctacaagacggccaactcctcacccatccacttcgccggggctcagaccagcctccctgccttctccccaggccggctcagccgtgggctttccgaacacaacgccctgctgcagagagaccccctcagccagcccctggcccctggctctcgaattggctctgacccttacctggggcagcgtctggacagtgaggcctctgtccacgccctgcctgaggacacgctcactttcgaggaggctgtggccaccaactcgggccgctcctccaggacttcctacgtgtcctccctgacctcccagtctcaccctctccgccgcgtgcccaacggttaccactgcaccctgggactcagctcgggtggccgagcacggcacagctaccaccaccctgaccaagaccactggtgctagctgcaccgtgaccgctcagacgcctgcatgcagcaggcgtgtgttccagtggatgagttttatcatccacacggggcagtcggccctcgggggaggccttgcccaccttggtgaggctcctgtggcccctccctccccctcctcccctcttttactctagacgacgaataaagccctgttgcttgagtgtacgtaccgc

SEQ ID NO: 1324 - DNA, 2688 bp, Homo sapiens
gcggaggcaaggcgggtgcagggcttctggggacggagggaggtgccagaagttgagccctgaggccctgctggcccctgggcgcaggcccagctcaggcccccagggatggacgtcgtggaccctgacattttcaatagagacccccgggaccactatgacctgctacagcggctgggtggcggcacgtatggggaagtctttaaggctcgagacaaggtgtcaggggacctggtggcactgaagatggtgaagatggagcctgatgatgatgtctccacccttcagaaggaaatcctcatattgaaaacttgccggcacgccaacatcgtggcctaccatgggagttatctctggttgcagaaactctggatctgcatggaattctgtggggctggttctctccaggacatctaccaagtgacaggctccctgtcagagctccagattagctatgtctgccgggaagtgctccagggactggcctatttgcactcacagaagaagatacacagggacatcaagggagctaacatcctcatcaatgatgctggggaggtcagattggctgactttggcatctcggcccagattggggctacactggccagacgcctctctttcattgggacaccctactggatggctccggaagtggcagctgtggccctgaagggaggatacaatgagctgtgtgacatctggtccctgggcatcacggccatcgaactggccgagctacagccaccgctctttgatgtgcaccctctcagagttctcttcctcatgaccaagagtggctaccagcctccccgactgaaggaaaaaggcaaatggtcggctgccttccacaacttcatcaaagtcactctgactaagagtcccaagaaacgacccagcgccaccaagatgctcagtcatcaactggtatcccagcctgggctgaatcgaggcctgatcctggatcttcttgacaaactgaagaatcccgggaaaggaccctccattggggacattgaggatgaggagcccgagctaccccctgctatccctcggcggatcagatccacccaccgctccagctctctggggatcccagatgcagactgctgtcggcggcacatggagttcaggaagctccgaggaatggagaccagacccccagccaacaccgctcgcctacagcctcctcgagacctcaggagcagcagccccaggaagcaactgtcagagtcgtctgacgatgactatgacgacgtggacatccccacccctgcagaggacacacctcctccacttccccccaagcccaagttccgttctccatcagacgagggtcctgggagcatgggggatgatgggcagctgagcccgggggtgctggtccggtgtgccagtgggcccccaccaaacagcccccgtcctgggcctcccccatccaccagcagcccccacctcaccgcccattcagaaccctcactctggaacccaccctcccgggagcttgacaagcccccacttctgccccccaagaaggaaaagatgaagagaaagggatgtgcccttctcgtaaagttgttcaatggctgccccctccggatccacagcacggccgcctggacacatccctccaccaaggaccagcacctgctcctgggggcagaggaaggcatcttcatcctgaaccggaatgaccaggaggccacgctggaaatgctctttcctagccggactacgtgggtgtactccatcaacaacgttctcatgtctctctcaggaaagaccccccacctgtattctcatagcatccttggcctgctggaacggaaagagaccagagcaggaaaccccatcgctcacattagcccccaccgcctactggcaaggaagaacatggtttccaccaagatccaggacaccaaaggctgccgggcgtgctgtgtggcggagggtgcgagctctgggggcccgttcctgtgcggtgcattggagacgtccgttgtcctgcttcagtggtaccagcccatgaacaaattcctgcttgtccggcaggtgctgttcccactgccgacgcctctgtccgtgttcgcgctgctgaccgggccaggctctgagctgcccgctgtgtgcatcggcgtgagccccgggcggccggggaagtcggtgctcttccacacggtgcgctttggcgcgctctcttgctggctgggcgagatgagcaccgagcacaggggacccgtgcaggtgacccaggtagaggaagatatggtgatggtgttgatggatggctctgtgaagctggtgaccccggaggggtccccagtccggggacttcgcacacctgagatccccatgaccgaagcggtggaggccgtggctatggttggaggtcagcttcaggccttctggaagcatggagtgcaggtgtgggctctaggctcggatcagctgctacaggagctgagagaccctaccctcactttccgtctgcttggctcccccaggcctgtagtggtggagacacgcccagtggatgatcctactgctcccagcaacctctacatccaggaatgagtccctaggggggtgtcaggaactagtccttgcaccccctcccccatagacacactagtggtcatggcatgtcctcatctcccaataaacatgactttagcctctgcaaaaaaa

SEQ ID NO: 1325 - DNA, 2964 bp, Homo sapiens
cagagccacgggcgcccgccccgccccgcgccgccccgcgccggctccgcagctcgcgcccgcccgcctgccggcccgcccggcgccgggccatggcgctgctgcgggatgtgtcgctgcaggacccgcgggaccgcttcgagctgctgcagcgcgtgggggccgggacctatggcgacgtctacaaggcccgcgacacggtcacgtccgaactggccgccgtgaagatagtcaagctagacccaggggacgacatcagctccctccagcaggaaatcaccatcctgcgtgagtgccgccaccccaatgtggtggcctacattggcagctacctcaggaatgaccgcttgtggatctgcatggagttctgcggagggggctccctgcaggagatttaccatgccactgggcccctggaggagcggcagattgcctacgtctgccgagaggcactgaaggggctccaccacctgcattctcaggggaagatccacagagacatcaagggagccaaccttctcctcactctccagggagatgtcaaactggctgactttggggtgtcaggcgagctgacagcgtctgtggccaagaggaggtctttcattgggactccctactggatggctcccgaggtggctgctgtggagcgcaaaggtggctacaatgagctatgtgacgtctgggccctgggcatcactgccattgagctgggcgagctgcagccccctctgttccacctgcaccccatgagggccctgatgctcatgtcgaagagcagcttccagccgcccaaactgagagataagactcgctggacccagaatttccaccactttctcaaactggccctgaccaagaatcctaagaagaggccgacagcagagaagctcctgcagcacccgttcacgactcagcagctccctcgggccctcctcacacagctgctggacaaagccagtgaccctcatctggggaccccctcccctgaggactgtgagctggagacctatgacatgtttccagacaccattcactcccgggggcagcacggcccagccgagaggaccccctcggagatccagtttcaccaggtgaaatttggcgccccacgcaggaaggaaactgacccactgaatgagccgtgggaggaagagtggacactactgggaaaggaagagttgagtgggagcctgctgcagtcggtccaggaggccctggaggaaaggagtctgactattcggtcagcctcagaattccaggagctggactccccagacgataccatgggaaccatcaagcgggccccgttcctagggccactccccactgaccctccagcagaggagcctctgtccagtcccccaggaaccctgcccccacctccttcaggccccaacagctccccactgctgcccacggcctgggccaccatgaagcagcgggaggatcctgagaggtcatcctgccacgggctccccccaactcccaaggtgcatatgggcgcctgcttctccaaggtcttcaatggctgccccctgcggatccacgctgctgtcacctggattcaccctgttactcgggaccagttcctggtggtaggggccgaggaaggcatctacacactcaacctgcatgaactgcatgaggatacgctggagaagctgatttcacatcgctgctcctggctctactgcgtgaacaacgtgctgctgtcactctcagggaaatccacgcacatctgggcccatgacctcccaggcctgtttgagcagcggaggctacagcaacaggttcccctctccatccccaccaaccgcctcacccagcgcatcatccccaggcgctttgctctgtccaccaagattcctgacaccaaaggctgcttgcagtgtcgtgtggtgcggaacccctacacgggtgccaccttcctgctggccgccctgcccaccagcctgctcctgctgcagtggtatgagccgctgcagaagtttctgctgctgaagaacttctccagccctctgcccagcccagctgggatgctggagccgctggtgctggatgggaaggagctgccgcaggtgtgtgttggggccgaggggcctgaggggcccggctgccgcgtcctgttccatgtcctgcccctggaggctggcctgacgcccgacatcctcatcccacctgaggggatcccaggctcggcccagcaggtgatccaggtggacagggacacaatcctagtcagctttgaacgctgtgtgaggattgtcaacatgcagggcgagcccacggccacactggcacctgagctgacctttgatttccccatcgagactgtggtgtgcctgcaggacagtgtgctggccttctggagccatgggatgcaaggccgaagcctggataccaatgaggtgacccaggagatcacagatgaaacaaggatcttccgagtgcttggggcccacagagacatcatcctggagagcattcccactgacaacccagaggcgcacagcaacctctacatcctcacgggccaccagagcacctactaagagcagcgggcctgtccaggggctccccgccccaccccacgccttagctgcaggcccttttgggcaaaggggcccatcctagaccagaggagcccaggccctggccctgctggggctgaaggtcagaagtaatcctgagaaatgtttcaggcctggggagggaggggagcccccgacgcctctgcaataactggaccagggggagctgctgtcactcccccatccccgaggcagcccagtccctagtgcccaaggcagggaccctgggcctgggccatccattccattttgttccacatttcctttctactctttctgccaagagcctgcccctgcatttgtcctgggaaacacggtatttaagagagaactatattggtattaaagctggtttgttttaaaaaaaaaa

SEQ ID NO: 1326 - DNA, 4141 bp, Homo sapiens
gagccggccgcggcgccctctctccgtgtggccccctgagcggcccccctcccctgcccgggagggaggcggggggcacctggggcccgccatgaaccccggcttcgatttgtcccgccggaacccgcaggaggacttcgagctgattcagcgcatcggcagcggcacctacggcgacgtctacaaggcacggaatgttaacactggtgaattagcagcaattaaagtaataaaattggaaccaggagaagactttgcagttgtgcagcaagaaattattatgatgaaagactgtaaacacccaaatattgttgcttattttggaagctatctcaggcgagataagctttggatttgcatggagttttgtggaggtggttctttacaggatatttatcacgtaactggacctctgtcagaactgcaaattgcatatgttagcagagaaacactgcagggattatattatcttcacagtaaaggaaaaatgcacagagatataaagggagctaacattctattaacggataatggtcatgtgaaattggctgattttggagtatctgcacagataacagctacaattgccaaacggaagtctttcattggcacaccatattggatggctccagaagttgcagctgttgagaggaaggggggttacaatcaactctgtgatctctgggcagtgggaatcactgccatagaacttgcagagcttcagcctcctatgtttgacttacacccaatgagagcattatttctaatgacaaaaagcaattttcagcctcctaaactaaaggataaaatgaaatggtcaaatagttttcatcactttgtgaaaatggcacttaccaaaaatccgaaaaaaagacctactgctgaaaaattattacagcatccttttgtaacacaacatttgacacggtctttggcaatcgagctgttggataaagtaaataatccagatcattccacttaccatgatttcgatgatgatgatcctgagcctcttgttgctgtaccacatagaattcactcaacaagtagaaacgtgagagaagaaaaaacacgctcagagataacctttggccaagtgaaatttgatccacccttaagaaaggagacagaaccacatcatgaacttcccgacagtgatggttttttggacagttcagaagaaatatactacactgcaagatctaatctggatctgcaactggaatatggacaaggacaccaaggtggttactttttaggtgcaaacaagagtcttctcaagtctgttgaagaagaattgcatcagcgaggacacgtcgcacatttagaagatgatgaaggagatgatgatgaatctaaacactcaactctgaaagcaaaaattccacctcctttgccaccaaagcctaagtctatcttcataccacaggaaatgcattctactgaggatgaaaatcaaggaacaatcaagagatgtcccatgtcagggagcccagcaaagccatcccaagttccacctagaccaccacctcccagattacccccacacaaacctgttgccttaggaaatggaatgagctccttccagttaaatggtgaacgagatggctcattatgtcaacaacagaatgaacatagaggcacaaacctttcaagaaaagaaaagaaagatgtaccaaagcctattagtaatggtcttcctccaacacctaaagtgcatatgggtgcatgtttttcaaaagtttttaatgggtgtcccttgaaaattcactgtgcatcatcatggataaacccagatacaagagatcagtacttgatatttggtgccgaagaagggatttataccctcaatcttaatgaacttcatgaaacatcaatggaacagctattccctcgaaggtgtacatggttgtatgtaatgaacaattgcttgctatcaatatctggtaaagcttctcagctttattcccataatttaccagggctttttgattatgcaagacaaatgcaaaagttacctgttgctattccagcacacaaactccctgacagaatactgccaaggaaattttctgtatcagcaaaaatccctgaaaccaaatggtgccagaagtgttgtgttgtaagaaatccttacacgggccataaatacctatgtggagcacttcagactagcattgttctattagaatgggttgaaccaatgcagaaatttatgttaattaagcacatagattttcctataccatgtccacttagaatgtttgaaatgctggtagttcctgaacaggagtaccctttagtttgtgttggtgtcagtagaggtagagacttcaaccaagtggttcgatttgagacggtcaatccaaattctacctcttcatggtttacagaatcagataccccacagacaaatgttactcatgtaacccaactggagagagataccatccttgtatgcttggactgttgtataaaaatagtaaatctccaaggaagattaaaatctagcaggaaattgtcatcagaactcacctttgatttccagattgaatcaatagtgtgcctacaagacagtgtgctagctttctggaaacatggaatgcaaggtagaagttttagatctaatgaggtaacacaagaaatttcagatagcacaagaattttcaggctgcttggatctgacagggtcgtggttttggaaagtaggccaactgataaccccacagcaaatagcaatttgtacatcctggcgggtcatgaaaacagttactgagaattgttgtgctttgacagttaactctagaaagaaagaacactaccactgcaacattaatggatgcttgaagctgtacaaaagctgcagtaacctgtcttcagttactttgtaatttattgtggcatgagataagatggggaaaattttgttttaagtggtatggatatatttagcatattgaaccacacaagtgcttaattcattgttatgtaatctttgtacatataggcagtattttttctgtgaaacttcatattgctgaagacatacactaagaatttatgtagataatgtacttttatgagatgtacaagtaagtgtcttatctgtacagatgtaaatgttgatgaaaatgcaattggggttaatattttaagaattctttagtatattcttgggtgtggctatattacaaaatgggatgctggcaatgaaacaatacatttaacactattgtatttttattatatgtaatttagtaatatgaatataaatcttgtaacttttaaaattgtaatggaggctgtaatcattttataatctttttaattttaatgcaagtacactggtgtttatatttgcacaaagtattgatatgtgatgtattaagtcacaaaagtaagctgtgacattgtctataagcatttggctccacaaatgtatttggattgttttctatgtgaagcaaaccaattataattaaccacatgttgtagtaactggtctttttatatttaagcagaatcctgtaagattgcttgtctttgcttaaaaacaatacctttgaacatttttgaatcacagaatagcggtaccatgatagaatactgcaattgtggtcagaattacagtatgcacaaagaattaattagcattattaaagagtcctcactaaacatttcatatgatcacactgaagaactgtaacattccatagagtgaagtggttcaaatttctcttggaatttttacttttgttggccttattttatgatccttttcatatttcttttgacttagagtattaatacatggccaaaataatttagttactacctcatacaaacaatataatggttactacacatcacaggaacttagttttggtttaagtcatttttgattgcttttttccaatggaatatgtatataccaggttttagcaaaatgcacacttttggctctttttggtatatgttctttatattttaatgtgagtatatacactaagaacaaactaaattgtgatttatgatcttcatttattttaatgataatggttttaaaatatgttcctgattgtacatattgtaaaataaacatgttttttaacaaaaaaaaaaaaaaaaaaaaaaaaaaaaa

SEQ ID NO: 1327 - DNA, 4373 bp, Homo sapiens
ggcgccgacccatgctggctgggaacgtgtctcccggtgacgcagccccgggtggggaacgtggtgcggcggcggcggcggcggcgactgtacgcgcctccgccgcccccgagaggacgcgccgtgcagcggctgagtggcggcggcggcgacggcaaacccggagctgccggccggcgcgcgggaggaggacgcgggtgcggtctaggaaacggagctgcgggcggaggctccatgttgggaagcggcgccgttcgtgcttgttagcgggaatccgggagccgcggggtgagctggcgggggccgggccctaagtgaagatggaggccccgctgcggcctgccgcggacatcctgaggcggaacccgcagcaggactacgaactcgtccagagggtcggcagcggcacctacggggacgtctataaggccagaaatgtacacacaggagagctggctgcagtaaaaatcattaaattggagcctggagatgatttttctttgattcaacaagaaatatttatggttaaagaatgtaaacattgtaacatcgttgcctactttgggagttatcttagtcgggaaaaactatggatttgtatggaatactgtggtggcggatcacttcaagatatttaccatgttactggaccattatcagaattgcaaatagcctatgtatgcagagaaaccttacagggtcttgcctatttgcatactaaaggcaaaatgcatagagatatcaaaggtgctaatattttattgacagaccatggcgatgtaaaattagctgactttggtgtggctgcaaaaataacagctaccattgcaaaacgaaaatctttcattggcaccccttactggatggccccagaagttgcagcagtagagaagaatggtggctacaaccaactctgtgatatctgggcagtaggaataacagcaattgaacttggagaacttcagccacctatgtttgatctccacccaatgagggctctcttcttaatgtcaaaaagtaattttcagcctccaaaactaaaggacaaaacaaaatggtcatcaacattccataattttgtcaaaatagcactaaccaaaaacccaaaaaaaagaccaactgctgaaagacttctgactcacacttttgttgcacagccaggtctctctagagccctagcagttgaactgttagacaaagtgaacaatccagataaccacgcacattacactgaagcagatgacgatgactttgagccccatgcaatcattcgtcataccattagatctacaaacaggaatgccagagctgaacggacagcttcagaaataaattttgacaaattacaatttgaacctcctctgagaaaagaaacagaagcacgagatgaaatgggattgtcatcagacccaaatttcatgttacagtggaatccttttgttgatggtgcaaatactggcaaatcaacctcaaaacgtgcaataccacctcccctacctcctaagccaaggataagcagttaccctgaagacaactttccggatgaagaaaaagcatcaaccataaaacattgtcctgattcagaaagcagagctccccaaattctcagaagacagagtagcccaagttgtgggcctgtggcagagacttcttctattggaaatggtgatggtatttcaaaactgatgagtgaaaatacagaaggatcagcacaagcaccacagttaccacgaaaaaaggacaaacgagacttccctaaaccagccatcaatggccttccacccaccccaaaagttctgatgggagcatgcttttcaaaagtttttgatggctgtcctttgaaaattaattgtgcaacatcctggatacatcctgatacaaaagatcagtacattatttttggaactgaagatggtatttacacactgaatctcaatgagctacatgaggcaacgatggaacagttatttccacggaagtgtacttggctgtatgttatcaataatactttaatgtcattatcagaaggaaaaacctttcagctctactctcacaatcttatagctttgtttgaacatgccaaaaaaccaggattagctgcccatattcaaactcacaggtttccagaccgaatactaccaagaaaattcgctttaacaacaaagattcctgatacaaaaggctgccacaaatgttgcatagtcagaaacccttacacgggacataaatacctctgtggagctttacagtctggaattgttttacttcagtggtatgagccaatgcagaaattcatgttgataaagcactttgattttcctttgccaagtcctttgaatgtttttgaaatgctggtgatacctgaacaggaataccctatggtctgtgtagctattagcaaaggcactgaatcgaatcaggtagttcagtttgagacaatcaatttgaactctgcatcttcatggtttacagaaattggtgcaggcagccagcagttagattccattcatgtaacacagttggagagagataccgttttagtgtgtttagacaaatttgtgaaaattgtaaatctacaaggaaaattaaaatcaagtaagaaactggcctctgagttaagttttgattttcgcattgaatctgtagtatgccttcaagacagtgtgttggctttctggaaacatgggatgcagggtaaaagcttcaagtcagatgaggttacccaggagatttcagatgaaacaagagttttccgcttattaggatcagacagggttgtcgttttggaaagtaggccaacagaaaatcctactgcacacagcaatctctacatcttggctggacatgaaaatagttactaagcaacagaaactgatctcaaatgacaggaaaatgaatatactccattgaaaggaaaaataaggaaattcaatacaaactgcactatgatttgctttaactattatgggttatattgcaaatgatctgtactttagggtagaattcaatattttctgcagctggaaacagctagtctatctcttgccactgtgtggtggttatatcaagtttgcttaataaaagctatgagacaaatagtcctctagttccaggaaacacagtctttttttaaaaaaaacaatgtttgtaacaagggtgccatggtatttttagataactcgtgattatcttaagagaggtaaatttagtgatcattttatatcatgtcttattccttcttaatgaacataatttgttaaattctcaagcaaggttttcacttttatattggccattctgtatgtttttgtaaaacagaatatttaatccttatttattaatctcttgctggagtggtgtaatgtatctaacttttagcaaaggagggttgcagagcagcttaaattttttttataatgtataagaattttgtttatcttttaagagtagtaaagtactttgagtgtttgggggttcaacacacacatgcaattttgcttaacaaaagtattttataatacagtttcatacagaattaccttaaaagggagtcttatgttttcaactacagatagttgtaagggatcatacagaagatattgatgatagttgaaatattcttagaaggggtgtgtatgtctagctgtgtctaccatgtgtatgtattcttgacaagcagtataaaatacctgtgatttttctttacattagggataatgcataaggaattaatcttcatatatattatcatccctaatgtagcagggggaagtatttaattgcccatgatatgtattttacttatactatgccagagaggaaactataaagtaattacacatgtaatcttgggtttttcacatatgtaggtattcattttgagtaggttgaagaagaaaaaaaatatttaaatgaattgaattcctgatgggatagtatcaataagtatttaaaagccagtattctaaaaataataaagggtagggtcatttttgagtttgtttttcttttgctattgttaatattcaaaattaaagtgttacattggtacctgttgtcttaatgcatttattgagaacagcattgagatgatgaacaaggggttagcaatagcaaactctataattattttgactaattacttaagaggaaaacagtataagtatctcattcagtatttagcaattctgtaaaataagtattatctctatttttcagatgaggaagtaagggtttagcaaggttaagagatctatccaatttacacagcaagttagtagttgagcctgaccatgagtcttctgactctgttcttttcactatgcaatacgcaaacaataaaatgttatacaaataaaaaaaaaaaaaaaaaa

SEQ ID NO: 1328 - DNA, 4421 bp, Homo sapiens
ggcgccgacccatgctggctgggaacgtgtctcccggtgacgcagccccgggtggggaacgtggtgcggcggcggcggcggcggcgactgtacgcgcctccgccgcccccgagaggacgcgccgtgcagcggctgagtggcggcggcggcgacggcaaacccggagctgccggccggcgcgcgggaggaggacgcgggtgcggtctaggaagtaggtcccgggctccgcgctcaacaaagacggggccgcccccattagacggagctgcgggcggaggctccatgttgggaagcggcgccgttcgtgcttgttagcgggaatccgggagccgcggggtgagctggcgggggccgggccctaagtgaagatggaggccccgctgcggcctgccgcggacatcctgaggcggaacccgcagcaggactacgaactcgtccagagggtcggcagcggcacctacggggacgtctataaggccagaaatgtacacacaggagagctggctgcagtaaaaatcattaaattggagcctggagatgatttttctttgattcaacaagaaatatttatggttaaagaatgtaaacattgtaacatcgttgcctactttgggagttatcttagtcgggaaaaactatggatttgtatggaatactgtggtggcggatcacttcaagatatttaccatgttactggaccattatcagaattgcaaatagcctatgtatgcagagaaaccttacagggtcttgcctatttgcatactaaaggcaaaatgcatagagatatcaaaggtgctaatattttattgacagaccatggcgatgtaaaattagctgactttggtgtggctgcaaaaataacagctaccattgcaaaacgaaaatctttcattggcaccccttactggatggccccagaagttgcagcagtagagaagaatggtggctacaaccaactctgtgatatctgggcagtaggaataacagcaattgaacttggagaacttcagccacctatgtttgatctccacccaatgagggctctcttcttaatgtcaaaaagtaattttcagcctccaaaactaaaggacaaaacaaaatggtcatcaacattccataattttgtcaaaatagcactaaccaaaaacccaaaaaaaagaccaactgctgaaagacttctgactcacacttttgttgcacagccaggtctctctagagccctagcagttgaactgttagacaaagtgaacaatccagataaccacgcacattacactgaagcagatgacgatgactttgagccccatgcaatcattcgtcataccattagatctacaaacaggaatgccagagctgaacggacagcttcagaaataaattttgacaaattacaatttgaacctcctctgagaaaagaaacagaagcacgagatgaaatgggattgtcatcagacccaaatttcatgttacagtggaatccttttgttgatggtgcaaatactggcaaatcaacctcaaaacgtgcaataccacctcccctacctcctaagccaaggataagcagttaccctgaagacaactttccggatgaagaaaaagcatcaaccataaaacattgtcctgattcagaaagcagagctccccaaattctcagaagacagagtagcccaagttgtgggcctgtggcagagacttcttctattggaaatggtgatggtatttcaaaactgatgagtgaaaatacagaaggatcagcacaagcaccacagttaccacgaaaaaaggacaaacgagacttccctaaaccagccatcaatggccttccacccaccccaaaagttctgatgggagcatgcttttcaaaagtttttgatggctgtcctttgaaaattaattgtgcaacatcctggatacatcctgatacaaaagatcagtacattatttttggaactgaagatggtatttacacactgaatctcaatgagctacatgaggcaacgatggaacagttatttccacggaagtgtacttggctgtatgttatcaataatactttaatgtcattatcagaaggaaaaacctttcagctctactctcacaatcttatagctttgtttgaacatgccaaaaaaccaggattagctgcccatattcaaactcacaggtttccagaccgaatactaccaagaaaattcgctttaacaacaaagattcctgatacaaaaggctgccacaaatgttgcatagtcagaaacccttacacgggacataaatacctctgtggagctttacagtctggaattgttttacttcagtggtatgagccaatgcagaaattcatgttgataaagcactttgattttcctttgccaagtcctttgaatgtttttgaaatgctggtgatacctgaacaggaataccctatggtctgtgtagctattagcaaaggcactgaatcgaatcaggtagttcagtttgagacaatcaatttgaactctgcatcttcatggtttacagaaattggtgcaggcagccagcagttagattccattcatgtaacacagttggagagagataccgttttagtgtgtttagacaaatttgtgaaaattgtaaatctacaaggaaaattaaaatcaagtaagaaactggcctctgagttaagttttgattttcgcattgaatctgtagtatgccttcaagacagtgtgttggctttctggaaacatgggatgcagggtaaaagcttcaagtcagatgaggttacccaggagatttcagatgaaacaagagttttccgcttattaggatcagacagggttgtcgttttggaaagtaggccaacagaaaatcctactgcacacagcaatctctacatcttggctggacatgaaaatagttactaagcaacagaaactgatctcaaatgacaggaaaatgaatatactccattgaaaggaaaaataaggaaattcaatacaaactgcactatgatttgctttaactattatgggttatattgcaaatgatctgtactttagggtagaattcaatattttctgcagctggaaacagctagtctatctcttgccactgtgtggtggttatatcaagtttgcttaataaaagctatgagacaaatagtcctctagttccaggaaacacagtctttttttaaaaaaaacaatgtttgtaacaagggtgccatggtatttttagataactcgtgattatcttaagagaggtaaatttagtgatcattttatatcatgtcttattccttcttaatgaacataatttgttaaattctcaagcaaggttttcacttttatattggccattctgtatgtttttgtaaaacagaatatttaatccttatttattaatctcttgctggagtggtgtaatgtatctaacttttagcaaaggagggttgcagagcagcttaaattttttttataatgtataagaattttgtttatcttttaagagtagtaaagtactttgagtgtttgggggttcaacacacacatgcaattttgcttaacaaaagtattttataatacagtttcatacagaattaccttaaaagggagtcttatgttttcaactacagatagttgtaagggatcatacagaagatattgatgatagttgaaatattcttagaaggggtgtgtatgtctagctgtgtctaccatgtgtatgtattcttgacaagcagtataaaatacctgtgatttttctttacattagggataatgcataaggaattaatcttcatatatattatcatccctaatgtagcagggggaagtatttaattgcccatgatatgtattttacttatactatgccagagaggaaactataaagtaattacacatgtaatcttgggtttttcacatatgtaggtattcattttgagtaggttgaagaagaaaaaaaatatttaaatgaattgaattcctgatgggatagtatcaataagtatttaaaagccagtattctaaaaataataaagggtagggtcatttttgagtttgtttttcttttgctattgttaatattcaaaattaaagtgttacattggtacctgttgtcttaatgcatttattgagaacagcattgagatgatgaacaaggggttagcaatagcaaactctataattattttgactaattacttaagaggaaaacagtataagtatctcattcagtatttagcaattctgtaaaataagtattatctctatttttcagatgaggaagtaagggtttagcaaggttaagagatctatccaatttacacagcaagttagtagttgagcctgaccatgagtcttctgactctgttcttttcactatgcaatacgcaaacaataaaatgttatacaaataaaaaaaaaaaaaaaaaa

SEQ ID NO: 1329 - DNA, 2372 bp, Homo sapiens
gagaaatggcgtggcaggggacccagcgagcccagagggattttgccgctgcttcctctacccctgtatttcacgcagctctctaaattgactcagctccaggctagtgtgagaaacaccaacagcaggcccatctcagatcttcactatggcaacttatgcaagaaactgttgaattagacccgtttcctatagatgagaaaccatacaagctgtggtatttatgagcctccatttcttatactactgcagtgaaccaacattggatgtgaaaattgccttttgtcagggattcgataaacaagtggatgtgtcatatattgccaaacattacaacatgagcaaaagcaaagttgacaaccagttctacagtgtggaagtgggagactcaaccttcacagttctcaagcgctaccagaatctaaagcctattggctctggggctcagggcatagtttgtgccgcgtatgatgctgtccttgacagaaatgtggccattaagaagctcagcagaccctttcagaaccaaacacatgccaagagagcgtaccgggagctggtcctcatgaagtgtgtgaaccataaaaacattattagtttattaaatgtcttcacaccccagaaaacgctggaggagttccaagatgtttacttagtaatggaactgatggatgccaacttatgtcaagtgattcagatggaattagaccatgagcgaatgtcttacctgctgtaccaaatgttgtgtggcattaagcacctccattctgctggaattattcacagggatttaaaaccaagtaacattgtagtcaagtctgattgcacattgaaaatcctggactttggactggccaggacagcaggcacaagcttcatgatgactccatatgtggtgacacgttattacagagcccctgaggtcatcctggggatgggctacaaggagaacgtggatatatggtctgtgggatgcattatgggagaaatggttcgccacaaaatcctctttccaggaagggactatattgaccagtggaataaggtaattgaacaactaggaacaccatgtccagaattcatgaagaaattgcaacccacagtaagaaactatgtggagaatcggcccaagtatgcgggactcaccttccccaaactcttcccagattccctcttcccagcggactccgagcacaataaactcaaagccagccaagccagggacttgttgtcaaagatgctagtgattgacccagcaaaaagaatatcagtggacgacgccttacagcatccctacatcaacgtctggtatgacccagccgaagtggaggcgcctccacctcagatatatgacaagcagttggatgaaagagaacacacaattgaagaatggaaagaacttatctacaaggaagtaatgaattcagaagaaaagactaaaaatggtgtagtaaaaggacagccttctccttcagcacaggtgcagcagtgaacagcagtgagagtctccctccatcctcgtctgtcaatgacatctcctccatgtccaccgaccagaccctggcatctgacactgacagcagcctggaagcctcggcaggacccctgggttgttgcaggtgactagccgcctgcctgcgaaacccagcgttcttcaggagatgatgtgatggaacacacacacacgcagacacacacacacacacaaatgcagacacacaacatcaagaaaacagcaagggagagaatccaagcctaaaattaaataaatctttcagcctgcttcttccccagggttctgtattgcagctaagctcaaatgtatatttaacttctagttgctcttgctttggtcttcttccaatgatgcttactacagaaagcaaatcagacacaattagagaagccttttccataaagtgtaattttaatggctgcaaaaccggcaacctgtaactgcccttttaaatggcatgacaaggtgtgcagtggccccatccagcatgtgtgtgtctctatcttgcatctacctgctccttggcctagtcagatggatgtagatacagatccgcatgtgtctgtattcatacagcactacttacttagagatgctactgtcagtgtcctcagggctctaccaagacataatgcactggggtaccacatggtccatttcatgtgatctattactctgacataaacccatctgtaatatattgccagtatataagctgtttagtttgttaattgattaaactgtatgtcttataagaaaacatgtaaagggggaatatatggggggagtgagctctctcagacccttgaagatgtagcttccaaatttgaatggattaaatggcacctgtatacca

SEQ ID NO: 1330 - DNA, 2211 bp, Homo sapiens
ttatgcaagaaactgttgaattagacccgtttcctatagatgagaaaccatacaagctgtggtatttatgagcctccatttcttatactactgcagtgaaccaacattggatgtgaaaattgccttttgtcagggattcgataaacaagtggatgtgtcatatattgccaaacattacaacatgagcaaaagcaaagttgacaaccagttctacagtgtggaagtgggagactcaaccttcacagttctcaagcgctaccagaatctaaagcctattggctctggggctcagggcatagtttgtgccgcgtatgatgctgtccttgacagaaatgtggccattaagaagctcagcagaccctttcagaaccaaacacatgccaagagagcgtaccgggagctggtcctcatgaagtgtgtgaaccataaaaacattattagtttattaaatgtcttcacaccccagaaaacgctggaggagttccaagatgtttacttagtaatggaactgatggatgccaacttatgtcaagtgattcagatggaattagaccatgagcgaatgtcttacctgctgtaccaaatgttgtgtggcattaagcacctccattctgctggaattattcacagggatttaaaaccaagtaacattgtagtcaagtctgattgcacattgaaaatcctggactttggactggccaggacagcaggcacaagcttcatgatgactccatatgtggtgacacgttattacagagcccctgaggtcatcctggggatgggctacaaggagaacgtggatatatggtctgtgggatgcattatgggagaaatggttcgccacaaaatcctctttccaggaagggactatattgaccagtggaataaggtaattgaacaactaggaacaccatgtccagaattcatgaagaaattgcaacccacagtaagaaactatgtggagaatcggcccaagtatgcgggactcaccttccccaaactcttcccagattccctcttcccagcggactccgagcacaataaactcaaagccagccaagccagggacttgttgtcaaagatgctagtgattgacccagcaaaaagaatatcagtggacgacgccttacagcatccctacatcaacgtctggtatgacccagccgaagtggaggcgcctccacctcagatatatgacaagcagttggatgaaagagaacacacaattgaagaatggaaagaacttatctacaaggaagtaatgaattcagaagaaaagactaaaaatggtgtagtaaaaggacagccttctccttcaggtgcagcagtgaacagcagtgagagtctccctccatcctcgtctgtcaatgacatctcctccatgtccaccgaccagaccctggcatctgacactgacagcagcctggaagcctcggcaggacccctgggttgttgcaggtgactagccgcctgcctgcgaaacccagcgttcttcaggagatgatgtgatggaacacacacacacgcagacacacacacacacacaaatgcagacacacaacatcaagaaaacagcaagggagagaatccaagcctaaaattaaataaatctttcagcctgcttcttccccagggttctgtattgcagctaagctcaaatgtatatttaacttctagttgctcttgctttggtcttcttccaatgatgcttactacagaaagcaaatcagacacaattagagaagccttttccataaagtgtaattttaatggctgcaaaaccggcaacctgtaactgcccttttaaatggcatgacaaggtgtgcagtggccccatccagcatgtgtgtgtctctatcttgcatctacctgctccttggcctagtcagatggatgtagatacagatccgcatgtgtctgtattcatacagcactacttacttagagatgctactgtcagtgtcctcagggctctaccaagacataatgcactggggtaccacatggtccatttcatgtgatctattactctgacataaacccatctgtaatatattgccagtatataagctgtttagtttgttaattgattaaactgtatgtcttataagaaaacatgtaaagggggaatatatggggggagtgagctctctcagacccttgaagatgtagcttccaaatttgaatggattaaatggcacctgtatacca

SEQ ID NO: 1331 - DNA, 2698 bp, Homo sapiens
ggtaggttccacaatggtacaggcagcatcacgctgcacaatggtttccaggcagtgaaagagggtgattcagcaagccactcttcttctattttctttaacctccccttcactttttatttttatgggggtgggtggtgcttgctatatgcttacctttttcttttcttttttcatttttacaaatttccttttttgtcctcacccctcaattcctaggggcttgagtgagtttaagattgggttttcttggaaatcacctgtccatcgttaattttaaacaatctccatatctccaaagaatctcttccatgttagtctggaatgtggttaatgaaaaacaagtagggaggatttctggggcaaacactgccggatcaggatcgtagttctcaggcacggaatggctagtgtgagaaacaccaacagcaggcccatctcagatcttcactatggcaacttatgcaagaaactgttgaattagacccgtttcctatagatgagaaaccatacaagctgtggtatttatgagcctccatttcttatactactgcagtgaaccaacattggatgtgaaaattgccttttgtcaggtgtgtgttccttacaggtaaaacaagggattcgataaacaagtggatgtgtcatatattgccaaacattacaacatgagcaaaagcaaagttgacaaccagttctacagtgtggaagtgggagactcaaccttcacagttctcaagcgctaccagaatctaaagcctattggctctggggctcagggcatagtttgtgccgcgtatgatgctgtccttgacagaaatgtggccattaagaagctcagcagaccctttcagaaccaaacacatgccaagagagcgtaccgggagctggtcctcatgaagtgtgtgaaccataaaaacattattagtttattaaatgtcttcacaccccagaaaacgctggaggagttccaagatgtttacttagtaatggaactgatggatgccaacttatgtcaagtgattcagatggaattagaccatgagcgaatgtcttacctgctgtaccaaatgttgtgtggcattaagcacctccattctgctggaattattcacagggatttaaaaccaagtaacattgtagtcaagtctgattgcacattgaaaatcctggactttggactggccaggacagcaggcacaagcttcatgatgactccatatgtggtgacacgttattacagagcccctgaggtcatcctggggatgggctacaaggagaacgtggatatatggtctgtgggatgcattatgggagaaatggttcgccacaaaatcctctttccaggaagggactatattgaccagtggaataaggtaattgaacaactaggaacaccatgtccagaattcatgaagaaattgcaacccacagtaagaaactatgtggagaatcggcccaagtatgcgggactcaccttccccaaactcttcccagattccctcttcccagcggactccgagcacaataaactcaaagccagccaagccagggacttgttgtcaaagatgctagtgattgacccagcaaaaagaatatcagtggacgacgccttacagcatccctacatcaacgtctggtatgacccagccgaagtggaggcgcctccacctcagatatatgacaagcagttggatgaaagagaacacacaattgaagaatggaaagaacttatctacaaggaagtaatgaattcagaagaaaagactaaaaatggtgtagtaaaaggacagccttctccttcaggtgcagcagtgaacagcagtgagagtctccctccatcctcgtctgtcaatgacatctcctccatgtccaccgaccagaccctggcatctgacactgacagcagcctggaagcctcggcaggacccctgggttgttgcaggtgactagccgcctgcctgcgaaacccagcgttcttcaggagatgatgtgatggaacacacacacacgcagacacacacacacacacaaatgcagacacacaacatcaagaaaacagcaagggagagaatccaagcctaaaattaaataaatctttcagcctgcttcttccccagggttctgtattgcagctaagctcaaatgtatatttaacttctagttgctcttgctttggtcttcttccaatgatgcttactacagaaagcaaatcagacacaattagagaagccttttccataaagtgtaattttaatggctgcaaaaccggcaacctgtaactgcccttttaaatggcatgacaaggtgtgcagtggccccatccagcatgtgtgtgtctctatcttgcatctacctgctccttggcctagtcagatggatgtagatacagatccgcatgtgtctgtattcatacagcactacttacttagagatgctactgtcagtgtcctcagggctctaccaagacataatgcactggggtaccacatggtccatttcatgtgatctattactctgacataaacccatctgtaatatattgccagtatataagctgtttagtttgttaattgattaaactgtatgtcttataagaaaacatgtaaagggggaatatatggggggagtgagctctctcagacccttgaagatgtagcttccaaatttgaatggattaaatggcacctgtatacca

SEQ ID NO: 1332 - DNA, 1888 bp, Homo sapiens
gcggcgcggggcgggcgcagcgggggtcggggcgctgggagcccgttgggccgcgaacgcagccgccacgccggggccgccgagatcgggtgcccgggatgagcctcatccggaaaaagggcttctacaagcaggacgtcaacaagaccgcctgggagctgcccaagacctacgtgtccccgacgcacgtcggcagcggggcctatggctccgtgtgctcggccatcgacaagcggtcaggggagaaggtggccatcaagaagctgagccgaccctttcagtccgagatcttcgccaagcgcgcctaccgggagctgctgctgctgaagcacatgcagcatgagaacgtcattgggctcctggatgtcttcaccccagcctcctccctgcgcaacttctatgacttctacctggtgatgcccttcatgcagacggatctgcagaagatcatggggatggagttcagtgaggagaagatccagtacctggtgtatcagatgctcaaaggccttaagtacatccactctgctggggtcgtgcacagggacctgaagccaggcaacctggctgtgaatgaggactgtgaactgaagattctggattttgggctggcgcgacatgcagacgccgagatgactggctacgtggtgacccgctggtaccgagcccccgaggtgatcctcagctggatgcactacaaccagacagtggacatctggtctgtgggctgtatcatggcagagatgctgacagggaaaactctgttcaaggggaaagattacctggaccagctgacccagatcctgaaagtgaccggggtgcctggcacggagtttgtgcagaagctgaacgacaaagcggccaaatcctacatccagtccctgccacagacccccaggaaggatttcactcagctgttcccacgggccagcccccaggctgcggacctgctggagaagatgctggagctagacgtggacaagcgcctgacggccgcgcaggccctcacccatcccttctttgaacccttccgggaccctgaggaagagacggaggcccagcagccgtttgatgattccttagaacacgagaaactcacagtggatgaatggaagcagcacatctacaaggagattgtgaacttcagccccattgcccggaaggactcacggcgccggagtggcatgaagctgtagggactcatcttgcatggcaccaccggccagacactgcccaaggaccagtatttgtcactaccaaactcagcccttcttggaatacagcctttcaagcagaggacagaagggtccttctccttatgtgggaaatgggcctagtagatgcagaattcaaagatgtcggttgggagaaactagctctgatcctaacaggccacgttaaactgcccatctggagaatcgcctgcaggtggggccctttccttcccgccagagtggggctgagtgggcgctgagccaggccgggggcctatggcagtgatgctgtgttggtttcctagggatgctctaacgaattaccacaaacctggtggattgaaacagcagaacttgattcccttacagttctggaggctggaaatctgggatggaggtgttggcagggctgtggtccctttgaaggctctggggaagaatccttccttggctctttttagcttgtggcggcagtgggcagtccgtggcattccccagcttattgctgcatcactccagtctctgtctcttctgttctctcctcttttaacaacagtcattggatttagggcccaccctaatcctgtgtgatcttatcttgatccttattaattaaacctgcaaatactctagttccaaataaagtcacattctcaggttccaggtggacatga

SEQ ID NO: 1333 - DNA, 1866 bp, Homo sapiens
cgttcctcggcgccgccggggccccagagggcagcggcagcaacagcagcagcagcagcagcgggagtggagatggcggcggcggcggctcaggggggcgggggcggggagccccgtagaaccgagggggtcggcccgggggtcccgggggaggtggagatggtgaaggggcagccgttcgacgtgggcccgcgctacacgcagttgcagtacatcggcgagggcgcgtacggcatggtcagctcggcctatgaccacgtgcgcaagactcgcgtggccatcaagaagatcagccccttcgaacatcagacctactgccagcgcacgctccgggagatccagatcctgctgcgcttccgccatgagaatgtcatcggcatccgagacattctgcgggcgtccaccctggaagccatgagagatgtctacattgtgcaggacctgatggagactgacctgtacaagttgctgaaaagccagcagctgagcaatgaccatatctgctacttcctctaccagatcctgcggggcctcaagtacatccactccgccaacgtgctccaccgagatctaaagccctccaacctgctcagcaacaccacctgcgaccttaagatttgtgatttcggcctggcccggattgccgatcctgagcatgaccacaccggcttcctgacggagtatgtggctacgcgctggtaccgggccccagagatcatgctgaactccaagggctataccaagtccatcgacatctggtctgtgggctgcattctggctgagatgctctctaaccggcccatcttccctggcaagcactacctggatcagctcaaccacattctgggcatcctgggctccccatcccaggaggacctgaattgtatcatcaacatgaaggcccgaaactacctacagtctctgccctccaagaccaaggtggcttgggccaagcttttccccaagtcagactccaaagcccttgacctgctggaccggatgttaacctttaaccccaataaacggatcacagtggaggaagcgctggctcacccctacctggagcagtactatgacccgacggatgagccagtggccgaggagcccttcaccttcgccatggagctggatgacctacctaaggagcggctgaaggagctcatcttccaggagacagcacgcttccagcccggagtgctggaggccccctagcccagacagacatctctgcaccctggggcctggacctgcctcctgcctgcccctctcccgccagactgttagaaaatggacactgtgcccagcccggaccttggcagcccaggccggggtggagcatgggcctggccacctctctcctttgctgaggcctccagcttcaggcaggccaaggccttctcctccccacccgccctccccacggggcctcgggagctcaggtggccccagttcaatctcccgctgctgctgctgctgcgcccttaccttccccagcgtcccagtctctggcagttctggaatggaagggttctggctgccccaacctgctgaagggcagaggtggagggtggggggcgctgagtagggactcagggccatgcctgcccccctcatctcattcaaaccccaccctagtttccctgaaggaacattccttagtctcaagggctagcatccctgaggagccaggccgggccgaatcccctccctgtcaaagctgtcacttcgcgtgccctcgctgcttctgtgtgtggtgagcagaagtggagctggggggcgtggagagcccggcgcccctgccacctccctgacccgtctaatatataaatatagagatgtgtctatggctgaaaaaaaaaaaaaaaa

SEQ ID NO: 1334 - DNA, 4736 bp, Homo sapiens
gctgtcggggcgaccgcgggagctcgccgtgcgccgtggctgggaccggcctggccgagcgcgccggcgccgcggccgcagacaaagggcggctcgcgcccgggccgccacgctctcgggctctgcctcgggaaggagacttggtctgaaagatgccacattcctgcagcctctcttggtgcagtggaatacagtcttgggcgaggtggcgtggatgagctggtgaaagaggatgctgcccacatccaaaggctccagaggatcctggcctggcagctgagctcccctgcatttggaacctcaggcgtaacttggtgtagagctcatgaaaggtgcttgtgtttctccagcttttttcaccagtgcttaccagactggctcaggttttggaatctaaggtgagctggtagaaacaggagaggtagaaagaagcccctggatgcctccagaattcattgatgggatccctgcatactgcttggaacacagaaagaggctgtgacacagctgagctttggagcatcttaaggagctcagctcagcaaacaactcttgcatttcagccagaaagagcctcttgtaacaaagtattcaaaggggagagtttctgcatcttttactttgcagtccactatggtagaaaacttgacattccatagataatgatactgggttttctttccaagatgccagctttaaaagaaatatgagccattctaagctttaagaagggttcaggaaacacaggaattagtagacagccctcccaatgcaggttaagacgacagcctgcgcccccaactagcacagctcagcgagcatgaccatatgccattctcgtctccagagagctggtggcagtgacctcactaggagaaaacacatccctcagccgtgggacttgacagaatgaggtgcgcgagggaggccgctagccgagacttggcctttcctgactgcccctgtgttacctgggcagctccagatcactgagcccacaatggctgagaagggtgactgcatcgccagtgtctatgggtatgacctcggtgggcgctttgttgacttccaacccctgggcttcggtgtcaatggtttggtgctgtcggccgtggacagccgggcctgccggaaggtcgctgtgaagaagattgccctgagcgatgcccgcagcatgaagcacgcgctccgagagatcaagatcattcggcgcctggaccacgacaacatcgtcaaagtgtacgaggtgctcggtcccaagggcactgacctgcagggtgagctgttcaagttcagcgtggcgtacatcgtccaggagtacatggagaccgacctggcacgcctgctggagcagggcacgctggcagaagagcatgccaagctgttcatgtaccagctgctccgcgggctcaagtacatccactccgccaacgtgctgcacagggacctgaagcccgccaacatcttcatcagcacagaggacctcgtgctcaagattggggatttcgggttggcaaggatcgttgatcagcattactcccacaagggttatctgtcagaagggttggtaacaaagtggtaccgttccccacgactgctcctttcccccaataactacaccaaagccatcgacatgtgggccgccggctgcatcctggctgagatgcttacggggagaatgctctttgctggggcccatgagctggagcagatgcaactcatcctggagaccatccctgtaatccgggaggaagacaaggacgagctgctcagggtgatgccttcctttgtcagcagcacctgggaggtgaagaggcctctgcgcaagctgctccctgaagtgaacagtgaagccatcgactttctggagaagatcctgacctttaaccccatggatcgcctaacagctgagatggggctgcaacacccctacatgagcccatactcgtgccctgaggacgagcccacctcacaacaccccttccgcattgaggatgagatcgacgacatcgtgctgatggccgctaaccagagccagctgtccaactgggacacgtgcagttccaggtaccctgtgagcctgtcgtcggacctggagtggcggcctgaccggtgccaggacgccagcgaggtacagcgcgacccgcgcgcgggttcggcgccactggctgaggacgtgcaggtggacccgcgcaaggactcgcacagcagctccgagcgcttcctagagcagtcgcactcgtccatggagcgcgccttcgaggccgactacgggcgctcctgcgactacaaggtggggtcgccgtcctacctggacaagctgctgtggcgcgacaacaagccgcaccactactcggagcccaagctcatcctggacctgtcgcactggaagcaggcggccggcgcgccccccacggccacggggctggcggacacgggggcgcgcgaggacgagccggccagcctcttcctggagatcgcgcagtgggtcaagagcacgcagggcggcccagagcacgccagcccgcccgccgacgaccccgagcgccgcttgtctgcctcgccccccggccgcccggccccggtggacggcggcgccagcccccagttcgacctggacgtgttcatctcccgcgccctgaagctctgcaccaagcccgaggacctgccggacaataaactgggcgacctcaatggtgcgtgcatccccgagcaccctggcgacctcgtgcagaccgaggccttctccaaagaaaggtggtgagggcggaggggccgctccaggccccacagagcaggagacccccagagaaagccggggctggcaggaggcggccgcccttcccgcccctctctgctgccttggggttggcagaacacgtgaaggatccgaggagcgagaggaatgtccatttcttaaactgccttaataactagcctttaacctgtgggagcgggtttgaacaggaccctggcttaggggttgatcactttcctagcaaaggggagaccacatgtggtgcacagggaagaaacggctttagacagcagtctgcgggccccacctgggtggcaggatgccgagaaatcttgcagaggtagctccgaaaccatctggcccaactagcctcaactgacagctgaggaaaggcaattaggcccagagaggcagagacactcgcttaagatcacaggcttagtgtgaggacgagcttgaaatcccagtctcctggcccccaggccagggtctgtccaccatagaatgtcttcctctactggggtcgttctggctttttgttagaaacttggtctgagatgtttcttccctgtccattaccattcgatgttcttttattcagagcaatgtttcttgtattctgaaactggaaactgaaccagtttgtttctcctagtcaccaagcatactttcctggctccccaagtacttaaatgttctcatctgtcgcacccctgtatttgcctcacccctgcatggtcggaaatcttcgtttcaggtcagaacagcctggggtctgtgggtaaaatcagcccttctcccaggcctgtgcacacaccccctcagcactccctatgcactttcctgacacgcaaagacacagccctctttccccactgggcgtcctaccccagtgaggttgaaggcaccaattccaagaatccctccaacctccctgccagcactcccccttcaccccacacccggcccccccacctaaccacagcgcctctccagacctacctcgggacctaatgttctctacatgaactgctcatttggaggacagcagtgaggtcctgccatagagcaaatgtgttaggagagaaggtttcacatgggacccaacatccttcatcaatactttcctgagtttgatcatccatttagccttgacaaacagcagaccctacagagatgtgttggagagcacgtcgtgaccttgggggcaaggaatccagaaaggtaggaagatatgaaaagagaggtgtcaacagcaagggctcttaggggtcaggcaccagcatggagacctcatgacaaaggaagggactcaaagcagcaatgcccctcatagtgtaggctaaggtgagtttggtgcatgcaaacctgtgtgctcacccacagagcatggggtaatggtgtgtagacacaggccctctgcagaagcgtggggtggggacactgacagcccctatctggtccccaggaacattctaccatttctgccactggtgttcagctccttctcttcccccaacactcccaaagatacccacaggaagtccagccagtttccaggtagaggattccaccagttggtcttgggctgcgttcaccctcacatcacagcaccttaaatctaatcagcaaactataatttgtacgttgaaacctgcaacacattagaaacttatatttaaaaacagaattaatcacactgaccaacttttaaatggaaaatatgtaaataggaagtgtttgggttttgttttttctttaagaaaaagaaatgtacaccactcctcatgtgccattttgtcctcagagggcggctttacttttttggtaaaggaacaagctgctggccttgaccaggagttcatatataactgttattacagaggaattgttataactactaatgtttttaaaaaatttattaaacattattaaacttgatcaggtcaggccaaataaagttttattggaacacaga

SEQ ID NO: 1335 - DNA, 4193 bp, Homo sapiens
catggcggcgactgcggcaaagcgagagcctcggagacgccgctgccgccagcacagccggagatctgagccgacactgggggcagtccgcgagccccgcactctctcgatgagtcggagaagtcccgttgtatcagagtaagatggacggtagctttgattgtgattgtggtgagctggagccacctgatcactaacaaaagacatcttctgttaaccaacagccgccaggcttcctgttgaaataaatatatagcaacaaaggaaaaaaagaagcaaaacggaaatagtgcttaccagcaccttagaatgatgctgctcaggaccagtccaacactgaatgtatctgcactgtgaggagaatgttcatagaagcctgttgtgtgcatatttattcactttttgttaaatgttaaatcgtttagcacggtaatctgagtgcacagtatgtcatttcattccgtttgagtttcttgttttcgttaaatgtctgcagagttgctgcccctttcttgaactatgagtactgcaatctttttaattctcaatatgaatagagctttttgagctttaaatctaaggggaactcgacaggcctgtttggcatatgcaatgaacatcaagaaaccatcttgctgtggaagcataattatttttcttctccctttttgaaagatctttccttttgatgccagttttcttccttgtttacacaagttcaatttgaaaggaaaaggcaatagtaagggtttcaaaatggcagagaaatttgaaagtctcatgaacattcatggttttgatctgggttctaggtatatggacttaaaaccattgggttgtggaggcaatggcttggttttttctgctgtagacaatgactgtgacaaaagagtagccatcaagaaaattgtccttactgatccccagagtgtcaaacatgctctacgtgaaatcaaaattattagaagacttgaccatgataacattgtgaaagtgtttgagattcttggtcccagtggaagccaattaacagacgatgtgggctctcttacggaactgaacagtgtttacattgttcaggagtacatggagacagacttggctaatgtgctggagcagggccctttactggaagagcatgccaggcttttcatgtatcagctgctacgggggctcaagtatattcactctgcaaatgtactgcacagagatctcaaaccagctaatcttttcattaatacggaagacttggtgctgaagataggtgactttggtcttgcacggatcatggatcctcattattcccataagggtcatctttctgaaggattggttactaaatggtacagatctccacgtcttttactttctcctaataattatactaaagccattgacatgtgggctgcaggctgcatctttgctgaaatgctgactggtaaaaccctttttgcaggtgcacatgaacttgaacagatgcagctgattttagaatctattcctgttgtacatgaggaagatcgtcaggagcttctcagcgtaattccagtttacattagaaatgacatgactgagccacacaaacctttaactcagctgcttccaggaattagtcgagaagcactggatttcctggaacaaattttgacatttagccccatggatcggttaacagcagaagaagcactctcccatccttacatgagcatatattcttttccaatggatgagccaatttcaagccatccttttcatattgaagatgaagttgatgatattttgcttatggatgaaactcacagtcacatttataactgggaaaggtatcatgattgtcagttttcagagcatgattggcctgtacataacaactttgatattgatgaagttcagcttgatccaagagctctgtccgatgtcactgatgaagaagaagtacaagttgatccccgaaaatatttggatggagatcgggaaaagtatctggaggatcctgcttttgataccaattactctactgagccttgttggcaatactcagatcatcatgaaaacaaatattgtgatctggagtgtagccatacttgtaactacaaaacgaggtcatcatcatatttagataacttagtttggagagagagtgaagttaaccattactatgaacccaagcttattatagatctttccaattggaaagaacaaagcaaagaaaaatctgataagaaaggcaaatcaaaatgtgaaaggaatggattggttaaagcccagatagcgctagaggaagcatcacagcaactggctggaaaagaaagggaaaagaatcagggatttgattttgattcctttattgcaggaactattcagcttagttcccagcatgagcctactgatgttgttgataaattaaatgacttgaatagctcagtgtcccaactagaattgaaaagtttgatatcaaagtcagtaagccaagaaaaacaggaaaaaggaatggcaaatctggctcaattagaagccttgtaccagtcttcttgggacagccagtttgtgagtggtggggaggactgttttttcataaatcagttttgtgaggtaaggaaggatgaacaagttgagaaggaaaacacttacactagttacttggacaagttctttagcaggaaagaagatactgaaatgctagaaactgagccagtagaggatgggaagcttggggagagaggacatgaggaaggatttctgaacaacagtggggagttcctctttaacaagcagctcgagtccataggcatcccacagtttcacagtccagttgggtcaccacttaagtcaatacaggccacattaacaccttctgctatgaaatcttcccctcaaattcctcatcaaacatacagcagcattctgaaacatctgaactaaaacactcagcagacatttatctttgtattcttcatgaaatgtgttttgtctttttttattactagtgtttaagtcattttttacttgaatcagatggtgtcatttagtaaggattttatgagttcttgttttttaaaatccagactttctttttctacatgtgagatagttttcattttaactggcatgtcatttgcacacaaaaataaagactagagcaaaataatgcaacgcaggaggagaaaagaaatgcactaagacaagaacattctctcatagaacattgatctgttttacaggaaacaaaccttgccttgaaatttacacagtgagactgtacataattgcatgaaaatagctatttttttcctaagacatttttcattcatgaatattttcaagtttttcatactgtacacatttcttaaaacacatgataccagcagcaactgaaaatgaatgccgaatttggtacacatgtgttatctacctcaaggtaacaagagtatgtggcaaaacatataccacccatagtgcttcacaaaatgcacttctatttagccagcgtttattgtagtaaactattcttaataaaactcactcactgtttataaatgttctggtatgcattctttatagtgaagtgttaatacatcacatcttatttattttagcaaatcagtatattttctgtatttaattataaaaaattaacttagtttttaaaatttatttgcaaatatactttttccatttggcactatggtttgttgcctacctagctgcatctataatgtcagcttatcctaaggctgtccacgtacttaatttacttaagtgttcattttaagtaacgtgctcactgtgtataggaatttgtattttggaggtgcttgatctatctacaaagaaaaattaattaggaattactttattataaaatgctcctagaagtcttaattgtgtttattttttaaaaaaacaaatgttagacttgtgtgcatggaagtaattaaggtacatcattattgtagtttgaaagttgtacatgataagacattttgtttttactgtatgtttttactgaatgatctattccccatcccaaggcaagcatgaataaaattaggttaaacgtagcatgtggcatcgcagtctcttagaatttgtttcatctattttattttattgaatactgtctgtatctttggttatcctgtttgaagaaaaaggacaaataaaacatggccagcaaatacaaaaaaaaaaaa

SEQ ID NO: 1336 - DNA, 2918 bp, Homo sapiens
ggacagggcagctcaagacgctgaggtggtggctgcggcctttgaacaagtaagtgagccaccctcggagacccccgcgctggggacgggaggccggcgagcctcgggacctctgaaagccttgaggaggcgcggggacaccatggccgagcctctgaaggaggaagacggcgaggacggctctgcggagccccccgggcccgtgaaggccgaacccgcccacaccgctgcctctgtagcggccaagaacctggccctgcttaaagcccgctccttcgatgtgacctttgacgtgggcgacgagtacgagatcatcgagaccataggcaacggggcctatggagtggtgtcctccgcccgccgccgcctcaccggccagcaggtggccatcaagaagatccctaatgctttcgatgtggtgaccaatgccaagcggaccctcagggagctgaagatcctcaagcactttaaacacgacaacatcatcgccatcaaggacatcctgaggcccaccgtgccctatggcgaattcaaatctgtctacgtggtcctggacctgatggaaagcgacctgcaccagatcatccactcctcacagcccctcacactggaacacgtgcgctacttcctgtaccaactgctgcggggcctgaagtacatgcactcggctcaggtcatccaccgtgacctgaagccctccaacctattggtgaatgagaactgtgagctcaagattggtgactttggtatggctcgtggcctgtgcacctcgcccgctgaacatcagtacttcatgactgagtatgtggccacgcgctggtaccgtgcgcccgagctcatgctctctttgcatgagtatacacaggctattgacctctggtctgtgggctgcatctttggtgagatgctggcccggcgccagctcttcccaggcaaaaactatgtacaccagctacagctcatcatgatggtgctgggtaccccatcaccagccgtgattcaggctgtgggggctgagagggtgcgggcctatatccagagcttgccaccacgccagcctgtgccctgggagacagtgtacccaggtgccgaccgccaggccctatcactgctgggtcgcatgctgcgttttgagcccagcgctcgcatctcagcagctgctgcccttcgccaccctttcctggccaagtaccatgatcctgatgatgagcctgactgtgccccgccctttgactttgcctttgaccgcgaagccctcactcgggagcgcattaaggaggccattgtggctgaaattgaggacttccatgcaaggcgtgagggcatccgccaacagatccgcttccagccttctctacagcctgtggctagtgagcctggctgtccagatgttgaaatgcccagtccctgggctcccagtggggactgtgccatggagtctccaccaccagccccgccaccatgccccggccctgcacctgacaccattgatctgaccctgcagccacctccaccagtcagtgagcctgccccaccaaagaaagatggtgccatctcagacaatactaaggctgcccttaaagctgccctgctcaagtctttgaggagccggctcagagatggccccagcgcacccctggaggctcctgagcctcggaagccggtgacagcccaggagcgccagcgggagcgggaggagaagcggcggaggcggcaagaacgagccaaggagcgggagaaacggcggcaggagcgggagcgaaaggaacggggggctggggcctctgggggcccctccactgaccccttggctggactagtgctcagtgacaatgacagaagcctgttggaacgctggactcgaatggcccggcccgcagccccagccctcacctctgtgccggcccctgccccagcgccaacgccaaccccaaccccagtccaacctaccagtcctcctcctggccctgtagcccagcccactggcccgcaaccacaatctgcgggctctacctctggccctgtaccccagcctgcctgcccaccccctggccctgcaccccaccccactggccctcctgggcccatccctgtccccgcgccaccccagattgccacctccaccagcctcctggctgcccagtcacttgtgccaccccctgggctgcctggctccagcaccccaggagttttgccttacttcccacctggcctgccgcccccagacgccgggggagcccctcagtcttccatgtcagagtcacctgatgtcaaccttgtgacccagcagctatctaagtcacaggtggaggaccccctgccccctgtgttctcaggcacaccaaagggcagtggggctggctacggtgttggctttgacctggaggaattcttaaaccagtctttcgacatgggcgtggctgatgggccacaggatggccaggcagattcagcctctctctcagcctccctgcttgctgactggctcgaaggccatggcatgaaccctgccgatattgagtccctgcagcgtgagatccagatggactccccaatgctgctggctgacctgcctgacctccaggacccctgaggcccccagcctgtgccttgctgccacagtagacctagttccaggatccatgggagcattctcaaaggctttagccctggacccagcaggtgaggctcggcttggattattctgcaggttcatctcagacccacctttcagccttaagcagccacctgagccaccaccgagccatggcaggatcgggagaccccaactccccctgaacaatccttttcagtattatatttttattattattatgttattattacactgtctttttgccatcaaaatgaggcctgtgaaatacaaggttcccttctgcaaaaaaaaaaaaaaaaaa

SEQ ID NO: 1337 - DNA, 2737 bp, Homo sapiens
cgcgggctccgcagaggagcagaggttgggcggccgcctcggttaactccgctgcagcccaaagcacgggaatcgcgggacagacaaacgagcggagggaagatacctagaagccaggaaaccgcgagctgcagtccaacttggccggaagctgcggagaggctcagccaccggaagtcagtggagggttcggccggacgctctagaatcccggaggaccgggatctctgtggttggccgtgacgggcaccctctaccggggatgacacattcccagagctcctgggaccaagcaaatggcggacacaattccctgggcggaaggggacttcgggagccagtagccaagctacgtggtcctggacctgatggaaagcgacctgcaccagatcatccactcctcacagcccctcacactggaacacgtgcgctacttcctgtaccaactgctgcggggcctgaagtacatgcactcggctcaggtcatccaccgtgacctgaagccctccaacctattggtgaatgagaactgtgagctcaagattggtgactttggtatggctcgtggcctgtgcacctcgcccgctgaacatcagtacttcatgactgagtatgtggccacgcgctggtaccgtgcgcccgagctcatgctctctttgcatgagtatacacaggctattgacctctggtctgtgggctgcatctttggtgagatgctggcccggcgccagctcttcccaggcaaaaactatgtacaccagctacagctcatcatgatggtgctgggtaccccatcaccagccgtgattcaggctgtgggggctgagagggtgcgggcctatatccagagcttgccaccacgccagcctgtgccctgggagacagtgtacccaggtgccgaccgccaggccctatcactgctgggtcgcatgctgcgttttgagcccagcgctcgcatctcagcagctgctgcccttcgccaccctttcctggccaagtaccatgatcctgatgatgagcctgactgtgccccgccctttgactttgcctttgaccgcgaagccctcactcgggagcgcattaaggaggccattgtggctgaaattgaggacttccatgcaaggcgtgagggcatccgccaacagatccgcttccagccttctctacagcctgtggctagtgagcctggctgtccagatgttgaaatgcccagtccctgggctcccagtggggactgtgccatggagtctccaccaccagccccgccaccatgccccggccctgcacctgacaccattgatctgaccctgcagccacctccaccagtcagtgagcctgccccaccaaagaaagatggtgccatctcagacaatactaaggctgcccttaaagctgccctgctcaagtctttgaggagccggctcagagatggccccagcgcacccctggaggctcctgagcctcggaagccggtgacagcccaggagcgccagcgggagcgggaggagaagcggcggaggcggcaagaacgagccaaggagcgggagaaacggcggcaggagcgggagcgaaaggaacggggggctggggcctctgggggcccctccactgaccccttggctggactagtgctcagtgacaatgacagaagcctgttggaacgctggactcgaatggcccggcccgcagccccagccctcacctctgtgccggcccctgccccagcgccaacgccaaccccaaccccagtccaacctaccagtcctcctcctggccctgtagcccagcccactggcccgcaaccacaatctgcgggctctacctctggccctgtaccccagcctgcctgcccaccccctggccctgcaccccaccccactggccctcctgggcccatccctgtccccgcgccaccccagattgccacctccaccagcctcctggctgcccagtcacttgtgccaccccctgggctgcctggctccagcaccccaggagttttgccttacttcccacctggcctgccgcccccagacgccgggggagcccctcagtcttccatgtcagagtcacctgatgtcaaccttgtgacccagcagctatctaagtcacaggtggaggaccccctgccccctgtgttctcaggcacaccaaagggcagtggggctggctacggtgttggctttgacctggaggaattcttaaaccagtctttcgacatgggcgtggctgatgggccacaggatggccaggcagattcagcctctctctcagcctccctgcttgctgactggctcgaaggccatggcatgaaccctgccgatattgagtccctgcagcgtgagatccagatggactccccaatgctgctggctgacctgcctgacctccaggacccctgaggcccccagcctgtgccttgctgccacagtagacctagttccaggatccatgggagcattctcaaaggctttagccctggacccagcaggtgaggctcggcttggattattctgcaggttcatctcagacccacctttcagccttaagcagccacctgagccaccaccgagccatggcaggatcgggagaccccaactccccctgaacaatccttttcagtattatatttttattattattatgttattattacactgtctttttgccatcaaaatgaggcctgtgaaatacaaggttcccttctgcaaaaaaaaaaaaaaaaaaaaaaaaaaaa

SEQ ID NO: 1338 - DNA, 3113 bp, Homo sapiens
cgcgggctccgcagaggagcagaggttgggcggccgcctcggttaactccgctgcagcccaaagcacgggaatcgcgggacagacaaacgagcggagggaagatacctagaagccaggaaaccgcgagctgcagtccaacttggccggaagctgcggagaggctcagccaccggaagtcagtggagggttcggccggacgctctagaatcccggaggaccgggatctctgtggttggccgtgacgggcaccctctaccggggatgacacattcccagagctcctgggaccaagcaaatggcggacacaattccctgggcggaaggggacttcgggagccagtagccaagacaccatggccgagcctctgaaggaggaagacggcgaggacggctctgcggagccccccgggcccgtgaaggtcgaacccgcccacaccgctgcctctgtagcggccaagaacctggccctgcttaaagcccgctccttcgatgtgacctttgacgtgggcgacgagtacgagatcatcgagaccataggcaacggggcctatggagtggtgtcctccgcccgccgccgcctcaccggccagcaggtggccatcaagaagatccctaatgctttcgatgtggtgaccaatgccaagcggaccctcagggagctgaagatcctcaagcactttaaacacgacaacatcatcgccatcaaggacatcctgaggcccaccgtgccctatggcgaattcaaatctgtctacgtggtcctggacctgatggaaagcgacctgcaccagatcatccactcctcacagcccctcacactggaacacgtgcgctacttcctgtaccaactgctgcggggcctgaagtacatgcactcggctcaggtcatccaccgtgacctgaagccctccaacctattggtgaatgagaactgtgagctcaagattggtgactttggtatggctcgtggcctgtgcacctcgcccgctgaacatcagtacttcatgactgagtatgtggccacgcgctggtaccgtgcgcccgagctcatgctctctttgcatgagtatacacaggctattgacctctggtctgtgggctgcatctttggtgagatgctggcccggcgccagctcttcccaggcaaaaactatgtacaccagctacagctcatcatgatggtgctgggtaccccatcaccagccgtgattcaggctgtgggggctgagagggtgcgggcctatatccagagcttgccaccacgccagcctgtgccctgggagacagtgtacccaggtgccgaccgccaggccctatcactgctgggtcgcatgctgcgttttgagcccagcgctcgcatctcagcagctgctgcccttcgccaccctttcctggccaagtaccatgatcctgatgatgagcctgactgtgccccgccctttgactttgcctttgaccgcgaagccctcactcgggagcgcattaaggaggccattgtggctgaaattgaggacttccatgcaaggcgtgagggcatccgccaacagatccgcttccagccttctctacagcctgtggctagtgagcctggctgtccagatgttgaaatgcccagtccctgggctcccagtggggactgtgccatggagtctccaccaccagccccgccaccatgccccggccctgcacctgacaccattgatctgaccctgcagccacctccaccagtcagtgagcctgccccaccaaagaaagatggtgccatctcagacaatactaaggctgcccttaaagctgccctgctcaagtctttgaggagccggctcagagatggccccagcgcacccctggaggctcctgagcctcggaagccggtgacagcccaggagcgccagcgggagcgggaggagaagcggcggaggcggcaagaacgagccaaggagcgggagaaacggcggcaggagcgggagcgaaaggaacggggggctggggcctctgggggcccctccactgaccccttggctggactagtgctcagtgacaatgacagaagcctgttggaacgctggactcgaatggcccggcccgcagccccagccctcacctctgtgccggcccctgccccagcgccaacgccaaccccaaccccagtccaacctaccagtcctcctcctggccctgtagcccagcccactggcccgcaaccacaatctgcgggctctacctctggccctgtaccccagcctgcctgcccaccccctggccctgcaccccaccccactggccctcctgggcccatccctgtccccgcgccaccccagattgccacctccaccagcctcctggctgcccagtcacttgtgccaccccctgggctgcctggctccagcaccccaggagttttgccttacttcccacctggcctgccgcccccagacgccgggggagcccctcagtcttccatgtcagagtcacctgatgtcaaccttgtgacccagcagctatctaagtcacaggtggaggaccccctgccccctgtgttctcaggcacaccaaagggcagtggggctggctacggtgttggctttgacctggaggaattcttaaaccagtctttcgacatgggcgtggctgatgggccacaggatggccaggcagattcagcctctctctcagcctccctgcttgctgactggctcgaaggccatggcatgaaccctgccgatattgagtccctgcagcgtgagatccagatggactccccaatgctgctggctgacctgcctgacctccaggacccctgaggcccccagcctgtgccttgctgccacagtagacctagttccaggatccatgggagcattctcaaaggctttagccctggacccagcaggtgaggctcggcttggattattctgcaggttcatctcagacccacctttcagccttaagcagccacctgagccaccaccgagccatggcaggatcgggagaccccaactccccctgaacaatccttttcagtattatatttttattattattatgttattattacactgtctttttgccatcaaaatgaggcctgtgaaatacaaggttcccttctgca

SEQ ID NO: 1339 - DNA, 2813 bp, Homo sapiens
ggacagggcagctcaagacgctgaggtggtggctgcggcctttgaacaaacaccatggccgagcctctgaaggaggaagacggcgaggacggctctgcggagccccccgggcccgtgaaggtcgaacccgcccacaccgctgcctctgtagcggccaagaacctggccctgcttaaagcccgctccttcgatgtgacctttgacgtgggcgacgagtacgagatcatcgagaccataggcaacggggcctatggagtggtgtcctccgcccgccgccgcctcaccggccagcaggtggccatcaagaagatccctaatgctttcgatgtggtgaccaatgccaagcggaccctcagggagctgaagatcctcaagcactttaaacacgacaacatcatcgccatcaaggacatcctgaggcccaccgtgccctatggcgaattcaaatctgtctacgtggtcctggacctgatggaaagcgacctgcaccagatcatccactcctcacagcccctcacactggaacacgtgcgctacttcctgtaccaactgctgcggggcctgaagtacatgcactcggctcaggtcatccaccgtgacctgaagccctccaacctattggtgaatgagaactgtgagctcaagattggtgactttggtatggctcgtggcctgtgcacctcgcccgctgaacatcagtacttcatgactgagtatgtggccacgcgctggtaccgtgcgcccgagctcatgctctctttgcatgagtatacacaggctattgacctctggtctgtgggctgcatctttggtgagatgctggcccggcgccagctcttcccaggcaaaaactatgtacaccagctacagctcatcatgatggtgctgggtaccccatcaccagccgtgattcaggctgtgggggctgagagggtgcgggcctatatccagagcttgccaccacgccagcctgtgccctgggagacagtgtacccaggtgccgaccgccaggccctatcactgctgggtcgcatgctgcgttttgagcccagcgctcgcatctcagcagctgctgcccttcgccaccctttcctggccaagtaccatgatcctgatgatgagcctgactgtgccccgccctttgactttgcctttgaccgcgaagccctcactcgggagcgcattaaggaggccattgtggctgaaattgaggacttccatgcaaggcgtgagggcatccgccaacagatccgcttccagccttctctacagcctgtggctagtgagcctggctgtccagatgttgaaatgcccagtccctgggctcccagtggggactgtgccatggagtctccaccaccagccccgccaccatgccccggccctgcacctgacaccattgatctgaccctgcagccacctccaccagtcagtgagcctgccccaccaaagaaagatggtgccatctcagacaatactaaggctgcccttaaagctgccctgctcaagtctttgaggagccggctcagagatggccccagcgcacccctggaggctcctgagcctcggaagccggtgacagcccaggagcgccagcgggagcgggaggagaagcggcggaggcggcaagaacgagccaaggagcgggagaaacggcggcaggagcgggagcgaaaggaacggggggctggggcctctgggggcccctccactgaccccttggctggactagtgctcagtgacaatgacagaagcctgttggaacgctggactcgaatggcccggcccgcagccccagccctcacctctgtgccggcccctgccccagcgccaacgccaaccccaaccccagtccaacctaccagtcctcctcctggccctgtagcccagcccactggcccgcaaccacaatctgcgggctctacctctggccctgtaccccagcctgcctgcccaccccctggccctgcaccccaccccactggccctcctgggcccatccctgtccccgcgccaccccagattgccacctccaccagcctcctggctgcccagtcacttgtgccaccccctgggctgcctggctccagcaccccaggagttttgccttacttcccacctggcctgccgcccccagacgccgggggagcccctcagtcttccatgtcagagtcacctgatgtcaaccttgtgacccagcagctatctaagtcacaggtggaggaccccctgccccctgtgttctcaggcacaccaaagggcagtggggctggctacggtgttggctttgacctggaggaattcttaaaccagtctttcgacatgggcgtggctgatgggccacaggatggccaggcagattcagcctctctctcagcctccctgcttgctgactggctcgaaggccatggcatgaaccctgccgatattgagtccctgcagcgtgagatccagatggactccccaatgctgctggctgacctgcctgacctccaggacccctgaggcccccagcctgtgccttgctgccacagtagacctagttccaggatccatgggagcattctcaaaggctttagccctggacccagcaggtgaggctcggcttggattattctgcaggttcatctcagacccacctttcagccttaagcagccacctgagccaccaccgagccatggcaggatcgggagaccccaactccccctgaacaatccttttcagtattatatttttattattattatgttattattacactgtctttttgccatcaaaatgaggcctgtgaaatacaaggttcccttctgca

SEQ ID NO: 1340 - DNA, 1412 bp, Homo sapiens
attaattgcttgccatcatgagcagaagcaagcgtgacaacaatttttatagtgtagagattggagattctacattcacagtcctgaaacgatatcagaatttaaaacctataggctcaggagctcaaggaatagtatgcgcagcttatgatgccattcttgaaagaaatgttgcaatcaagaagctaagccgaccatttcagaatcagactcatgccaagcgggcctacagagagctagttcttatgaaatgtgttaatcacaaaaatataattggccttttgaatgttttcacaccacagaaatccctagaagaatttcaagatgtttacatagtcatggagctcatggatgcaaatctttgccaagtgattcagatggagctagatcatgaaagaatgtcctaccttctctatcagatgctgtgtggaatcaagcaccttcattctgctggaattattcatcgggacttaaagcccagtaatatagtagtaaaatctgattgcactttgaagattcttgacttcggtctggccaggactgcaggaacgagttttatgatgacgccttatgtagtgactcgctactacagagcacccgaggtcatccttggcatgggctacaaggaaaacgtggatttatggtctgtggggtgcattatgggagaaatggtttgccacaaaatcctctttccaggaagggactatattgatcagtggaataaagttattgaacagcttggaacaccatgtcctgaattcatgaagaaactgcaaccaacagtaaggacttacgttgaaaacagacctaaatatgctggatatagctttgagaaactcttccctgatgtccttttcccagctgactcagaacacaacaaacttaaagccagtcaggcaagggatttgttatccaaaatgctggtaatagatgcatctaaaaggatctctgtagatgaagctctccaacacccgtacatcaatgtctggtatgatccttctgaagcagaagctccaccaccaaagatccctgacaagcagttagatgaaagggaacacacaatagaagagtggaaagaattgatatataaggaagttatggacttggaggagagaaccaagaatggagttatacgggggcagccctctcctttaggtgcagcagtgatcaatggctctcagcatccatcatcatcgtcgtctgtcaatgatgtgtcttcaatgtcaacagatccgactttggcctctgatacagacagcagtctagaagcagcagctgggcctctgggctgctgtagatgactacttgggccatcggggggtgggagggatggggagtcggttagtcattgatagaactactttgaaaacaattcagtggtcttatttttgggtgatttttcaaaaaatgta

SEQ ID NO: 1341 - DNA, 1417 bp, Homo sapiens
attaattgcttgccatcatgagcagaagcaagcgtgacaacaatttttatagtgtagagattggagattctacattcacagtcctgaaacgatatcagaatttaaaacctataggctcaggagctcaaggaatagtatgcgcagcttatgatgccattcttgaaagaaatgttgcaatcaagaagctaagccgaccatttcagaatcagactcatgccaagcgggcctacagagagctagttcttatgaaatgtgttaatcacaaaaatataattggccttttgaatgttttcacaccacagaaatccctagaagaatttcaagatgtttacatagtcatggagctcatggatgcaaatctttgccaagtgattcagatggagctagatcatgaaagaatgtcctaccttctctatcagatgctgtgtggaatcaagcaccttcattctgctggaattattcatcgggacttaaagcccagtaatatagtagtaaaatctgattgcactttgaagattcttgacttcggtctggccaggactgcaggaacgagttttatgatgacgccttatgtagtgactcgctactacagagcacccgaggtcatccttggcatgggctacaaggaaaacgttgacatttggtcagttgggtgcatcatgggagaaatgatcaaaggtggtgttttgttcccaggtacagatcatattgatcagtggaataaagttattgaacagcttggaacaccatgtcctgaattcatgaagaaactgcaaccaacagtaaggacttacgttgaaaacagacctaaatatgctggatatagctttgagaaactcttccctgatgtccttttcccagctgactcagaacacaacaaacttaaagccagtcaggcaagggatttgttatccaaaatgctggtaatagatgcatctaaaaggatctctgtagatgaagctctccaacacccgtacatcaatgtctggtatgatccttctgaagcagaagctccaccaccaaagatccctgacaagcagttagatgaaagggaacacacaatagaagagtggaaagaattgatatataaggaagttatggacttggaggagagaaccaagaatggagttatacgggggcagccctctcctttagcacaggtgcagcagtgatcaatggctctcagcatccatcatcatcgtcgtctgtcaatgatgtgtcttcaatgtcaacagatccgactttggcctctgatacagacagcagtctagaagcagcagctgggcctctgggctgctgtagatgactacttgggccatcggggggtgggagggatggggagtcggttagtcattgatagaactactttgaaaacaattcagtggtcttatttttgggtgatttttcaaaaaatgta

SEQ ID NO: 1342 - DNA, 1412 bp, Homo sapiens
attaattgcttgccatcatgagcagaagcaagcgtgacaacaatttttatagtgtagagattggagattctacattcacagtcctgaaacgatatcagaatttaaaacctataggctcaggagctcaaggaatagtatgcgcagcttatgatgccattcttgaaagaaatgttgcaatcaagaagctaagccgaccatttcagaatcagactcatgccaagcgggcctacagagagctagttcttatgaaatgtgttaatcacaaaaatataattggccttttgaatgttttcacaccacagaaatccctagaagaatttcaagatgtttacatagtcatggagctcatggatgcaaatctttgccaagtgattcagatggagctagatcatgaaagaatgtcctaccttctctatcagatgctgtgtggaatcaagcaccttcattctgctggaattattcatcgggacttaaagcccagtaatatagtagtaaaatctgattgcactttgaagattcttgacttcggtctggccaggactgcaggaacgagttttatgatgacgccttatgtagtgactcgctactacagagcacccgaggtcatccttggcatgggctacaaggaaaacgttgacatttggtcagttgggtgcatcatgggagaaatgatcaaaggtggtgttttgttcccaggtacagatcatattgatcagtggaataaagttattgaacagcttggaacaccatgtcctgaattcatgaagaaactgcaaccaacagtaaggacttacgttgaaaacagacctaaatatgctggatatagctttgagaaactcttccctgatgtccttttcccagctgactcagaacacaacaaacttaaagccagtcaggcaagggatttgttatccaaaatgctggtaatagatgcatctaaaaggatctctgtagatgaagctctccaacacccgtacatcaatgtctggtatgatccttctgaagcagaagctccaccaccaaagatccctgacaagcagttagatgaaagggaacacacaatagaagagtggaaagaattgatatataaggaagttatggacttggaggagagaaccaagaatggagttatacgggggcagccctctcctttaggtgcagcagtgatcaatggctctcagcatccatcatcatcgtcgtctgtcaatgatgtgtcttcaatgtcaacagatccgactttggcctctgatacagacagcagtctagaagcagcagctgggcctctgggctgctgtagatgactacttgggccatcggggggtgggagggatggggagtcggttagtcattgatagaactactttgaaaacaattcagtggtcttatttttgggtgatttttcaaaaaatgta

SEQ ID NO: 1343 - DNA, 1942 bp, Homo sapiens
agggatctgaaacttgcccacccttcgggatattgcaggacgctgcatcatgagcgacagtaaatgtgacagtcagttttatagtgtgcaagtggcagactcaaccttcactgtcctaaaacgttaccagcagctgaaaccaattggctctggggcccaagggattgtttgtgctgcatttgatacagttcttgggataaatgttgcagtcaagaaactaagccgtccttttcagaaccaaactcatgcaaagagagcttatcgtgaacttgtcctcttaaaatgtgtcaatcataaaaatataattagtttgttaaatgtgtttacaccacaaaaaactctagaagaatttcaagatgtgtatttggttatggaattaatggatgctaacttatgtcaggttattcacatggagctggatcatgaaagaatgtcctaccttctttaccagatgctttgtggtattaaacatctgcattcagctggtataattcatagagatttgaagcctagcaacattgttgtgaaatcagactgcaccctgaagatccttgactttggcctggcccggacagcgtgcactaacttcatgatgaccccttacgtggtgacacggtactaccgggcgcccgaagtcatcctgggtatgggctacaaagagaacgttgatatctggtcagtcgggtgcatcatggcagaaatggtcctccataaagtcctgttcccgggaagagactatattgatcagtggaataaagttattgagcagctgggaacaccatcagcagagttcatgaagaaacttcagccaactgtgaggaattatgtcgaaaacagaccaaagtatcctggaatcaaatttgaagaactctttccagattggatattcccatcagaatctgagcgagacaaaataaaaacaagtcaagccagagatctgttatcaaaaatgttagtgattgatcctgacaagcggatctctgtagacgaagctctgcgtcacccatacatcactgtttggtatgaccccgccgaagcagaagccccaccacctcaaatttatgatgcccagttggaagaaagagaacatgcaattgaagaatggaaagagctaatttacaaagaagtcatggattgggaagaaagaagcaagaatggtgttgtaaaagatcagccttcagatgcagcagtaagtagcaacgccactccttctcagtcttcatcgatcaatgacatttcatccatgtccactgagcagacgctggcctcagacacagacagcagtcttgatgcctcgacgggaccccttgaaggctgtcgatgataggttagaaatagcaaacctgtcagcattgaaggaactctcacctccgtgggcctgaaatgcttgggagttgatggaaccaaatagaaaaactccatgttctgcatgtaagaaacacaatgccttgccctattcagacctgataggattgcctgcttagatgataaaatgaggcagaatatgtctgaagaaaaaaattgcaagccacacttctagagattttgttcaagatcatttcaggtgagcagttagagtaggtgaatttgtttcaaattgtactagtgacagtttctcatcatctgtaactgttgagatgtatgtgcatgtgaccacaaatgcttgcttggacttgcccatctagcactttggaaatcagtatttaaatgccaaataatcttccaggtagtgctgcttctgaagttatctcttaatcctcttaagtaatttggtgtctgtccagaaaaagtcgatttatgtgtattaattggccatcatgatgttatcatatcttattcccttttatgctatgatttattctatcttttgtatttcagaagacatataattaaatctatttaataaataaaaatatatagctttaaaaaaaaaaaaaaaaaa

SEQ ID NO: 1344 - DNA, 1947 bp, Homo sapiens
agggatctgaaacttgcccacccttcgggatattgcaggacgctgcatcatgagcgacagtaaatgtgacagtcagttttatagtgtgcaagtggcagactcaaccttcactgtcctaaaacgttaccagcagctgaaaccaattggctctggggcccaagggattgtttgtgctgcatttgatacagttcttgggataaatgttgcagtcaagaaactaagccgtccttttcagaaccaaactcatgcaaagagagcttatcgtgaacttgtcctcttaaaatgtgtcaatcataaaaatataattagtttgttaaatgtgtttacaccacaaaaaactctagaagaatttcaagatgtgtatttggttatggaattaatggatgctaacttatgtcaggttattcacatggagctggatcatgaaagaatgtcctaccttctttaccagatgctttgtggtattaaacatctgcattcagctggtataattcatagagatttgaagcctagcaacattgttgtgaaatcagactgcaccctgaagatccttgactttggcctggcccggacagcgtgcactaacttcatgatgaccccttacgtggtgacacggtactaccgggcgcccgaagtcatcctgggtatgggctacaaagagaacgttgatatctggtcagtcgggtgcatcatggcagaaatggtcctccataaagtcctgttcccgggaagagactatattgatcagtggaataaagttattgagcagctgggaacaccatcagcagagttcatgaagaaacttcagccaactgtgaggaattatgtcgaaaacagaccaaagtatcctggaatcaaatttgaagaactctttccagattggatattcccatcagaatctgagcgagacaaaataaaaacaagtcaagccagagatctgttatcaaaaatgttagtgattgatcctgacaagcggatctctgtagacgaagctctgcgtcacccatacatcactgtttggtatgaccccgccgaagcagaagccccaccacctcaaatttatgatgcccagttggaagaaagagaacatgcaattgaagaatggaaagagctaatttacaaagaagtcatggattgggaagaaagaagcaagaatggtgttgtaaaagatcagccttcagcacagatgcagcagtaagtagcaacgccactccttctcagtcttcatcgatcaatgacatttcatccatgtccactgagcagacgctggcctcagacacagacagcagtcttgatgcctcgacgggaccccttgaaggctgtcgatgataggttagaaatagcaaacctgtcagcattgaaggaactctcacctccgtgggcctgaaatgcttgggagttgatggaaccaaatagaaaaactccatgttctgcatgtaagaaacacaatgccttgccctattcagacctgataggattgcctgcttagatgataaaatgaggcagaatatgtctgaagaaaaaaattgcaagccacacttctagagattttgttcaagatcatttcaggtgagcagttagagtaggtgaatttgtttcaaattgtactagtgacagtttctcatcatctgtaactgttgagatgtatgtgcatgtgaccacaaatgcttgcttggacttgcccatctagcactttggaaatcagtatttaaatgccaaataatcttccaggtagtgctgcttctgaagttatctcttaatcctcttaagtaatttggtgtctgtccagaaaaagtcgatttatgtgtattaattggccatcatgatgttatcatatcttattcccttttatgctatgatttattctatcttttgtatttcagaagacatataattaaatctatttaataaataaaaatatatagctttaaaaaaaaaaaaaaaaaa

SEQ ID NO: 1345 - DNA, 2500 bp, Homo sapiens
ctgcggccgccagctcccgcgaccgcctctcctgcccctcgccggtacctcagcaaggtgccactagaagcgccaggctggggccgcctctgagcgccccgcgggggccatggatggtgaaacagcagaggagcaggggggccctgtgcccccgccagttgcacccggcggacccggcttgggcggtgctccgggggggcggcgggagcccaagaagtacgcagtgaccgacgactaccagttgtccaagcaggtgctgggcctgggtgtgaacggcaaagtgctggagtgcttccatcggcgcactggacagaagtgtgccctgaagctcctgtatgacagccccaaggcccggcaggaggtagaccatcactggcaggcttctggcggcccccatattgtctgcatcctggatgtgtatgagaacatgcaccatggcaagcgctgtctcctcatcatcatggaatgcatggaaggtggtgagttgttcagcaggattcaggagcgtggcgaccaggctttcactgagagagaagctgcagagataatgcgggatattggcactgccatccagtttctgcacagccataacattgcccaccgagatgtcaagcctgaaaacctactctacacatctaaggagaaagacgcagtgcttaagctcaccgattttggctttgctaaggagaccacccaaaatgccctgcagacaccctgctatactccctattatgtggcccctgaggtcctgggtccagagaagtatgacaagtcatgtgacatgtggtccctgggtgtcatcatgtacatcctcctttgtggcttcccacccttctactccaacacgggccaggccatctccccggggatgaagaggaggattcgcctgggccagtacggcttccccaatcctgagtggtcagaagtctctgaggatgccaagcagctgatccgcctcctgttgaagacagaccccacagagaggctgaccatcactcagttcatgaaccacccctggatcaaccaatcgatggtagtgccacagaccccactccacacggcccgagtgctgcaggaggacaaagaccactgggacgaagtcaaggaggagatgaccagtgccttggccactatgcgggtagactacgaccaggtgaagatcaaggacctgaagacctctaacaaccggctcctcaacaagaggagaaaaaagcaggcaggcagctcctctgcctcacagggctgcaacaaccagtagctcatggggccttggaggagcctggcctctcagcctgcataacagactgaaatgtgctcaggccctggccaggagggcccagggtcattcttttaacaaaaggattattttgttgtgttttaatttgtcactcggaacttcaggatggaggaccctgaccctaagcctccttcagatctctggcccaggctcaagccctagagatgggcagggcctaggggctgggagctgcctgctgccatagcagcacctttagctaggttggcccgagtgaggcctctgtgctgtcctgccctggtgcatggccttagctttctaggccactgggagttgtggctgggcttcccatcttccacagagacatctccctgtgggatgggcagatgggcctggccttgagaaaggcattggccattggttgccatggtgaccagggaccacgttgctgcctgtgaatgctgagtgagcgagtaagggaggaggggcgattgagggttcacctctgccttggggaggctgatttctcacacactggctggccctctcattctcactcctccttgggccctgaggctgctggatccggtctgcctgcctccctgtgcagtccagccctgccttgctgcagccccagcccagatggcactcagcgctctcccctgagggagtccctgggcctagccatcccctcactattcccgacccaaagggtgacttttcatctgaacttaaggtgggagatatttttaacttttttccactttggaaaatgtcactgtgacaaaagccagcatactttccctgcacccatctgctcaccagatctcaggcaggaaagcccctctctgttgaagtcaggggctatcttttggtatacttgtgtgaaagtggctggttgggagcagagctaagtggcttcccattaacctgaggtctctttctttactctgggtcagacctgaggttggggaaggcgactgagccatgctcagaatgtctggtcctggcttgggcctgagtagggcagagagggcctttcatggctgatcagagcttaccagccccaccccaccatggtagccttagggtgctgagtgcctgatactgcctgacaagtgcctgacacgcagcctagttccttcctggcccctctctcactggctgggaaaccctagaccatgtcagataggacaacactgctgggttttacatccagatagtaataaacaccatttcatcatt

SEQ ID NO: 1346 - DNA, 1705 bp, Homo sapiens
ccggacgcaggtgccggccggagcggagctagtggcgccgacgggccgggccgggccgggaccggggccgaggcgaaccgaggggcctgtgcggccgcccggcccggccgcggatcagagactggagactgggtcttgctctgttacccaggctggagtgcagtggtgtgatcatagctcactacagccttgaactcctgggctcaagaggttgaggctccctcctcagcctcccaagtagctgggactacaggctttcagcaccatgcctggctaattcaaaaaaaccttcagagagatagggtctctctatgttgccctagctcgtctcaaactcctggcctcaagtgatcctcctgcttggacctcccaaagcgctgggattacaggctcctggaaccatgggcctcaggccctgaggatacggggctcccggtggccatgacgacgggtgactgctgccacctccccggctccctgtgtgactgctccggcagccctgccttctccaaggtcgtggaggctacgggcctcggaccgccccagtatgtggcacaggtgacttcaagggatggccggctcctctccaccgtcatccgtgccttggacacaccgagtgatggtcctttctgccggatctgccatgagggagcgaacggggagtgcttgctgtccccgtgtggctgcaccggcacgctgggtgccgtgcataagagctgtctggagaagtggctttcctcatctaacaccagctactgcgagctgtgccacacggagtttgcagtggagaaacggcctcgacccctcacagagtggctgaaggacccggggccgcggacggagaagcggacactgtgctgcgacatggtgtgtttcctgttcatcacaccgctggccgccatctcaggctggttgtgcctgcgcggggcccaggaccacctccggctccacagccagctggaggccgtgggtctcattgccctcaccatcgccctcttcaccatctatgtcctctggacgctggtctccttccgctaccactgccagctgtactccgagtggagaaagaccaaccagaaagttcgcctgaagatccgggaggcggacagccccgagggcccccagcattctccactggcagctggactcctgaagaaggtggcagaggagacaccagtatgaatgctgggctctccggaccctgcagcagagaggccagaggtagctggtgataccctgtcctgtggaaggacttccacttcaacacttccacttcaacagttcccgcacggcctgaacgcttcttaggccaagagacaccatgcagagcctagtctgtgatcctgtgtgaagatattttcagggtttttttttttttttttttgcatatggaggacaggtggacatggtcctgagctctggacggagcaggcaccctgatctcattctgaggtccacatggcaccttctgggccagcagctgtggccggtgtatcaagggcgcccttaaagctggaacattccagcaagcttcttgcgcttctctgcacccggcaggcccactttcctggcaccctcgactttatataaaagttgcactgcgtttcaaaaacccacccctgaatgaataaaaggagccctggctggacaaaaaaaaaaaaaaaaaaaaaaaaaaaaaaaaaaaaaaaaaaaaaaaaaaaaaaaa

SEQ ID NO: 1347 - DNA, 2795 bp, Homo sapiens
atcagcgagggattcacggcgaaatgagactgttcgtgagtgatggcgtcccgggttgcttgccggtgctggccgccgccgggagagcccggggcagagcagaggtgctcatcagcactgtaggcccggaagattgtgtggtcccgttcctgacccggcctaaggtccctgtcttgcagctggatagcggcaactacctcttctccactagtgcaatctgccgatatttttttttgttatctggctgggagcaagatgacctcactaaccagtggctggaatgggaagcgacagagctgcagccagctttgtctgctgccctgtactatttagtggtccaaggcaagaagggggaagatgttcttggttcagtgcggagagccctgactcacattgaccacagcttgagtcgtcagaactgtcctttcctggctggggagacagaatctctagccgacattgttttgtggggagccctatacccattactgcaagatcccgcctacctccctgaggagctgagtgccctgcacagctggttccagacactgagtacccaggaaccatgtcagcgagctgcagagactgtactgaaacagcaaggtgtcctggctctccggccttacctccaaaagcagccccagcccagccccgctgagggaagggctgtcaccaatgagcctgaggaggaggagctggctaccctatctgaggaggagattgctatggctgttactgcttgggagaagggcctagaaagtttgcccccgctgcggccccagcagaatccagtgttgcctgtggctggagaaaggaatgtgctcatcaccagtgccctcccttacgtcaacaatgtcccccaccttgggaacatcattggttgtgtgctcagtgccgatgtctttgccaggtactctcgcctccgccagtggaacaccctctatctgtgtgggacagatgagtatggtacagcaacagagaccaaggctctggaggagggactaaccccccaggagatctgcgacaagtaccacatcatccatgctgacatctaccgctggtttaacatttcgtttgatatttttggtcgcaccaccactccacagcagaccaaaatcacccaggacattttccagcagttgctgaaacgaggttttgtgctgcaagatactgtggagcaactgcgatgtgagcactgtgctcgcttcctggctgaccgcttcgtggagggcgtgtgtcccttctgtggctatgaggaggctcggggtgaccagtgtgacaagtgtggcaagctcatcaatgctgtcgagcttaagaagcctcagtgtaaagtctgccgatcatgccctgtggtgcagtcgagccagcacctgtttctggacctgcctaagctggagaagcgactggaggagtggttggggaggacattgcctggcagtgactggacacccaatgcccagtttatcacccgttcttggcttcgggatggcctcaagccacgctgcataacccgagacctcaaatggggaacccctgtacccttagaaggttttgaagacaaggtattctatgtctggtttgatgccactattggctatctgtccatcacagccaactacacagaccagtgggagagatggtggaagaacccagagcaagtggacctgtatcagttcatggccaaagacaatgttcctttccatagcttagtctttccttgctcagccctaggagctgaggataactataccttggtcagccacctcattgctacagagtacctgaactatgaggatgggaaattctctaagagccgcggtgtgggagtgtttggggacatggcccaggacacggggatccctgctgacatctggcgcttctatctgctgtacattcggcctgagggccaggacagtgctttctcctggacggacctgctgctgaagaataattctgagctgcttaacaacctgggcaacttcatcaacagagctgggatgtttgtgtctaagttctttgggggctatgtgcctgagatggtgctcacccctgatgatcagcgcctgctggcccatgtcaccctggagctccagcactatcaccagctacttgagaaggttcggatccgggatgccttgcgcagtatcctcaccatatctcgacatggcaaccaatatattcaggtgaatgagccctggaagcggattaaaggcagtgaggctgacaggcaacgggcaggaacagtgactggcttggcagtgaatatagctgccttgctctctgtcatgcttcagccttacatgcccacggttagtgccacaatccaggcccagctgcagctcccacctccagcctgcagtatcctgctgacaaacttcctgtgtaccttaccagcaggacaccagattggcacagtcagtcccttgttccaaaaattggaaaatgaccagattgaaagtttaaggcagcgctttggagggggccaggcaaaaacgtccccgaagccagcagttgtagagactgttacaacagccaagccacagcagatacaagcgctgatggatgaagtgacaaaacaaggaaacattgtccgagaactgaaagcacaaaaggcagacaagaacgaggttgctgcggaggtggcgaaactcttggatctaaagaaacagttggctgtagctgaggggaaaccccctgaagcccctaaaggcaagaagaaaaagtaaaagaccttggctcatagaaagtcactttaatagatagggacagtaataaataaatgtacaatctctata

SEQ ID NO: 1348 - DNA, 5893 bp, Homo sapiens
atggacgagtcgagcctcctgcggcgccgcgggctccagaaggagctgagcctgccacgccgaggacgtggctgccgcagcgggaaccgcaagagcttggtggtaggaacgccctccccgaccctctcccggcccctgtcgccattgtcggtcccaacggcaggcagcagccccttggatagtcctcggaatttctcggctgcctctgccctaaatttcccctttgcccggagggcagacggcagaagatggtccctcgcgtctctcccatcttccggctatggaaccaacacacccagctccaccctctcgtcaagctcatcctcccgggaacgtctccaccagcttcccttccagccgacgccggacgagctgcacttcctgtccaagcacttccgcagctcagagaatgtgcttgatgaggaaggcggccggtcaccccgcctccgaccccgctctcgcagtctcagcccgggccgtgcaacggggaccttcgacaatgagattgtcatgatgaatcacgtgtaccgggagaggttccccaaggccacagcacagatggagggccgtctgcaggagttcctgacggcctacgcgcccggcgcccggctggcgctggctgatggcgtcttgggcttcatccaccaccagatcgtcgagctggcccgagactgcttggccaagtctggcgagaacctcgtcacctcccgctacttcctagagatgcaggagaagctggagcggcttctgcaggatgcccatgagcgttcggacagtgaggaggtcagcttcatcgtccagcttgtccggaaactgctgatcatcatctcacggccagctcggctgctggagtgtctggagtttgaccctgaggaattttaccacctgctggaggcggctgagggccatgcgcgggagggccaaggcattaagactgaccttccacagtacatcattgggcagctgggcctggccaaggaccccctggaggagatggtgccactgagtcacctcgaagaagaacagcccccagcacctgagtccccagagagccgcgccctggtcggccagtcacggaggaagccatgcgaaagcgactttgagaccatcaaactcattagcaacggagcctatggggccgtctacctggtgcggcaccgtgacacacggcagcgctttgccatcaagaagatcaacaaacagaacttgatcctgcgtaaccagatccagcaggtctttgtggagcgtgacattctcacctttgccgagaacccctttgtggtcagcatgttctgctcctttgagacccggcgccacctatgtatggtcatggaatacgtggaaggcggcgactgcgccacgctcctgaagaacatgggcccgctgcccgtggacatggcccgcctgtacttcgccgagacggtgttggcgctggagtacctgcataactatggcatcgtgcaccgtgacctcaaaccagacaatctgctcatcacctcgcttggccacatcaagctcacggacttcggcctgtccaagatcggcctcatgagcatggccaccaacctctatgagggccacatcgagaaggacgcccgagagttcatcgacaagcaggtgtgtgggacgccggagtacatagcccccgaggtgatcttccgccagggctatgggaagccagtggactggtgggccatgggcgtcgtcctctatgagtttctggtgggctgcgtgcctttctttggagatacccccgaggaactcttcggtcaggtggtcagcgatgagatcatgtggccagagggagatgaggcccttccagcagacgcccaggacctcatcaccaggttgctccggcagagcccgctggaccgtctgggcactggtggcacccacgaagtgaagcagcacccctttttcctggccctggactgggcagggcttctccgacacaaagccgagttcgtgccccagctcgaagctgaggatgataccagctactttgacacacgttcggaacgttaccgccatctgggctccgaggacgacgagaccaatgatgaagaatcgtccacagagatcccccagttctcctcctgctcccaccggttcagcaaggtctacagcagctctgagttcctggccgtccagcccactcctaccttcgctgaaaggagcttcagtgaagaccgggaggaggggtgggagcgcagcgaagtggactatggccgccggctgagtgctgacatccggctgaggtcctggacatcctctggatcctcctgtcagtcatcttcgtcccagcccgagcggggtcccagcccatctctcctgaataccatcagcctggacacaatgcccaagtttgccttctcatcagaggatgagggggtaggcccaggccctgcaggccccaagaggcccgtcttcattctaggggagcctgaccccccaccagcggccaccccagtgatgcccaagccctcgagcctttctgccgacacagctgctctcagccacgcccgcctacggagcaatagcatcggcgcccgacactccacaccaaggcctctggatgccggccggggccgccgccttgggggcccaagagacccagcccctgagaagtccagagcctcctccagcggtggcagtggtggcggcagtgggggccgcgtgcccaagtcagcctctgtctctgccctgtccctcatcatcacggcagatgatggcagcggcggccccctcatgagccccctttccccgcgctctctgtcctcgaacccgtcgtcccgtgactcttcgccgagccgagacccgtcccccgtgtgtggcagcctgcggccccccatcgttatccacagctctggcaagaagtacggcttcagcctgcgggcgatccgcgtctacatgggtgatagcgacgtctacactgtgcaccacgtcgtctggagtgtggaggacggaagccccgcccaggaggcgggcctgcgggctggggacctcatcacccacatcaacggggagtcagtgctggggctggtgcacatggacgtcgtggagctgctgctgaagagcggcaacaagatatccctgcggaccacagccctggagaacacctccatcaaggtgggccccgcccggaagaatgtggccaagggccgcatggcacgcaggagcaagaggagccgtcggcgggagacccaggatcggcggaagtcacttttcaagaagatctccaagcagacctccgtgctgcacaccagccgcagcttctcctccggactccaccactcactgtcatccagtgagagcctccccggctcgcccacccacagcctctcccccagccccaccactccctgccgaagcccagcccctgatgtcccagcagataccactgcatccccacccagcgcatccccgagctccagcagccccgcctccccagctgctgctggccacacccgccccagctccctgcacggcctggctgccaagcttgggccaccccgccccaagactggccgccgcaagtccaccagcagcatcccgccctccccgctggcctgcccgcccatctccgcgcccccaccccgctcgccctcgcccctgcccgggcacccgcccgcacctgcccgatccccgcggctgcgccggggccagtcagctgacaagctgggcacaggggagcggctggatggggaggcggggcggcgcactcgtgggccagaggccgagctcgtggtcatgcggcggctgcacctgtccgagcgccgagactccttcaagaagcaggaggccgtgcaggaggttagcttcgatgagccgcaggaggaggccactgggctgcccacctcagtgccacagatcgccgtggagggcgaggaagccgtgccagtagctctcgggcccaccggaagagactgatcccctgccaggtctctccctggcatcaaagttacgcgttttcttgtgcaatgttttttccgtaaagtcatgcctggatggggactgagccaccagcctgacacccagaaggcgagaagccatctcggtccttgctggaaggtggagacatcgcttgtgttctggtgtcaatcggggctggatggggcaagaatgggggacaagggtggctttgtaaatagcagcaaatccctgcaactaatttattactttttttttctttttttttttttttttttgagacagagtctcactctgttgcccgggctggagtgcagcggcgtgatctcagctcactgcaacctccgcctcccaagttcaagcgattgtcctgcctcagcttcccaagtggctgggattacaggcgcccaccactatgcccagctaattttttgtatttttagtacagacggggtttcaccatgttggtcaggctggtctcgaactcctgacctcatgatttgcctgcctttgcctcccaaagtgctgggattacaggcgtgagccactgggcccagcctaatttattactttttataagcgatagccgtactgagccgccccctgaaggcggctgccaggtcttgccccaggcacctgggactctgtttgcaggccctgccctctgggctgagaaggatgcactttggacaagtcatctgtgtttgtgttttccagtttttctgtactttttaagtgttttgtgttacctggtctcattcccctccccacacctacccatttgaggggatggagttgaagtcacctggtcacctgtaccggcccagttcggctacaacctggagtgtccgtaaacaattcctctcacccacaaaacaatgtaatcccagcgatggactggattctgaaggccacttcccaccatcatagctgccatgcccaggcagtgcctgctctatatatagagtctgcctccaatcctgctggcttcagcctggagaagggatatgggagctggagctttgatggatgaataggtgttcaccggatctgggcagaggggtcatccgctccccaggtgggcactgataaaggaaggtacaggcctcacctggaactgccaaggcagcctccagaaatgctcggctgtctcggggcacgctccagtatgccagtcctgcgggattacgtccagctacttccagaaacactcagtgtcccctcccctcaggctctgccttggcctggccttgtccagtctaccctggacaagatgccgtgtgtttgaggcccagcagagtaagcccttggccgtgatgtgtctgaaacacctgttaggggttccctccatatgtcagagcctctctgggatgaagttcaagccagaaaacccagtcgaggctcaagtttgaatttcagcttcactgtgtggctctgggaaaatggctttcccactctgtgcctcagtttccttgtgtttacaagactaatcccattgactgtttattaagcacctactgtgtgccaagcgcttttacgtggcttctccctcagccagccttgagaaggctggaggtggtgtcatcacctccattttacagacaaagcagctgagaccccagcgaggggcggagacctgtcccacgatcacccagcaggagtcgtggcagaacggagcatcagccagaccctgttgtgggcgttgtcatcaagggagcttgaatggagggtctggtgtcagatacagccgactccagccccagctcatcccccatgatgctgtgtgacccactgggcactctggtgagggagctttccagacatcaacagcccactctgcttccctttctgagtcccctgtccagcactgcctagtgttggagggtagaccaaggctgtgcatgattcaccccctccttccatcctggagctggcagtgaataaaagcccgtatttacaaaga

SEQ ID NO: 1349 - DNA, 1738 bp, Homo sapiens
gaattccgggggttccggcgctccgcggccccaagcgccctcctttcctccctccgccggccggggttgcgggcgcggggcgccgcgggccatgcgatctcggcgcggcccagcccggccggcggcgccccgcccccgctggagcctggggccccgctgcgccgaggccatgttcccggtgtttccttgcacgctgctggccccccccttccccgtgctgggcctggactcccggggggttggcggcctcatgaactccttcccgccacctcagggtcacgcccagaaccccctgcaggtcggggctgagctccagtcccgcttctttgcctcccagggctgcgcccagagtccattccaggccgcgccggcgcccccgcccacgccccaggccccggcggccgagcccctccaggtggacttgctcccggtgctcgccgccgcccaggagtccgccgcggctgctgcggccgctgccgccgctgctgccgccgtcgctgccgcgcccccggcccctgccgccgcctctacggtggacacagcggccctgaagcagcctccggcgccccctccgccacccccgccagtgtcggcgcccgcggccgaggccgcgccccccgcctccgccgccactatcgccgcggcggcggccaccgccgtcgtagccccaacctcgacggtcgccgtggccccggtcgcgtctgccttggagaagaagacaaagagcaaggggccctacatctgcgctctgtgcgccaaggagttcaagaacggctacaatctccggaggcacgaagccatccacacgggagccaaggccggccgggtcccctcgggtgctatgaagatgccgaccatggtgcccctgagcctcctgagcgtgccccagctgagcggagccggcgggggagggggagaggcgggtgccggcggcggcgctgcagtggccgccggtggcgtggtgaccacgaccgcctcggggaagcgcatccggaagaaccatgcctgcgagatgtgtggcaaggccttccgcgacgtctaccacctgaaccgacacaagctgtcgcactcggacgagaagccctaccagtgcccggtgtgccagcagcgcttcaagcgcaaggaccgcatgagctaccacgtgcgctcacatgacggcgctgtgcacaagccctacaactgctcccactgtggcaagagcttctcccggccggatcacctcaacagtcacgtcagacaagtgcactcaacagaacggcccttcaaatgtgagaaatgtgaggcagctttcgccacgaaggatcggctgcgggcgcacacagtacgacacgaggagaaagtgccatgtcacgtgtgtggcaagatgctgagctcggcttatatttcggaccacatgaaggtgcacagccagggtcctcaccatgtctgtgagctctgcaacaaaggtactggtgaggtttgtccaatggcggcggcagcggcagcagcggcagcagtagcagcccctcccacagctgtgggctccctctcgggggcggagggggtgcctgtgagctctcagccacttccctcccaaccctggtgagctccaagttggttgcgggggagaggggagaatggagtagagtcccttggtacaagctcctctcccccctcttttcccaccaactcctatttccctaccaaccaaggagcctccagaaggaaaggaggaagaaatgttttcttaggggaattc

SEQ ID NO: 1350 - DNA, 1623 bp, Homo sapiens
gtcgacttgtgagcaaatcttggtggtggtggtggtggggcggcctgagaagatattatggctgctgccacggagcataatcgcccgagcagcggtgacaggaacctggagcgaagatgcagccccaacctctcccgagaggtgctctacgaaatctttcgctccctacacaccctggttggacagcttgacctcagagatgatgtggtgaaaattacaatcgattggaacaagctccagagcctctcggcattccagcctgcattgctctttagtgcacttgaacaacacattttatatttacagccttttttagcaaaacttcagtctccgattaaagaggagaatacaactgctgttgaagagataggaagaacagaaatggggaacaaaaatgaagtaaatgacaaattttccattggcgacctacaagaggaagaaaagcacaaagaaagtgatttaagagatgtgaaaaagacacagatccattttgatccagaagtagttcagataaaggctggaaaagcagaaattgacagacgaatatctgcatttattgaaagaaagcaagctgaaatcaatgaaaacaacgtcagggaattttgcaatgttattgattgtaatcaagaaaatagttgtgcaagaactgatgcgatttttaccccttaccccggatttaaaagtcacgtaaaagtttctagagttgtgaatacatacggaccacagactagacctgaaggaattccagggtcaggtcataaacctaacagcatgcttcgagactgtggtaatcaggctgtagaagaacgactacaaaatattgaggcccacttgcggttacagacaggtggtccagtgccaagagacatttatcagagaattaaaaaacttgaggataaaatccttgaattggaaggcatctctcctgaatattttcagtctgtaagcttttctggaaaaagaagaaaagttcaaccacctcaacagaactattcactggctgaacttgatgagaaaattagtgccctcaaacaagccctcctcagaaaatcaagagaagcagaatccatggcaacccaccaccttccatgaaaaactcctctcgtccttgtcattttacttttttgtatacatatgtgtaacttacactgttattaattcaacggatatatatttatcaatgtagacttctctgtgaagtcaaggtttattttcacatgagtccagcttgcagcaagtaatcttcaaatattccagtaagttttgaaataatgaatgcattgaaaatagcattgttggaatttattcccttctgttttaaaggaggtattttggaaattgaaaaacttaatttacaagtgctggtacatcttttttcttttgtggaccaccggaaggaagatttattttgatattgatactttaaacggactttatatttgtaacattgatgttaaccagtttattagtttaaatcagtactttgcatataataagcattcaacaaaaatttattgactgaaatgaattttaaatgcatgtgtatgaacttgtttttcttaatctttaagatgtcagtattcatgtaaataaacaatagatccagctttaaaaaaaaaaaaa

SEQ ID NO: 1351 - DNA, 6404 bp, Homo sapiens
ttacatcttatagcacccagtgaattatgatatggggctgcggtttatttgctctggcgacaatatggcttacttgccgtggaatatcccggtatttcagaagtaacatattatttttaaagagggagctttgctttctctaaatcacatggtgcaaagttgggaatacagtggcctgtaaattacaaatattatttacaaactagaaggaaagctgacatgtgtttgtgcctgtgtgacagtttcactaaggaattccaaaactgtggatagcctgttacttgagaaaaatacacggtggcagtcttgcagatgtttttcccgcctgttagccctccaggttcaaaaactgtttggtgcattttaaggcggcagtctcaccagatcgcaggattctagtctaattggcttctaaccttcaatctaaccttgccggcttccttgcaaagcccggtgcaagggcctctttcaaaatgaacccactggtgtgcctagcagtcggtagaagaagcgggagggcgtccggtctgcacgcccgccgcgaggttacaatgctgaacgcatgagatggaagataccaacgggaggccgaggggatccacggcgcccgcgcgggctccggcttcctcctgctctcggcgccgctgggcgaccgcccatgacccgctcttgcgggctctgtccggttgacaggcgaccctgtggcccggggaagcgcgggagggcgccggcggaaagttgaagagcgtttttctcgccgccgcgtgcattaggagctcgacgagtccgccctgggcttcctggtggggctgggcgggcgggggaggggccgcgcagcagcagcggaagccagacctcggcgataagaggctgcacagcgacatgcaacagtcttttcactgcagctgaatgagttgtggcgcccacaatgctcccatgacaaggagctgacaagttccattttccgtcgcgggcatcttggaatcatgactcccacaatgccttgggcacttggtcgacagtggggccgcctctgaaaaaaaaatgtgagaggttggtactaagaagtgcctttcctgacgtctctgctgcttggaaccgcttctagagcagtctctgcttttgccttgcttgctgccagctagactgtgacgacagcacatccaccctccacctctagcccagacacccccatttctacttataatcaagagaaaagctctaagtatctggcattgccctaggctgctttagtgttaaaagaaaagtttgctgaaaaagtaagatatcttctgccaggaaatcaaggaggaaaaaaaaaatcattttctcgattttgctctaaactgctgcatctgtctatgccaaactaatcaataccgattgcaccaccaaactccattgcaaattcagctgtgaggagattccctttcagacaactttgctgaaagcagcttggaaattcggtgtcgaagggtctgccacgttttcatgcttgcattttgggctccaaattggcactgggaaggggttactgagagcacaaggctgataccaggccctacttttaaacgttcatctacttacaatcctagtatttctctaaaaaccaaaacctctttgaattaacagtttcatgctgtgaatttctagtgggagatcttttccttgatattgacgacacaattttccatgtacttttaaagcagggagtggggaaaagtattttgaggggacattttcatcatcagttcagctttttttttttggttgttgctcttttttgggggggttgggtttgttggtttcactgaaacatttaactacctgtaaaatctaaacatggctgttagtgtcacaccaattcgggacacaaaatggctaacactggaagtatgtagagagttccagagggggacttgctcacggccagacacggaatgtaaatttgcacatccttcgaaaagctgccaagttgaaaatggacgagtaatcgcctgctttgattcattgaaaggccgttgctccagggagaactgcaaatatcttcatccacccccacatttaaaaacgcagttggagataaatggacgcaataacttgattcagcagaagaacatggccatgttggcccagcaaatgcaactagccaatgccatgatgcctggtgccccattacaacccgtgccaatgttttcagttgcaccaagcttagccaccaatgcatcagcagccgcctttaatccctatctgggacctgtttctccaagcctggtcccggcagagatcttgccgactgcaccaatgttggttacagggaatccgggtgtccctgtacctgcagctgctgcagctgctgcacagaaattaatgcgaacagacagacttgaggtatgtcgagagtaccaacgtggcaattgcaaccgaggagaaaatgattgtcggtttgctcatcctgctgacagcacaatgattgacaccaatgacaacacagtcactgtgtgtatggattacatcaaagggagatgctctcgggaaaagtgcaaatactttcatccccctgcacatttgcaagccaagatcaaggctgcccaataccaggtcaaccaggctgcagctgcacaggctgcagccaccgcagctgccatgggaattcctcaagctgtacttcccccattaccaaagaggcctgctcttgaaaaaaccaacggtgccaccgcagtctttaacactggtattttccaataccaacaggctctagccaacatgcagttacaacagcatacagcatttctcccaccaggctcaatattgtgcatgacacccgctacaagtgttgttcccatggtgcacggtgctacgccagccactgtgtccgcagcaacaacatctgccacaagtgttcccttcgctgcaacagccacagccaaccagatacccataatatctgccgaacatctgactagccacaagtatgttacccagatgtagaattttcatcactaaacaatcatgctaaagaggaaaggacagtgtgcttggttagagtaaaggacgaggtcattagccatattgtatatatcgtcaagcaacacacacaaaagttcctcagccacaagacatccacatattgcatgttaaccagaagaaaagacaacattttccggaaatccactgcacactgttgcctatacactttgtacatttaattgatatttgtgctgaggtgatattcctgtctaaaagaacaacattgtctttcttttctagcacagagttatgcattcaaagatgcatacctagttagtttcctatatattcatgccatcttgaaaagacagactatggtgtaaccatgattctattatgtattggtacgtctgtagaccaagatataattttttaaaaataagtttatttctttcaaggtttacaaataacaaaggtgcaccttgtatttaaaattgccattatagatgagagcgtgcatgcacagtcatttttgtttaagagtaatatttttaatgtaatagattgtaagacgtggtgagggagggatctgacagagatgaatgtgccaagcaaaaccacaactgtgtatattttaaagcacatcatggctttaagtaccatgttgttaaggattctcatgaagtgccatagactgtacatcaaattagagtattatttcttcagtgttattgttttcagagccacattttgttgcatatttgctagtactaatcagtcaaagggcaccattctttttttttttttttgaaaccaaagctgtctcagaaatggccaatttaactttacagtaacaatagacagcacaacacaaactctctcaatacagataaactcacacatactggagatatatatataatagatatatataaaattattttaatgcattgtagtgtaatatttatgcatactatactgtataacatgttattcaaaagggattgccatttctgagacacagtaacaaaaaaatgaggaaattattttgcttctatttatagcctctgtcaaaagtcaaaagactataaatgctttgcaaaaatggtttcacgtttgcttaaatgcttcatcacagtcacattcaaaatagtgactctaaacaaagaagaaagcagcactgtcatcagatgcatgataaaccaaaatatgaaaatgggaaatgtttaattaacctagtaattgggtgggttaagtacatgggtgaattttatatgtgatttttgttttgttttgttttgttcagattaactgcttatagccttagaaagccttttacaaaattaaaaaaaaaatagatgtgcattcagtttttaagaatggaatcatccaaaggaattcctttttttgaggtttggatgttgcagctagtaaaggatatttttgctctgttcagcagttctaaaaattgctgaagtaggggccaggtcactggtagttatagtatggaatgggagaagtgaaagttcagttatagaactttccatacttccaagtttactgcaagtttttatgcttgagagagatgctttctaatataagactgatgtgttgattttactgattgtactgtacatctattaaagccttagattattacattacgggttggaacccataccaatgtaatttcaatcgtgttaagaaagtaatggtgacttcacatgttattgtagttagttacattatagaatattacttatttttcttgttaaaatgtagtttttcatttcctacatttattagattttcattttctattaacaattgaataccatttcagtttatagacttgttttattagattttaccaatgaatttttcaaaatacaaaaaaaagtagtttttccttcataacatactcagttttgaattacatgtagtgtcacatgaatattcgtattgttaactaaatgatttatattttactgatttaatattacagtgtaagaatgtcagtcattgttagttcttgtctagttttcattaaaagaacaaagatcttttatatggatatcttataaatatataatcattgctaagtaagaagttaagttgttgctatcgcaacaatcctggcagacaattgagtaatattttgatgatttattttgtttgtaattagttattataagaagatctagatcctagatattagaataaaatttattttctactgtatccatttcaaatgttaaaatattgtttaatatttttgaaatccctgagtatcaggccttgttataaataagctgcataatcaataaatagaacaagggactttttgttgataatccaaatactcaaagtttacgtaatgaaaattatagcgtgtgtgcaaactcttgagggttgattatgctgcaatttagcatgttggaacgtctagggagaaggttgactttttgcacttctgtatatagtcaaaagagagaaacctgtataatagtaagatcttattttgaataaaaacgtctataattacaaggagttttgttaaggctaatacaatgacagactgagcaaaattgcttgcaaaagtggcacagagttagcactccataccccttcaaacatgttgctttgctttcttgtggacagcttgtagtttgccaggattttttcagctggaaagatacgccatcctttcaaaccctcatgactgacaaaaactccatggggccaaatctgcctgaagatcattaccaaaaatagcaggtacttctaccattaaggtgaaatcatggatcagatattccttacatttttcaaaactactgcatgtttaaaacttcaacaaaaaaagagagaaagaactatactaagaacatatattattcagatcagtttctgccaatttcagtggtttattgttcacaaaaaaatcttcaaaacaagtattgactttcacaaaatttaaatcataaacaggcaaaccaaacagcacactgtagctatagttgttatgtgattgttttttaattgctgtaggatcctgttctttcagcaggtgaaaaataaaacgcagttcaaatttcatggttttaattttcaactcagaagcactcaaaaatgcaaaatgtgataatgggcacttgtttaaaagaattagtgtatccagccttcactccagctggttaaaaatgttgcacttatcagcaaccctaccactttcatctgctgaaaggacaaatgtgcttggttttactattatgtaatcacaacttactttctgcttgtagttgcttaaaattatgtattttgtcttgggctgcaatttgttttatgcttattttattattactgcagtagttgactttgctgtatggaaaaataaagtgaaattgccctaataaaacttctctttcttaagt

SEQ ID NO: 1352 - DNA, 6368 bp, Homo sapiens
ttacatcttatagcacccagtgaattatgatatggggctgcggtttatttgctctggcgacaatatggcttacttgccgtggaatatcccggtatttcagaagtaacatattatttttaaagagggagctttgctttctctaaatcacatggtgcaaagttgggaatacagtggcctgtaaattacaaatattatttacaaactagaaggaaagctgacatgtgtttgtgcctgtgtgacagtttcactaaggaattccaaaactgtggatagcctgttacttgagaaaaatacacggtggcagtcttgcagatgtttttcccgcctgttagccctccaggttcaaaaactgtttggtgcattttaaggcggcagtctcaccagatcgcaggattctagtctaattggcttctaaccttcaatctaaccttgccggcttccttgcaaagcccggtgcaagggcctctttcaaaatgaacccactggtgtgcctagcagtcggtagaagaagcgggagggcgtccggtctgcacgcccgccgcgaggttacaatgctgaacgcatgagatggaagataccaacgggaggccgaggggatccacggcgcccgcgcgggctccggcttcctcctgctctcggcgccgctgggcgaccgcccatgacccgctcttgcgggctctgtccggttgacaggcgaccctgtggcccggggaagcgcgggagggcgccggcggaaagttgaagagcgtttttctcgccgccgcgtgcattaggagctcgacgagtccgccctgggcttcctggtggggctgggcgggcgggggaggggccgcgcagcagcagcggaagccagacctcggcgataagaggctgcacagcgacatgcaacagtcttttcactgcagctgaatgagttgtggcgcccacaatgctcccatgacaaggagctgacaagttccattttccgtcgcgggcatcttggaatcatgactcccacaatgccttgggcacttggtcgacagtggggccgcctctgaaaaaaaaatgtgagaggttggtactaagaagtgcctttcctgacgtctctgctgcttggaaccgcttctagagcagtctctgcttttgccttgcttgctgccagctagactgtgacgacagcacatccaccctccacctctagcccagacacccccatttctacttataatcaagagaaaagctctaagtatctggcattgccctaggctgctttagtgttaaaagaaaagtttgctgaaaaagtaagatatcttctgccaggaaatcaaggaggaaaaaaaaaatcattttctcgattttgctctaaactgctgcatctgtctatgccaaactaatcaataccgattgcaccaccaaactccattgcaaattcagctgtgaggagattccctttcagacaactttgctgaaagcagcttggaaattcggtgtcgaagggtctgccacgttttcatgcttgcattttgggctccaaattggcactgggaaggggttactgagagcacaaggctgataccaggccctacttttaaacgttcatctacttacaatcctagtatttctctaaaaaccaaaacctctttgaattaacagtttcatgctgtgaatttctagtgggagatcttttccttgatattgacgacacaattttccatgtacttttaaagcagggagtggggaaaagtattttgaggggacattttcatcatcagttcagctttttttttttggttgttgctcttttttgggggggttgggtttgttggtttcactgaaacatttaactacctgtaaaatctaaacatggctgttagtgtcacaccaattcgggacacaaaatggctaacactggaagtatgtagagagttccagagggggacttgctcacggccagacacggaatgtaaatttgcacatccttcgaaaagctgccaagttgaaaatggacgagtaatcgcctgctttgattcattgaaaggccgttgctccagggagaactgcaaatatcttcatccacccccacatttaaaaacgcagttggagataaatggacgcaataacttgattcagcagaagaacatggccatgttggcccagcaaatgcaactagccaatgccatgatgcctggtgccccattacaacccgtgccaatgttttcagttgcaccaagcttagccaccaatgcatcagcagccgcctttaatccctatctgggacctgtttctccaagcctggtcccggcagagatcttgccgactgcaccaatgttggttacagggaatccgggtgtccctgtacctgcagctgctgcagctgctgcacagaaattaatgcgaacagacagacttgaggtatgtcgagagtaccaacgtggcaattgcaaccgaggagaaaatgattgtcggtttgctcatcctgctgacagcacaatgattgacaccaatgacaacacagtcactgtgtgtatggattacatcaaagggagatgctctcgggaaaagtgcaaatactttcatccccctgcacatttgcaagccaagatcaaggctgcccaataccaggtcaaccaggctgcagctgcacaggctgcagccaccgcagctgccatgggaattcctcaagctgtacttcccccattaccaaagaggcctgctcttgaaaaaaccaacggtgccaccgcagtctttaacactggtattttccaataccaacaggctctagccaacatgcagttacaacagcatacagcatttctcccaccagttcccatggtgcacggtgctacgccagccactgtgtccgcagcaacaacatctgccacaagtgttcccttcgctgcaacagccacagccaaccagatacccataatatctgccgaacatctgactagccacaagtatgttacccagatgtagaattttcatcactaaacaatcatgctaaagaggaaaggacagtgtgcttggttagagtaaaggacgaggtcattagccatattgtatatatcgtcaagcaacacacacaaaagttcctcagccacaagacatccacatattgcatgttaaccagaagaaaagacaacattttccggaaatccactgcacactgttgcctatacactttgtacatttaattgatatttgtgctgaggtgatattcctgtctaaaagaacaacattgtctttcttttctagcacagagttatgcattcaaagatgcatacctagttagtttcctatatattcatgccatcttgaaaagacagactatggtgtaaccatgattctattatgtattggtacgtctgtagaccaagatataattttttaaaaataagtttatttctttcaaggtttacaaataacaaaggtgcaccttgtatttaaaattgccattatagatgagagcgtgcatgcacagtcatttttgtttaagagtaatatttttaatgtaatagattgtaagacgtggtgagggagggatctgacagagatgaatgtgccaagcaaaaccacaactgtgtatattttaaagcacatcatggctttaagtaccatgttgttaaggattctcatgaagtgccatagactgtacatcaaattagagtattatttcttcagtgttattgttttcagagccacattttgttgcatatttgctagtactaatcagtcaaagggcaccattctttttttttttttttgaaaccaaagctgtctcagaaatggccaatttaactttacagtaacaatagacagcacaacacaaactctctcaatacagataaactcacacatactggagatatatatataatagatatatataaaattattttaatgcattgtagtgtaatatttatgcatactatactgtataacatgttattcaaaagggattgccatttctgagacacagtaacaaaaaaatgaggaaattattttgcttctatttatagcctctgtcaaaagtcaaaagactataaatgctttgcaaaaatggtttcacgtttgcttaaatgcttcatcacagtcacattcaaaatagtgactctaaacaaagaagaaagcagcactgtcatcagatgcatgataaaccaaaatatgaaaatgggaaatgtttaattaacctagtaattgggtgggttaagtacatgggtgaattttatatgtgatttttgttttgttttgttttgttcagattaactgcttatagccttagaaagccttttacaaaattaaaaaaaaaatagatgtgcattcagtttttaagaatggaatcatccaaaggaattcctttttttgaggtttggatgttgcagctagtaaaggatatttttgctctgttcagcagttctaaaaattgctgaagtaggggccaggtcactggtagttatagtatggaatgggagaagtgaaagttcagttatagaactttccatacttccaagtttactgcaagtttttatgcttgagagagatgctttctaatataagactgatgtgttgattttactgattgtactgtacatctattaaagccttagattattacattacgggttggaacccataccaatgtaatttcaatcgtgttaagaaagtaatggtgacttcacatgttattgtagttagttacattatagaatattacttatttttcttgttaaaatgtagtttttcatttcctacatttattagattttcattttctattaacaattgaataccatttcagtttatagacttgttttattagattttaccaatgaatttttcaaaatacaaaaaaaagtagtttttccttcataacatactcagttttgaattacatgtagtgtcacatgaatattcgtattgttaactaaatgatttatattttactgatttaatattacagtgtaagaatgtcagtcattgttagttcttgtctagttttcattaaaagaacaaagatcttttatatggatatcttataaatatataatcattgctaagtaagaagttaagttgttgctatcgcaacaatcctggcagacaattgagtaatattttgatgatttattttgtttgtaattagttattataagaagatctagatcctagatattagaataaaatttattttctactgtatccatttcaaatgttaaaatattgtttaatatttttgaaatccctgagtatcaggccttgttataaataagctgcataatcaataaatagaacaagggactttttgttgataatccaaatactcaaagtttacgtaatgaaaattatagcgtgtgtgcaaactcttgagggttgattatgctgcaatttagcatgttggaacgtctagggagaaggttgactttttgcacttctgtatatagtcaaaagagagaaacctgtataatagtaagatcttattttgaataaaaacgtctataattacaaggagttttgttaaggctaatacaatgacagactgagcaaaattgcttgcaaaagtggcacagagttagcactccataccccttcaaacatgttgctttgctttcttgtggacagcttgtagtttgccaggattttttcagctggaaagatacgccatcctttcaaaccctcatgactgacaaaaactccatggggccaaatctgcctgaagatcattaccaaaaatagcaggtacttctaccattaaggtgaaatcatggatcagatattccttacatttttcaaaactactgcatgtttaaaacttcaacaaaaaaagagagaaagaactatactaagaacatatattattcagatcagtttctgccaatttcagtggtttattgttcacaaaaaaatcttcaaaacaagtattgactttcacaaaatttaaatcataaacaggcaaaccaaacagcacactgtagctatagttgttatgtgattgttttttaattgctgtaggatcctgttctttcagcaggtgaaaaataaaacgcagttcaaatttcatggttttaattttcaactcagaagcactcaaaaatgcaaaatgtgataatgggcacttgtttaaaagaattagtgtatccagccttcactccagctggttaaaaatgttgcacttatcagcaaccctaccactttcatctgctgaaaggacaaatgtgcttggttttactattatgtaatcacaacttactttctgcttgtagttgcttaaaattatgtattttgtcttgggctgcaatttgttttatgcttattttattattactgcagtagttgactttgctgtatggaaaaataaagtgaaattgccctaataaaacttctctttcttaagt

SEQ ID NO: 1353 - DNA, 5168 bp, Homo sapiens
gttggtactaagaagtgcctttcctgacgtctctgctgcttggaaccgcttctagagcagtctctgcttttgccttgcttgctgccagctagactgtgacgacagcacatccaccctccacctctagcccagacacccccatttctacttataatcaagagaaaagctctaagtatctggcattgccctaggctgctttagtgttaaaagaaaagtttgctgaaaaagtaagatatcttctgccaggaaatcaaggaggaaaaaaaaaatcattttctcgattttgctctaaactgctgcatctgtctatgccaaactaatcaataccgattgcaccaccaaactccattgcaaattcagctgtgaggagattccctttcagacaactttgctgaaagcagcttggaaattcggtgtcgaagggtctgccacgttttcatgcttgcattttgggctccaaattggcactgggaaggggttactgagagcacaaggctgataccaggccctacttttaaacgttcatctacttacaatcctagtatttctctaaaaaccaaaacctctttgaattaacagtttcatgctgtgaatttctagtgggagatcttttccttgatattgacgacacaattttccatgtacttttaaagcagggagtggggaaaagtattttgaggggacattttcatcatcagttcagctttttttttttggttgttgctcttttttgggggggttgggtttgttggtttcactgaaacatttaactacctgtaaaatctaaacatggctgttagtgtcacaccaattcgggacacaaaatggctaacactggaagtatgtagagagttccagagggggacttgctcacggccagacacggaatgtaaatttgcacatccttcgaaaagctgccaagttgaaaatggacgagtaatcgcctgctttgattcattgaaaggccgttgctccagggagaactgcaaatatcttcatccacccccacatttaaaaacgcagttggagataaatggacgcaataacttgattcagcagaagaacatggccatgttggcccagcaaatgcaactagccaatgccatgatgcctggtgccccattacaacccgtggtatgtcgagagtaccaacgtggcaattgcaaccgaggagaaaatgattgtcggtttgctcatcctgctgacagcacaatgattgacaccaatgacaacacagtcactgtgtgtatggattacatcaaagggagatgctctcgggaaaagtgcaaatactttcatccccctgcacatttgcaagccaagatcaaggctgcccaataccaggtcaaccaggctgcagctgcacaggctgcagccaccgcagctgccatgggaattcctcaagctgtacttcccccattaccaaagaggcctgctcttgaaaaaaccaacggtgccaccgcagtctttaacactggtattttccaataccaacaggctctagccaacatgcagttacaacagcatacagcatttctcccaccaggctcaatattgtgcatgacacccgctacaagtgttgttcccatggtgcacggtgctacgccagccactgtgtccgcagcaacaacatctgccacaagtgttcccttcgctgcaacagccacagccaaccagatacccataatatctgccgaacatctgactagccacaagtatgttacccagatgtagaattttcatcactaaacaatcatgctaaagaggaaaggacagtgtgcttggttagagtaaaggacgaggtcattagccatattgtatatatcgtcaagcaacacacacaaaagttcctcagccacaagacatccacatattgcatgttaaccagaagaaaagacaacattttccggaaatccactgcacactgttgcctatacactttgtacatttaattgatatttgtgctgaggtgatattcctgtctaaaagaacaacattgtctttcttttctagcacagagttatgcattcaaagatgcatacctagttagtttcctatatattcatgccatcttgaaaagacagactatggtgtaaccatgattctattatgtattggtacgtctgtagaccaagatataattttttaaaaataagtttatttctttcaaggtttacaaataacaaaggtgcaccttgtatttaaaattgccattatagatgagagcgtgcatgcacagtcatttttgtttaagagtaatatttttaatgtaatagattgtaagacgtggtgagggagggatctgacagagatgaatgtgccaagcaaaaccacaactgtgtatattttaaagcacatcatggctttaagtaccatgttgttaaggattctcatgaagtgccatagactgtacatcaaattagagtattatttcttcagtgttattgttttcagagccacattttgttgcatatttgctagtactaatcagtcaaagggcaccattctttttttttttttttgaaaccaaagctgtctcagaaatggccaatttaactttacagtaacaatagacagcacaacacaaactctctcaatacagataaactcacacatactggagatatatatataatagatatatataaaattattttaatgcattgtagtgtaatatttatgcatactatactgtataacatgttattcaaaagggattgccatttctgagacacagtaacaaaaaaatgaggaaattattttgcttctatttatagcctctgtcaaaagtcaaaagactataaatgctttgcaaaaatggtttcacgtttgcttaaatgcttcatcacagtcacattcaaaatagtgactctaaacaaagaagaaagcagcactgtcatcagatgcatgataaaccaaaatatgaaaatgggaaatgtttaattaacctagtaattgggtgggttaagtacatgggtgaattttatatgtgatttttgttttgttttgttttgttcagattaactgcttatagccttagaaagccttttacaaaattaaaaaaaaaatagatgtgcattcagtttttaagaatggaatcatccaaaggaattcctttttttgaggtttggatgttgcagctagtaaaggatatttttgctctgttcagcagttctaaaaattgctgaagtaggggccaggtcactggtagttatagtatggaatgggagaagtgaaagttcagttatagaactttccatacttccaagtttactgcaagtttttatgcttgagagagatgctttctaatataagactgatgtgttgattttactgattgtactgtacatctattaaagccttagattattacattacgggttggaacccataccaatgtaatttcaatcgtgttaagaaagtaatggtgacttcacatgttattgtagttagttacattatagaatattacttatttttcttgttaaaatgtagtttttcatttcctacatttattagattttcattttctattaacaattgaataccatttcagtttatagacttgttttattagattttaccaatgaatttttcaaaatacaaaaaaaagtagtttttccttcataacatactcagttttgaattacatgtagtgtcacatgaatattcgtattgttaactaaatgatttatattttactgatttaatattacagtgtaagaatgtcagtcattgttagttcttgtctagttttcattaaaagaacaaagatcttttatatggatatcttataaatatataatcattgctaagtaagaagttaagttgttgctatcgcaacaatcctggcagacaattgagtaatattttgatgatttattttgtttgtaattagttattataagaagatctagatcctagatattagaataaaatttattttctactgtatccatttcaaatgttaaaatattgtttaatatttttgaaatccctgagtatcaggccttgttataaataagctgcataatcaataaatagaacaagggactttttgttgataatccaaatactcaaagtttacgtaatgaaaattatagcgtgtgtgcaaactcttgagggttgattatgctgcaatttagcatgttggaacgtctagggagaaggttgactttttgcacttctgtatatagtcaaaagagagaaacctgtataatagtaagatcttattttgaataaaaacgtctataattacaaggagttttgttaaggctaatacaatgacagactgagcaaaattgcttgcaaaagtggcacagagttagcactccataccccttcaaacatgttgctttgctttcttgtggacagcttgtagtttgccaggattttttcagctggaaagatacgccatcctttcaaaccctcatgactgacaaaaactccatggggccaaatctgcctgaagatcattaccaaaaatagcaggtacttctaccattaaggtgaaatcatggatcagatattccttacatttttcaaaactactgcatgtttaaaacttcaacaaaaaaagagagaaagaactatactaagaacatatattattcagatcagtttctgccaatttcagtggtttattgttcacaaaaaaatcttcaaaacaagtattgactttcacaaaatttaaatcataaacaggcaaaccaaacagcacactgtagctatagttgttatgtgattgttttttaattgctgtaggatcctgttctttcagcaggtgaaaaataaaacgcagttcaaatttcatggttttaattttcaactcagaagcactcaaaaatgcaaaatgtgataatgggcacttgtttaaaagaattagtgtatccagccttcactccagctggttaaaaatgttgcacttatcagcaaccctaccactttcatctgctgaaaggacaaatgtgcttggttttactattatgtaatcacaacttactttctgcttgtagttgcttaaaattatgtattttgtcttgggctgcaatttgttttatgcttattttattattactgcagtagttgactttgctgtatggaaaaataaagtgaaattgccctaataaaacttctctttcttaagtaaaaaaaaaaaaaaaaaaaaa

SEQ ID NO: 1354 - DNA, 5390 bp, Homo sapiens
gttggtactaagaagtgcctttcctgacgtctctgctgcttggaaccgcttctagagcagtctctgcttttgccttgcttgctgccagctagactgtgacgacagcacatccaccctccacctctagcccagacacccccatttctacttataatcaagagaaaagctctaagtatctggcattgccctaggctgctttagtgttaaaagaaaagtttgctgaaaaagtaagatatcttctgccaggaaatcaaggaggaaaaaaaaaatcattttctcgattttgctctaaactgctgcatctgtctatgccaaactaatcaataccgattgcaccaccaaactccattgcaaattcagctgtgaggagattccctttcagacaactttgctgaaagcagcttggaaattcggtgtcgaagggtctgccacgttttcatgcttgcattttgggctccaaattggcactgggaaggggttactgagagcacaaggctgataccaggccctacttttaaacgttcatctacttacaatcctagtatttctctaaaaaccaaaacctctttgaattaacagtttcatgctgtgaatttctagtgggagatcttttccttgatattgacgacacaattttccatgtacttttaaagcagggagtggggaaaagtattttgaggggacattttcatcatcagttcagctttttttttttggttgttgctcttttttgggggggttgggtttgttggtttcactgaaacatttaactacctgtaaaatctaaacatggctgttagtgtcacaccaattcgggacacaaaatggctaacactggaagtatgtagagagttccagagggggacttgctcacggccagacacggaatgtaaatttgcacatccttcgaaaagctgccaagttgaaaatggacgagtaatcgcctgctttgattcattgaaaggccgttgctccagggagaactgcaaatatcttcatccacccccacatttaaaaacgcagttggagataaatggacgcaataacttgattcagcagaagaacatggccatgttggcccagcaaatgcaactagccaatgccatgatgcctggtgccccattacaacccgtgccaatgttttcagttgcaccaagcttagccaccaatgcatcagcagccgcctttaatccctatctgggacctgtttctccaagcctggtcccggcagagatcttgccgactgcaccaatgttggttacagggaatccgggtgtccctgtacctgcagctgctgcagctgctgcacagaaattaatgcgaacagacagacttgaggtatgtcgagagtaccaacgtggcaattgcaaccgaggagaaaatgattgtcggtttgctcatcctgctgacagcacaatgattgacaccaatgacaacacagtcactgtgtgtatggattacatcaaagggagatgctctcgggaaaagtgcaaatactttcatccccctgcacatttgcaagccaagatcaaggctgcccaataccaggtcaaccaggctgcagctgcacaggctgcagccaccgcagctgccatgactcagtcggctgtcaaatcactgaagcgacccctcgaggcaacctttgacctgggaattcctcaagctgtacttcccccattaccaaagaggcctgctcttgaaaaaaccaacggtgccaccgcagtctttaacactggtattttccaataccaacaggctctagccaacatgcagttacaacagcatacagcatttctcccaccagttcccatggtgcacggtgctacgccagccactgtgtccgcagcaacaacatctgccacaagtgttcccttcgctgcaacagccacagccaaccagatacccataatatctgccgaacatctgactagccacaagtatgttacccagatgtagaattttcatcactaaacaatcatgctaaagaggaaaggacagtgtgcttggttagagtaaaggacgaggtcattagccatattgtatatatcgtcaagcaacacacacaaaagttcctcagccacaagacatccacatattgcatgttaaccagaagaaaagacaacattttccggaaatccactgcacactgttgcctatacactttgtacatttaattgatatttgtgctgaggtgatattcctgtctaaaagaacaacattgtctttcttttctagcacagagttatgcattcaaagatgcatacctagttagtttcctatatattcatgccatcttgaaaagacagactatggtgtaaccatgattctattatgtattggtacgtctgtagaccaagatataattttttaaaaataagtttatttctttcaaggtttacaaataacaaaggtgcaccttgtatttaaaattgccattatagatgagagcgtgcatgcacagtcatttttgtttaagagtaatatttttaatgtaatagattgtaagacgtggtgagggagggatctgacagagatgaatgtgccaagcaaaaccacaactgtgtatattttaaagcacatcatggctttaagtaccatgttgttaaggattctcatgaagtgccatagactgtacatcaaattagagtattatttcttcagtgttattgttttcagagccacattttgttgcatatttgctagtactaatcagtcaaagggcaccattctttttttttttttttgaaaccaaagctgtctcagaaatggccaatttaactttacagtaacaatagacagcacaacacaaactctctcaatacagataaactcacacatactggagatatatatataatagatatatataaaattattttaatgcattgtagtgtaatatttatgcatactatactgtataacatgttattcaaaagggattgccatttctgagacacagtaacaaaaaaatgaggaaattattttgcttctatttatagcctctgtcaaaagtcaaaagactataaatgctttgcaaaaatggtttcacgtttgcttaaatgcttcatcacagtcacattcaaaatagtgactctaaacaaagaagaaagcagcactgtcatcagatgcatgataaaccaaaatatgaaaatgggaaatgtttaattaacctagtaattgggtgggttaagtacatgggtgaattttatatgtgatttttgttttgttttgttttgttcagattaactgcttatagccttagaaagccttttacaaaattaaaaaaaaaatagatgtgcattcagtttttaagaatggaatcatccaaaggaattcctttttttgaggtttggatgttgcagctagtaaaggatatttttgctctgttcagcagttctaaaaattgctgaagtaggggccaggtcactggtagttatagtatggaatgggagaagtgaaagttcagttatagaactttccatacttccaagtttactgcaagtttttatgcttgagagagatgctttctaatataagactgatgtgttgattttactgattgtactgtacatctattaaagccttagattattacattacgggttggaacccataccaatgtaatttcaatcgtgttaagaaagtaatggtgacttcacatgttattgtagttagttacattatagaatattacttatttttcttgttaaaatgtagtttttcatttcctacatttattagattttcattttctattaacaattgaataccatttcagtttatagacttgttttattagattttaccaatgaatttttcaaaatacaaaaaaaagtagtttttccttcataacatactcagttttgaattacatgtagtgtcacatgaatattcgtattgttaactaaatgatttatattttactgatttaatattacagtgtaagaatgtcagtcattgttagttcttgtctagttttcattaaaagaacaaagatcttttatatggatatcttataaatatataatcattgctaagtaagaagttaagttgttgctatcgcaacaatcctggcagacaattgagtaatattttgatgatttattttgtttgtaattagttattataagaagatctagatcctagatattagaataaaatttattttctactgtatccatttcaaatgttaaaatattgtttaatatttttgaaatccctgagtatcaggccttgttataaataagctgcataatcaataaatagaacaagggactttttgttgataatccaaatactcaaagtttacgtaatgaaaattatagcgtgtgtgcaaactcttgagggttgattatgctgcaatttagcatgttggaacgtctagggagaaggttgactttttgcacttctgtatatagtcaaaagagagaaacctgtataatagtaagatcttattttgaataaaaacgtctataattacaaggagttttgttaaggctaatacaatgacagactgagcaaaattgcttgcaaaagtggcacagagttagcactccataccccttcaaacatgttgctttgctttcttgtggacagcttgtagtttgccaggattttttcagctggaaagatacgccatcctttcaaaccctcatgactgacaaaaactccatggggccaaatctgcctgaagatcattaccaaaaatagcaggtacttctaccattaaggtgaaatcatggatcagatattccttacatttttcaaaactactgcatgtttaaaacttcaacaaaaaaagagagaaagaactatactaagaacatatattattcagatcagtttctgccaatttcagtggtttattgttcacaaaaaaatcttcaaaacaagtattgactttcacaaaatttaaatcataaacaggcaaaccaaacagcacactgtagctatagttgttatgtgattgttttttaattgctgtaggatcctgttctttcagcaggtgaaaaataaaacgcagttcaaatttcatggttttaattttcaactcagaagcactcaaaaatgcaaaatgtgataatgggcacttgtttaaaagaattagtgtatccagccttcactccagctggttaaaaatgttgcacttatcagcaaccctaccactttcatctgctgaaaggacaaatgtgcttggttttactattatgtaatcacaacttactttctgcttgtagttgcttaaaattatgtattttgtcttgggctgcaatttgttttatgcttattttattattactgcagtagttgactttgctgtatggaaaaataaagtgaaattgccctaataaaacttctctttcttaagtaaaaaaaaaaaaaaaaaaaaa

SEQ ID NO: 1355 - DNA, 5277 bp, Homo sapiens
gttggtactaagaagtgcctttcctgacgtctctgctgcttggaaccgcttctagagcagtctctgcttttgccttgcttgctgccagctagactgtgacgacagcacatccaccctccacctctagcccagacacccccatttctacttataatcaagagaaaagctctaagtatctggcattgccctaggctgctttagtgttaaaagaaaagtttgctgaaaaagtaagatatcttctgccaggaaatcaaggaggaaaaaaaaaatcattttctcgattttgctctaaactgctgcatctgtctatgccaaactaatcaataccgattgcaccaccaaactccattgcaaattcagctgtgaggagattccctttcagacaactttgctgaaagcagcttggaaattcggtgtcgaagggtctgccacgttttcatgcttgcattttgggctccaaattggcactgggaaggggttactgagagcacaaggctgataccaggccctacttttaaacgttcatctacttacaatcctagtatttctctaaaaaccaaaacctctttgaattaacagtttcatgctgtgaatttctagtgggagatcttttccttgatattgacgacacaattttccatgtacttttaaagcagggagtggggaaaagtattttgaggggacattttcatcatcagttcagctttttttttttggttgttgctcttttttgggggggttgggtttgttggtttcactgaaacatttaactacctgtaaaatctaaacatggctgttagtgtcacaccaattcgggacacaaaatggctaacactggaagtatgtagagagttccagagggggacttgctcacggccagacacggaatgtaaatttgcacatccttcgaaaagctgccaagttgaaaatggacgagtaatcgcctgctttgattcattgaaaggccgttgctccagggagaactgcaaatatcttcatccacccccacatttaaaaacgcagttggagataaatggacgcaataacttgattcagcagaagaacatggccatgttggcccagcaaatgcaactagccaatgccatgatgcctggtgccccattacaacccgtgccaatgttttcagttgcaccaagcttagccaccaatgcatcagcagccgcctttaatccctatctgggacctgtttctccaagcctggtcccggcagagatcttgccgactgcaccaatgttggttacagggaatccgggtgtccctgtacctgcagctgctgcagctgctgcacagaaattaatgcgaacagacagacttgaggtatgtcgagagtaccaacgtggcaattgcaaccgaggagaaaatgattgtcggtttgctcatcctgctgacagcacaatgattgacaccaatgacaacacagtcactgtgtgtatggattacatcaaagggagatgctctcgggaaaagtgcaaatactttcatccccctgcacatttgcaagccaagatcaaggctgcccaataccaggtcaaccaggctgcagctgcacaggctgcagccaccgcagctgccatgggaattcctcaagctgtacttcccccattaccaaagaggcctgctcttgaaaaaaccaacggtgccaccgcagtctttaacactggtattttccaataccaacaggctctagccaacatgcagttacaacagcatacagcatttctcccaccaggctcaatattgtgcatgacacccgctacaagtgttgatacccataatatctgccgaacatctgactagccacaagtatgttacccagatgtagaattttcatcactaaacaatcatgctaaagaggaaaggacagtgtgcttggttagagtaaaggacgaggtcattagccatattgtatatatcgtcaagcaacacacacaaaagttcctcagccacaagacatccacatattgcatgttaaccagaagaaaagacaacattttccggaaatccactgcacactgttgcctatacactttgtacatttaattgatatttgtgctgaggtgatattcctgtctaaaagaacaacattgtctttcttttctagcacagagttatgcattcaaagatgcatacctagttagtttcctatatattcatgccatcttgaaaagacagactatggtgtaaccatgattctattatgtattggtacgtctgtagaccaagatataattttttaaaaataagtttatttctttcaaggtttacaaataacaaaggtgcaccttgtatttaaaattgccattatagatgagagcgtgcatgcacagtcatttttgtttaagagtaatatttttaatgtaatagattgtaagacgtggtgagggagggatctgacagagatgaatgtgccaagcaaaaccacaactgtgtatattttaaagcacatcatggctttaagtaccatgttgttaaggattctcatgaagtgccatagactgtacatcaaattagagtattatttcttcagtgttattgttttcagagccacattttgttgcatatttgctagtactaatcagtcaaagggcaccattctttttttttttttttgaaaccaaagctgtctcagaaatggccaatttaactttacagtaacaatagacagcacaacacaaactctctcaatacagataaactcacacatactggagatatatatataatagatatatataaaattattttaatgcattgtagtgtaatatttatgcatactatactgtataacatgttattcaaaagggattgccatttctgagacacagtaacaaaaaaatgaggaaattattttgcttctatttatagcctctgtcaaaagtcaaaagactataaatgctttgcaaaaatggtttcacgtttgcttaaatgcttcatcacagtcacattcaaaatagtgactctaaacaaagaagaaagcagcactgtcatcagatgcatgataaaccaaaatatgaaaatgggaaatgtttaattaacctagtaattgggtgggttaagtacatgggtgaattttatatgtgatttttgttttgttttgttttgttcagattaactgcttatagccttagaaagccttttacaaaattaaaaaaaaaatagatgtgcattcagtttttaagaatggaatcatccaaaggaattcctttttttgaggtttggatgttgcagctagtaaaggatatttttgctctgttcagcagttctaaaaattgctgaagtaggggccaggtcactggtagttatagtatggaatgggagaagtgaaagttcagttatagaactttccatacttccaagtttactgcaagtttttatgcttgagagagatgctttctaatataagactgatgtgttgattttactgattgtactgtacatctattaaagccttagattattacattacgggttggaacccataccaatgtaatttcaatcgtgttaagaaagtaatggtgacttcacatgttattgtagttagttacattatagaatattacttatttttcttgttaaaatgtagtttttcatttcctacatttattagattttcattttctattaacaattgaataccatttcagtttatagacttgttttattagattttaccaatgaatttttcaaaatacaaaaaaaagtagtttttccttcataacatactcagttttgaattacatgtagtgtcacatgaatattcgtattgttaactaaatgatttatattttactgatttaatattacagtgtaagaatgtcagtcattgttagttcttgtctagttttcattaaaagaacaaagatcttttatatggatatcttataaatatataatcattgctaagtaagaagttaagttgttgctatcgcaacaatcctggcagacaattgagtaatattttgatgatttattttgtttgtaattagttattataagaagatctagatcctagatattagaataaaatttattttctactgtatccatttcaaatgttaaaatattgtttaatatttttgaaatccctgagtatcaggccttgttataaataagctgcataatcaataaatagaacaagggactttttgttgataatccaaatactcaaagtttacgtaatgaaaattatagcgtgtgtgcaaactcttgagggttgattatgctgcaatttagcatgttggaacgtctagggagaaggttgactttttgcacttctgtatatagtcaaaagagagaaacctgtataatagtaagatcttattttgaataaaaacgtctataattacaaggagttttgttaaggctaatacaatgacagactgagcaaaattgcttgcaaaagtggcacagagttagcactccataccccttcaaacatgttgctttgctttcttgtggacagcttgtagtttgccaggattttttcagctggaaagatacgccatcctttcaaaccctcatgactgacaaaaactccatggggccaaatctgcctgaagatcattaccaaaaatagcaggtacttctaccattaaggtgaaatcatggatcagatattccttacatttttcaaaactactgcatgtttaaaacttcaacaaaaaaagagagaaagaactatactaagaacatatattattcagatcagtttctgccaatttcagtggtttattgttcacaaaaaaatcttcaaaacaagtattgactttcacaaaatttaaatcataaacaggcaaaccaaacagcacactgtagctatagttgttatgtgattgttttttaattgctgtaggatcctgttctttcagcaggtgaaaaataaaacgcagttcaaatttcatggttttaattttcaactcagaagcactcaaaaatgcaaaatgtgataatgggcacttgtttaaaagaattagtgtatccagccttcactccagctggttaaaaatgttgcacttatcagcaaccctaccactttcatctgctgaaaggacaaatgtgcttggttttactattatgtaatcacaacttactttctgcttgtagttgcttaaaattatgtattttgtcttgggctgcaatttgttttatgcttattttattattactgcagtagttgactttgctgtatggaaaaataaagtgaaattgccctaataaaacttctctttcttaagtaaaaaaaaaaaaaaaaaaaaa

SEQ ID NO: 1356 - DNA, 5246 bp, Homo sapiens
gttggtactaagaagtgcctttcctgacgtctctgctgcttggaaccgcttctagagcagtctctgcttttgccttgcttgctgccagctagactgtgacgacagcacatccaccctccacctctagcccagacacccccatttctacttataatcaagagaaaagctctaagtatctggcattgccctaggctgctttagtgttaaaagaaaagtttgctgaaaaagtaagatatcttctgccaggaaatcaaggaggaaaaaaaaaatcattttctcgattttgctctaaactgctgcatctgtctatgccaaactaatcaataccgattgcaccaccaaactccattgcaaattcagctgtgaggagattccctttcagacaactttgctgaaagcagcttggaaattcggtgtcgaagggtctgccacgttttcatgcttgcattttgggctccaaattggcactgggaaggggttactgagagcacaaggctgataccaggccctacttttaaacgttcatctacttacaatcctagtatttctctaaaaaccaaaacctctttgaattaacagtttcatgctgtgaatttctagtgggagatcttttccttgatattgacgacacaattttccatgtacttttaaagcagggagtggggaaaagtattttgaggggacattttcatcatcagttcagctttttttttttggttgttgctcttttttgggggggttgggtttgttggtttcactgaaacatttaactacctgtaaaatctaaacatggctgttagtgtcacaccaattcgggacacaaaatggctaacactggaagtatgtagagagttccagagggggacttgctcacggccagacacggaatgtaaatttgcacatccttcgaaaagctgccaagttgaaaatggacgagtaatcgcctgctttgattcattgaaaggccgttgctccagggagaactgcaaatatcttcatccacccccacatttaaaaacgcagttggagataaatggacgcaataacttgattcagcagaagaacatggccatgttggcccagcaaatgcaactagccaatgccatgatgcctggtgccccattacaacccgtgccaatgttttcagttgcaccaagcttagccaccaatgcatcagcagccgcctttaatccctatctgggacctgtttctccaagcctggtcccggcagagatcttgccgactgcaccaatgttggttacagggaatccgggtgtccctgtacctgcagctgctgcagctgctgcacagaaattaatgcgaacagacagacttgaggtatgtcgagagtaccaacgtggcaattgcaaccgaggagaaaatgattgtcggtttgctcatcctgctgacagcacaatgattgacaccaatgacaacacagtcactgtgtgtatggattacatcaaagggagatgctctcgggaaaagtgcaaatactttcatccccctgcacatttgcaagccaagatcaaggctgcccaataccaggtcaaccaggctgcagctgcacaggctgcagccaccgcagctgccatgttcccatggtgcacggtgctacgccagccactgtgtccgcagcaacaacatctgccacaagtgttcccttcgctgcaacagccacagccaaccagccccatccttgatgcttctacactgttgggtgcaacatcctgtcctgcagcagcaggaaaaatgatacccataatatctgccgaacatctgactagccacaagtatgttacccagatgtagaattttcatcactaaacaatcatgctaaagaggaaaggacagtgtgcttggttagagtaaaggacgaggtcattagccatattgtatatatcgtcaagcaacacacacaaaagttcctcagccacaagacatccacatattgcatgttaaccagaagaaaagacaacattttccggaaatccactgcacactgttgcctatacactttgtacatttaattgatatttgtgctgaggtgatattcctgtctaaaagaacaacattgtctttcttttctagcacagagttatgcattcaaagatgcatacctagttagtttcctatatattcatgccatcttgaaaagacagactatggtgtaaccatgattctattatgtattggtacgtctgtagaccaagatataattttttaaaaataagtttatttctttcaaggtttacaaataacaaaggtgcaccttgtatttaaaattgccattatagatgagagcgtgcatgcacagtcatttttgtttaagagtaatatttttaatgtaatagattgtaagacgtggtgagggagggatctgacagagatgaatgtgccaagcaaaaccacaactgtgtatattttaaagcacatcatggctttaagtaccatgttgttaaggattctcatgaagtgccatagactgtacatcaaattagagtattatttcttcagtgttattgttttcagagccacattttgttgcatatttgctagtactaatcagtcaaagggcaccattctttttttttttttttgaaaccaaagctgtctcagaaatggccaatttaactttacagtaacaatagacagcacaacacaaactctctcaatacagataaactcacacatactggagatatatatataatagatatatataaaattattttaatgcattgtagtgtaatatttatgcatactatactgtataacatgttattcaaaagggattgccatttctgagacacagtaacaaaaaaatgaggaaattattttgcttctatttatagcctctgtcaaaagtcaaaagactataaatgctttgcaaaaatggtttcacgtttgcttaaatgcttcatcacagtcacattcaaaatagtgactctaaacaaagaagaaagcagcactgtcatcagatgcatgataaaccaaaatatgaaaatgggaaatgtttaattaacctagtaattgggtgggttaagtacatgggtgaattttatatgtgatttttgttttgttttgttttgttcagattaactgcttatagccttagaaagccttttacaaaattaaaaaaaaaatagatgtgcattcagtttttaagaatggaatcatccaaaggaattcctttttttgaggtttggatgttgcagctagtaaaggatatttttgctctgttcagcagttctaaaaattgctgaagtaggggccaggtcactggtagttatagtatggaatgggagaagtgaaagttcagttatagaactttccatacttccaagtttactgcaagtttttatgcttgagagagatgctttctaatataagactgatgtgttgattttactgattgtactgtacatctattaaagccttagattattacattacgggttggaacccataccaatgtaatttcaatcgtgttaagaaagtaatggtgacttcacatgttattgtagttagttacattatagaatattacttatttttcttgttaaaatgtagtttttcatttcctacatttattagattttcattttctattaacaattgaataccatttcagtttatagacttgttttattagattttaccaatgaatttttcaaaatacaaaaaaaagtagtttttccttcataacatactcagttttgaattacatgtagtgtcacatgaatattcgtattgttaactaaatgatttatattttactgatttaatattacagtgtaagaatgtcagtcattgttagttcttgtctagttttcattaaaagaacaaagatcttttatatggatatcttataaatatataatcattgctaagtaagaagttaagttgttgctatcgcaacaatcctggcagacaattgagtaatattttgatgatttattttgtttgtaattagttattataagaagatctagatcctagatattagaataaaatttattttctactgtatccatttcaaatgttaaaatattgtttaatatttttgaaatccctgagtatcaggccttgttataaataagctgcataatcaataaatagaacaagggactttttgttgataatccaaatactcaaagtttacgtaatgaaaattatagcgtgtgtgcaaactcttgagggttgattatgctgcaatttagcatgttggaacgtctagggagaaggttgactttttgcacttctgtatatagtcaaaagagagaaacctgtataatagtaagatcttattttgaataaaaacgtctataattacaaggagttttgttaaggctaatacaatgacagactgagcaaaattgcttgcaaaagtggcacagagttagcactccataccccttcaaacatgttgctttgctttcttgtggacagcttgtagtttgccaggattttttcagctggaaagatacgccatcctttcaaaccctcatgactgacaaaaactccatggggccaaatctgcctgaagatcattaccaaaaatagcaggtacttctaccattaaggtgaaatcatggatcagatattccttacatttttcaaaactactgcatgtttaaaacttcaacaaaaaaagagagaaagaactatactaagaacatatattattcagatcagtttctgccaatttcagtggtttattgttcacaaaaaaatcttcaaaacaagtattgactttcacaaaatttaaatcataaacaggcaaaccaaacagcacactgtagctatagttgttatgtgattgttttttaattgctgtaggatcctgttctttcagcaggtgaaaaataaaacgcagttcaaatttcatggttttaattttcaactcagaagcactcaaaaatgcaaaatgtgataatgggcacttgtttaaaagaattagtgtatccagccttcactccagctggttaaaaatgttgcacttatcagcaaccctaccactttcatctgctgaaaggacaaatgtgcttggttttactattatgtaatcacaacttactttctgcttgtagttgcttaaaattatgtattttgtcttgggctgcaatttgttttatgcttattttattattactgcagtagttgactttgctgtatggaaaaataaagtgaaattgccctaataaaacttctctttcttaagtaaaaaaaaaaaaaaaaaaaaa

SEQ ID NO: 1357 - DNA, 2400 bp, Homo sapiens
gagagggcaggtcccggggaagctccggactcctagaggggcggccaggtgggggccctggtgaccaggacagactgtggtgttttttaacgtaaaggagatccgcggtgtgagggaccccctgggtcctgcacgccgcctggtggcaggccgggccatggtgggtgctcacgcccccggcatgtggccgccctcagtgggaggggctctgagaacgactttttaaaacgcagagaaaagctccattcttcccaggacctcagcgcagccctggcccaggaaggcaggagacagaggccaggacggtccagaggtgtcgaaatgtcctggggacctgagcagcagccaccagggaagaggcagggagggagctgaggaccaggcttggttgtgagaatccctgagcccaggcggtagatgccaggaggtgtctggactggctgggccatgcctgggctgacctgtccagccagggagagggtgtgagggcagatctgggggtgcccagatggaaggaggcaggcatgggggacacccaaggccccctggcagcaccatgaactaagcaggacacctggaggggaagaactgtggggacctggaggcctccaacgactccttcctgcttcctggacaggactatggctgtgcagggatcccagagaagacttctgggctccctcaactccacccccacagccatcccccagctggggctggctgccaaccagacaggagcccggtgcctggaggtgtccatctctgacgggctcttcctcagcctggggctggtgagcttggtggagaacgcgctggtggtggccaccatcgccaagaaccggaacctgcactcacccatgtactgcttcatctgctgcctggccttgtcggacctgctggtgagcgggagcaacgtgctggagacggccgtcatcctcctgctggaggccggtgcactggtggcccgggctgcggtgctgcagcagctggacaatgtcattgacgtgatcacctgcagctccatgctgtccagcctctgcttcctgggcgccatcgccgtggaccgctacatctccatcttctacgcactgcgctaccacagcaccgtgaccctgccgcgggcgcggcgagccgttgcggccatctgggtggccagtgtcgtcttcagcacgctcttcatcgcctactacgaccacgtggccgtcctgctgtgcctcgtggtcttcttcctggctatgctggtgctcatggccgtgctgtacgtccacatgctggcccgggcctgccagcacgcccagggcatcgcccggctccacaagaggcagcgcccggtccaccagggctttggccttaaaggcgctgtcaccctcaccatcctgctgggcattttcttcctctgctggggccccttcttcctgcatctcacactcatcgtcctctgccccgagcaccccacgtgcggctgcatcttcaagaacttcaacctctttctcgccctcatcatctgcaatgccatcatcgaccccctcatctacgccttccacagccaggagctccgcaggacgctcaaggaggtgctgacgtgctcctggtgagcgcggtgcacgcggctttaagtgtgctgggcagagggaggtggtgatattgtgtggtctggttcctgtgtgaccctgggcagttccttacctccctggtccccgtttgtcaaagaggatggactaaatgatctctgaaagtgttgaagcgcggacccttctgggtccagggaggggtccctgcaaaactccaggcaggacttctcaccagcagtcgtggggaacggaggaggacatggggaggttgtggggcctcaggctccgggcaccaggggccaacctcaggctcctaaagagacattttccgcccactcctgggacactccgtctgctccaatgactgagcagcatccaccccaccccatctttgctgccagctctcaggaccgtgccctcgtcagctgggatgtgaagtctctgggtggaagtgtgtgccaagagctactcccacagcagccccaggagaaggggctttgtgaccagaaagcttcatccacagccttgcagcggctcctgcaaaaggaggtgaaatccctgcctcaggccaagggaccaggtttgcaggagcccccctagtggtatggggctgagccctcctgagggccggttctaaggctcagactgggcactggggcctcagcctgctttcctgcagcagtcgcccaagcagacagccctggcaaatgcctgactcagtgaccagtgcctgtgagcatggggccaggaaagtctggtaataaatgtgactcagcatcacccaccttaaaaaaaaaaaaaaaaaaaaaaaaaaaaaaaaaaaaaaaaa

SEQ ID NO: 1358 - DNA, 1736 bp, Homo sapiens
cgaccctcagcagccagcccggcccgcccgcgcccgtccgcagccgcccgccagacgcgcccagtatgagggagatcgtgcacatccaggccggccagtgcggcaaccagatcggggccaagttctgggaagtcatcagtgatgagcatggcatcgaccccagcggcaactacgtgggcgactcggacttgcagctggagcggatcagcgtctactacaacgaggcctcttctcacaagtacgtgcctcgagccattctggtggacctggaacccggaaccatggacagtgtccgctcaggggcctttggacatctcttcaggcctgacaatttcatctttggtcagagtggggccggcaacaactgggccaagggtcactacacggagggggcggagctggtggattcggtcctggatgtggtgcggaaggagtgtgaaaactgcgactgcctgcagggcttccagctgacccactcgctggggggcggcacgggctccggcatgggcacgttgctcatcagcaaggtgcgtgaggagtatcccgaccgcatcatgaacaccttcagcgtcgtgccctcacccaaggtgtcagacacggtggtggagccctacaacgccacgctgtccatccaccagctggtggagaacacggatgagacctactgcatcgacaacgaggcgctctacgacatctgcttccgcaccctcaagctggccacgcccacctacggggacctcaaccacctggtatcggccaccatgagcggagtcaccacctccttgcgcttcccgggccagctcaacgctgacctgcgcaagctggccgtcaacatggtgcccttcccgcgcctgcacttcttcatgcccggcttcgcccccctcacagcccggggcagccagcagtaccgggccctgaccgtgcccgagctcacccagcagatgttcgatgccaagaacatgatggccgcctgcgacccgcgccacggccgctacctgacggtggccaccgtgttccggggccgcatgtccatgaaggaggtggacgagcagatgctggccatccagagcaagaacagcagctacttcgtggagtggatccccaacaacgtgaaggtggccgtgtgtgacatcccgccccgcggcctcaagatgtcctccaccttcatcgggaacagcacggccatccaggagctgttcaagcgcatctccgagcagttcacggccatgttccggcgcaaggccttcctgcactggtacacgggcgagggcatggacgagatggagttcaccgaggccgagagcaacatgaacgacctggtgtccgagtaccagcagtaccaggacgccacggccgaggaagagggcgagatgtacgaagacgacgaggaggagtcggaggcccagggccccaagtgaagctgctcgcagctggagtgagaggcaggtggcggccggggccgaagccagcagtgtctaaacccccggagccatcttgctgccgacaccctgctttcccctcgccctagggctcccttgccgccctcctgcagtatttatggcctcgtcctccccacctaggccacgtgtgagctgctcctgtctctgtcttattgcagctccaggcctgacgttttacggttttgttttttactggtttgtgtttatattttcggggatacttaataaatctattgctgtcagatacccttaaaaaaaaaaaaaaaaaaaaaaaaa

SEQ ID NO: 1359 - DNA, 2528 bp, Homo sapiens
cccaaaggtaggctcaggctccgacggtggccggcgggggtcacgaggcttcgtagtggaggaacgggtttggcgtgtgggacgcagctgcctctgtactggggagtcacggagtggccgggctccagggacatggcggcggcctctgcggtgtcggtgctgctggtggcggcggagaggaaccggtggcatcgtctcccgagcctgctcctgccgccgaggacatgggtgtggaggcaaagaaccatgaagtacacaacagccacaggaagaaacattaccaaggtcctcattgcaaacagaggagaaattgcctgcagggtgatgcgcacagccaaaaaactgggtgtacagactgtggcggtttatagtgaggctgacagaaattccatgcatgtagatatggcagatgaagcatattccatcggccccgctccctcccagcagagctacctatctatggagaaaatcattcaagtggccaagacctctgctgcacaggctatccatccaggatgcggttttctttcagaaaacatggaatttgctgaactttgtaagcaagaaggaattatttttataggccctcctccatctgcaattagagacatgggtataaagagcacatccaaatccataatggctgctgctggagtacctgttgtggagggttatcatggtgaggaccaatcagaccagtgcctgaaggaacacgccaggagaattggctatcctgtcatgattaaagccgtccggggtggaggaggaaaaggaatgaggattgttagatcagaacaagaatttcaagaacagttagagtcagcacggagagaagctaagaagtctttcaatgatgatgctatgctgatcgagaagtttgtagacacaccgaggcatgtagaagtccaggtgtttggtgatcaccatggcaatgctgtgtacttgtttgaaagagactgtagtgtgcagaggcgacatcagaagatcattgaggaggccccagcgcctggtattaaatctgaagtaagaaaaaagctgggagaagctgcagtcagagctgctaaagctgtaaattatgttggagcagggactgtggagtttattatggactcaaaacataatttctgtttcatggagatgaatacaaggctgcaagtggaacatcctgttactgagatgatcacaggaactgacttggtggagtggcagcttagaattgcagcaggagagaagattcctttgagccaggaagaaataactctgcagggccatgccttcgaagctagaatatatgcagaagatcctagcaataacttcatgcctgtggcaggcccattagtgcacctctctactcctcgagcagacccttccaccaggattgaaactggagtacggcaaggagacgaagtttccgtgcattatgaccccatgattgcgaagctggtcgtgtgggcagcagatcgccaggcggcattgacaaaactgaggtacagccttcgtcagtacaatattgttggactgcccaccaacattgacttcttactcaacctgtctggccacccagagtttgaagctgggaacgtgcacactgatttcatccctcaacaccacaaacagttgttgctcagtcggaaggctgcagccaaagagtctttatgccaggcagccctgggtctcatcctcaaggagaaagccatgaccgacactttcactcttcaggcacatgatcaattctctccattttcgtctagcagtggaagaagactgaatatctcgtataccagaaacatgactcttaaagatggtaaaaacaatgtagccatagctgtaacgtataaccatgatgggtcttatagcatgcagattgaagataaaactttccaagtccttggtaatctttacagcgagggagactgcacttacctgaaatgttctgttaatggagttgctagtaaagcgaagctgattatcctggaaaacactatttacctattttccaaggaaggaagtattgagattgacattccagtccccaaatacttatcttctgtgagctcacaagaaactcagggcggccccttagctcctatgactggaaccattgaaaaggtgtttgtcaaagctggagacaaagtgaaagcgggagattccctcatggttatgatcgccatgaagatggagcataccataaagtctccaaaggatggcacagtaaagaaagtgttctacagagaaggtgctcaggccaacagacacactcctttagtcgagtttgaggaggaagaatcagacaaaagggaatcggaataaactccagcaaggaaatggccagttaagtagtgtcttctctctccaccaaaaagaggaagtgcctccagcttttctgggggtctcataaagagcagttttactaaatgattgtatgcttatgctgaacacctttcatattggagaatcatgcatttgggtcactaattatctcaaaatatttcatactaataaagttgaattattttttattggaagcc

SEQ ID NO: 1360 - DNA, 4772 bp, Homo sapiens
ttgggcggagatgcctttaaaaaatcatccaccgcagcggtagaaacagttttgtttggctttatttatacggaatggtttttcagtgaaatgctgtcttgcttaaaagaagagatgcctccccaggagctcacccggcgactggccacagtgatcactcatgtcgatgaaattatgcagcaggaagtcagacccctgatggcggtggagataatagaacaacttcacagacaatttgccattctttcaggaggccgaggggaggatggcgcccccatcatcacgttcccagagttttcggggttcaaacacatcccagatgaagacttcctgaatgtcatgacctacctgactagcatccccagtgtggaggctgccagcattggattcattgttgttatcgacagacgaagagacaagtggagctccgtaaaggcatccttgacacgaatagctgtggcatttccaggaaacttacagctcatattcatccttcgtccatctcgctttatccagaggacattcactgacattggcattaaatactatcgaaatgagtttaaaacgaaagtgccgatcatcatggtaaactctgtctctgaccttcacggctacatcgacaaaagccaactgacccgggaattaggggggactttggaatatcgccacggtcagtgggtaaatcaccgcactgccatcgaaaactttgccttgaccttgaagaccactgcccagatgctgcagacgtttgggtcctgcctggccacagcagagctgcccagaagcatgctatccacggaagaccttctcatgtcccacacaaggcagcgggacaagctgcaggatgagctgaaattacttggaaagcaggggaccacattgctgtcatgcatccaagaaccagcaaccaaatgtcccaacagcaaactcaatctcaaccaacttgagaatgtaactaccatggaaaggttattagttcaactggatgaaacagaaaaagcctttagtcacttttggtctgagcatcatctgaagcttaaccagtgcctacaactacagcattttgagcacgatttttgtaaggctaagcttgccctggataatttgctggaagagcaagcagagtttacaggcattggagacagcgtgatgcacgtggagcagattcttaaggaacacaaaaaactggaggaaaaaagccaggagcccctggaaaaggcccagctgctggcactggttggggaccagctcatccaaagccaccattatgcagcagatgccatcaggccccggtgtgtggagctcaggcacctctgtgacgatttcatcaatggaaacaagaaaaaatgggacattttaggaaagtccttagagtttcatagacagctggacaaggtcagccaatggtgtgaggcaggaatctacctcttggcttcccaagctgtagacaagtgccagtctcgagaaggggttgatatcgccttgaacgacattgcgacattcctgggcacagtcaaggagtacccgttgctcagccccaaggagttttacaacgagtttgagttgctgctcaccctcgatgcaaaggccaaagcccagaaagttttgcagaggctggatgatgtccaggaaatatttcacaagaggcaagtgagtctgatgaaactggcagccaaacagactcgtccagtgcaacctgtggccccacatcctgagtcttcaccaaaatgggtgtcatcaaaaaccagccagccctccacctcggtccctctagctcgtcctctgagaacgtctgaggaaccttatacggagacagagttgaactcccggggaaaggaagatgatgagactaaatttgaagtcaagagtgaagaaatctttgaaagccatcatgaaagggggaaccctgagctggagcagcaggccaggctcggagacctttccccccgcaggcgcattatacgtgacttgcttgagactgaagagatttacataaaagagattaaaagcataattgatggatatatcactccaatggattttatttggctaaagcatctaattccagatgttcttcagaataacaaggactttctctttgggaatattagagaactttacgaatttcacaacaggacttttctaaaagagttggaaaagtgtgctgagaaccctgaacttctggcacattgctttctcaagagaaaagaagatcttcagatatattttaaataccataagaatctgccccgagctagggcaatctggcaagagtgtcaagactgcgcctactttggggtatgccagcgccaactggatcacaatctccctctttttaagtatctcaaaggaccaagccagagacttataaaataccagatgctgttgaagggtctgctggatttcgagtctcctgaagatatggagatagacccaggtgaactaggaggctcggctaaggatgggccaaagagaaccaaagattcagcattctcaactgaactacaacaagctttggcagtgatagaggatttgatcaagtcctgtgagttggctgtggacctagcagcagtgactgaatgtccggacgatattggaaaactaggcaagctgttgctgcacggccctttcagcgtctggacaattcacaaggatcgttataaaatgaaggatttgattcgatttaaacccagccagaggcaaatctacctatttgaaaggggaatagtgttctgtaagatacgaatggagcctggggaccagggattatctcctcattacagcttcaagaagaccatgaagctgatgacactttcaattcgccagcttggaagggggagccatagaaagtttgagattgccagtcgaaatggacttgagaaatacatcctgcaggcagcttcaaaagaaatcagagactgttggttttcagaaataagtaaattattgatggaacaacaaaataatatcaaagaccaaggaaatccacagtttgaaatgagcacgagcaaaggcagtggagcaggatccggaccatggattaaaaatatggaaagagctaccactagcaaggaagacccggcctccagcacaggagggattaaaggctgctccagcagggagtttagctccatggacacctttgaagactgtgaaggcgcagaagacatggaaaaggagagcagtgctctgagtctcgcgggccttttccagtcggacgacagtcacgaaacctgttcctccaaatctgctttcctggagaggggagaaagcagccagggagaaaaagaagaacgcgatgaggaggaaacggcgacccgcagcaccgaggaggagcgcgctggggcgtccacgggccggctggctcctgcgggggcgacggctggtttccaggcgagggcgctgcgcccgaggacctccgcccaggagagctgacctccctgcggacgcccccgctcctcggctccagagcgcccgcattcccgggagaggcggtgtgggggcccgggccctgcccagctacgcagaaagcagccggagcctcggcggcggcagaaaggggacaaccagggcctcctccgaggagcccgaggggtgtcctgggtgcgcgcctagctccgcacgggggacctcggagctgctctaaggcgcctgcagaggcgagcagagcccgcagcccacgccttctcgaccgcgcacttcgacattcggagccgggcaattctttgctgcgtgggcttctctgtgctcccacggtaggatgtttagtagcacccctggcctctacccactaggtgccaggaatgcgccaccccatcctccaccccgcccccaaatcgtgacaatcaaaaatgcctgcagacacgcccgcatttctccagggcggggtgggaatcggttgagagccgcttagcccgagccttggaggagccggagccgctcaaacccggcgggggccgcagactgggagctcccggtccgcctcccagcatccctgcgagcgttcatggggtgttcgtgttagtgccaagattgcttcgttgtagagagagttcgttccaagttactttctgaggtattttatgtatcgatttattagtttttaaatgagttttgttagtttcagttgtattttatttttagttttattagttgattttcatttctttgtagctttctggttatttaattttatagtttcagttactggtttatagttactttattttcaaagttatttagttgttcattttcagttatttatatgtagttgttttgttttaggagttacagatgttcaaattaatttgcttggaatttatttatttatttatttatttatttttcgagacggagtctcgctctgtcgcccaggctggagtgcagtggtgtgatctcggctcactgcaaaccgcctcccgggttcacgccattctcctgcctcagcctcctgagtagctgggactacaggcgcccgccaccacgcccggctaattttttatttggatttttagtagagacggggtttccccgtgttagccaggatggtctcgatctcctgacctcgtgatccccctgcctcggcctcccaaagtgctgggattacaggcgtgagccaccgcgcccagccggaatttatttttaattatctttacaattattatctgagttatttaccttcatagttatttcactttatcttattggagtttttgagttatttatttttacagtaacttatttgactattaaacactcactggaagttcatg

SEQ ID NO: 1361 - DNA, 4144 bp, Homo sapiens
ggggcgaagccgaggaagagcgttttggggacgggggctggtgaggctcacgttggagggcttcgcgtctgcttcggagaccgtaaggatattgatgaccatgagatccctgctcagaacccccttcctgtgtggcctgctctgggccttttgtgccccaggcgccagggctgaggagcctgcagccagcttctcccaacccggcagcatgggcctggataagaacacagtgcacgaccaagagcatatcatggagcatctagaaggtgtcatcaacaaaccagaggcggagatgtcgccacaagaattgcagctccattacttcaaaatgcatgattatgatggcaataatttgcttgatggcttagaactctccacagccatcactcatgtccataaggaggaagggagtgaacaggcaccactaatgagtgaagatgaactgattaacataatagatggtgttttgagagatgatgacaagaacaatgatggatacattgactatgctgaatttgcaaaatcactgcagtagatgttatttggccatctcctggttatatacaaatgtgacccgtgataatgtgattgaacactttagtaatgcaaaataactcatttccaactactgctgcagcattttggtaaaaacctgtagcgattcgttacactggggtgagaagagataagagaaatgaaagagaagagaaatgggacatctaatagtccctaagtgctattaaataccttattggacaagggcttgcttcaagcatctgtattagtctgtattaatgctgctgataaagacgtacccgagactgggaagaaaaagaggtttacttggacttacagttccacatggctggggaggcctcagaatcatggcgggaggtgaaaggcacttcttacatggcagcaagagaaaatgaggaagaagcaaaagtggaaacccctgataagccatcagatcttgtgaaacttattcactatcacaagaatagcatgggaaagactggcccccatgattcaattacctccccttgggtctctcccacaacacgtgggaattctggtagatacaatttcaagttgagatttgggtggggacatagccaaaccatatcattctacccctggcccctccaaatctcatgtcctcactattcaaaaccaatcatgccttcctaacagtcccccaaagtcttaactcttttcagcattaacgcaaaaatccacagtccaaagtctcatctgagacaaggcaagtcccttccacctatgagcctgtaaaatcaaaagcaagctagttacttcctagataccaacaggggtacaggtattgattaaagacggctgttccaaatgggagaaattggccaaaataaaggggttacagggcccatgcaagtccgaaatccagcagggctgtcaaattttaaagttccagaataatctcctttgactccaggtctcacatccaggtcatactgatgcaagaagtgggttcccatggtcttgggcagctctgcccctgtggctttgtagggtacagcctccctcctggctgctttcacggctgttgttcagtgcctgcggcttttccaggtgcacggtgcaagctgttggtggatctaccattctggggtctggaggacggtggccctcttctcacagctccactaggcagtgccccagtagggactctgtgtgggggctcccacaccacatttcccttctgcactgccctagcagaggttctctcccctgccgctgagagggcctctcccctgcagcaaacgtttgcctgggcattgaggcatttccatacatcttctgaaaactaggcggaggtttccaaatctcaattcttgacttctgtgcacctgcaggcttaacagcacatagaagctgccaaggcttggggcttccactctgaagccacagcccgagctgtatgttggcccctttcagccatggctggagtggctgggacacaagacaccaagtccctaggctgcacacacatgtcaggggctgccctgacatggcctggagacattttccccatggtgttggggattaacattaggctccttgctacttatgcaaatttctgcagctggcttgaatttctccccagaaaatgggtttttcttttctattgcatagtcaggctgcaaatttccaaacttttatgctttgcttcccttatttataagggaatgcctttaaaagcacccaagtcacctgttgaacactttgctgcttagaaatttcttccgctagttaacctaaatcatctctctcaagttcaaagttccacaaatccctatggaaggggcaaaatgctgccagtctctttgctaaaacataacaagagtcacctttactccagttcccaacaagttcctcatcttcatctgaggccacctcagcctggactttgttgtccatattgctatcagcatttggggcaaagccattcaacaagtctgtaggaagttccaaactttcccacattttcctgttttcttctgagccctccaaactgttccagcctctgcctgttacccagttccaaagtcacttccacattttgggtatttcttcagcaggtcccaatctactggtaccaatttactgtattagtccgttttcacgctgctgataaagacatacccgagactgggaagaaaaagtggtttaattggacttaaagttccacatggctggggaggcctcagaatcatggtgggaggcaaaagacacttcttacattgtggcaagaaaaaatgaggaagaagcaaaagcagaaacccctgataaactgatcagatctcatgagacttattcactgtcacgagaatagcacgggaaagactggcccccatgattcaattacctccccctgggtctgtcccacaacacgtgggaattctgggagatacaattcaagttgagatttgtggggggacacaaccaaaccatatcagcatcctttcaagaatattagataattggagctgagtactcaggaacttgactgtagtagaatactgctagtttcttaattttaattcacatcacctgaaaagtaaaacaacaggctttgccaagtggatgcttttcagtaacagtgaagtggagtgaataccaaatgtttgccctggtggttcctatctcttcaggcaaacatggtcagtattctgtaaagttcccctggcctaaatgattacttgctctgggcaagtggatatttattaggctatttcaaagccacagcataagaatgtcagcctagccacagagtctgagattctgagttcagcctagccacagagtctaagattctgtatcctctgacattttggaaatgatacactactggcttaagtgatgactctttcagattttcagtattttatacaactactgccacatccttatactttattgcttttctgtcttcttcaacctgggagagaccctgaatttgagtgtgttctctaatcaatagtggtttagctttcttttctatttcactcgtttctagggttttttatttgcagtttaggaactattaggaatgtcaggactttatcagcaggggtaaaactaccacctggcctagcctaagtaggaagtgaaaagataattcaccaaacaatgattaatcagatagaagttctagtcaagagggatattgttgaagttacctcttttagcctagatacatggattcttttcaaatcaggaaagattagaaaaggaacccaaaaaaccctttaacagtgtgaatctttatagtatttgaaaatgagaagaagcagcagattgtaatttggtttattggatgtgatggacgttctgtaatagaaaacctgaaacgatgattgaatgggaaaaagagactacaaaatttgtcgtaggatgtatacagacttattttctttattacagtattataagaaaacatatgtatttgtaaaaatggtttcctgtgtcaagtatttgtgcagtcagagctgacttgtaaactattcttgtaatagctcattattttgaaagatttatatatgatgaattctggatatatgaccaataaaactgatgaagcaaaaaaaaaaaaaaaaaaaaaaaa

SEQ ID NO: 1362 - DNA, 3772 bp, Homo sapiens
caccccgtaggactggccgccctaaaaccgtgataaaggagctgctcgccacttctcacttccgcttccttccagtaaggagtcggggtcttccccagttttctcagccaggcggcggcggcgactggcaatgtttggcctcaaaagaaacgcggtaatcggactcaacctctactgtgggggggccggcttgggggccggcagcggcggcgccacccgcccgggagggcgacttttggctacggagaaggaggcctcggcccggcgagagatagggggaggggaggccggcgcggtgattggcggaagcgccggcgcaagccccccgtccaccctcacgccagactcccggagggtcgcgcggccgccgcccattggcgccgaggtccccgacgtcaccgcgacccccgcgaggctgcttttcttcgcgcccacccgccgcgcggcgccgcttgaggagatggaagccccggccgctgacgccatcatgtcgcccgaagaggagctggacgggtacgagccggagcctctcgggaagcggccggctgtcctgccgctgctggagttggtcggggaatctggtaataacaccagtacggacgggtcactaccctcgacgccgccgccagcagaggaggaggaggacgagttgtaccggcagtcgctggagattatctctcggtaccttcgggagcaggccaccggcgccaaggacacaaagccaatgggcaggtctggggccaccagcaggaaggcgctggagaccttacgacgggttggggatggcgtgcagcgcaaccacgagacggccttccaaggatgggtttgtggagttcttccatgtagaggacctagaaggtggcatcaggaatgtgctgctggcttttgcaggtgttgctggagtaggagctggtttggcatatctaataagatagccttactgtaagtgcaatagttgacttttaaccaaccaccaccaccaccaaaaccagtttatgcagttggactccaagctgtaacttcctagagttgcaccctagcaacctagccagaaaagcaagtggcaagaggattatggctaacaagaataaatacatgggaagagtgctccccattgattgaagagtcactgtctgaaagaagcaaagttcagtttcagcaacaaacaaactttgtttgggaagctatggaggaggacttttagatttagtgaagatggtagggtggaaagacttaatttccttgttgagaacaggaaagtggccagtagccaggcaagtcatagaattgattacccgccgaattcattaatttactgtagtgttaagagaagcactaagaatgccagtgacctgtgtaaaagttacaagtaatagaactatgactgtaagcctcagtactgtacaagggaagcttttcctctctctaattagctttcccagtatacttcttagaaagtccaagtgttcaggacttttatacctgttatactttggcttggtttccatgattcttactttattagcctagtttatcaccaataatacttgacggaaggctcagtaattagttatgaatatggatatcctcaattcttaagacagcttgtaaatgtatttgtaaaaattgtatatatttttacagaaagtctatttctttgaaacgaaggaagtatcgaatttacattagtttttttcatacccttttgaactttgcaacttccgtaattaggaacctgtttcttacagcttttctatgctaaactttgttctgttcagttctagagtgtatacagaacgaattgatgtgtaactgtatgcagactggttgtagtggaacaaatctgataactatgcaggtttaaattttcttatctgattttggtaagtattccttagataggtttttctttgaaaacctgggattgagaggttgatgaatggaaattctttcacttcattatatgcaagttttcaataattaggtctaagtggagttttaaggttactgatgacttacaaataatgggctctgattgggcaatactcatttgagttccttccatttgacctaatttaactggtgaaatttaaagtgaattcatgggctcatctttaaagcttttactaaaagattttcagctgaatggaactcattagctgtgtgcatataaaaagatcacatcaggtggatggagagacatttgatcccttgtttgcttaataaattataaaatgatggcttggaaaagcaggctagtctaaccatggtgctattattaggcttgcttgttacacacacaggtctaagcctagtatgtcaataaagcaaatacttactgttttgtttctattaatgattcccaaaccttgttgcaagtttttgcattggcatctttggatttcagtcttgatgtttgttctatcagacttaaccttttatttcctgtccttccttgaaattgctgattgttctgctccctctacagatatttatatcaattcctacagctttcccctgccatccctgaactctttctagcccttttagattttggcactgtgaaacccctgctggaaacctgagtgaccctccctccccaccaagagtccacagacctttcatctttcacgaacttgatcctgttagcaggtggtaataccatgggtgctgtgacactaacagtcattgagaggtgggaggaagtcccttttccttggactggtatcttttcaactattgttttatcctgtctttgggggcaatgtgtcaaaagtcccctcaggaattttcagaggaaagaacattttatgaggctttctctaaagtttcctttgtataggagtatgctcacttaaatttacagaaagaggtgagctgtgttaaacctcagagtttaaaagctactgataaactgaagaaagtgtctatattggaactagggtcatttgaaagcttcagtctcggaacatgacctttagtctgtggactccatttaaaaataggtatgaataagatgactaagaatgtaatggggaagaactgccctgcctgcccatctcagagccataaggtcatctttgctagagctatttttacctatgtatttatcgttcttgatcataagccgcttatttatatcatgtatctctaaggacctaaaagcactttatgtagtttttaattaatcttaagatctggttacggtaactaaaaaagcctgtctgccaaatccagtggaaacaagtgcatagatgtgaattggtttttaggggccccacttcccaattcattaggtatgactgtggaaatacagacaaggatcttagttgatattttgggcttggggcagtgagggcttaggacaccccaagtggtttgggaaaggaggaggggagtggtgggtttatagggggaggaggaggcaggtggtctaagtgctgactggctacgtagttcgggcaaatcctccaaaagggaaagggaggatttgcttagaaggatggcgctcccagtgactactttttgacttctgtttgtcttacgcttctctcagggaaaaacatgcagtcctctagtgtttcatgtacattctgtggggggtgaacaccttggttctggttaaacagctgtacttttgatagctgtgccaggaagggttaggaccaactacaaattaatgttggttgtcaaatgtagtgtgtttccctaactttctgtttttcctgagaaaaaaaaataaatcttttattcaaaaaaaaaaaaaaaaaaa

SEQ ID NO: 1363 - DNA, 6113 bp, Homo sapiens
taatacttaattaccttctaataattggagcagaagatgaacccaactaatcctttcagtgggcagcagcctagtgctttttcggcgtcttctagtaatgtaggaacacttccatctaagccgccatttcgatttggtcaaccttctctttttggacaaaacagtaccttatctgggaagagctcgggattttcacaggtatccagctttccagcgtcttctggagtaagtcattcctcttcagtgcaaacattagggttcacccaaacctcaagtgttggacccttttctggacttgagcacacttccacctttgtggctacctctgggccttcaagttcatctgtgctgggaaacacaggatttagttttaaatcacccaccagtgttggggctttcccaagcacttctgcttttggacaagaagctggagaaatagtgaactctggttttgggaaaacagaattcagctttaaacctctggaaaatgcagtgttcaaaccaatactgggggctgaatctgagccagagaaaacccagagccaaattgcttctgggttttttacattttcccacccaattagtagtgcacctggaggcctggcccctttctcttttcctcaagtaacaagtagttcagctaccacttcaaattttaccttttcaaaacctgttagtagtaataattcattatctgcctttacccctgctttgtcaaaccaaaatgtagaggaagagaagagaggacctaagtcaatatttggaagttctaataatagcttcagtagcttccctgtatcatctgcggttttgggcgaacctttccaggctagcaaagcaggtgtcaggcaggggtgtgaagaagctgtttcccaggtggaaccacttcccagcctaatgaaaggactgaaaaggaaggaggaccaggatcgctccccaaggagacatggccacgagccagcagaagattcggatcctctgtcccggggcgatcatcctccagacaaacgacctgtccgcctgaatcgaccccggggaggtactttatttggtcggacgatacaggatgttttcaaaagcaataaggaagtaggtcgtctgggcaacaaggaggccaaaaaggaaactggctttgttgagtctgcagaaagtgaccacatggctatcccaggagggaatcagtctgtcctggcaccttcccggattccaggtgtgaataaagaggaagaaactgaaagtagagagaagaaagaagattctctaagaggaactccggcgcgtcagagtaacagaagcgagagcacagacagtcttgggggcttgtctccctctgaagtcacagccatccagtgcaagaacatccctgactacctcaacgacaggaccattctggagaaccattttggcaaaattgctaaagtgcagcgcatctttaccaggcgcagcaaaaagcttgcagtggtacatttctttgatcatgcatctgcagccctggctagaaagaaggggaaaagtttgcataaagacatggctatcttttggcacaggaagaaaataagccccaataagaaacccttttccctgaaggagaagaaaccaggtgacggtgaagtcagcccgagcacagaggatgcaccctttcagcactctcctcttggcaaggccgcagggaggactggtgctagcagcctcctgaataaaagctctccagtgaagaagccaagtcttctaaaggcccaccaattcgagggagactcttttgactcagcctccgagggctccgagggcctcgggccatgtgtgctctccctcagtaccctgataggcactgtggctgagacatccaaggagaagtaccgcctgcttgaccagagagacaggatcatgcggcaagctcgggtgaagagaaccgatctggacaaagcgaggacttttgttggcacctgcctggatatgtgtcctgagaaggagaggtacatgcgggagacccgtagccagctgagcgtgttcgaagtggtcccagggactgaccaggtggaccacgcagcagctgtgaaagagtacagtcggtcctcggcggatcaggaggagcccctgccccacgagctgcggcccttgccagtgctcagcaggaccatggactacctggtgacccagatcatggaccagaaggagggcagcctgcgggattggtatgacttcgtgtggaaccgcacgcgtggcatacggaaggatatcacgcagcagcacctctgtgaccccctgacggtgtccctgattgagaagtgcacccggtttcacatccactgtgcccacttcatgtgtgaggagcccatgtcctcctttgatgccaagatcaataatgagaacatgaccaagtgcctgcagagcctgaaggagatgtaccaggacctgagaaacaagggtgtcttctgtgccagcgaagcggagttccagggctacaatgttctgctcagtctcaacaagggagacatcctaagagaagtacaacagttccatcctgctgttagaaactcatctgaggtgaaatttgctgttcaggcttttgctgcattgaacagtaataattttgtgagatttttcaaactggtccagtcagcttcttacctgaacgcttgtcttttacactgttacttcagtcagatccgcaaggatgctctccgggcgctcaactttgcgtacacggtgagcacacagcgatctaccatctttcccctggatggtgtggtgcgcatgctgctgttcagagactgtgaagaggccaccgacttcctcacctgccacggcctcaccgtttccgacggctgtgtggagctgaaccggtctgcattcctggaaccagagggattatccaagaccaggaagtcggtgtttattactaggaagctgacggtgtcagtcggggaaattgtgaacggagggccattgccccccgtccctcgtcatacccctgtgtgcagcttcaactcccagaacaagtacatcggggagagcctggccgcggagctgcccgtcagcacccagagacccggctccgacacagtgggcggagggagaggagaggagtgtggtgtagagccggatgcacccctgtccagtctcccacagtctctaccagcccctgcgccctcaccagtgcctctgcctcctgtcctggcactgaccccgtctgtggcgcccagcctcttccagctgtctgtgcagcctgaaccaccgcctccagagcccgtgcccatgtactctgacgaggacctggcgcaggtggtggacgagctcatccaggaggccctgcagagggactgtgaggaagttggctctgcgggtgctgcctacgcagctgccgccctgggtgtttctaatgctgctatggaggatttgttaacagctgcaaccacgggcattttgaggcacattgcagctgaagaagtgtctaaggaaagagagcgaagggagcaggagaggcagcgggctgaagaggaaaggttgaaacaagagagagagctggtgttaagtgagctgagccagggcctggccgtggagctgatggaacgcgtgatgatggagtttgtgagggaaacctgctcccaggagttgaagaatgcagtagagacagaccagagggtccgtgtggcccgttgctgtgaggatgtctgtgcccacttagtggacttgtttctcgtggaggaaatcttccagactgcaaaggagaccctccaggagcttcagtgcttctgcaagtatctacagcggtggagggaagctgtcacagcccgcaagaaactgaggcgccaaatgcgggctttccctgctgcgccctgctgcgtggacgtgagcgaccggctgagggcgctggcgcccagcgcagagtgccccattgctgaagagaacctggccaggggcctcctggacctgggccatgcagggagattgggcatctcctgcaccaggttaaggcggctcagaaacaagacagctcaccagatgaaggttcagcacttctaccagcagctgctgagtgatgtggcatgggcgtctctggacctgccatccctcgtggctgagcacctccctgggaggcaggagcatgtgttttggaagctggtgctggtgttgccggatgtagaggagcagtccccagagagttgtggcagaattctagcaaattggttaaaagtcaagttcatgggagatgaaggctcagtggatgacacatccagcgatgctggtgggattcagacgctttcgcttttcaactcacttagcagcaaaggggatcagatgatttctgttaacgtgtgtataaaggtggcccatggcgccctcagtgatggtgccattgatgctgtggagacacagaaggacctcctgggagccagtgggctcatgctgctgcttccccccaaaatgaagagtgaggacatggcagaggaggacgtgtactggctgtcggccttgctgcagctcaagcagctcctgcaggctaagcccttccagcctgcgcttcctctggtggttcttgtgcctagcccaggaggggacgccgttgagaaggaagtagaagatggtctgatgctacaggacttggtttcagctaagctgatttcagattacactgttaccgagatccctgataccattaatgatctacaaggttcaactaaggttttgcaagcagtgcagtggctggtttcccactgcccccattcccttgacctctgctgccagactctcattcagtacgtcgaagacgggattggccatgagtttagtggccgctttttccatgacagaagagagaggcgtctgggcggtcttgcttctcaggagcctggcgccatcattgagctgtttaacagtgtgctgcagttcctggcttctgtggtgtcctctgaacagctgtgtgacctgtcctggcctgtcactgagtttgctgaggcagggggcagccggctgcttcctcacctgcactggaatgccccagagcacctggcctggctgaagcaggctgtgctcgggttccagcttccgcagatggaccttccacccctgggggccccctggctccccgtgtgctccatggttgtccagtacgcctcccagatccccagctcacgccagacacagcctgtcctccagtcccaggtggagaacctgctccacagaacctactgtaggtggaagagcaagagtccctccccagtccatggggcaggcccctcggtcatggagatcccatgggatgatcttatcgccttgtgtatcaaccacaagctgagagactggacgcccccccggcttcctgttacatcagaggcgctgagtgaagatggtcagatatgtgtgtatttttttaaaaacgatttgaaaaaatatgatgttcctttgtcgtgggaacaagccaggttgcagacgcagaaggagctacagctgagagagggacgtttggcaataaagccttttcatccttctgcaaacaattttcccataccattgcttcacatgcaccgtaactggaagaggagcacagagtgtgctcaagaggggaggattcccagcacagaggatctgatgcgaggagcttctgctgaggagctcttggcgcagtgtttgtcgagcagtctgctgctggagaaagaagagaacaagaggtttgaagatcagcttcagcaatggttgtctgaagactcaggagcatttacggatttaacttcccttcccctctatcttcctcagactctagtgtctctttctcacactattgaacctgtgatgaaaacatctgtaactactagcccacagagtgacatgatgagggagcaactgcagctgtcagaggcgacaggaacgtgtctaggcgaacgactaaagcacctggaaaggctgatccggagttcaagggaagaggaagttgcctctgagctccatctctctgcgctgctagacatggtggacatttgagcagcctgacctgtggggagggggtctctcccgaagagtttctgtttttactcaaaataatgttattctcagatgcttgatgcactgttggaaatgtgattaatttaatcatgcagataaaccatttaaatgtc

SEQ ID NO: 1364 - DNA, 3124 bp, Homo sapiens
gctcgggccacgcccacctgtcctgcagcactggatgctttgtgagttggggattgttgcgtcccatatctggacccagaagggacttccctgctcggctggctctcggtttctctgctttcctccggagaaataacagcgtcttccgcgccgcgcatggagcctcccggccgccgcgagtgtccctttccttcctggcgctttcctgggttgcttctggcggccatggtgttgctgctgtactccttctccgatgcctgtgaggagccaccaacatttgaagctatggagctcattggtaaaccaaaaccctactatgagattggtgaacgagtagattataagtgtaaaaaaggatacttctatatacctcctcttgccacccatactatttgtgatcggaatcatacatggctacctgtctcagatgacgcctgttatagagaaacatgtccatatatacgggatcctttaaatggccaagcagtccctgcaaatgggacttacgagtttggttatcagatgcactttatttgtaatgagggttattacttaattggtgaagaaattctatattgtgaacttaaaggatcagtagcaatttggagcggtaagcccccaatatgtgaaaaggttttgtgtacaccacctccaaaaataaaaaatggaaaacacacctttagtgaagtagaagtatttgagtatcttgatgcagtaacttatagttgtgatcctgcacctggaccagatccattttcacttattggagagagcacgatttattgtggtgacaattcagtgtggagtcgtgctgctccagagtgtaaagtggtcaaatgtcgatttccagtagtcgaaaatggaaaacagatatcaggatttggaaaaaaattttactacaaagcaacagttatgtttgaatgcgataagggtttttacctcgatggcagcgacacaattgtctgtgacagtaacagtacttgggatcccccagttccaaagtgtcttaaaggtcctaggcctacttacaagcctccagtctcaaattatccaggatatcctaaacctgaggaaggaatacttgacagtttggatgtttgggtcattgctgtgattgttattgccataggaaagcagatggtggagctgaatatgccacttaccagactaaatcaaccactccagcagagcagagaggctgaatagattccacaacctggtttgccagttcatcttttgactctattaaaatcttcaatagttgttattctgtagtttcactctcatgagtgcaactgtggcttagctaatattgcaatgtggcttgaatgtaggtagcatcctttgatgcttctttgaaacttgtatgaatttgggtatgaacagattgcctgctttcccttaaataacacttagatttattggaccagtcagcacagcatgcctggttgtattaaagcagggatatgctgtattttataaaattggcaaaattagagaaatatagttcacaatgaaattatattttctttgtaaagaaagtggcttgaaatcttttttgttcaaagattaatgccaactcttaagattattctttcaccaactatagaatgtattttatatatcgttcattgtaaaaagcccttaaaaatatgtgtatactactttggctcttgtgcataaaaacaagaacactgaaaattgggaatatgcacaaacttggcttctttaaccaagaatattattggaaaattctctaaaagttaatagggtaaattctctattttttgtaatgtgttcggtgatttcagaaagctagaaagtgtatgtgtggcatttgttttcactttttaaaacatccctaactgatcgaatatatcagtaatttcagaatcagatgcatcctttcataagaagtgagaggactctgacagccataacaggagtgccacttcatggtgcgaagtgaacactgtagtcttgttgttttcccaaagagaactccgtatgttctcttaggttgagtaacccactctgaattctggttacatgtgtttttctctccctccttaaataaagagaggggttaaacatgccctctaaaagtaggtggttttgaagagaataaattcatcagataacctcaagtcacatgagaatcttagtccatttacattgccttggctagtaaaagccatctatgtatatgtcttacctcatctcctaaaaggcagagtacaaagtaagccatgtatctcaggaaggtaacttcattttgtctatttgctgttgattgtaccaagggatggaagaagtaaatatagctcaggtagcactttatactcaggcagatctcagccctctactgagtcccttagccaagcagtttctttcaaagaagccagcaggcgaaaagcagggactgccactgcatttcatatcacactgttaaaagttgtgttttgaaattttatgtttagttgcacaaattgggccaaagaaacattgccttgaggaagatatgattggaaaatcaagagtgtagaagaataaatactgttttactgtccaaagacatgtttatagtgctctgtaaatgttcctttcctttgtagtctctggcaagatgctttaggaagataaaagtttgaggagaacaaacaggaattctgaattaagcacagagttgaagtttatacccgtttcacatgcttttcaagaatgtcgcaattactaagaagcagataatggtgttttttagaaacctaattgaagtatattcaaccaaatactttaatgtataaaataaatattatacaatatacttgtatagcagtttctgcttcacatttgattttttcaaatttaatatttatattagagatctatatatgtataaatatgtattttgtcaaatttgttacttaaatatatagagaccagttttctctggaagtttgtttaaatgacagaagcgtatatgaattcaagaaaatttaagctgcaaaaatgtatttgctataaaatgagaagtctcactgatagaggttctttattgctcattttttaaaaaatggactcttgaaatctgttaaaataaaattgtacatttggagatgtttca

SEQ ID NO: 1365 - DNA, 3146 bp, Homo sapiens
gctcgggccacgcccacctgtcctgcagcactggatgctttgtgagttggggattgttgcgtcccatatctggacccagaagggacttccctgctcggctggctctcggtttctctgctttcctccggagaaataacagcgtcttccgcgccgcgcatggagcctcccggccgccgcgagtgtccctttccttcctggcgctttcctgggttgcttctggcggccatggtgttgctgctgtactccttctccgatgcctgtgaggagccaccaacatttgaagctatggagctcattggtaaaccaaaaccctactatgagattggtgaacgagtagattataagtgtaaaaaaggatacttctatatacctcctcttgccacccatactatttgtgatcggaatcatacatggctacctgtctcagatgacgcctgttatagagaaacatgtccatatatacgggatcctttaaatggccaagcagtccctgcaaatgggacttacgagtttggttatcagatgcactttatttgtaatgagggttattacttaattggtgaagaaattctatattgtgaacttaaaggatcagtagcaatttggagcggtaagcccccaatatgtgaaaaggttttgtgtacaccacctccaaaaataaaaaatggaaaacacacctttagtgaagtagaagtatttgagtatcttgatgcagtaacttatagttgtgatcctgcacctggaccagatccattttcacttattggagagagcacgatttattgtggtgacaattcagtgtggagtcgtgctgctccagagtgtaaagtggtcaaatgtcgatttccagtagtcgaaaatggaaaacagatatcaggatttggaaaaaaattttactacaaagcaacagttatgtttgaatgcgataagggtttttacctcgatggcagcgacacaattgtctgtgacagtaacagtacttgggatcccccagttccaaagtgtcttaaaggatatcctaaacctgaggaaggaatacttgacagtttggatgtttgggtcattgctgtgattgttattgccatagttgttggagttgcagtaatttgtgttgtcccgtacagatatcttcaaaggaggaagaagaaagggaaagcagatggtggagctgaatatgccacttaccagactaaatcaaccactccagcagagcagagaggctgaatagattccacaacctggtttgccagttcatcttttgactctattaaaatcttcaatagttgttattctgtagtttcactctcatgagtgcaactgtggcttagctaatattgcaatgtggcttgaatgtaggtagcatcctttgatgcttctttgaaacttgtatgaatttgggtatgaacagattgcctgctttcccttaaataacacttagatttattggaccagtcagcacagcatgcctggttgtattaaagcagggatatgctgtattttataaaattggcaaaattagagaaatatagttcacaatgaaattatattttctttgtaaagaaagtggcttgaaatcttttttgttcaaagattaatgccaactcttaagattattctttcaccaactatagaatgtattttatatatcgttcattgtaaaaagcccttaaaaatatgtgtatactactttggctcttgtgcataaaaacaagaacactgaaaattgggaatatgcacaaacttggcttctttaaccaagaatattattggaaaattctctaaaagttaatagggtaaattctctattttttgtaatgtgttcggtgatttcagaaagctagaaagtgtatgtgtggcatttgttttcactttttaaaacatccctaactgatcgaatatatcagtaatttcagaatcagatgcatcctttcataagaagtgagaggactctgacagccataacaggagtgccacttcatggtgcgaagtgaacactgtagtcttgttgttttcccaaagagaactccgtatgttctcttaggttgagtaacccactctgaattctggttacatgtgtttttctctccctccttaaataaagagaggggttaaacatgccctctaaaagtaggtggttttgaagagaataaattcatcagataacctcaagtcacatgagaatcttagtccatttacattgccttggctagtaaaagccatctatgtatatgtcttacctcatctcctaaaaggcagagtacaaagtaagccatgtatctcaggaaggtaacttcattttgtctatttgctgttgattgtaccaagggatggaagaagtaaatatagctcaggtagcactttatactcaggcagatctcagccctctactgagtcccttagccaagcagtttctttcaaagaagccagcaggcgaaaagcagggactgccactgcatttcatatcacactgttaaaagttgtgttttgaaattttatgtttagttgcacaaattgggccaaagaaacattgccttgaggaagatatgattggaaaatcaagagtgtagaagaataaatactgttttactgtccaaagacatgtttatagtgctctgtaaatgttcctttcctttgtagtctctggcaagatgctttaggaagataaaagtttgaggagaacaaacaggaattctgaattaagcacagagttgaagtttatacccgtttcacatgcttttcaagaatgtcgcaattactaagaagcagataatggtgttttttagaaacctaattgaagtatattcaaccaaatactttaatgtataaaataaatattatacaatatacttgtatagcagtttctgcttcacatttgattttttcaaatttaatatttatattagagatctatatatgtataaatatgtattttgtcaaatttgttacttaaatatatagagaccagttttctctggaagtttgtttaaatgacagaagcgtatatgaattcaagaaaatttaagctgcaaaaatgtatttgctataaaatgagaagtctcactgatagaggttctttattgctcattttttaaaaaatggactcttgaaatctgttaaaataaaattgtacatttggagatgtttca

SEQ ID NO: 1366 - DNA, 3191 bp, Homo sapiens
gctcgggccacgcccacctgtcctgcagcactggatgctttgtgagttggggattgttgcgtcccatatctggacccagaagggacttccctgctcggctggctctcggtttctctgctttcctccggagaaataacagcgtcttccgcgccgcgcatggagcctcccggccgccgcgagtgtccctttccttcctggcgctttcctgggttgcttctggcggccatggtgttgctgctgtactccttctccgatgcctgtgaggagccaccaacatttgaagctatggagctcattggtaaaccaaaaccctactatgagattggtgaacgagtagattataagtgtaaaaaaggatacttctatatacctcctcttgccacccatactatttgtgatcggaatcatacatggctacctgtctcagatgacgcctgttatagagaaacatgtccatatatacgggatcctttaaatggccaagcagtccctgcaaatgggacttacgagtttggttatcagatgcactttatttgtaatgagggttattacttaattggtgaagaaattctatattgtgaacttaaaggatcagtagcaatttggagcggtaagcccccaatatgtgaaaaggttttgtgtacaccacctccaaaaataaaaaatggaaaacacacctttagtgaagtagaagtatttgagtatcttgatgcagtaacttatagttgtgatcctgcacctggaccagatccattttcacttattggagagagcacgatttattgtggtgacaattcagtgtggagtcgtgctgctccagagtgtaaagtggtcaaatgtcgatttccagtagtcgaaaatggaaaacagatatcaggatttggaaaaaaattttactacaaagcaacagttatgtttgaatgcgataagggtttttacctcgatggcagcgacacaattgtctgtgacagtaacagtacttgggatcccccagttccaaagtgtcttaaagtgtcgacttcttccactacaaaatctccagcgtccagtgcctcaggatatcctaaacctgaggaaggaatacttgacagtttggatgtttgggtcattgctgtgattgttattgccatagttgttggagttgcagtaatttgtgttgtcccgtacagatatcttcaaaggaggaagaagaaagggaaagcagatggtggagctgaatatgccacttaccagactaaatcaaccactccagcagagcagagaggctgaatagattccacaacctggtttgccagttcatcttttgactctattaaaatcttcaatagttgttattctgtagtttcactctcatgagtgcaactgtggcttagctaatattgcaatgtggcttgaatgtaggtagcatcctttgatgcttctttgaaacttgtatgaatttgggtatgaacagattgcctgctttcccttaaataacacttagatttattggaccagtcagcacagcatgcctggttgtattaaagcagggatatgctgtattttataaaattggcaaaattagagaaatatagttcacaatgaaattatattttctttgtaaagaaagtggcttgaaatcttttttgttcaaagattaatgccaactcttaagattattctttcaccaactatagaatgtattttatatatcgttcattgtaaaaagcccttaaaaatatgtgtatactactttggctcttgtgcataaaaacaagaacactgaaaattgggaatatgcacaaacttggcttctttaaccaagaatattattggaaaattctctaaaagttaatagggtaaattctctattttttgtaatgtgttcggtgatttcagaaagctagaaagtgtatgtgtggcatttgttttcactttttaaaacatccctaactgatcgaatatatcagtaatttcagaatcagatgcatcctttcataagaagtgagaggactctgacagccataacaggagtgccacttcatggtgcgaagtgaacactgtagtcttgttgttttcccaaagagaactccgtatgttctcttaggttgagtaacccactctgaattctggttacatgtgtttttctctccctccttaaataaagagaggggttaaacatgccctctaaaagtaggtggttttgaagagaataaattcatcagataacctcaagtcacatgagaatcttagtccatttacattgccttggctagtaaaagccatctatgtatatgtcttacctcatctcctaaaaggcagagtacaaagtaagccatgtatctcaggaaggtaacttcattttgtctatttgctgttgattgtaccaagggatggaagaagtaaatatagctcaggtagcactttatactcaggcagatctcagccctctactgagtcccttagccaagcagtttctttcaaagaagccagcaggcgaaaagcagggactgccactgcatttcatatcacactgttaaaagttgtgttttgaaattttatgtttagttgcacaaattgggccaaagaaacattgccttgaggaagatatgattggaaaatcaagagtgtagaagaataaatactgttttactgtccaaagacatgtttatagtgctctgtaaatgttcctttcctttgtagtctctggcaagatgctttaggaagataaaagtttgaggagaacaaacaggaattctgaattaagcacagagttgaagtttatacccgtttcacatgcttttcaagaatgtcgcaattactaagaagcagataatggtgttttttagaaacctaattgaagtatattcaaccaaatactttaatgtataaaataaatattatacaatatacttgtatagcagtttctgcttcacatttgattttttcaaatttaatatttatattagagatctatatatgtataaatatgtattttgtcaaatttgttacttaaatatatagagaccagttttctctggaagtttgtttaaatgacagaagcgtatatgaattcaagaaaatttaagctgcaaaaatgtatttgctataaaatgagaagtctcactgatagaggttctttattgctcattttttaaaaaatggactcttgaaatctgttaaaataaaattgtacatttggagatgtttca

SEQ ID NO: 1367 - DNA, 3196 bp, Homo sapiens
gctcgggccacgcccacctgtcctgcagcactggatgctttgtgagttggggattgttgcgtcccatatctggacccagaagggacttccctgctcggctggctctcggtttctctgctttcctccggagaaataacagcgtcttccgcgccgcgcatggagcctcccggccgccgcgagtgtccctttccttcctggcgctttcctgggttgcttctggcggccatggtgttgctgctgtactccttctccgatgcctgtgaggagccaccaacatttgaagctatggagctcattggtaaaccaaaaccctactatgagattggtgaacgagtagattataagtgtaaaaaaggatacttctatatacctcctcttgccacccatactatttgtgatcggaatcatacatggctacctgtctcagatgacgcctgttatagagaaacatgtccatatatacgggatcctttaaatggccaagcagtccctgcaaatgggacttacgagtttggttatcagatgcactttatttgtaatgagggttattacttaattggtgaagaaattctatattgtgaacttaaaggatcagtagcaatttggagcggtaagcccccaatatgtgaaaaggttttgtgtacaccacctccaaaaataaaaaatggaaaacacacctttagtgaagtagaagtatttgagtatcttgatgcagtaacttatagttgtgatcctgcacctggaccagatccattttcacttattggagagagcacgatttattgtggtgacaattcagtgtggagtcgtgctgctccagagtgtaaagtggtcaaatgtcgatttccagtagtcgaaaatggaaaacagatatcaggatttggaaaaaaattttactacaaagcaacagttatgtttgaatgcgataagggtttttacctcgatggcagcgacacaattgtctgtgacagtaacagtacttgggatcccccagttccaaagtgtcttaaagtgtcgacttcttccactacaaaatctccagcgtccagtgcctcaggtcctaggcctacttacaagcctccagtctcaaattatccaggatatcctaaacctgaggaaggaatacttgacagtttggatgtttgggtcattgctgtgattgttattgccatagatatcttcaaaggaggaagaagaaagggaaagcagatggtggagctgaatatgccacttaccagactaaatcaaccactccagcagagcagagaggctgaatagattccacaacctggtttgccagttcatcttttgactctattaaaatcttcaatagttgttattctgtagtttcactctcatgagtgcaactgtggcttagctaatattgcaatgtggcttgaatgtaggtagcatcctttgatgcttctttgaaacttgtatgaatttgggtatgaacagattgcctgctttcccttaaataacacttagatttattggaccagtcagcacagcatgcctggttgtattaaagcagggatatgctgtattttataaaattggcaaaattagagaaatatagttcacaatgaaattatattttctttgtaaagaaagtggcttgaaatcttttttgttcaaagattaatgccaactcttaagattattctttcaccaactatagaatgtattttatatatcgttcattgtaaaaagcccttaaaaatatgtgtatactactttggctcttgtgcataaaaacaagaacactgaaaattgggaatatgcacaaacttggcttctttaaccaagaatattattggaaaattctctaaaagttaatagggtaaattctctattttttgtaatgtgttcggtgatttcagaaagctagaaagtgtatgtgtggcatttgttttcactttttaaaacatccctaactgatcgaatatatcagtaatttcagaatcagatgcatcctttcataagaagtgagaggactctgacagccataacaggagtgccacttcatggtgcgaagtgaacactgtagtcttgttgttttcccaaagagaactccgtatgttctcttaggttgagtaacccactctgaattctggttacatgtgtttttctctccctccttaaataaagagaggggttaaacatgccctctaaaagtaggtggttttgaagagaataaattcatcagataacctcaagtcacatgagaatcttagtccatttacattgccttggctagtaaaagccatctatgtatatgtcttacctcatctcctaaaaggcagagtacaaagtaagccatgtatctcaggaaggtaacttcattttgtctatttgctgttgattgtaccaagggatggaagaagtaaatatagctcaggtagcactttatactcaggcagatctcagccctctactgagtcccttagccaagcagtttctttcaaagaagccagcaggcgaaaagcagggactgccactgcatttcatatcacactgttaaaagttgtgttttgaaattttatgtttagttgcacaaattgggccaaagaaacattgccttgaggaagatatgattggaaaatcaagagtgtagaagaataaatactgttttactgtccaaagacatgtttatagtgctctgtaaatgttcctttcctttgtagtctctggcaagatgctttaggaagataaaagtttgaggagaacaaacaggaattctgaattaagcacagagttgaagtttatacccgtttcacatgcttttcaagaatgtcgcaattactaagaagcagataatggtgttttttagaaacctaattgaagtatattcaaccaaatactttaatgtataaaataaatattatacaatatacttgtatagcagtttctgcttcacatttgattttttcaaatttaatatttatattagagatctatatatgtataaatatgtattttgtcaaatttgttacttaaatatatagagaccagttttctctggaagtttgtttaaatgacagaagcgtatatgaattcaagaaaatttaagctgcaaaaatgtatttgctataaaatgagaagtctcactgatagaggttctttattgctcattttttaaaaaatggactcttgaaatctgttaaaataaaattgtacatttggagatgtttca

SEQ ID NO: 1368 - DNA, 3236 bp, Homo sapiens
gctcgggccacgcccacctgtcctgcagcactggatgctttgtgagttggggattgttgcgtcccatatctggacccagaagggacttccctgctcggctggctctcggtttctctgctttcctccggagaaataacagcgtcttccgcgccgcgcatggagcctcccggccgccgcgagtgtccctttccttcctggcgctttcctgggttgcttctggcggccatggtgttgctgctgtactccttctccgatgcctgtgaggagccaccaacatttgaagctatggagctcattggtaaaccaaaaccctactatgagattggtgaacgagtagattataagtgtaaaaaaggatacttctatatacctcctcttgccacccatactatttgtgatcggaatcatacatggctacctgtctcagatgacgcctgttatagagaaacatgtccatatatacgggatcctttaaatggccaagcagtccctgcaaatgggacttacgagtttggttatcagatgcactttatttgtaatgagggttattacttaattggtgaagaaattctatattgtgaacttaaaggatcagtagcaatttggagcggtaagcccccaatatgtgaaaaggttttgtgtacaccacctccaaaaataaaaaatggaaaacacacctttagtgaagtagaagtatttgagtatcttgatgcagtaacttatagttgtgatcctgcacctggaccagatccattttcacttattggagagagcacgatttattgtggtgacaattcagtgtggagtcgtgctgctccagagtgtaaagtggtcaaatgtcgatttccagtagtcgaaaatggaaaacagatatcaggatttggaaaaaaattttactacaaagcaacagttatgtttgaatgcgataagggtttttacctcgatggcagcgacacaattgtctgtgacagtaacagtacttgggatcccccagttccaaagtgtcttaaagtgctgcctccatctagtacaaaacctccagctttgagtcattcagtgtcgacttcttccactacaaaatctccagcgtccagtgcctcaggatatcctaaacctgaggaaggaatacttgacagtttggatgtttgggtcattgctgtgattgttattgccatagttgttggagttgcagtaatttgtgttgtcccgtacagatatcttcaaaggaggaagaagaaagggaaagcagatggtggagctgaatatgccacttaccagactaaatcaaccactccagcagagcagagaggctgaatagattccacaacctggtttgccagttcatcttttgactctattaaaatcttcaatagttgttattctgtagtttcactctcatgagtgcaactgtggcttagctaatattgcaatgtggcttgaatgtaggtagcatcctttgatgcttctttgaaacttgtatgaatttgggtatgaacagattgcctgctttcccttaaataacacttagatttattggaccagtcagcacagcatgcctggttgtattaaagcagggatatgctgtattttataaaattggcaaaattagagaaatatagttcacaatgaaattatattttctttgtaaagaaagtggcttgaaatcttttttgttcaaagattaatgccaactcttaagattattctttcaccaactatagaatgtattttatatatcgttcattgtaaaaagcccttaaaaatatgtgtatactactttggctcttgtgcataaaaacaagaacactgaaaattgggaatatgcacaaacttggcttctttaaccaagaatattattggaaaattctctaaaagttaatagggtaaattctctattttttgtaatgtgttcggtgatttcagaaagctagaaagtgtatgtgtggcatttgttttcactttttaaaacatccctaactgatcgaatatatcagtaatttcagaatcagatgcatcctttcataagaagtgagaggactctgacagccataacaggagtgccacttcatggtgcgaagtgaacactgtagtcttgttgttttcccaaagagaactccgtatgttctcttaggttgagtaacccactctgaattctggttacatgtgtttttctctccctccttaaataaagagaggggttaaacatgccctctaaaagtaggtggttttgaagagaataaattcatcagataacctcaagtcacatgagaatcttagtccatttacattgccttggctagtaaaagccatctatgtatatgtcttacctcatctcctaaaaggcagagtacaaagtaagccatgtatctcaggaaggtaacttcattttgtctatttgctgttgattgtaccaagggatggaagaagtaaatatagctcaggtagcactttatactcaggcagatctcagccctctactgagtcccttagccaagcagtttctttcaaagaagccagcaggcgaaaagcagggactgccactgcatttcatatcacactgttaaaagttgtgttttgaaattttatgtttagttgcacaaattgggccaaagaaacattgccttgaggaagatatgattggaaaatcaagagtgtagaagaataaatactgttttactgtccaaagacatgtttatagtgctctgtaaatgttcctttcctttgtagtctctggcaagatgctttaggaagataaaagtttgaggagaacaaacaggaattctgaattaagcacagagttgaagtttatacccgtttcacatgcttttcaagaatgtcgcaattactaagaagcagataatggtgttttttagaaacctaattgaagtatattcaaccaaatactttaatgtataaaataaatattatacaatatacttgtatagcagtttctgcttcacatttgattttttcaaatttaatatttatattagagatctatatatgtataaatatgtattttgtcaaatttgttacttaaatatatagagaccagttttctctggaagtttgtttaaatgacagaagcgtatatgaattcaagaaaatttaagctgcaaaaatgtatttgctataaaatgagaagtctcactgatagaggttctttattgctcattttttaaaaaatggactcttgaaatctgttaaaataaaattgtacatttggagatgtttca

SEQ ID NO: 1369 - DNA, 3278 bp, Homo sapiens
gctcgggccacgcccacctgtcctgcagcactggatgctttgtgagttggggattgttgcgtcccatatctggacccagaagggacttccctgctcggctggctctcggtttctctgctttcctccggagaaataacagcgtcttccgcgccgcgcatggagcctcccggccgccgcgagtgtccctttccttcctggcgctttcctgggttgcttctggcggccatggtgttgctgctgtactccttctccgatgcctgtgaggagccaccaacatttgaagctatggagctcattggtaaaccaaaaccctactatgagattggtgaacgagtagattataagtgtaaaaaaggatacttctatatacctcctcttgccacccatactatttgtgatcggaatcatacatggctacctgtctcagatgacgcctgttatagagaaacatgtccatatatacgggatcctttaaatggccaagcagtccctgcaaatgggacttacgagtttggttatcagatgcactttatttgtaatgagggttattacttaattggtgaagaaattctatattgtgaacttaaaggatcagtagcaatttggagcggtaagcccccaatatgtgaaaaggttttgtgtacaccacctccaaaaataaaaaatggaaaacacacctttagtgaagtagaagtatttgagtatcttgatgcagtaacttatagttgtgatcctgcacctggaccagatccattttcacttattggagagagcacgatttattgtggtgacaattcagtgtggagtcgtgctgctccagagtgtaaagtggtcaaatgtcgatttccagtagtcgaaaatggaaaacagatatcaggatttggaaaaaaattttactacaaagcaacagttatgtttgaatgcgataagggtttttacctcgatggcagcgacacaattgtctgtgacagtaacagtacttgggatcccccagttccaaagtgtcttaaagtgctgcctccatctagtacaaaacctccagctttgagtcattcagtgtcgacttcttccactacaaaatctccagcgtccagtgcctcaggtcctaggcctacttacaagcctccagtctcaaattatccaggatatcctaaacctgaggaaggaatacttgacagtttggatgtttgggtcattgctgtgattgttattgccatagttgttggagttgcagtaatttgtgttgtcccgtacagatatcttcaaaggaggaagaagaaagggaaagcagatggtggagctgaatatgccacttaccagactaaatcaaccactccagcagagcagagaggctgaatagattccacaacctggtttgccagttcatcttttgactctattaaaatcttcaatagttgttattctgtagtttcactctcatgagtgcaactgtggcttagctaatattgcaatgtggcttgaatgtaggtagcatcctttgatgcttctttgaaacttgtatgaatttgggtatgaacagattgcctgctttcccttaaataacacttagatttattggaccagtcagcacagcatgcctggttgtattaaagcagggatatgctgtattttataaaattggcaaaattagagaaatatagttcacaatgaaattatattttctttgtaaagaaagtggcttgaaatcttttttgttcaaagattaatgccaactcttaagattattctttcaccaactatagaatgtattttatatatcgttcattgtaaaaagcccttaaaaatatgtgtatactactttggctcttgtgcataaaaacaagaacactgaaaattgggaatatgcacaaacttggcttctttaaccaagaatattattggaaaattctctaaaagttaatagggtaaattctctattttttgtaatgtgttcggtgatttcagaaagctagaaagtgtatgtgtggcatttgttttcactttttaaaacatccctaactgatcgaatatatcagtaatttcagaatcagatgcatcctttcataagaagtgagaggactctgacagccataacaggagtgccacttcatggtgcgaagtgaacactgtagtcttgttgttttcccaaagagaactccgtatgttctcttaggttgagtaacccactctgaattctggttacatgtgtttttctctccctccttaaataaagagaggggttaaacatgccctctaaaagtaggtggttttgaagagaataaattcatcagataacctcaagtcacatgagaatcttagtccatttacattgccttggctagtaaaagccatctatgtatatgtcttacctcatctcctaaaaggcagagtacaaagtaagccatgtatctcaggaaggtaacttcattttgtctatttgctgttgattgtaccaagggatggaagaagtaaatatagctcaggtagcactttatactcaggcagatctcagccctctactgagtcccttagccaagcagtttctttcaaagaagccagcaggcgaaaagcagggactgccactgcatttcatatcacactgttaaaagttgtgttttgaaattttatgtttagttgcacaaattgggccaaagaaacattgccttgaggaagatatgattggaaaatcaagagtgtagaagaataaatactgttttactgtccaaagacatgtttatagtgctctgtaaatgttcctttcctttgtagtctctggcaagatgctttaggaagataaaagtttgaggagaacaaacaggaattctgaattaagcacagagttgaagtttatacccgtttcacatgcttttcaagaatgtcgcaattactaagaagcagataatggtgttttttagaaacctaattgaagtatattcaaccaaatactttaatgtataaaataaatattatacaatatacttgtatagcagtttctgcttcacatttgattttttcaaatttaatatttatattagagatctatatatgtataaatatgtattttgtcaaatttgttacttaaatatatagagaccagttttctctggaagtttgtttaaatgacagaagcgtatatgaattcaagaaaatttaagctgcaaaaatgtatttgctataaaatgagaagtctcactgatagaggttctttattgctcattttttaaaaaatggactcttgaaatctgttaaaataaaattgtacatttggagatgtttca

SEQ ID NO: 1370 - DNA, 3371 bp, Homo sapiens
gctcgggccacgcccacctgtcctgcagcactggatgctttgtgagttggggattgttgcgtcccatatctggacccagaagggacttccctgctcggctggctctcggtttctctgctttcctccggagaaataacagcgtcttccgcgccgcgcatggagcctcccggccgccgcgagtgtccctttccttcctggcgctttcctgggttgcttctggcggccatggtgttgctgctgtactccttctccgatgcctgtgaggagccaccaacatttgaagctatggagctcattggtaaaccaaaaccctactatgagattggtgaacgagtagattataagtgtaaaaaaggatacttctatatacctcctcttgccacccatactatttgtgatcggaatcatacatggctacctgtctcagatgacgcctgttatagagaaacatgtccatatatacgggatcctttaaatggccaagcagtccctgcaaatgggacttacgagtttggttatcagatgcactttatttgtaatgagggttattacttaattggtgaagaaattctatattgtgaacttaaaggatcagtagcaatttggagcggtaagcccccaatatgtgaaaaggttttgtgtacaccacctccaaaaataaaaaatggaaaacacacctttagtgaagtagaagtatttgagtatcttgatgcagtaacttatagttgtgatcctgcacctggaccagatccattttcacttattggagagagcacgatttattgtggtgacaattcagtgtggagtcgtgctgctccagagtgtaaagtggtcaaatgtcgatttccagtagtcgaaaatggaaaacagatatcaggatttggaaaaaaattttactacaaagcaacagttatgtttgaatgcgataagggtttttacctcgatggcagcgacacaattgtctgtgacagtaacagtacttgggatcccccagttccaaagtgtcttaaagtgctgcctccatctagtacaaaacctccagctttgagtcattcagtgtcgacttcttccactacaaaatctccagcgtccagtgcctcaggtcctaggcctacttacaagcctccagtctcaaattatccaggatatcctaaacctgaggaaggaatacttgacagtttggatgtttgggtcattgctgtgattgttattgccatagttgttggagttgcagtaatttgtgttgtcccgtacagatatcttcaaaggaggaagaagaaaggcacatacctaactgatgagacccacagagaagtaaaatttacttctctctgagaaggagagatgagagaaaggtttgcttttatcattaaaaggaaagcagatggtggagctgaatatgccacttaccagactaaatcaaccactccagcagagcagagaggctgaatagattccacaacctggtttgccagttcatcttttgactctattaaaatcttcaatagttgttattctgtagtttcactctcatgagtgcaactgtggcttagctaatattgcaatgtggcttgaatgtaggtagcatcctttgatgcttctttgaaacttgtatgaatttgggtatgaacagattgcctgctttcccttaaataacacttagatttattggaccagtcagcacagcatgcctggttgtattaaagcagggatatgctgtattttataaaattggcaaaattagagaaatatagttcacaatgaaattatattttctttgtaaagaaagtggcttgaaatcttttttgttcaaagattaatgccaactcttaagattattctttcaccaactatagaatgtattttatatatcgttcattgtaaaaagcccttaaaaatatgtgtatactactttggctcttgtgcataaaaacaagaacactgaaaattgggaatatgcacaaacttggcttctttaaccaagaatattattggaaaattctctaaaagttaatagggtaaattctctattttttgtaatgtgttcggtgatttcagaaagctagaaagtgtatgtgtggcatttgttttcactttttaaaacatccctaactgatcgaatatatcagtaatttcagaatcagatgcatcctttcataagaagtgagaggactctgacagccataacaggagtgccacttcatggtgcgaagtgaacactgtagtcttgttgttttcccaaagagaactccgtatgttctcttaggttgagtaacccactctgaattctggttacatgtgtttttctctccctccttaaataaagagaggggttaaacatgccctctaaaagtaggtggttttgaagagaataaattcatcagataacctcaagtcacatgagaatcttagtccatttacattgccttggctagtaaaagccatctatgtatatgtcttacctcatctcctaaaaggcagagtacaaagtaagccatgtatctcaggaaggtaacttcattttgtctatttgctgttgattgtaccaagggatggaagaagtaaatatagctcaggtagcactttatactcaggcagatctcagccctctactgagtcccttagccaagcagtttctttcaaagaagccagcaggcgaaaagcagggactgccactgcatttcatatcacactgttaaaagttgtgttttgaaattttatgtttagttgcacaaattgggccaaagaaacattgccttgaggaagatatgattggaaaatcaagagtgtagaagaataaatactgttttactgtccaaagacatgtttatagtgctctgtaaatgttcctttcctttgtagtctctggcaagatgctttaggaagataaaagtttgaggagaacaaacaggaattctgaattaagcacagagttgaagtttatacccgtttcacatgcttttcaagaatgtcgcaattactaagaagcagataatggtgttttttagaaacctaattgaagtatattcaaccaaatactttaatgtataaaataaatattatacaatatacttgtatagcagtttctgcttcacatttgattttttcaaatttaatatttatattagagatctatatatgtataaatatgtattttgtcaaatttgttacttaaatatatagagaccagttttctctggaagtttgtttaaatgacagaagcgtatatgaattcaagaaaatttaagctgcaaaaatgtatttgctataaaatgagaagtctcactgatagaggttctttattgctcattttttaaaaaatggactcttgaaatctgttaaaataaaattgtacatttggagatgtttca

SEQ ID NO: 1371 - DNA, 1937 bp, Homo sapiens
gtacctcacggaagccggctttggccctgcggctgctaccgtcgccgcggagaaattgttggatctggcagtctaggaatgaatctcctctcagcctttaagctcacctggtcagaatccttggatgagcctgtgggaccgttcctcctagcccggtggtttggaaccagtggctttgggactgtaagaggatggacaaagattctcaggggctgctagattcatccctgatggcatcaggcactgccagccgctcagaggatgaggagtcactggcagggcagaagcgagcctcctcccaggccttgggcaccatccctaaacggagaagctcctccaggttcatcaagaggaagaagttcgatgatgagctggtggagagcagcctggcaaaatcttctacccgggcaaagggggccagtggggtggaaccagggcgctgttcggggagtgaaccctcctccagtgagaagaagaaggtatccaaagcccccagcactcctgtgccacccagcccagccccagcccctggactcaccaagcgtgtgaagaagagtaaacagccacttcaggtgaccaaggatctgggccgctggaagcctgcagatgacctcctgctcataaatgctgtgttgcagaccaacgacctgacctccgtccacctgggcgtgaaattcagctgccgcttcacccttcgggaggtccaggagcgttggtacgccctgctctacgatcctgtcatctccaagttggcctgtcaggccatgaggcagctgcacccagaggctattgcagccatccagagcaaggccctgtttagcaaggctgaggagcagctgctgagcaaagtgggatcgaccagccagcccaccttggagaccttccaggacctgctgcacagacaccctgatgccttctacctggcccgtaccgcgaaggccctgcaggcccactggcagctcatgaagcagtattacctgctggaggaccagacagtgcagccgctgcccaaaggggaccaagtgctgaacttctctgatgcagaggacctgattgatgacagtaagctcaaggacatgcgagatgaggtcctggaacatgagctgatggtggctgaccggcgccagaagcgagagattcggcagctggaacaggaactgcataagtggcaggtgctagtggacagcatcacaggcatgagctctccggacttcgacaaccagacactggcagtgctgcggggccgcatggtgcggtacctgatgcgctcgcgtgagatcaccctgggcagagcaaccaaggataaccagattgatgtggacctgtctctggagggtccggcctggaagatatcccggaaacaaggtgtcatcaagctgaagaacaacggtgatttcttcattgccaatgagggtcgacggcccatctacatcgatggacggccggtgctctgtggctccaaatggcgcctcagcaacaactctgtggtggagatcgccagcctgcgattcgtcttccttatcaaccaggacctcattgccctcatcagggctgaggctgccaagatcacaccacagtgaggagtggtggcaggactcgtgggccctctccggcctgtttcccctgccactccagcccccttgagctgggaactcaggctcctggaaaaacctgggcagtgggaggctcagctgcgggccattgatttgagcctttgagggaggatagggctggcctttgtgaagccagcagaggctgagaacctcaggcttccctagatccagagcccctccccatcttcctctctctaaaaacaaccctaccccccattgccaccttcactcctgtgtctccagctgattagcctcagactcttcttttattgtttttcttttgtaaataaaaagcaccaggttccaaaaaaaaaaaaaaaaaaa

SEQ ID NO: 1372 - DNA, 1321 bp, Homo sapiens
ggcgctgggcagtgtggaggtcgttggagtcacttccgcgtcaccagctcctgtgcctgccagtcggtgcccctcccgctccagccatgctctccgccctcgcccggcctgccagcgctgctctccgccgcagcttcagcacctcggcccagaacaatgctaaagtagctgtgctaggggcctctggaggcatcgggcagccactttcacttctcctgaagaacagccccttggtgagccgcctgaccctctatgatatcgcgcacacacccggagtggccgcagatctgagccacatcgagaccaaagccgctgtgaaaggctacctcggacctgaacagctgcctgactgcctgaaaggttgtgatgtggtagttattccggctggagtccccagaaagccaggcatgacccgggacgacctgttcaacaccaatgccacgattgtggccaccctgaccgctgcctgtgcccagcactgcccggaagccatgatctgcgtcattgccaatccggttaattccaccatccccatcacagcagaagttttcaagaagcatggagtgtacaaccccaacaaaatcttcggcgtgacgaccctggacatcgtcagagccaacacctttgttgcagagctgaagggtttggatccagctcgagtcaacgtccctgtcattggtggccatgctgggaagaccatcatccccctgatctctcagtgcacccccaaggtggactttccccaggaccagctgacagcactcactgggcggatccaggaggccggcacggaggtggtcaaggctaaagccggagcaggctctgccaccctctccatggcgtatgccggcgcccgctttgtcttctcccttgtggatgcaatgaatggaaaggaaggtgttgtggaatgttccttcgttaagtcacaggaaacggaatgtacctacttctccacaccgctgctgcttgggaaaaagggcatcgagaagaacctgggcatcggcaaagtctcctcttttgaggagaagatgatctcggatgccatccccgagctgaaggcctccatcaagaagggggaagatttcgtgaagaccctgaagtgagccgctgtgacgggtggccagtttccttaatttatgaaggcatcatgtcactgcaaagccgttgcagataaactttgtattttaatttgctttggtgatgattactgtattgacatcatcatgccttccaaattgtgggtggctctgtgggcgcatcaataaaagccgtccttgattttatttttcaaggtcccttctgtaaaaaaaaaaaaaaaaaa

SEQ ID NO: 1373 - DNA, 2730 bp, Homo sapiens
gtgggccacgccttccgggccccgcggctggccggctcctcgcgccctcccctctctcggccgctcttcgggccgcctctgcgtgtggggccgcccgcgccagtgtgagcctgagctgacggcggctccgggaggctcgcagaaggggagggccgggcggcgcgggagctgagcatcgccagggcgggcggcagggcgcggcctctccgccgggtgtaccacctgtcgcggcgcgagacctctggtgaaagaaaagatgttgtcccggttaagagtagtttccaccacttgtactttggcatgtcgacatttgcacataaaagaaaaaggcaagccacttatgctgaacccaagaacaaacaagggaatggcatttactttacaagaacgacaaatgcttggtcttcaaggacttctacctcccaaaatagagacacaagatattcaagccttacgatttcatagaaacttgaagaaaatgactagccctttggaaaaatatatctacataatgggaatacaagaaagaaatgagaaattgttttatagaatactgcaagatgacattgagagtttaatgccaattgtatatacaccgacggttggtcttgcctgctcccagtatggacacatctttagaagacctaagggattatttatttcgatctcagacagaggtcatgttagatcaattgtggataactggccagaaaatcatgttaaggctgttgtagtgactgatggagagagaattctgggtcttggagatctgggtgtctatggaatgggaattccagtaggaaaactttgtttgtatacagcttgtgcaggaatacggcctgatagatgcctgccagtgtgtattgatgtgggaactgataatatcgcactcttaaaagacccattttacatgggcttgtaccagaaacgagatcgcacacaacagtatgatgacctgattgatgagtttatgaaagctattactgacagatatggccggaacacactcattcagttcgaagactttggaaatcataatgcattcaggttcttgagaaagtaccgagaaaaatattgtactttcaatgatgatattcaagggacagctgcagtagctctagcaggtcttcttgcagcacaaaaagttattagtaaaccaatctccgaacacaaaatcttattccttggagcaggagaggctgctcttggaattgcaaatcttatagttatgtctatggtagaaaatggcctgtcagaacaagaggcacaaaagaaaatctggatgtttgacaagtatggtttattagttaagggacggaaagcaaaaatagatagttatcaggaaccatttactcactcagccccagagagcatacctgatacttttgaagatgcagtgaatatactgaagccttcaactataattggagttgcaggtgctggccgtcttttcactcctgatgtaatcagagccatggcctctatcaatgaaaggcctgtaatatttgcattaagtaatcctacagcacaggcagagtgcacggctgaagaagcatatacacttacagagggcaggtgtttgtttgccagtggcagtccatttgggccagtgaaacttacagatgggcgagtctttacaccaggtcaaggaaacaatgtttatatttttccaggtgtggctttagctgttattctctgtaacacccggcatattagtgacagtgttttcctagaagctgcaaaggccctgacaagccaattgacagatgaagagctagcccaagggagactttacccaccgcttgctaatattcaggaagtttctattaacattgctattaaagttacagaatacctatatgctaataaaatggctttccgatacccagaacctgaagacaaggccaaatatgttaaagaaagaacatggcggagtgaatatgattccctgctgccagatgtgtatgaatggccagaatctgcatcaagccctcctgtgataacagaatagaagcactcccctgataaatactttctgtgctccagggaaccccttttttcagacaagaagagataatgtcttcagttttatggtgttttctgtgttttgttctccctgaccactttggttgatgtattttttccatgcgtctccacatctgttggggtagacgtgttgattgattgcattgcccaccagcaccctacaatcagatagttgtgatgctttaattctaacatacagcccgtaccacatccaggagatgtaaaaagtgtgtttgtgaatgtcttcacttgtactctaattcagacttgccaaagtatttgctatttactattatgggtaatactcttctctggcctagttcttacagagctactaaaatagaaatttacttttatggatagaagtacagaattttgagaagaaactaaattttcaccaaattttaaggaaaaattgtcattatctaaaaatgttcttatatatctgcttcatcttaccttcatactctgaaattccctatagcagacagagctagggaaatattaaaaatttaccctatttattttctggaactaaatcaagccttaactataacattatgagagtaatgggaactactgctggctttaagtaaataaaagtcattgttttcaacagtgtataaaaatcatagtgtaacctttttatttaataaatatcttacatttaaaaaaaaaaaaaaa

SEQ ID NO: 1374 - DNA, 6985 bp, Homo sapiens
attgtccgatggttcccggcgtacctcggcttccctcggtagtttccggcaatggtcgagagtttctaacgtgcccccttgttgtctctcggccgccgtcctctcaaccaccgccccccttttcggctccctctcccccttcccgttcccccagtcagcctggccctgctggtgcctccggcgctacgggctgggcaagatggcggccttcgggatcttgagctacgaacaccggcccctgaagcggccgcggctggggcctcccgatgtttaccctcaggaccccaaacagaaggaggatgaactgacggccttgaatgtaaaacaaggtttcaataaccagcctgctgtctctggggatgagcatggcagtgccaagaacgtcagcttcaatcctgccaagatcagttccaacttcagcagcattattgcagagaaattacgttgtaatacccttcctgacactggtcgcaggaagccccaagtgaaccagaaggataacttctggctggtgactgcacgatcccagagtgccattaacacttggttcactgacttggctggcaccaagccactcacgcaactagccaaaaaggtccccattttcagtaagaaggaagaggtgtttgggtacttagccaaatacacagtgcctgtgatgcgggctgcctggctcattaagatgacctgtgcctactatgcagcaatctctgagaccaaggttaagaagagacatgttgaccctttcatggaatggactcagatcatcaccaagtacttatgggagcagttacagaagatggctgaatactaccggccagggcctgcaggaagtgggggctgtggttccacgatagggcccttgccccatgatgtagaggtggcaatccggcagtgggattacaccgagaagctggccatgttcatgtttcaggatggaatgctggacagacatgagttcctgacctgggtgcttgagtgttttgagaagatccgccctggagaggatgaattgcttaaactgctgctgcctctgcttctccgatactctggggaatttgttcagtctgcatacctgtcccgccggcttgcctacttctgtacacggagactggccctgcagctggatggtgtgagcagtcactcatctcatgttatatctgctcagtcaacaagcacgctacccaccacccctgctcctcagcccccaactagcagcacaccctcgactccctttagtgacctgcttatgtgccctcagcaccggcccctggtttttggcctcagctgtatcctacagaccatcctcctgtgctgtcctagtgccttggtttggcactactcactgactgatagcagaattaagaccggctcaccacttgaccacttgcctattgccccgtccaacctgcccatgccagagggtaacagtgccttcactcagcaggtccgtgcaaagttgcgggagatcgagcagcagatcaaggagcggggacaggcagttgaagttcgctggtctttcgataaatgccaggaagctactgcaggcttcaccattggacgggtacttcatactttggaagtgctggacagccatagttttgaacgctctgacttcagcaactctcttgactccctttgtaaccgaatctttggattgggacctagcaaggatgggcatgagatctcctcagatgatgatgctgtggtgtcattgctatgtgaatgggctgtcagctgcaagcgttctggtcggcatcgtgctatggtggtagccaagctcctggagaagagacaggcggagattgaggctgagcgttgtggagaatcagaagccgcagatgagaagggttccatcgcctctggctccctttctgctcccagtgctcccattttccaggatgtcctcctgcagtttctggatacacaggctcccatgctgacggaccctcgaagtgagagtgagcgggtggaattctttaacttagtactgctgttctgtgaactgattcgacatgatgttttctcccacaacatgtatacttgcactctcatctcccgaggggaccttgcctttggagcccctggtccccggcctccctctccctttgatgatcctgccgatgacccagagcacaaggaggctgaaggcagcagcagcagcaagctggaagatccagggctctcagaatctatggacattgaccctagttccagtgttctctttgaggacatggagaagcctgatttctcattgttctcccctactatgccctgtgaggggaagggcagtccatcccctgagaagccagatgtcgagaaggaggtgaagcccccacccaaggagaagattgaagggacccttggggttctttacgaccagccacgacacgtgcagtacgccacccattttcccatcccccaggaggagtcatgcagccatgagtgcaaccagcggttggtcgtactgtttggggtgggaaagcagcgagatgatgcccgccatgccatcaagaaaatcaccaaggatatcttgaaggttctgaaccgcaaagggacagcagaaactgaccagcttgctcctattgtgcctctgaatcctggagacctgacattcttaggtggggaggatgggcagaagcggcgacgcaaccggcctgaagccttccccactgctgaagatatctttgctaagttccagcacctttcacattatgaccaacaccaggtcacggctcaggtctcccggaatgttctggagcagatcacgagctttgcccttggcatgtcataccacttgcctctggtgcagcatgtgcagttcatcttcgacctcatggaatattcactcagcatcagtggcctcatcgactttgccattcagctgctgaatgaactgagtgtagttgaggctgagctgcttctcaaatcctcggatctggtgggcagctacactactagcctgtgcctgtgcatcgtggctgtcctgcggcactatcatgcctgcctcatcctcaaccaggaccagatggcacaggtctttgaggggctgtgtggcgtcgtgaagcatgggatgaaccggtccgatggctcctctgcagagcgctgtatccttgcttatctctatgatctgtacacctcctgtagccatttaaagaacaaatttggggagctcttcagcgacttttgctcaaaggtgaagaacaccatctactgcaacgtggagccatcggaatcaaatatgcgctgggcacctgagttcatgatcgacactctagagaaccctgcagctcacaccttcacctacacggggctaggcaagagtcttagtgagaaccctgctaaccgctacagctttgtctgcaatgcccttatgcacgtctgtgtggggcaccatgatcccgatagggtgaatgacatcgcaatcctgtgtgcagagctgaccggctattgcaagtcactgagtgcagaatggctaggagtgcttaaggccttgtgctgctcctctaacaatggcacttgtggtttcaacgatctcctctgcaatgttgatgtcagtgacctatcttttcatgactcgctggctacttttgttgccatcctcatcgctcggcagtgtttgctcctggaagatctgattcgctgtgctgccatcccttcactccttaatgctgcttgtagtgaacaggactctgagccaggggcccggcttacctgccgcatcctccttcaccttttcaagacaccgcagctcaatccttgccagtctgatggaaacaagcctacagtaggaatccgctcctcctgcgaccgccacctgctggctgcctcccagaaccgcatcgtggatggagccgtgtttgctgttctcaaggctgtgtttgtacttggggatgcggaactgaaaggttcaggcttcactgtgacaggaggaacagaagaacttccagaggaggagggaggaggtggcagtggtggtcggaggcagggtggccgcaacatctctgtggagacagccagtctggatgtctatgccaagtacgtgctgcgcagcatctgccaacaggaatgggtaggagaacgttgccttaagtctctgtgtgaggacagcaatgacctgcaagacccagtgttgagtagtgcccaggcgcagcgcctcatgcagctcatttgctatccacatcgactgctggacaatgaggatggggaaaacccccagcggcagcgcataaagcgcattctccagaacttggaccagtggaccatgcgccagtcttccttggagctgcagctcatgatcaagcagacccctaacaatgagatgaactccctcttggagaacatcgccaaggccacaatcgaggttttccaacagtcagcagagacagggtcatcttctggaagtactgcaagcaacatgcccagcagcagcaagaccaagcctgtgctcagctctctagagcgctctggtgtatggctggtggcccccctcattgctaaactgcccacctcagtccagggacatgtgttaaaggctgctggggaagaattggagaagggtcagcacctgggttcctcttcacgcaaagaacgtgatcgacaaaagcagaagagcatgtccctattgagccagcagcccttcttatcgctggtgctaacatgtctgaaagggcaggatgaacaacgcgagggactccttacctccctctacagccaggtgcaccagattgtgaataattggcgagatgaccagtacttagatgattgcaaaccaaagcagcttatgcatgaggcactcaaactgcggctcaacctggtggggggcatgtttgacacggtgcagcgcagcacccagcagaccacggagtgggccatgctcctcctggagatcatcatcagcggcactgtcgacatgcagtccaacaatgagctcttcactactgtgttggacatgctgagcgtgctcatcaatgggacattggctgcagacatgtctagcatctcgcaaggtagcatggaggaaaacaagcgtgcatacatgaacctggcgaagaagttgcagaaggagttgggggagcgccagtcagacagtctggaaaaggttcgccagctgctgccactgcccaagcagacccgagatgtcatcacgtgtgagccacagggctcccttatcgataccaagggcaacaagattgctggcttcgattccatcttcaagaaggagggtctacaggtttccaccaaacagaagatctcgccctgggatctttttgaggggttgaagccgtcagcaccactctcttggggctggtttggaacagtccgagtggaccggcgagtggctcgaggagaggagcagcagcggttgctgctctaccacacacacctgaggccccggccccgcgcctattacctggagccactgccactgcccccagaagatgaggagccgcctgctcctaccctgctagagcctgagaaaaaggctccagagccccccaaaactgacaaaccgggggctgctccacccagtactgaggaacgcaagaagaagtccaccaagggcaagaaacgcagccagccagctaccaagacagaggactatggaatgggcccgggtcggagcggcccttatggtgtgacagtgcctccggacctcctgcaccacccaaaccctggttctataacacaccttaactacaggcaaggctccataggcctgtacacccagaaccagccactacctgcaggtggccctcgtgtggacccataccgtcctgtgcgcttaccaatgcagaagctgcccacccgaccaacttaccctggagtgctgcccacaaccatgactggcgtcatgggtttagaaccctcctcttataagacctctgtgtaccggcagcagcaacctgcggtgccccaaggacagcgccttcgccaacagctccagcagagtcagggcatgttgggacagtcatctgtccatcagatgactcccagctcttcctacggtttgcagacttcccagggctatactccttatgtttctcatgtgggattgcagcaacacacaggccctgcaggtaccatggtgccccccagctactccagccagccttaccagagcacccacccttctaccaatcctactcttgtagatcctacccgccacctgcaacagcggcccagtggctatgtgcaccagcaggcccccacctatggacatggactgacctccactcaaaggttttcacaccagacactgcagcagacacccatgataagtaccatgactccaatgagtgcccagggcgtccaggcaggcgtccgttcaacagccatcctacctgagcagcagcagcagcagcaacagcagcaacagcaacagcagcagcagcagcaacagcaacagcagcagcagcagcagcagtaccacatccggcagcagcagcagcagcagatcctgcggcagcagcagcaacagcaacagcagcagcagcagcagcagcaacagcaacagcagcagcagcaacagcaacaacagcaacaccagcagcaacagcagcaacaggcggctcctccccaaccccagccccagtcccagccccagttccagcgccaggggcttcagcagacccagcagcagcaacagacagcagctttggtccggcaacttcaacaacagctctctaatacccagccacagcccagtaccaacatatttggacgctactgagccacctggaggaactgcttgtgcactggatgtggccccaccctttcctcttaattcccaatcccattcctgggctagcaccagtagtggttggggccctcccctcaggctccatttttaataagtttttagtatttttgttaatgtgaggcattgagctgttgggttttgtatattatttatatagagaccccagagctgttgcacccaatacacagagcttctttgcaaagggaaaaaaaaaaaaaaaaa

SEQ ID NO: 1375 - DNA, 7694 bp, Homo sapiens
ccaactctcattcatttcgccggttaacatgagagatcatggccgccttcgggcttctcagctatgagcagagaccgctgaagcgcccccggctcgggccgcccgacgtctacccacaggaccccaagcagaaggaggatgaacttactgctgtgaatgtaaagcaaggcttcaataatcagccagccttcactggagatgaacatggctcagccagaaatattgtaattaacccatcaaagattggagcttattttagcagcatattagctgagaaactgaagcttaacactttccaggacacgggaaagaagaaaccacaagttaatgctaaagataattattggctggttactgctcgatcccagagtgcaattcatagttggttttctgacttagcaggaaataagccactttctattttggcaaaaaaggttcctatccttagtaaaaaagaggatgtttttgcatatttagctaaatattctgtgccaatggttcgagcaacgtggctgatcaagatgacttgtgcctattattctgctatatctgaagctaaaattaagaaacgtcaggctcctgatccgaatttggagtggacacagatatctaccagatatcttcgagagcagttggccaagatttctgacttttaccacatggcctccagcacgggcgatggccctgtccctgtgccaccagaggtggagcaagccatgaagcaatgggaatacaacgaaaagctagcatttcacatgttccaggaaggaatgttagaaaaacacgaatatttgacatggatcctggatgttttagaaaagatcagaccaatggatgatgatcttcttaaactcttgctaccactaatgctgcagtattcagatgagtttgttcagtcggcctacctgtctcgtcgtcttgcctacttttgtgcccggcgtctttccttgctgctgagcgatagccccaacctccttgctgcccactcaccccacatgatgataggaccaaacaactcgagtatcggggcccccagccctggcccccccggccctggcatgagccccgtgcagctggccttctcagattttctttcctgtgcacagcatggtcccctggtttatggacttagttgtatgttgcagactgtcactctctgttgcccaagtgccttggtgtggaattattccacaaatgaaaataagagcgcaaacccaggctcacccctggatctgctgcaggtggccccgtccagcctccccatgccgggtgggaacacggctttcaatcagcaggttcgggcaaggatttatgaagtagaacaacagataaaacaaagaggccgtgcagtggaagttcggtggtcatttgacaagtgccaagaatccacagcaggggtgactattagtcgggttttgcacacgttggaagttttggatcgtcactgttttgaccgaactgattccagcaattccatggagacactttatcataagattttctgggcaaaccaaaacaaagataaccaagaggttgcgcccaacgatgaagctgtggtgacgctgttatgtgaatgggccgtgagctgcaaacggtctggcaagcacagggccatggctgtggcaaaactcctggagaagaggcaagcagaaattgaggcagagagatgtggtgaatcagaagtcttagatgagaaggagtctatttcttcatcctctcttgctggatccagtttgcctgttttccagaatgtgctgttaaggtttttagatacacaggccccctctttgtcggacccaaacagtgaatgtgaaaaggtggaatttgtgaacctggtgctgctcttctgcgagttcatccgccatgatgtcttctcccatgacgcatacatgtgtaccctcatatctcgaggagatttgtcagtcactgcctcaactcggccgcggtcaccagtaggggaaaatgcagatgaacactattcaaaggaccatgatgtgaaaatggagattttttctcctatgcctggagaatcctgtgagaatgccaacacttcgttgggcagaagaatgtcagttaattgtgagaagttggtgaagagggaaaagccaagggaattaatttttccatctaattatgacctccttcgccacttacagtatgcaacacattttcctatacctctggatgaatcttcaagtcatgaatgtaaccagcgcacaatccttctctatggagtcggcaaagagcgtgatgaagcaaggcatcagctgaagaagattaccaaagatatcctgaaaattctaaataagaagagcaccacagagacaggggttggggacgaaggacaaaaagccaggaagaacaaacaggagacatttccaacactggagactgtgttcactaaactccagctcctttcatattttgatcaacatcaagtgacatctcagatttctaacaatgtgctagaacaaatcacaagctttgcgtcaggaacatcctatcatctccctttggctcaccacattcagctcatctttgatctcatggagccagcactgaacatcaacggactaattgacttcgcaatacagttactaaatgaactgagtgttgtggaagctgaactgctcctaaaatcctccagcctggcaggaagttatacaacaggactgtgtgtctgcatcgtggctgttctcaggcgctatcacagttgtctaatcttgaatcctgatcagacagcccaggtgtttgaagggttgtgtggtgtggtcaagcatgtcgtaaacccctcagaatgttcttcccctgaaagatgcattttagcctacctctatgatctctatgtgtcatgtagccacctcagaagtaaatttggagacctcttcagtagtgcctgttcaaaagtaaagcaaaccatatataataacgtgatgcctgcaaattcgaacttgcgatgggatccagacttcatgatggattttattgagaatccctcagcccgcagcatcaactactcaatgctgggcaagatcctcagtgacaatgcggccaatcgctacagctttgtctgcaatacactcatgaatgtatgtatgggccatcaggatgctggcaggattaacgacatagccaatttctcctctgagcttacggcttgctgcactgttcttagttcagaatggctgggggttctgaaggctctttgttgttcttcaaatcacgtgtgggggtttaatgatgtactttgcactgtagatgtgagtgacctttcattccatgattcattagctactttcattgctattctgatagcacgacagtgtttttccctggaggacgtcgtgcagcatgtcgcacttccctctcttctagcagcagcttgtggggatgcggacgccgagcctggggcgagaatgacatgccgactcttgcttcatctcttccgagctccccaggcctgcttcttacctcaagcaacgggcaaacctttccctggaataagatcatcttgtgatagacacctcttagccgctgctcacaacagcattgaagtgggagccgtgtttgctgtcttaaaagcaattatgatgcttggagatgccaaaattggcaataacagtgtcagctctttaaagaatgatgacttcaccatgagaggtttgcgatgtgatgggaatgctgatgatatctggactgcctcacaaaatccaaaatcctgtgggaaaagcatttccatagaaactgccaatttaagagaatacgctagatatgtactgaggactatctgtcaacaggaatgggtaggagagcattgcttaaaagaacctgaaagattatgtacagacaaagaacttatattggaccctgtgctttcaaatatgcaagcacagaaattactgcagcttatctgttatcctcatggcattaaagaatgtaccgagggggacaatctgcaaagacagcacattaagcgtattcttcagaatcttgagcagtggacactgaggcaatcctggttagaactccagctaatgatcaaacagtgcttgaaggaccctggctctggttctgtggccgaaatgaacaacttactggacaatattgcaaaggcaacaatagaggtattccagcagtctgcagacctaaataattcttctaattctggcatgagcctcttcaacccaaacagtattggaagtgctgatacaagtagcacgagacagaatggaataaagacattcctaagttcctccgaacgcaggggtgtatggttggtggcccccctcatcgccaggttgccaacttctgtgcaaggaagagtgctgaaagccgctggggaagagctggagaagggacagcacttgggttcttcttccaaaaaggaaagggacagacagaaacagaaaagtatgtctcttttgagtcaacaacccttcctctcactggtacttacctgccttaagggacaagatgaacaaagggaaggcctcctaacatctctccagaatcaagttaaccagattttaagtaactggagagaagaacgataccaagatgacataaaagcgcggcagatgatgcacgaagcattgcaactccgcctaaatttggtaggaggaatgtttgacacggtgcagaggagcacccagtggactacagactgggccctgctactccttcagatcattacttcaggaactgttgacatgcacactaacaatgaattattcacaacagttcttgacatgctgggtgttttaatcaatggaacgttagcctctgacctatcaaatgcatcccctgggggatctgaagagaacaagcgtgcatacatgaatttagtaaagaaactgaaaaaagagctaggagacaagcgatcagaaagtattgacaaagttcgacagttactacctttgccgaaacagacatgtgatgtcatcacttgtgaacctatgggttccttgattgacacaaaaggaaacaaaattgctggatttgactctatagataaaaaacagggtctccaggtctctacgaagcagaaggtgtccccgtgggacttgtttgagggtcagaagaacccagctcctttgtcctgggcctggtttgggacagtccgagtggaccgaagagtgatcaagtacgaggagcagcatcacctcctgctgtatcacacacaccccatgcccaagccccgcagttactacctccagccactgcccctgcctcctgaggaggaagaggaagagcccacatctccagtttctcaggaaccagaaaggaagtccgctgagctgtcagatcagggaaaaaccacaacagatgaagaaaagaaaacaaaaggaaggaagcgcaagacgaaatctagctcaagagttgatgaatatccacagagcaacatataccgagtgcctcctaattactcgcctatctcctcccaaatgatgcaccatccacagtccaccttgtggggttacaacctcgtgggccagccccagcagcccggctttttccttcagaaccaatctcttactccaggtggctccagattggaccctgcaggctcctttgtcccaaccaacaccaaacaagctctgtcaaacatgctacagcggcgctcaggcgccatgatgcagccgccttctcttcatgcaatcacatcgcagcagcagttgatacagatgaagcttctgcagcagcagcagcaacagcgacttctcaggcaagcccagactcggcctttccaacagggccagccgggggaccaggctgctctctttgctgcgcaagcacggccctcccctcagctccctcagtatccagggctgcagcaagcacagaccatgccacagggctatacaatgtatgggacacagatgcctttgcagcagacatcgcagcagcaggctggcagtgtggtcctgtctcccagctataactccagagcctatccggccgcacattccaaccccgtgctaatggaaagactcagacagattcagcagcagccgagtggctatgttcagcagcaggcctcgccgtacctgcagcccctgactggctctcagagactgaaccatcaggctctacagcagagccctctggtgggcgggggaattgatgctgtgctgacttctgcacatccaaaccttccctccgtgcccctgcctcaggatcccatgagacccagacagccgcaagttcgacagcagcagagactcctccagatgcagcagccccagcagccccagccccagcagcctccccagccccagcagtcctcgcagtcccagagtcagacccttggtctccaagcaatgcagccccagcagcccttgtttcccaggcaaggcttgcagcagacccagcagcagcagcagacggccgccttggtgcggcagctccagaagcagctttccagcaaccagccacagcaaggagtgactccgtatgggcatccttcacacttctgaatctgcaagaggagaagacatgacgttttatgtttgcactgaaaaacagaaaatcaaatttaatgcattagtcatcttaaaaatgtccctttttttcatttctttgacattttactatattttatgctacatctcacaaaaaaaaaaaaaggtgtttaaacaaaaagccaaggagaagttgtggtttgattttgttgaattcacctttaaagtaggtttacaaatgtgaatcatgcaggcaggcctactcccggaagagtgtgctagcagaccttttgaaattggtgctttttttgaatctcacatttctagaaagaatggattatgatggatctaaggtatttatgtatttcattcattaatgatgacgttgtttttttttttttaattttattttccaaactgtgctggaccaaactactgatttgaaaggcatgtcagatcttgacagaaacatggcctgtttattctgcattcacctgtgatggtgaaacggacatttatttgcatcgctctaatttgaaatgtttgtaatctcataagcactttataaactttgttcttatttatgtaggactcttctttgcttttgttgtggtcaaaaggtgctgaaacagattgttgcttcgtacttaaacttcttaaaccaagaacctaaaccaaggtttctttgagagccgccctaagatgtgcggaaacctgttagaagtagctgtactcaaatttgttttgaggcaagatcattgatgagagtcattgtgaaggtacaacatgtaaatcctaaaggcctgaaagaactgcagtggaatcgtccaactatttattgccagttttggttctcctgaaccttatgccaccttaaggggaaaaaaaaatccagtagctggcttgagattccagtgctcacacttgacatggtttccagagaatctggccccaaagtccagaaggctctggttttcataaaaggtgtatttgctgtttattttgtatggtaagtatttgctcttttgaatttaattattactgtcagtgtcagtcttggttgtgtattgcatatactgtatttataaattggtgcaaaaagcacaagtaaattatacatcaaatttattataaagaaatagtaactattttaactttgttcaagtatgtggtaatttgctcctattagagtaaaaaagaaaccagtaaattatcagtttgtgtaacttaaga

SEQ ID NO: 1376 - DNA, 2501 bp, Homo sapiens
cgaaaagattcttaggaacgccgtaccagccgcgtctctcaggacagcaggcccctgtccttctgtcgggcgccgctcagccgtgccctccgcccctcaggttctttttctaattccaaataaacttgcaagaggactatgaaagattatgatgaacttctcaaatattatgaattacatgaaactattgggacaggtggctttgcaaaggtcaaacttgcctgccatatccttactggagagatggtagctataaaaatcatggataaaaacacactagggagtgatttgccccggatcaaaacggagattgaggccttgaagaacctgagacatcagcatatatgtcaactctaccatgtgctagagacagccaacaaaatattcatggttcttgagtactgccctggaggagagctgtttgactatataatttcccaggatcgcctgtcagaagaggagacccgggttgtcttccgtcagatagtatctgctgttgcttatgtgcacagccagggctatgctcacagggacctcaagccagaaaatttgctgtttgatgaatatcataaattaaagctgattgactttggtctctgtgcaaaacccaagggtaacaaggattaccatctacagacatgctgtgggagtctggcttatgcagcacctgagttaatacaaggcaaatcatatcttggatcagaggcagatgtttggagcatgggcatactgttatatgttcttatgtgtggatttctaccatttgatgatgataatgtaatggctttatacaagaagattatgagaggaaaatatgatgttcccaagtggctctctcccagtagcattctgcttcttcaacaaatgctgcaggtggacccaaagaaacggatttctatgaaaaatctattgaaccatccctggatcatgcaagattacaactatcctgttgagtggcaaagcaagaatccttttattcacctcgatgatgattgcgtaacagaactttctgtacatcacagaaacaacaggcaaacaatggaggatttaatttcactgtggcagtatgatcacctcacggctacctatcttctgcttctagccaagaaggctcggggaaaaccagttcgtttaaggctttcttctttctcctgtggacaagccagtgctaccccattcacagacatcaagtcaaataattggagtctggaagatgtgaccgcaagtgataaaaattatgtggcgggattaatagactatgattggtgtgaagatgatttatcaacaggtgctgctactccccgaacatcacagtttaccaagtactggacagaatcaaatggggtggaatctaaatcattaactccagccttatgcagaacacctgcaaataaattaaagaacaaagaaaatgtatatactcctaagtctgctgtaaagaatgaagagtactttatgtttcctgagccaaagactccagttaataagaaccagcataagagagaaatactcactacgccaaatcgttacactacaccctcaaaagctagaaaccagtgcctgaaagaaactccaattaaaataccagtaaattcaacaggaacagacaagttaatgacaggtgtcattagccctgagaggcggtgccgctcagtggaattggatctcaaccaagcacatatggaggagactccaaaaagaaagggagccaaagtgtttgggagccttgaaagggggttggataaggttatcactgtgctcaccaggagcaaaaggaagggttctgccagagacgggcccagaagactaaagcttcactataatgtgactacaactagattagtgaatccagatcaactgttgaatgaaataatgtctattcttccaaagaagcatgttgactttgtacaaaagggttatacactgaagtgtcaaacacagtcagattttgggaaagtgacaatgcaatttgaattagaagtgtgccagcttcaaaaacccgatgtggtgggtatcaggaggcagcggcttaagggcgatgcctgggtttacaaaagattagtggaagacatcctatctagctgcaaggtataattgatggattcttccatcctgccggatgagtgtgggtgtgatacagcctacataaagactgttatgatcgctttgattttaaagttcattggaactaccaacttgtttctaaagagctatcttaagaccaatatctctttgtttttaaacaaaagatattattttgtgtatgaatctaaatcaagcccatctgtcattatgttactgtcttttttaatcatgtggttttgtatattaataattgttgactttcttagattcacttccatatgtgaatgtaagctcttaactatgtctctttgtaatgtgtaatttctttctgaaataaaaccatttgtgaatataaaaaaaaaaaaaaaaaaaaaaaaaaaaaaaaaaaaaaaaaaaaaaaaaaaaaaaaaaaaaaa

SEQ ID NO: 1377 - DNA, 2455 bp, Homo sapiens
agcacatgctgggctcgggggcgatgggcttgtgcgcggacctggcgacgctctagccccgagccgcgtattcgtggccgggtcctccctgggaacagggtgaaggccgagaacctctggcctcaggaagcgcatgcgcaaccggttctccgaaacatggagtcctgtaggcaaggtcttacctgaatcaggatgagggagtggtgggtccaggtggggctgctggccgtgcccctgcttgctgcgtacctgcacatcccaccccctcagctctcccctgcccttcactcatggaagtcttcaggcaagtttttcacttacaagggactgcgtatcttctaccaagactctgtgggtgtggttggaagtccagagatagttgtgcttttacacggttttccaacatccagctacgactggtacaagatttgggaaggtctgaccttgaggtttcatcgggtgattgcccttgatttcttaggctttggcttcagtgacaaaccgagaccacatcactattccatatttgagcaggccagcatcgtggaagcgcttttgcggcatctggggctccagaaccgcaggatcaaccttctttctcatgactatggagatattgttgctcaggagcttctctacaggtacaagcagaatcgatctggtcggcttaccataaagagtctctgtctgtcaaatggaggtatctttcctgagactcaccgtccactccttctccaaaagctactcaaagatggaggtgtgctgtcacccatcctcacacgactgatgaacttctttgtattctctcgaggtctcaccccagtctttgggccgtatactcggccctctgagagtgagctgtgggacatgtgggcagggatccgcaacaatgacgggaacttagtcattgacagtctcttacagtacatcaatcagaggaagaagttcagaaggcgctgggtgggagctcttgcctctgtaactatccccattcattttatctatgggccattggatcctgtaaatccctatccagagtttttggagctgtacaggaaaacgctgccgcggtccacagtgtcgattctggatgaccacattagccactatccacagctagaggatcccatgggcttcttgaatgcatatatgggcttcatcaactccttctgagctggaaagagtagcttccctgtattacctcccctactcccttatgtgttgtgtattccacttaggaagaaatgcccaaaagaggtcctggccatcaaacataattctctcacaaagtccactttactcaaattggtgaacagtgtataggaagaagccagcaggagctctgactaaggttgacataatagtccacctcccattactttgatatctgatcaaatgtatagacttggctttgttttttgtgctattaggaaattctgatgagcattactattcactgatgcagaaagacgttcttttgcataaaagacttttttttaacactttggacttctctgaaatatttagaagtgctaatttctggcccacccccaacaggaattctatagtaaggaggaggagaaggggggctccttccctctcctcgaatgacgttatgggcacatgccttttaaaagttctttaagcaacacagagctgagtcctctttgtcatacctttggatttagtgtttcatcagctgtttttagttataaacattttgttaaaatagatattggtttaaatgatacagtattttaggtatgatttaagactatgatttacctatacattatatatattttataaagatactaaaccagcatacccttactctgccagagtagtgaagctaattaaacacatttggtttctgaataaattgaactaaatccaaactatttcctaaaatcacaggacattaaggaccaatagcatctgtgccagagatgtactgttattagctgggaagaccaattctaacagcaaataacagtctgagactcctcatacctcagtggttagaagcatgtctctcttgagctacagtagaggggaagggattgttgtgtagtcaagtcaccatgctgaatgtacactgattcctttatgatgactgcttaactccccactgcctgtcccagagaggctttccaatgtagctcagtaattcctgttactttacagacaggaaagttccagaaactttaagaacaaactctgaaagacctatgagcaaatggtgctgaatactttttttttaaagccacatttcattgtcttagtcaaagcaggattattaagtgattatttaaaattcgtttttttaaattagcaacttcaagtataacaactttgaaactggaataagtgtttattttctattaataaaaatgaattgtgacaaaaaaaaaaaaaaaaaaaaaaaaaaaaaaaaaaaaaaaaaaaaaaaaaa

SEQ ID NO: 1378 - DNA, 2419 bp, Homo sapiens
cgctgctgtggccaggcgtctggcatgctgaccacgtcgcgctgctgtaaaggaaacctgccccgcgcagcggcggtggctggagcgggagaaaccggactttgtgcaactttggccatagtggccatcccatgaatctgtttactagcttggtggatgagggagtggtgggtccaggtggggctgctggccgtgcccctgcttgctgcgtacctgcacatcccaccccctcagctctcccctgcccttcactcatggaagtcttcaggcaagtttttcacttacaagggactgcgtatcttctaccaagactctgtgggtgtggttggaagtccagagatagttgtgcttttacacggttttccaacatccagctacgactggtacaagatttgggaaggtctgaccttgaggtttcatcgggtgattgcccttgatttcttaggctttggcttcagtgacaaaccgagaccacatcactattccatatttgagcaggccagcatcgtggaagcgcttttgcggcatctggggctccagaaccgcaggatcaaccttctttctcatgactatggagatattgttgctcaggagcttctctacaggtacaagcagaatcgatctggtcggcttaccataaagagtctctgtctgtcaaatggaggtatctttcctgagactcaccgtccactccttctccaaaagctactcaaagatggaggtgtgctgtcacccatcctcacacgactgatgaacttctttgtattctctcgaggtctcaccccagtctttgggccgtatactcggccctctgagagtgagctgtgggacatgtgggcagggatccgcaacaatgacgggaacttagtcattgacagtctcttacagtacatcaatcagaggaagaagttcagaaggcgctgggtgggagctcttgcctctgtaactatccccattcattttatctatgggccattggatcctgtaaatccctatccagagtttttggagctgtacaggaaaacgctgccgcggtccacagtgtcgattctggatgaccacattagccactatccacagctagaggatcccatgggcttcttgaatgcatatatgggcttcatcaactccttctgagctggaaagagtagcttccctgtattacctcccctactcccttatgtgttgtgtattccacttaggaagaaatgcccaaaagaggtcctggccatcaaacataattctctcacaaagtccactttactcaaattggtgaacagtgtataggaagaagccagcaggagctctgactaaggttgacataatagtccacctcccattactttgatatctgatcaaatgtatagacttggctttgttttttgtgctattaggaaattctgatgagcattactattcactgatgcagaaagacgttcttttgcataaaagacttttttttaacactttggacttctctgaaatatttagaagtgctaatttctggcccacccccaacaggaattctatagtaaggaggaggagaaggggggctccttccctctcctcgaatgacgttatgggcacatgccttttaaaagttctttaagcaacacagagctgagtcctctttgtcatacctttggatttagtgtttcatcagctgtttttagttataaacattttgttaaaatagatattggtttaaatgatacagtattttaggtatgatttaagactatgatttacctatacattatatatattttataaagatactaaaccagcatacccttactctgccagagtagtgaagctaattaaacacatttggtttctgaataaattgaactaaatccaaactatttcctaaaatcacaggacattaaggaccaatagcatctgtgccagagatgtactgttattagctgggaagaccaattctaacagcaaataacagtctgagactcctcatacctcagtggttagaagcatgtctctcttgagctacagtagaggggaagggattgttgtgtagtcaagtcaccatgctgaatgtacactgattcctttatgatgactgcttaactccccactgcctgtcccagagaggctttccaatgtagctcagtaattcctgttactttacagacaggaaagttccagaaactttaagaacaaactctgaaagacctatgagcaaatggtgctgaatactttttttttaaagccacatttcattgtcttagtcaaagcaggattattaagtgattatttaaaattcgtttttttaaattagcaacttcaagtataacaactttgaaactggaataagtgtttattttctattaataaaaatgaattgtgacaaaaaaaaaaaaaaaaaaaaaaaaaaaaaaaaaaaaaaaaaaaaaaaaaa

SEQ ID NO: 1379 - DNA, 6641 bp, Homo sapiens
gccctcgccgcccgcggcgccccgagcgctttgtgagcagatgcggagccgagtggagggcgcgagccagatgcggggcgacagctgacttgctgagaggaggcggggaggcgcggagcgcgcgtgtggtccttgcgccgctgacttctccactggttcctgggcaccgaaagataaacctctcataatgaaggcccccgctgtgcttgcacctggcatcctcgtgctcctgtttaccttggtgcagaggagcaatggggagtgtaaagaggcactagcaaagtccgagatgaatgtgaatatgaagtatcagcttcccaacttcaccgcggaaacacccatccagaatgtcattctacatgagcatcacattttccttggtgccactaactacatttatgttttaaatgaggaagaccttcagaaggttgctgagtacaagactgggcctgtgctggaacacccagattgtttcccatgtcaggactgcagcagcaaagccaatttatcaggaggtgtttggaaagataacatcaacatggctctagttgtcgacacctactatgatgatcaactcattagctgtggcagcgtcaacagagggacctgccagcgacatgtctttccccacaatcatactgctgacatacagtcggaggttcactgcatattctccccacagatagaagagcccagccagtgtcctgactgtgtggtgagcgccctgggagccaaagtcctttcatctgtaaaggaccggttcatcaacttctttgtaggcaataccataaattcttcttatttcccagatcatccattgcattcgatatcagtgagaaggctaaaggaaacgaaagatggttttatgtttttgacggaccagtcctacattgatgttttacctgagttcagagattcttaccccattaagtatgtccatgcctttgaaagcaacaattttatttacttcttgacggtccaaagggaaactctagatgctcagacttttcacacaagaataatcaggttctgttccataaactctggattgcattcctacatggaaatgcctctggagtgtattctcacagaaaagagaaaaaagagatccacaaagaaggaagtgtttaatatacttcaggctgcgtatgtcagcaagcctggggcccagcttgctagacaaataggagccagcctgaatgatgacattcttttcggggtgttcgcacaaagcaagccagattctgccgaaccaatggatcgatctgccatgtgtgcattccctatcaaatatgtcaacgacttcttcaacaagatcgtcaacaaaaacaatgtgagatgtctccagcatttttacggacccaatcatgagcactgctttaataggacacttctgagaaattcatcaggctgtgaagcgcgccgtgatgaatatcgaacagagtttaccacagctttgcagcgcgttgacttattcatgggtcaattcagcgaagtcctcttaacatctatatccaccttcattaaaggagacctcaccatagctaatcttgggacatcagagggtcgcttcatgcaggttgtggtttctcgatcaggaccatcaacccctcatgtgaattttctcctggactcccatccagtgtctccagaagtgattgtggagcatacattaaaccaaaatggctacacactggttatcactgggaagaagatcacgaagatcccattgaatggcttgggctgcagacatttccagtcctgcagtcaatgcctctctgccccaccctttgttcagtgtggctggtgccacgacaaatgtgtgcgatcggaggaatgcctgagcgggacatggactcaacagatctgtctgcctgcaatctacaaggttttcccaaatagtgcaccccttgaaggagggacaaggctgaccatatgtggctgggactttggatttcggaggaataataaatttgatttaaagaaaactagagttctccttggaaatgagagctgcaccttgactttaagtgagagcacgatgaatacattgaaatgcacagttggtcctgccatgaataagcatttcaatatgtccataattatttcaaatggccacgggacaacacaatacagtacattctcctatgtggatcctgtaataacaagtatttcgccgaaatacggtcctatggctggtggcactttacttactttaactggaaattacctaaacagtgggaattctagacacatttcaattggtggaaaaacatgtactttaaaaagtgtgtcaaacagtattcttgaatgttataccccagcccaaaccatttcaactgagtttgctgttaaattgaaaattgacttagccaaccgagagacaagcatcttcagttaccgtgaagatcccattgtctatgaaattcatccaaccaaatcttttattagtggtgggagcacaataacaggtgttgggaaaaacctgaattcagttagtgtcccgagaatggtcataaatgtgcatgaagcaggaaggaactttacagtggcatgtcaacatcgctctaattcagagataatctgttgtaccactccttccctgcaacagctgaatctgcaactccccctgaaaaccaaagcctttttcatgttagatgggatcctttccaaatactttgatctcatttatgtacataatcctgtgtttaagccttttgaaaagccagtgatgatctcaatgggcaatgaaaatgtactggaaattaagggaaatgatattgaccctgaagcagttaaaggtgaagtgttaaaagttggaaataagagctgtgagaatatacacttacattctgaagccgttttatgcacggtccccaatgacctgctgaaattgaacagcgagctaaatatagagtggaagcaagcaatttcttcaaccgtccttggaaaagtaatagttcaaccagatcagaatttcacaggattgattgctggtgttgtctcaatatcaacagcactgttattactacttgggtttttcctgtggctgaaaaagagaaagcaaattaaagatctgggcagtgaattagttcgctacgatgcaagagtacacactcctcatttggataggcttgtaagtgcccgaagtgtaagcccaactacagaaatggtttcaaatgaatctgtagactaccgagctacttttccagaagatcagtttcctaattcatctcagaacggttcatgccgacaagtgcagtatcctctgacagacatgtcccccatcctaactagtggggactctgatatatccagtccattactgcaaaatactgtccacattgacctcagtgctctaaatccagagctggtccaggcagtgcagcatgtagtgattgggcccagtagcctgattgtgcatttcaatgaagtcataggaagagggcattttggttgtgtatatcatgggactttgttggacaatgatggcaagaaaattcactgtgctgtgaaatccttgaacagaatcactgacataggagaagtttcccaatttctgaccgagggaatcatcatgaaagattttagtcatcccaatgtcctctcgctcctgggaatctgcctgcgaagtgaagggtctccgctggtggtcctaccatacatgaaacatggagatcttcgaaatttcattcgaaatgagactcataatccaactgtaaaagatcttattggctttggtcttcaagtagccaaaggcatgaaatatcttgcaagcaaaaagtttgtccacagagacttggctgcaagaaactgtatgctggatgaaaaattcacagtcaaggttgctgattttggtcttgccagagacatgtatgataaagaatactatagtgtacacaacaaaacaggtgcaaagctgccagtgaagtggatggctttggaaagtctgcaaactcaaaagtttaccaccaagtcagatgtgtggtcctttggcgtgctcctctgggagctgatgacaagaggagccccaccttatcctgacgtaaacacctttgatataactgtttacttgttgcaagggagaagactcctacaacccgaatactgcccagaccccttatatgaagtaatgctaaaatgctggcaccctaaagccgaaatgcgcccatccttttctgaactggtgtcccggatatcagcgatcttctctactttcattggggagcactatgtccatgtgaacgctacttatgtgaacgtaaaatgtgtcgctccgtatccttctctgttgtcatcagaagataacgctgatgatgaggtggacacacgaccagcctccttctgggagacatcatagtgctagtactatgtcaaagcaacagtccacactttgtccaatggttttttcactgcctgacctttaaaaggccatcgatattctttgctcttgccaaaattgcactattataggacttgtattgttatttaaattactggattctaaggaatttcttatctgacagagcatcagaaccagaggcttggtcccacaggccacggaccaatggcctgcagccgtgacaacactcctgtcatattggagtccaaaacttgaattctgggttgaattttttaaaaatcaggtaccacttgatttcatatgggaaattgaagcaggaaatattgagggcttcttgatcacagaaaactcagaagagatagtaatgctcaggacaggagcggcagccccagaacaggccactcatttagaattctagtgtttcaaaacacttttgtgtgttgtatggtcaataacatttttcattactgatggtgtcattcacccattaggtaaacattcccttttaaatgtttgtttgttttttgagacaggatctcactctgttgccagggctgtagtgcagtggtgtgatcatagctcactgcaacctccacctcccaggctcaagcctcccgaatagctgggactacaggcgcacaccaccatccccggctaatttttgtattttttgtagagacggggttttgccatgttgccaaggctggtttcaaactcctggactcaagaaatccacccacctcagcctcccaaagtgctaggattacaggcatgagccactgcgcccagcccttataaatttttgtatagacattcctttggttggaagaatatttataggcaatacagtcaaagtttcaaaatagcatcacacaaaacatgtttataaatgaacaggatgtaatgtacatagatgacattaagaaaatttgtatgaaataatttagtcatcatgaaatatttagttgtcatataaaaacccactgtttgagaatgatgctactctgatctaatgaatgtgaacatgtagatgttttgtgtgtatttttttaaatgaaaactcaaaataagacaagtaatttgttgataaatatttttaaagataactcagcatgtttgtaaagcaggatacattttactaaaaggttcattggttccaatcacagctcataggtagagcaaagaaagggtggatggattgaaaagattagcctctgtctcggtggcaggttcccacctcgcaagcaattggaaacaaaacttttggggagttttattttgcattagggtgtgttttatgttaagcaaaacatactttagaaacaaatgaaaaaggcaattgaaaatcccagctatttcacctagatggaatagccaccctgagcagaactttgtgatgcttcattctgtggaattttgtgcttgctactgtatagtgcatgtggtgtaggttactctaactggttttgtcgacgtaaacatttaaagtgttatattttttataaaaatgtttatttttaatgatatgagaaaaattttgttaggccacaaaaacactgcactgtgaacattttagaaaaggtatgtcagactgggattaatgacagcatgattttcaatgactgtaaattgcgataaggaaatgtactgattgccaatacaccccaccctcattacatcatcaggacttgaagccaagggttaacccagcaagctacaaagagggtgtgtcacactgaaactcaatagttgagtttggctgttgttgcaggaaaatgattataactaaaagctctctgatagtgcagagacttaccagaagacacaaggaattgtactgaagagctattacaatccaaatattgccgtttcataaatgtaataagtaatactaattcacagagtattgtaaatggtggatgacaaaagaaaatctgctctgtggaaagaaagaactgtctctaccagggtcaagagcatgaacgcatcaatagaaagaactcggggaaacatcccatcaacaggactacacacttgtatatacattcttgagaacactgcaatgtgaaaatcacgtttgctatttataaacttgtccttagattaatgtgtctggacagattgtgggagtaagtgattcttctaagaattagatacttgtcactgcctatacctgcagctgaactgaatggtacttcgtatgttaatagttgttctgataaatcatgcaattaaagtaaagtgatgcaacatcttgtaaaaaaaaaaaaaaaaaaaa

SEQ ID NO: 1380 - DNA, 6641 bp, Homo sapiens; identical to SEQ ID NO: 1379

SEQ ID NO: 1381 - DNA, 956 bp, Homo sapiens
cctgaggctgctccagcagtgcgccgccgccgtctcctggggcggcttgggttagccgggaggtgggtcagaggctcgccccgtgccctgcgtccgggcgtctccttagggcgcgtcttcgggtccggccagcggtgctgaaaaagggagaaggttgggggtagggaggaaacaagatcccagttcaatagatttctccgcagatcctgtgccttcaaaccctacgagtccatactttaaaacaaaatgaagaaagtaaggcttaaggaactagagagtcgcctgcaacaagtggatggatttgaaaagcccaagctacttctggaacagtatcctaccaggccgcacattgcagcatgtatgctctatacaatccataacacttatgatgacattgaaaataaagtcgttgcagatctaggatgtggttgtggagtacttagcatcggaactgcaatgttaggagcagggttgtgtgttggatttgacatagatgaagacgcattggaaatatttaataggaatgcagaagagtttgagttaacaaatattgacatggttcaatgtgatgtgtgcttattatctaacagaatgtccaagtcattcgatacagtaattatgaatcctccctttgggaccaaaaataataaagggacagatatggcttttctaaagactgctttggaaatggcaagaacagcagtatattccttacacaaatcctcaactagagaacatgttcaaaagaaagctgcagaatggaaaatcaagatagatattatagcagaacttcgatatgacctgccagcatcatacaagtttcacaaaaagaaatcagtggacattgaagtggacctaattcggttttccttttaaaagccccgcaaacaaaagtcgtttaaaacctatttaaaatgaataaaaaattggtttactaaaaaaaaaaaaaaaaaaaa

SEQ ID NO: 1382 - DNA, 2063 bp, Homo sapiens
catcccacaatcctctcgtcacgtatttccggtttatctagctcagccgtaagtagtttctctatcagtcgcgcagctgtgttcgcggactcaggtggaaggaatttcttctcttcgttgacgttgctggtgttcactgtttggaattagtcaagtttcgggaatcaccgtcgctgccatcaacatgtcggtcccaagcgctctcatgaagcaaccgcccattcagtctacggctggggccgtcccagttcgcaatgagaaaggtgagatttcaatggaaaaagtgaaggtaaagcgttatgtgtccggaaaaaggccagactatgcccctatggagtcctcagatgaggaggatgaagaatttcagttcattaagaaagccaaagaacaagaagcagagcctgaggaacaggaggaggattcatccagtgacccccggctacggcgtttacagaaccgtattagtgaagatgtggaagagagattggctcgacatcgaaaaatagtggaacctgaagtggtaggagagagtgactcagaagtagaaggagatgcttggcgcatggaacgagaagacagcagtgaagaagaggaggaggaaattgatgatgaggaaatagagcggcggcgtggcatgatgcgtcagcgagcacaggagagaaaaaatgaagagatggaagtcatggaagtggaagatgagggtcgttctggagaggagtcagaatcagagtctgagtatgaagagtacacagacagtgaagatgagatggagcctcgccttaagccagtcttcattcgaaagaaggaccgagtgacagttcaagaacgtgaagccgaagcattgaaacagaaggagctggagcaggaagcaaaacgcatggctgaggaaaggcgcaagtacacactcaagattgtcgaagaggaaaccaaaaaagagctggaagagaacaagcgatccctggctgcattggatgcactcaatactgatgatgaaaatgatgaggaggaatatgaggcatggaaagttcgagagctaaaaagaatcaagagggacagagaagatcgagaagcgcttgagaaggagaaagcagaaattgaacgcatgcgaaacctgactgaggaagagaggagagctgaacttcgggcaaacggcaaagtcattaccaacaaagctgttaagggcaaatacaagttcttacagaagtattatcaccggggtgccttcttcatggatgaggatgaagaagtatacaagagagatttcagcgctcctaccctggaggatcatttcaataaaaccattcttcctaaagtcatgcaggtcaagaactttggacgctcaggtcgcaccaaatacactcaccttgtggatcaagataccacctcctttgactcagcttggggccaagagagtgcccagaacacaaagttcttcaaacaaaaggcagctggggtacgagatgtatttgagcggccatctgccaagaagcggaaaactacctagggtccaactgcttattcttccaactgtggaacacaaggggagtctcagcatctggtccttgatttggttttttcattgtttccttggcccctgtatccagatattggacttactgctatacttgtgatactgggtagcccagactttgaaggtgctttgtgaggtttggactcatgctgagaaacccacaggaaagcactgtccaggtaggattagaggcttcccacttaaaactatttctgagaaatcttaggttttatcactgctatggtttcccatatttacttgggactgttctgactttctttttccagcccttagcttgggttagaaaagtggacatgtaagtgaacaatgcattacttctaccttaggtttaggagtaatatacccggaaatctaagctcatggaaacatgttttccatttttgcttggagtccgtttttctagttgtacatactttttgatccatatatgtgtgcatgtcaagaaataaaagaatcacacaacaaggagatttttagcatgatactggaaataaaatgtccaagctgacaa

SEQ ID NO: 1383 - DNA, 1081 bp, Homo sapiens
attgcaacttggtctcacagtggcttaggccagggtgggagcagtgaacggagtcacaaaagaaatttttcagctgtcctctctgacaccaccccggcctgcctctttgttgccatgagagctgcctacctcttcctgctattcctgcctgcaggcttgctggctcagggccagtatgatctggacccgctgccgccgttccctgaccacgtccagtacacccactatagcgaccagatcgacaacccagactactatgattatcaagaggtgactcctcggccctccgaggaacagttccagttccagtcccagcagcaagtccaacaggaagtcatcccagccccaaccccagaaccaggaaatgcagagctggagcccacagagcctgggcctcttgactgccgtgaggaacagtacccgtgcacccgcctctactccatacacaggccttgcaaacagtgtctcaacgaggtctgcttctacagcctccgccgtgtgtacgtcattaacaaggagatctgtgttcgtacagtgtgtgcccacgaggagctcctccgagctgacctctgtcgggacaagttctccaaatgtggcgtgatggccagcagcggcctgtgccaatccgtggcggcctcctgtgccaggagctgtgggagctgctagggtggtgctggcatcctgagtcctggccctcctgggatctggggccctcgggctacctgacctggtgcttttttccccatccccatgttccttttattctgaaaaagttagtggactgcagccctgggggttgcaggctgcggtgcctcaggcccctccttcagcctgtggccacctctggggcacgatgggggctccccactgcccagtctgcccctcgggttgggggagtatcccaggcctctctgtgggacctgggcctgacgggcccttctcagcccgttttgaggacagacagtcccccgaggtaggctacatccccccaccccagctggtctgcttggatttcctacagcccccgtgggcatggaccacctttattttatacaaaattaaaaacaagtttttacaaaaa

SEQ ID NO: 1384 - DNA, 1066 bp, Homo sapiens
ggccaaggggcggctccggcgggcggactcggagcgggcggcggagtgacccggacagctgtcctctctgacaccaccccggcctgcctctttgttgccatgagagctgcctacctcttcctgctattcctgcctgcaggcttgctggctcagggccagtatgatctggacccgctgccgccgttccctgaccacgtccagtacacccactatagcgaccagatcgacaacccagactactatgattatcaagaggtgactcctcggccctccgaggaacagttccagttccagtcccagcagcaagtccaacaggaagtcatcccagccccaaccccagaaccaggaaatgcagagctggagcccacagagcctgggcctcttgactgccgtgaggaacagtacccgtgcacccgcctctactccatacacaggccttgcaaacagtgtctcaacgaggtctgcttctacagcctccgccgtgtgtacgtcattaacaaggagatctgtgttcgtacagtgtgtgcccacgaggagctcctccgagctgacctctgtcgggacaagttctccaaatgtggcgtgatggccagcagcggcctgtgccaatccgtggcggcctcctgtgccaggagctgtgggagctgctagggtggtgctggcatcctgagtcctggccctcctgggatctggggccctcgggctacctgacctggtgcttttttccccatccccatgttccttttattctgaaaaagttagtggactgcagccctgggggttgcaggctgcggtgcctcaggcccctccttcagcctgtggccacctctggggcacgatgggggctccccactgcccagtctgcccctcgggttgggggagtatcccaggcctctctgtgggacctgggcctgacgggcccttctcagcccgttttgaggacagacagtcccccgaggtaggctacatccccccaccccagctggtctgcttggatttcctacagcccccgtgggcatggaccacctttattttatacaaaattaaaaacaagtttttacaaaaa

SEQ ID NO: 1385 - DNA, 2417 bp, Homo sapiens
acttaaggagctcgggccagcgcgagggggagcagggaggaagcccggctgctgcggacctcctcggacccggacccagccccagcccggccccagccagccccgacggcgccatgcggggtccgagcggggctctgtggctgctcctggctctgcgcaccgtgctcggtggcatggaggtgcggtggtgcgccacctcggacccagagcagcacaagtgcggcaacatgagcgaggccttccgggaagcgggcatccagccctccctcctctgcgtccggggcacctccgccgaccactgcgtccagctcatcgcggcccaggaggctgacgccatcactctggatggaggagccatctatgaggcgggaaaggagcacggcctgaagccggtggtgggcgaagtgtacgatcaagaggtcggtacctcctattacgccgtggctgtggtcaggaggagctcccatgtgaccattgacaccctgaaaggcgtgaagtcctgccacacgggcatcaatcgcacagtgggctggaacgtgcccgtgggctacctggtggagagcggccgcctctcggtgatgggctgcgatgtactcaaagctgtcagcgactattttgggggcagctgcgtcccgggggcaggagagaccagttactctgagtccctctgtcgcctctgcaggggtgacagctctggggaaggggtgtgtgacaagagccccctggagagatactacgactacagcggggccttccggtgcctggcggaaggggcaggggacgtggcttttgtgaagcacagcacggtactggagaacacggatgggaagacgcttccctcctggggccaggccctgctgtcacaggacttcgagctgctgtgccgggatggtagccgggccgatgtcaccgagtggaggcagtgccatctggcccgggtgcctgctcacgccgtggtggtccgggccgacacagatgggggcctcatcttccggctgctcaacgaaggccagcgtctgttcagccacgagggcagcagcttccagatgttcagctctgaggcctatggccagaaggatctactcttcaaagactctacctcggagcttgtgcccatcgccacacagacctatgaggcgtggctgggccatgagtacctgcacgccatgaagggtctgctctgtgaccccaaccggctgcccccctacctgcgctggtgtgtgctctccactcccgagatccagaagtgtggagacatggccgtggccttccgccggcagcggctcaagccagagatccagtgcgtgtcagccaagtccccccaacactgcatggagcggatccaggctgagcaggtcgacgctgtgaccctgagtggcgaggacatttacacggcggggaagacgtacggcctggttcccgcagccggggagcactatgccccggaagacagcagcaactcgtactacgtggtggccgtggtgagacgggacagctcccacgccttcaccttggatgagcttcggggcaagcgctcctgccacgccggtttcggcagccctgcaggctgggatgtccccgtgggtgcccttattcagagaggcttcatccggcccaaggactgtgacgtcctcacagcagtgagcgagttcttcaatgccagctgcgtgcccgtgaacaaccccaagaactacccctcctcgctgtgtgcactgtgcgtgggggacgagcagggccgcaacaagtgtgtgggcaacagccaggagcggtattacggctaccgcggcgccttcaggtgcctggtggagaatgcgggtgacgttgccttcgtcaggcacacaaccgtctttgacaacacaaacggccacaattccgagccctgggctgctgagctcaggtcagaggactatgaactgctgtgccccaacggggcccgagccgaggtgtcccagtttgcagcctgcaacctggcacagataccaccccacgccgtgatggtccggcccgacaccaacatcttcaccgtgtatggactgctggacaaggcccaggacctgtttggagacgaccacaataagaacgggttcaaaatgttcgactcctccaactatcatggccaagacctgcttttcaaggatgccaccgtccgggcggtgcctgtcggagagaaaaccacctaccgcggctggctggggctggactacgtggcggcgctggaagggatgtcgtctcagcagtgctcgggcgcagcggccccggcgcccggggcgcccctgctcccgctgctgctgcccgccctcgccgcccgcctgctcccgcccgccctctgagcccggccgccccgccccagagctccgatgcccgcccggggagtttccgcggcggcttcgcgctggaatccagaaggaagctcgcga

SEQ ID NO: 1386 - DNA, 1696 bp, Homo sapiens
acttaaggagctcgggccagcgcgagggggagcagggaggaagcccggctgctgcggacctcctcggacccggacccagccccagcccggccccagccagccccgacggcgccatgcggggtccgagcggggctctgtggctgctcctggctctgcgcaccgtgctcggtggcatggaggtgcggtggtgcgccacctcggacccagagcagcacaagtgcggcaacatgagcgaggccttccgggaagcgggcatccagccctccctcctctgcgtccggggcacctccgccgaccactgcgtccagctcatcgcggcccaggaggctgacgccatcactctggatggaggagccatctatgaggcgggaaaggagcacggcctgaagccggtggtgggcgaagtgtacgatcaagaggtcggtacctcctattacgccgtggctgtggtcaggaggagctcccatgtgaccattgacaccctgaaaggcgtgaagtcctgccacacgggcatcaatcgcacagtgggctggaacgtgcccgtgggctacctggtggagagcggccgcctctcggtgatgggctgcgatgtactcaaagctgtcagcgactattttgggggcagctgcgtcccgggggcaggagagaccagttactctgagtccctctgtcgcctctgcaggggtgacagctctggggaaggggtgtgtgacaagagccccctggagagatactacgactacagcggggccttccggtgcctggcggaaggggcaggggacgtggcttttgtgaagcacagcacggtactggagaacacggatgaaagtccatcacgaaggcaaacatggaccagatctgaggaggaagaaggcgagtgccctgcacacgaggaagcacgtaggacgatgcgctctagtgctgggcaagcctggaaatgggctcccgttcacaggccccaggacgagtctgacaaaggagaatttggaaaacgggcaaagagtagggatatgttgggttaagaatcagctctttcaaacttggggttttttttgagatgggggtctcaccatgttgcccaggctggtctcaaacccccagcctcaactgatcctcgcatctcagcctcctgagtagctgggatgacaggcgtgcacctggcagctttttcaaagtgttgatggtaatctgaggcaatctaagggagtcattttttaagtgactttatacagaaagattggtaagagccaaggggtagaagtggcataaatgtctaaagcagggaagtgacaggactttcattgttcttggctgaggagaagcgggagtggctgatggaagcacctaaatgatgcctttgtctgtgggaaggcaaatgatgccccagagctctaaccaaaggttttgcagccgccgaaaaacaggaaagttgggaagcgggggtaggactacactgaatcattaacagtgctgtaaactaccatgtggccattaacaatgacctttagggagttttcctaaacgatcactctggtgcgggtgtttggttttgttttaaaatagctttgcagtgaaagctttcatgaccatacaaattatcttttttcttcctatttccttgtagaggtttttttcctccttgtcttaaggtcataaaaatattgttatgtgggaaaaaaaaaaaaaaaaaaaaaaa

SEQ ID NO: 1387 - DNA, 6513 bp, Homo sapiens
attgctaagccatccttcagacagagagggagcggctgcaagaggtaatgagagatggcaagaaagaagctgaaaaaatttactactttggagattgtgctcagtgttcttctgcttgtgttgtttatcatcagtattgttctaattgtgcttttagccaaagagtcactgaaatcaacagccccagatcctgggacaactggtaccccggatcctgggacaactggtaccccagatcctggaacaactggtaccacacatgctaggacaacgggtcccccagatcctggaacaactggtaccactcctgtttctgctgaatgtccagtggtaaatgaattggaacgaattaattgcatccctgaccagccgccaacaaaggccacatgtgaccaacgtggctgttgctggaatccccagggagctgtaagtgttccctggtgctactattccaagaatcatagctaccatgtagagggcaaccttgtcaacacaaatgcaggattcacagcccggttgaaaaatctgccttcctcaccagtgtttggaagcaatgttgacaatgttcttctcacagcagaatatcagacatctaatcgtttccactttaagttgactgaccaaaccaataacaggtttgaagtgccccacgaacacgtgcagtccttcagtggaaatgctgctgcttctttgacctaccaagttgaaatctccagacagccatttagcatcaaagtgaccagaagaagcaacaatcgtgttttgtttgactcgagcattgggcccctactgtttgctgaccagttcttgcagctctccactcgactgcctagcactaacgtgtatggcctgggagagcatgtgcaccagcagtatcggcatgatatgaattggaagacctggcccatatttaacagagacacaactcccaatggaaacggaactaatttgtatggtgcgcagacattcttcttgtgccttgaagatgctagtggattgtcctttggggtgtttctgatgaacagcaatgccatggaggttgtccttcagcctgcgccagccatcacttaccgcaccattgggggcattctcgacttctatgtgttcttgggaaacactccagagcaagttgttcaagaatatctagagctcattgggcggccagcccttccctcctactgggcgcttggatttcacctcagtcgttacgaatatggaaccttagacaacatgagggaagtcgtggagagaaatcgcgcagcacagctcccttatgatgttcagcatgctgatattgattatatggatgagagaagggacttcacttatgattcagtggattttaaaggcttccctgaatttgtcaacgagttacacaataatggacagaagcttgtcatcattgtggatccagccatctccaacaactcttcctcaagtaaaccctatggcccatatgacaggggttcggatatgaagatatgggtgaatagttcagatggagtgactccactcattggggaggtctggcctggacaaactgtgtttcctgattataccaatcccaactgtgctgtttggtggacaaaggaatttgagctttttcacaatcaagtagagtttgatggaatctggattgatatgaatgaagtctccaactttgttgatggttcggtctcaggatgttccacaaacaacctaaataatcccccattcactcccagaatcctggatgggtacctgttctgcaagactctctgtatggatgcagtgcagcactggggcaagcagtatgacattcacaatctgtatggctactccatggcggtcgccacagcagaagctgccaagactgtgttccctaataagagaagcttcattctgacccgttctacctttgcgggctctggcaagtttgcagcacattggttaggagacaacactgccacctgggatgacctgagatggtccatccctggcgtgcttgagttcaacctttttggcatcccaatggtgggtcctgacatatgtggctttgctttggacacccctgaggagctctgtaggcggtggatgcagttgggtgcattttatccgttttctagaaatcacaatggccaaggctacaaggaccaggatcctgcctcctttggagctgactccctgctgttgaattcctccaggcactaccttaacatccgctatactctattgccctacctatacacccttttcttccgtgctcacagccgaggggacacggtggccaggccccttttgcatgagttctacgaggacaacagcacttgggatgtgcaccaacagttcttatgggggcccggcctcctcatcactccagttctggatgaaggtgcagagaaagcgatggcatatgtgcctgatgctgtctggtatgactacgagactgggagccaagtgagatggaggaagcaaaaagtcgagatggaacttcctggagacaaaattggacttcaccttcgaggaggctacatcttccccacacagcagccaaatacaaccactctggccagtcgaaagaaccctcttggtcttatcattgccctagatgagaacaaagaagcaaaaggagaacttttctgggatgatggggaaacgaaggatactgtggccaataaagtgtatcttttatgtgagttttctgtcactcaaaaccgcttggaggtgaatatttcacaatcaacctacaaggaccccaataatttagcatttaatgagattaaaattcttgggacggaggaacctagcaatgttacagtgaaacacaatggtgtcccaagtcagacttctcctacagtcacttatgattctaacctgaaggttgccattatcacagatattgatcttctcctgggagaagcatacacagtggaatggagcataaagataagggatgaagaaaaaatagactgttaccctgatgagaatggtgcttctgccgaaaactgcactgcccgtggctgtatctgggaggcatccaattcttctggagtccctttttgctattttgtcaacgacctatactctgtcagtgatgttcagtataattcccatggggccacagctgacatctccttaaagtcttccgtttatgccaatgccttcccctccacacccgtgaacccccttcgcctggatgtcacttaccataagaatgaaatgccgcagttcaagatttatgatcccaacaagaatcggtatgaagttccagtccctctgaacatacccagcatgccatccagcacccctgagggtcaactctatgatgtgctcattaagaagaatccatttgggattgaaattcgccggaagagtataggcactataatttgggactctcagctccttggctttaccttcagtgacatgtttatccgcatctccacccgccttccctccaagtacctctatggcttcggggaaactgagcacaggtcctataggagagacttggagtggcacacttgggggatgttctcccgagaccagcccccagggtacaagaagaattcctatggtgtccacccctactacatggggctggaggaggacggcagtgcccatggagtgctcctgctgaacagcaatgccatggatgtgacgttccagcccctgcctgccttgacataccgcaccacagggggagttctggacttttatgtgttcttggggccgactccagagcttgtcacccagcagtacactgagttgattggccggcctgtgatggtaccttactggtctttggggttccagctgtgtcgctatggctaccagaatgactctgagatcgccagcttgtatgatgagatggtggctgcccagatcccttatgatgtgcagtactcagacatcgactacatggagcggcagctggacttcaccctcagccccaagtttgctgggtttccagctctgatcaatcgcatgaaggctgatgggatgcgggtcatcctcattctggatccagccatttctggcaatgagacacagccttatcctgccttcactcggggcgtggaggatgacgtcttcatcaaatacccaaatgatggagacattgtctggggaaaggtctggcctgattttcctgatgttgttgtgaatgggtctctagactgggacagccaagtggagctatatcgagcttatgtggccttcccagactttttccgtaattcaactgccaagtggtggaagagggaaatagaagaactatacaacaatccacagaatccagagaggagcttgaagtttgatggcatgtggattgatatgaatgaaccatcaagcttcgtgaatggggcagtttctccaggctgcagggacgcctctctgaaccaccctccctacatgccacatttggagtccagggacaggggcctgagcagcaagaccctttgtatggagagtcagcagatcctcccagacggctccctggtgcagcactacaacgtgcacaacctgtatgggtggtcccagaccagacccacatacgaagccgtgcaggaggtgacgggacagcgaggggtcgtcatcacccgctccacatttccctcttctggccgctgggcaggacattggctgggagacaacacggccgcatgggatcagctgaagaagtctatcattggcatgacggagttcagcctcttcggcatatcctatacgggagcagatatctgtgggttctttcaagatgctgaatatgagatgtgtgttcgctggatgcagctgggggccttttaccccttctcaagaaaccacaacaccattgggaccaggagacaagaccctgtgtcctgggatgttgcttttgtgaatatttccagaactgtcctgcagaccagatgcaccctgttgccatatctgtataccttgatgcataaggcccacacggagggcgtcactgttgtgcggcctctgctccatgaatttgtgtcagaccaggtgacatgggacatagacagtcagttcctgctgggcccagccttcctggtcagccctgtcctggagcgtaatgccagaaatgtcactgcatatttccctagagcccgctggtatgattactacacgggtgtggatattaatgcaagaggagagtggaagaccttgccagcccctcttgaccacattaatcttcatgtccgtgggggctacatcctgccctggcaagagcctgcactgaacacccacttaagccgccagaaattcatgggcttcaaaattgccttggatgatgaaggaactgctgggggctggctcttctgggatgatgggcaaagcattgatacctatgggaaaggactctattacttggccagcttttctgccagccagaatacgatgcaaagccatataattttcaacaattacatcactggtacaaatcctttgaaactgggctacattgaaatctggggagtgggcagtgtccccgttaccagtgccagcatctctgtgagtggcatggtcataacaccctccttcaacaatgaccccacgacacaggtattaagcatcgatgtgactgacagaaacatcagcctacataattttacttcattgacgtggataagcactctgtgaatttttacagcaagattctaactaactatgaatgactttgaaactacttatacttcatactcataaaaattattgtgtgttgctaatttgttcatacccactattggtgaaatatttctgttaattttgttatatgttttttgtgtgaaccctaaaggttaaaccttagccctgtgggataggcagttagggaggtgtggaaaatctatgcattaccttaatgtctctgtgtggttagtatggtagtgactgttcatcatatgacatttactgaagatgaactgggtccatgatgaagtgtgtgtatgtccacgtttgtaatcatagaatggaccccattcttttgttaaatacacaagagaaagctttctgtgacagttccaggtcttgaagctaatcagcatctcaagaaagtatccagaaagaacatctgctagttggttataggcggtgggaggaataatatacctaattggttataggtggggggagcatgataagcaaagaaaaggcaaacacaaggaaagatcagatgaaacagaagatgatagtaaaagtgatcctaagtaagaacataatgtaaaattgtcagcagcctcatggggaggaaaaaggaagagtcaactcacttgaagaagagggtcttgagaaatccttagcataaagggctactggtgagattgagatctgagcaggcaaagctcaaaagagagtttggaggttaaaaataatttatttttgcagtagtgtgctttgaaatgtgtaaatcttatttctaatgtatacaaccacatttcacataaaaatatgcaatttatatgccagataaaaataaaacaagtgaatttgcaagtgaaaaaaaaaaaaaaaaaaaaaaaaaaaaaa

SEQ ID NO: 1388 - DNA, 2627 bp, Homo sapiens
gtcgctcttcggacctcaaggttccccttaacacagagcgccccgcagtcttcgcggaaagcgttcggggtaggcgatggctgcgacgcgtgcagggccccgcgcccgcgagatcttcacctcgctggagtacggaccggtgccggagagccacgcatgcgcactggcctggctggacacccaggaccggtgcttgggccactatgtgaatgggaagtggttaaagcctgaacacagaaattcagtgccttgccaggatcccatcacaggagagaacttggccagttgcctgcaggcacaggccgaggatgtggctgcagccgtggaggcagccaggatggcatttaagggctggagtgcgcaccccggcgtcgtccgggcccagcacctgaccaggctggccgaggtgatccagaagcaccagcggctgctgtggaccctggaatccctggtgactgggcgggctgttcgagaggttcgagacggggacgtccagctggcccagcagctgctccactaccatgcaatccaggcatccacccaggaggaggcactggcaggctgggagcccatgggagtaattggcctcatcctgccacccacattctccttccttgagatgatgtggaggatttgccctgccctggctgtgggctgcaccgtggtggccctcgtgcccccggcctccccggcgcccctcctcctggcccagctggcgggggagctgggccccttcccgggaatcctgaatgtcgtcagtggccctgcgtccctggtgcccatcctggcctcccagcctggaatccggaaggtggccttctgcggagccccggaggaagggcgtgcccttcgacggagcctggcgggtgagtgtgcggagctgggcctggcgctggggacggagtcgctgctgctgctgacggacacggcggacgtagactcggccgtggagggtgtcgtggacgccgcctggtccgaccgcggcccgggtggcctcaggctcctcatccaggagtctgtgtgggatgaagccatgagacggctgcaggagcggatggggcggcttcggagtggccgagggctggatggggccgtggacatgggggcccggggggctgccgcatgtgacctggtccagcgctttgtgcgtgaggcccagagccagggtgcacaggtgttccaggctggtgatgtgccttcggaacgcccattctatcccccaaccttggtctccaacctgcccccagcctccccatgtgcccaggtggaggtgccgtggcctgtggtcgtggcctcccccttccgcacagccaaggaggcactgttggtggccaacgggacgccccgcgggggcagcgccagtgtgtggagcgagaggctggggcaggcgctggagctgggctatgggctccaagtgggcactgtctggatcaacgcccacggcctcagagacccttcggtgcccacaggcggctgcaaggagagtgggtgttcctggcacgggggcccagacgggctgtatgagtatctgcggccctcagggacccctgcccggctgtcctgcctctccaagaacctgaactatgacacctttggcctcgctgttccctcaaccctgccggctgggcctgaaatagggcccagcccagcacccccctatgggctcttcgttgggggccgtttccaggctcctggggcccgaagctccaggcccatccgggattcgtctggcaacctccatggctacgtggctgagggtggagccaaggacatccgaggtgctgtggaggccgctcaccaggctttccctggctgggcgggccagtccccaggagcccgggcagccctgctgtgggccctggcggctgcactggagcgccggaagtctaccctggcctcgaggctggagaggcagggagcggagctcaaggctgcggaggcggaggtggagctgagcgcaagacgacttcgggcgtggggggcccgggtgcaggcccaaggccacaccctgcaggtagccgggctgagaggccctgtgctgcgcctgcgggagccgctgggtgtgctggctgtggtgtgtccggacgagtggcccctgcttgccttcgtgtccctgctggctcccgccctggcctacggcaacactgtggtcatggtgcccagtgcggcctgtcctctgctggccctggaggtctgccaggacatggccaccgtgttcccagcaggcctggccaacgtggtgacaggagaccgggaccatctgacccgctgcctggccttgcaccaagacgtccaggccatgtggtatttcggatcagcccagggttcccagtttgtcgagtgggcctcggcaggaaacctcaaaccggtgtgggcgagcaggggctgcccgcgggcctgggaccaggaggccgagggggcaggcccagagctggggctgcgagtggcgcggaccaaggccctgtggctgcctatgggggactgatgcctgagcgccacctactgcattttggacacctcacaccaaggggagatgcaccccacggacacctgggactttccccttctggttcctgtgtctcccaataaactctctgaccaaccctaaaaaaaaaaaaaaaaaaaaa

SEQ ID NO: 1389 - DNA, 2117 bp, Homo sapiens
gttccgctgtctcgggaaccgtcgtatccctcggtccggcggcggcggcggcggcggcggtagcggaggagacggtttcaggcctccggtgcggctgcaatgctgagctcccgggccgaggcggcgatgaccgcggccgacagggccatccagcgcttcctgcggaccggggcggccgtcagatataaagtcatgaagaactggggagttataggtggaattgctgctgctcttgcagcaggaatatatgttatttggggtcccattacagaaagaaagaagcgtagaaaagggcttgtgcctggccttgttaatttagggaacacctgcttcatgaactccctgctacaaggcctgtctgcctgtcctgctttcatcaggtggctggaagagttcacctcccagtactccagggatcagaaggagcccccctcacaccagtatttatccttaacactcttgcaccttctgaaagccttgtcctgccaagaagttactgatgatgaggtcttagatgcaagctgcttgttggatgtcttaagaatgtacagatggcagatctcatcatttgaagaacaggatgctcacgaattattccatgtcattacctcgtcattggaagatgagcgagaccgccagcctcgggtcacacatttgtttgatgtgcattccctggagcagcagtcagaaataactcccaaacaaattacctgccgcacaagagggtcacctcaccccacatccaatcactggaagtctcaacatccttttcatggaagactcactagtaatatggtctgcaaacactgtgaacaccagagtcctgttcgatttgatacctttgatagcctttcactaagtattccagccgccacatggggtcacccattgaccctggaccactgccttcaccacttcatctcatcagaatcagtgcgggatgttgtgtgtgacaactgtacaaagattgaagccaagggaacgttgaacggggaaaaggtggaacaccagaggaccacttttgttaaacagttaaaactagggaagctccctcagtgtctctgcatccacctacagcggctgagctggtccagccacggcacgcctctgaagcggcatgagcacgtgcagttcaatgagttcctgatgatggacatttacaagtaccacctccttggacataaacctagtcaacacaaccctaaactgaacaagaacccagggcctacactggagctgcaggatgggccgggagcccccacaccagttctgaatcagccaggggcccccaaaacacagatttttatgaatggcgcctgctccccatctttattgccaacgctgtcagcgccgatgcccttccctctcccagttgttcccgactacagctcctccacatacctcttccggctgatggcagttgtcgtccaccatggagacatgcactctggacactttgtcacttaccgacggtccccaccttctgccaggaaccctctctcaactagcaatcagtggctgtgggtctccgatgacactgtccgcaaggccagcctgcaggaggtcctgtcctccagcgcctacctgctgttctacgagcgcgtcctttccaggatgcagcaccagagccaggagtgcaagtctgaagaatgactgtgccctcctgcaaggctagagctgatggcactgtctgcactgtccaggaaaaaagtaaaactgtactgttgcgtgtgcaagcggccccactagagccttccagccttctggtgtgttctaagagcaggctccacctgggagccagccccagttcacaccaaaccaggctccctgaacagtcctgttcatgtgtgtaggtggttctgttgtgttaagaaagcattcattatgtccggagtgtctttttactcatctgatacaggtaattaaaagaactcagattcttgaagccaccgttttcatattgtaatgttaggtgttctcagaggggaggtacctttgtctaatcaacgtttccacttagatcttttatttttaataagcaggcccataaaaattgttgacaagaattaatgaaattattaaaggcaacaatttagaagaaaaaaaaaaaaaaaaaa

SEQ ID NO: 1390 - DNA, 3161 bp, Homo sapiens
gggcgcgagctcagggcgcctccggggtcctcactgcgctccccacgcgctgtgaccccatttgttgcacgtgcatgttcaggtcgagagagggatgcgacgtgttcggggagcagcccaccttgtgggtggccaatccgggacgggaatcttaaacttttaactcttggtgcaaagacttgatccactggcggctttacgggagcgggaaaaaaatggcgctcccgacgctgccgtcctactggtgcagccagcagcgcctgaatcagcagctagcacgacagcgagagcaggaggcccggcttcggcagcagtgggagcagaacagccgttacttcaggatgtctgacatctgcagctccaaacaggcagaatggagctctaaaacctcctaccagcggagcatgcatgcctatcagcgggagaagatgaaggaggagaagaggaggagtctggaggcccgacgggaaaagctcaggcagctcatgcaggaggagcaggacctgctggccagagaactggaggagctgaggctgagcatgaacttgcaggaaagaagaatccgggagcagcacgggaagctgaaatcagccaaagaagagcagaggaaactgattgctgaacaacttttgtacgaacactggaaaaagaacaacccgaaacttcgagagatggagctggaccttcaccagaagcatgtcgtaaactcttgggaaatgcagaaagaagaaaaaaaacagcaagaagccaccgcagagcaagagaacaaacggtatgaaaatgaatatgaaagggcccgaagggaggcgctagaaaggatgaaagctgaagaggagaggaggcagctggaggacaagctccaggccgaggcactgctgcaacagatggaggagctgaagctgaaggaggtggaggcgaccaaactaaagaaggagcaggagaatctgttgaagcagcggtgggagctagagaggctggaggaagagcgaaagcagatggaagccttccggcagaaggcagagctggggcgtttcttgagacatcagtataacgctcaactcagcagacgcacacagcagatccaagaggagctggaggcagacaggcggatcctgcaggccctcctcgagaaggaggacgagagccagcgcctccacctggccaggcgggagcaggtcatggccgatgtggcctggatgaagcaggccattgaggagcagctgcagctggagcgggcgcgggaggcagagctgcagatgctgctgagggaggaggccaaggagatgtgggaaaagagagaggcagagtgggcccgagagcgcagcgcacgggacagactgatgagcgaggttctgacagggagacaacagcaaatacaagagaagattgagcagaaccgacgggcacaagaggaatccctgaaacacagggagcaacttattcgaaatcttgaggaggtgagagagttggctcgtcgcgagaaagaggagagtgaaaagctgaaatcggccaggaagcaggagctggaagcccaggttgcagagcgccggctgcaggcatgggaagcagaccagcaggaggaggaggaagaggaggaggcccggcgggtcgagcagctctcagatgccctgctgcagcaggaggcggagactatggctgagcagggctaccggcctaagccttacggacatccaaaaattgcttggaactgacttcatgggtaccataagtacagagaacaagggatgctgaggcttctgatcccagccgccaggcagttttacagggctctgttaacagtaagtgcccggggcactgtcagatggctcagcagtgcctgctcaggttcatcattgaaacatcccagtgtttggccagacattaaggtgtcgtgagagtccctttcatgcctttcttacccaagcaagggtctttgatgggcacgtgtttacagcgctgctgcatagtcttgtaatatattaacagtcacatcaactgaaggtcaatactaagagccacaggttgtacctgtgatggggcgtgtggtttcctgttgtctcacctttaattgtcaacctccagtgttgactctagaaatatgaggaaagcttttcagtttttaaaattgccatttaaatttagtctattaaaaacaaacctagaggtcttggtgcagttgatttcagagtttattaatttagtggtcccaaaagtattacatcttttatattctggaagaaaagaactgtgaacaaattagaaccccggaacactctgacgtccatggacgcattccagaaaagtggcaagagatgagtctttcctcctccaggaagcattttggtagaatttccatagagcattgtctgtgagtgactgatcccaacatgtatgttactaagccccaaaacgaacttcaaactgggtgtggtggcacgtgcctttagtcccagctacccgggaggctgcggcaagaggattgcttgagcccaggagttcgagtccaacctgggcaaaagagtgagaccccatctctaaaaccaaaaaggtaccttagaaggtcacctggttggctaaccttttaaaggcaggggcgtgacacgtaggacacattgggaatgtcttggctactacatgtagccttctgggatatatgtgcccagagggagaagcactgagcctgaagaaactagatgagtctcagaaccacagaccggccagaaatctctcccaccattatatcagcgtgatacaggtctacattcatttctacaaacaggaacaagttccttgcagcaataatattattttatgacttgtatttttactatacccttcctctgaggtttagttttcatcacattatgttcaagattccatatctccgtaaattacagctaattacagggcattgttccatggttattaaaaatcagagtttattaaaaatcctgagtcttaagggctgtcttacctttcacttccactgtcctgtagaaacagatcaagctgcaaaccacgtccttcatctgttgttcattttcttgcaactctttgactctgatcccctgagcagcacgttcatcacgcatgctctctgttgcgttccccatttcagatgtccagtaatggtgaaataaaatcctgcttcggaaaaaaaa

SEQ ID NO: 1391 - DNA, 1418 bp, Homo sapiens
ggcgtgctttgcggccgccctgccgcgcgcacatgtaggcgttccgagcggcggcggaggtgagcgcacggacgagcgggagggacccttctccggcctgatgcgacccgattgtccgcagtgactacactcatggcaggtcccctgtggcggaccgcagcatttgtgcagagacacaggacaggcctcttggtgggttcctgtgcaggcctgtttggagttccaatctcgtaccacctcttcccggatcccgtggtccaatggctctaccagtactggcctcagggccagccagctccgctccctccacagctgcagagcctcttccaagaggtgctacaggacataggtgttccttcaggccattgctacaagcccttcaccaccttcaccttccagcctgtgagtgcaggcttcccaagactccctgctggggctgtggtgggcatccctgccagtttcttgggagacctagtgatcaacactaaccatcccgtggtcatacatgggcatacagtggactggcggagcccagcaggcgcccggctgagagcttccctgaccttgtcccgtgaagcccagaagttcgccttggccagggaagtggtgtacctggaaagcagtaccactgccgtgcacgccctgctggccccagcttgcctggcagggacctgggcactgggcgtgggtgccaagtacaccctggggctccatgcaggccccatgaatttacgggctgccttcagcttggtggcagcagtggcaggctttgtggcctacgccttctcccaggattctctcactcatgccgtggagtcctggctggaccgccgcacggcctccctctctgcagcctatgcctgtggtggagtggagttctatgagaagcttctgtcgggcaacctggccctgcgcagtctcttgggcaaagacggggagaagctgtatacacccagcgggaacatcgtccccagacacttgttccgaatcaaacatttaccctacaccacccgccgggactctgtgctgcagatgtggagggggatgctcaatccgggccgctcctgatgggctcatcacaaggacacttccagcttgtgcagacaccaccctgccattgagtctggagggccctgttggagcctttggacctatagctcacggccagaaaaatcactggctttggaattaaatagcttagattgtactataaccactacttatgaactcagggactatgagggactattcaggggctatgaatctgagcctttgtttcttgaactgtaaagtggagatgatgtaaaccgccttgcaagattgtagagttgggtaaggtcatgaacataagggcctggcacaaagggtgcactgtaaataaacagacatccctccttaaaaaaaaaaaaaaaaaaaaa

SEQ ID NO: 1392 - DNA, 1891 bp, Homo sapiens
agaagactttggtggggtagtctcggggcagctcagcggcccgctgtgcccgtttctggcctcgctcgcagcttgcacgtcgagactcgtaggccgcaccgtagggcgagcgtgcgggtcgccgccgcggccgcctcggggtctgggcccagccgcagcctcttctaccgcggccggttgggagtcgccgcgagatgcagcctccgggcccgcccccggcctatgcccccactaacggggacttcacctttgtctcctcagcagacgcggaagatctcagtggttcaatagcatccccagatgtcaaattaaatcttggtggagattttatcaaagaatctacagctactacatttctgagacaaagaggttatggctggcttctggaagttgaagatgatgatcctgaagataacaagccactcttggaagaattggacattgatctaaaggatatttactacaaaatccgatgtgttttgatgccaatgccatcacttggttttaatagacaagtggtgagagacaatcctgacttttggggtcctctggctgttgttcttttcttttccatgatatcattatatggacagtttagggtggtctcatggattataaccatttggatatttggttcactaacaattttcttactggccagagttcttggtggagaagttgcatatggccaagtccttggagttataggatattcattacttcctctcattgtaatagcccctgtacttttggtggttggatcatttgaagtggtgtctacacttataaaactgtttggtgtgttttgggctgcctacagtgctgcttcattgttagtgggtgaagaattcaagaccaaaaagcctcttctgatttatccaatctttttattatacatttattttttgtcgttatatactggtgtgtgatccaagttatacatgaatagaaaaagatggtgttaaatttgtgtgtaggctgggaattcttgctgaaggaattggagaaaacctgttgctgcaaaattttacatgttccagatggaaagggaagtctaagcgctttttaaaacaatttttttttgtatttaattaagcaattgcagttatctgggatttttgggtcagaattttaaattctgtttgattctccatattccagtgaataaaatacaaaagcattgtgtttttaagattgtgtcgatattcacctaaaaacttgtgccaaaagcacctggattggtaattatatttcacttaaagggtaaatttgacaatatcttgataatcaaaagtgcaatttttttcttcaaaatgttttctccagcatcacagatcctgcagatatatatttatatttatacatatatatttatgaaataattcttactcacaaaatatatttctgataaacattaagatattaaatctgatgcacaaactttaatttggccattaatcttttttatttaaaaatttaaatttgtttttaaaattgtatatagtttttaaaatctcacacatgcttcgatacttccttgttaagaattcttaataactactaaaactgatttttaatagttgctgatatatatttggtttgtttgggtatacttttcaaaaccatttttgaatgtccaaacatctgatttaaagtttctgtttatctttctgaccaaaggagcaagaggtataatggatatggcattcattaaaatctttactatgtacaaaaacagtaatatttacagcatcagtaaatatttttaagtggtacttctaaatcataaaagttggggaaagagacctttaaaatcttgtggtgttgaacaatgttatatgaagtagaaaaaataaaatacttcccagttgtgaaaaaaaaaaaaaaaaaa

SEQ ID NO: 1393 - DNA, 2420 bp, Homo sapiens
acctcgcggggcgcgggaaagaggcagagcgcgcgcagatttctcaaggggaagataaaatgactaagaggaagaagctgcggacctcaggagagggactctgtcctccaaaacccctaaagaacccaaggctaggagacttctatggggacccccagagttccatgttgggctgtttacatcaccctgaggagccagagggcaaattgggacctgttccctctacacagcagcacggggaggaaccaggaaaggccgtctccagctcccctgatgaggaaacaggatctccctgccggctcctccgtcaaccagaaaaggagccagctccccttcctccttcccagaactcattcgggaggtttgttccccagtttgcaaaatccaggaagacagtgacaagaaaagaagagatgaaggatgaggaccgtgggagtggggcctttagcctggaaacaatcgcagagtccagcgcccagagtccaggatgccagctgctagtggagaccctgggggtccccctccaggaggccacggagctgggggacccaacgcaggcagacagtgcccgccctgagcagagcagccagagccctgtgcaggcggtgcccggcagtggggattctcagcctgatgaccctccagacagggggacggggttgtccgcctcacagagggccagccaagaccacctgtcagaacaaggggccgatgacagcaagcctgagacagacagggttccaggtgacggtggccaaaaggaacacctaccaagcattgattctgaaggggagaagccagacagaggagccccccaggagggaggggcccaaaggacagcaggggctggcctgcctggagggccccaggaggagggagacggtgtcccctgtaccccagcatcagctcctacctcaggccctgctccaggactgggccctgcctcttggtgcctggaacccgggtctgtggcccagggctcccctgacccccagcagacccccagcaggatgggtagggaaggggaagggactcatagcagcctgggatgctcctccctcgggatggttgtcatcgcagacctgagcacagaccccactgagctggaagagagggctctggaggtggctgggcccgatgggcaggccagtgccatatcacctgcctctcccaggaggaaggccgctgatggaggccacaggagggccttgccaggctgcacctcgctcactggggaaaccacaggagaaagtggggaggcagggcaggatggcaagccccccggcgatgtcctagtgggccctacagcctccctggctctggcacctgggagcggagagtccatgatgggtgctggagattccggtcatgcatccccggacacaggtccatgtgtcaatcagaagcaggagccaggtcctgctcaagaggaagccgagttaggtggccagaacctcgaacgagacctcgaggggttccgtgtgtccccgcaagcctctgttgtgctggaacacagagaaatagcagacgaccctctccaggagcccggggctcagcagggcattccagacaccacctcagagctggcagggcagcgagaccacctgcctcattctgcagaccagggcacctgggcagactctttagctgtggaactcgacttcctgctggacagccagatacaggatgccctggacgcctctgacttcgaagccccacctgagcagctctttccttcggggaacaagccgggcccttgctggccgggccccagctcacatgccaatggagaccctgttgcagtggccaaggcccagccgagccggctgatcatgggcacccaccgggacctggaagctttcaagcgccttaactaccggaagacaaagctgggaggcaaagcccccctgccttacccttccaaggggcctgggaatatccctcgaggggacccaccctggagggagttgtaggccactttgaggtctgtgtttcctttgccacccagcccccatgtccgcagacctcctccaagatgctccagggggtcctagtggaccctacaaacctcccttcagttgcccggaagttggtcttccatggacaacacaaaggaggccgtgaggtcctggcctcacctggccagggtcaaggtcatttgccacccttggcttcagggagggaaactgtgtctcccacagccccagtgacttcaagcgggcctgggctccaggaagctggccacctctgagcagggcccatcctgtccggatttgcaaattttagggtcctgagccaagtatggatggttcagaatttgtttctttcctggaggagaagagagctccctttgttttctttctccccatttccattttatttcttctgggaagacccataataaatgattctgtagaggc

SEQ ID NO: 1394 - DNA, 4019 bp, Homo sapiens
gggagccagctgttgtcatcattcaggagctatcagcctatttctacatactttatatctgttttggattatttggattccagttgtaagcctccatttagaaagggagcatgagaagcactgaaaagtaaggcactgtgatctacacggaaaccatatattgggctcacagctactgaatgagaccgactggtggagacagtttagtgaacctggtaaacactacacgtgaagagtggtgaaagggaacattgattactgaagtgccctggagagggaaagcactggtcaacatcacatggacaaatttcattgttttctaaagatggcctggaagtagtctttgccactgcttcctccacaaacagctcttcataacatgggctgcatgaaatcaaagcaaactttcccatttcctaccatatatgaaggtgagaagcagcatgagagtgaagaaccctttatgccagaagagagatgtctacctaggatggcttctccagttaatgtcaaagaggaagtgaaggaacctccagggaccaatactgtgatcttggaatatgcacaccgcctgtctcaggatatcttgtgtgatgccttgcagcaatgggcatgcaataacatcaagtaccatgacattccatacattgagagtgaggggccttgaggctgtaggatgacaacactttgactgtggaggtgctagtttgaataaatgtgacaaaagcaaaaactggtgtgaaaaagtacaaataactatctggatttaaaaatgtgtctacgataatgtcactattataagaacaactaggatgaaatgcattttaagtacttctatgttaacagcaatttctgtttagtcttagattttagtcatctgaagggctgaacagaggtcctgtgacacccaataatcagctgaatgtcacagcacttcttcctaagtaatggcatcaccaaagaaaatgctaaggaataaaaactgccccaaattccaatggttgaagtttatcctttaaaataacaatttttgtttgtttatacccaaaaaaagtccagatatgaaaagggcttttctaaaatttcttggcgagggaatggcactcaaatcatagtgattaacagtaagtcttgtttgtttgtcaaggatctctacttcttgacacaaatgaaccctgtctttaataagataagatatttatttttgtagatgagaagtgtaactaccaccttggacctcagggccctaactaattacagctgttactggacgactcagactttgtgcctaaagccatcttagagataacagtttatagaagccatgacattagtgtttattgcattgaattaagcccagtgatataactatacaagaaaacaagtaggggtaccttttacaaagagcaatccaataaatcttaaaaataacagaaacttagtctgcaaggtagaaagtttcagttttaattctgtattaagctttactatctcagaggtacagagggctggaatatgggcatttatttccagttttttcttgactagtaaggcggtcaccattaaaatagaccagataatgcatgaagatttacagttgtattgcaaaacggaaaagataaaactgtcctttgaggagagtactcgttttctgggtttttgttattttttagtggtaacacaagcctatagggcatttatagccacctattatactgtttccataagcctggctaccttttagggaagctattttttctctttcatttttactgtcacagcacatacacacacacctttttgttttaaaggattaagtactgtttgaagatcagtggtaacagaaaatttgggagggagaagaagaaattaagacatgacttgttagaaaattaagacttcagtttctagaattatcttttcatcaagatttggtagacattgagtttaaatggaaaggaaattatttaagcctgtgtatgttagatccacaatacaccattggtattgaaatataaaggttaaaaaaaaggcttatgacctctttaatgagataaatatgtatttgtcttgtaagcaggcagaaaatctacctctaattttaacactaatactttgaaacccacaatcaaatagagtgaattctccaagttacataagcaaggaaaacattatttgaaatatgccatgttttcgttgcctttggacacctcatcattcaactctaattttaccgagtcccgggatttgtactgtcccattgtacttgcaatctacaatttatataatagaaaaacaaccaaacccattcatacaaggatctgaagttataaggttaagggcagaaagtttcccataagtataaaacatttccaggtcatgaagagtagtttaggttgagtgacaaaagcctaggtgtggttgtttttcattcattttgcatctcacaccaagacatttttgctgcaaggtcatctgctgcttaaaatgtacaattaggtatataaaataagtacaatggtgaaaacacaaagccaggtaaagcagcatgccccactaaacttttcagtatacatagggacagacaagtgagttttggttgtatctaaatattttaatttcaggttccttctgtgccctgggccactatttcccaggggtgtgacagagatgcctgccagatccatatcaactagaagtctgatttctgttgctgcccttcctcagcaactatggcagtatacttttatcaccaagcaccactcccttgtccctgaatcacattttaatagagtacaatatcttctgtacaatatttctgaaacacttatgtctgaaatatatgctgtattgtatgttaacccatgacatatatgaactacaaggcttgcataatcagtgagctagtggataaatcaagacaggagcaaatgggagaaagatgaataaacaaatgaaaaaagatgaataaatgaataagagagatgaataaacaaatttacattacatgtgatagttatcatggtatggccttcatgacaagatggatgagaatatcactgataggatattagccttctttcatatctttatattgaaatatgggctttacttcaatttgaaggtctttcatgaacaataaaagagagtagaaggactgtctgagaaggcaggagacatataaaacagatgactgaaagactgactagctcctggaaagggaaacatttggaacatccagagtaagggcaaatgggcttctaccagcacaacaaagagcctccaggtggcaacatggaagcaggttatcagagaaaataaatgtgcaaattccttatttacaatgactcacttaaccccacaaacatgtttcactgctgccttccccagttgtcgcttatgtactgttgttacctttcagttacatgcctttgatcctaaaattctctacttttgttgccttatcagttctttgcaatctgcctgtggttatcagcacttaaagcacaattttgaaggggaaaaaaatgataatcaccttagtcccaaagaaataatttgtcaaactgccttattagtattaaaaacagacacactgaatgaagtagcatgatacgcatatatcctactcagtatcattggccttttatcaaatggggaaactatacttttgtattacatagttttagaaatcgaaagttagagactctttataagtaatgtcaaggaacagtaatttaaaaacaaagttctaacaaatatattgtttgcttaatcacaatgccctcaacttgtatttgaataactaaataggacatgtcttccttggagctgtgggcattagttcagaagcactacctgcatcttaattttcaaaacttaagttttattagcaaatcctcttctctgtaagacttagctatgaagtggtatattttttccaaatatttttctgaaaacatttgttgttgtaactgcacaataaaagtccagttgcaattaaaaaaaaaaaaaaaaaa

SEQ ID NO: 1395 - DNA, 2216 bp, Homo sapiens
cgtctctctgcccccgccgctgccatggcggcagctccgccgctttccaaggccgagtatctgaagcgttacttgtccggggcagatgccggcgtcgaccggggatctgagtccggtcgcaagcgtcgcaaaaagcggccgaagcctggcggggccggcggcaagggaatgcggattgtggatgatgatgtgagctggacagctatctccacaaccaaactagaaaaggaggaagaggaagatgatggagatttgcctgtggtggcagagtttgtggatgagcggccagaagaggtaaagcagatggaggcctttcgttccagtgccaaatggaagcttctgggaggccacaacgaagacctaccctcaaacagacattttcgtcacgataccccggattcatctcctaggagggtccgtcatggtaccccagatccatctcctaggaaggaccgtcatgacaccccggatccatctcctaggagggcccgtcatgacaccccagatccttctcccctcagaggggctcgtcatgactcagacacatctcctcccaggaggatccgtcatgactcctcagacacttcacccccaaggagggcccgtcatgattctccagatccttctcccccaaggaggcctcagcataattcttcaggtgcatctcctaggagagtccgtcatgattcaccagatccctctcctcctaggcgagcccgtcatggttcctcagatatctcttcccccagaagggtccataacaactcccctgacacatctaggaggactcttggctcttcagacacacagcaactcagaagggcccgtcatgactcccctgatttggctcctaatgtcacttattccctgcccagaaccaaaagtggtaaagccccagaaagagcctctagcaagacttctccacattggaaggagtcaggagcctcccatttgtcattcccaaagaacagcaaatatgagtatgaccctgacatctctcctccacgaaaaaagcaagcaaaatcccattttggagacaagaagcagcttgattccaaaggtgactgccagaaagcaactgattcagacctttcttctccacggcataaacaaagtccagggcaccaggattctgattcagatctgtcacctccacggaatagacctagacaccggagctctgattctgacctctctccaccaaggaggagacagaggaccaaatcttctgattctgacctgtccccgcctcgaaggagtcagcctcctggaaagaaggctgcacacatgtattctggggctaaaactgggttggtgttaactgacatacagcgagaacagcaggagctcaaggaacaggatcaagaaaccatggcatttgaagctgaatttcaatatgctgaaaccgtatttcgagataagtctggtcgtaagaggaatttgaaactcgaacgtttagagcaaaggaggaaagcagaaaaggactcagagagagatgagctgtatgcccagtggggaaaagggcttgcccagagccggcaacagcaacaaaatgtggaggatgcaatgaaagagatgcaaaagcctctggcccgctatattgatgacgaagatctggataggatgctaagagaacaggaaagagagggggaccctatggccaacttcatcaagaagaataaggccaaggagaacaagaataaaaaagtgagacctcgctacagtggtccagcacctcctcccaacagatttaatatctggcctggatatcgctgggacggagtggacagatccaatggatttgaacagaagcgctttgccaggcttgccagcaagaaggcagtggaggaacttgcctacaaatggagtgttgaggatatgtaactttcctgaggctgtgggggtggctgggctgtggtagtgggcataggcagcgagatatccagtggtaacagttgtctgtgctaataattggagcccacacagaccagcaacttgttgaatgccagttttgaccacagaagaatattcgagacctgatgtttggactgaggtacctgtacttcttgggtgtgacagcaccggctgttgctggctttcagaggaagcattgatttctcattgaccagggtttgttcttggtagggtttttctttttcttttttaaataaacatgtatttatttttttaaaaaaaaaaaaaaaaaaaaaaaaaaa

SEQ ID NO: 1396 - DNA, 2453 bp, Homo sapiens
ggcccgcgcccggcctccgcggcgccgcctcccagcccagagcccagcgctcaggaaggtgcgggcgggggagaaagcaacaccattgtttttcaggcgcctccatttgcccccgagccgagccgtggctttccggatgatcgggagacgcggtctggacgggccgggaaaggagccgggcgcctgcggagaccccgcctcagcgagtacgcccggccgggcgggctgggaggatgaggacggctgccctggacttccgccgccacaggagggttttcggccggacgccgggagggagctccaggctgtgagctccatttgtaaaggtcttaataacaagaacagtgacttcggctccggagcttcaagatagtggcctgcttggcctgcccatctcggatctctccaggaggacccagccacccaagggtcgtcttctgctgctgacccccatcaaatcccatcatgcccacagccctgtgcccccgagtcttggctccgaaggaaagtgaggagcccaggaaaatgaggagcccacctggagagaaccctagcccccagggggagcttcccagccccgagtcctctcggcgtctcttccgccgtttccgctaccaggaggcggcgggcccccgggaggccctgcagcgcctctgggacctgtgcgggggctggctgcggcctgagaggcacaccaaggagcagattctggagctgctggtgctggagcagttcctggccatcctgccccgggagatccagagctgggtgcgggcgcaggagcctgagagcggagagcaggctgtggccgcggtggaggcactggaacgggagcccgggagaccctggcagtggctcaagcactgtgaagaccctgtggtgattgatgatggggacagccctctggaccaggagcaggagcagctgccggtagagccccacagcgaccttgcaaagaaccaggatgcccagcccataaccctggcacagtgcctggggctcccaagcagaccaccaagccagctcagcggggacccagttctgcaagatgctttccttcttcaggaagagaatgtgcgggacacacagcaggtgaccaccctccagctacccccgagtcgggtttctccattcaaggacatgattttatgcttctctgaagaggattggtcccttctagatcctgcccagactggcttctatggagagttcatcattggggaggattacggggtctcaatgcctccaaacgacctagctgcccagccagatctctcccagggagaggagaatgagccacgcgttccagagttgcaggatctccagggcaaagaagtgccccaggtctcctacttggactctccaagtctccagccattccaggtagaagaaagaaggaaacgtgaggagctgcaggtgccagagttccaggcctgcccacagacggtggtgcctcaaaacacctacccagctggcggcaacccgcgatctctagagaacagcctggatgaagaagtgaccatcgagatcgttctctccagctctggggacgaggactcccagcatggcccgtactgcacagaagagctggggagccccacagagaagcagcgcagcctccccgcctcccaccggagcagcaccgaggccggaggcgaggtgcagacctccaagaagtcctacgtgtgtccgaactgtgggaaaatcttccgctggagggtcaacttcatccggcatctgcggagccgcagggagcaggagaagccgcacgagtgctcggtgtgcggggagctgttcagcgacagcgaggacctggatgggcacctagagagccacgaggcccagaagccttaccggtgtggtgcctgcgggaagagcttccgcctgaactcccacctgctctcccaccggcggatacacctgcagccggacagactccagccggtggagaagagagagcaggcggcatccgaggacgcggacaagggtcccaaagagccgctggaaaacggcaaggccaaactgagcttccagtgctgtgagtgtgggaaggccttccagcggcacgaccacctggctcggcaccgcagccactttcacctgaaggacaaagcccggcccttccagtgccggtactgcgtcaagagcttcacgcagaactatgacctcctccgccacgagcgcctgcacatgaagcgccgttccaagcaggctctgaactcctactgagcctctccgcctggggcggcctcaccctggctggtgctgccccctcaccttggtactgatcagcgcccccacccaggacataccttccccaggatagagagcacacctccctcctgtccttgctctcaggtagtgagcgttcgggtggtgccatgggagcactctccctcccccaggtaatgaaagagtggccaagtgaaaaaaaaaaaaaaaaaaaaaaaaaa

SEQ ID NO: 1397 - DNA, 3949 bp, Homo sapiens
aggaagcggggggctagcggcctggcgctgcggcgaccgaccggggcgtcaggatccctggcccccggagagcgaagggcgggcgggtcccggagcaagaagaattgtatagaaatgtaaaaaacatttatgtgtgcttcacatgtggcatgaaaaaaatgaggacctctggtcaaaattgcctgagttcagaatttcatgctggaaggaaagttagacgtaacttctaatttctagttccagtaagcatctcttcttggaaaatttccaaaaaagagtcctgctctgttgcccaggctggagtacattggtgtgatgatcatggttcactgcagcctcgacctcccaggctcaagcaattctcctacctcagcctcctgagtaactgggactataggatttctttgaagaaaaatgtgcttcttgaatcaactgcagtctctcctctgcataagagctcttaagggtactagcaggatagaagcaaatgaaactgaaagctcatctgcagctcagaaaagcaaagacatggaattttaaagagtgaaggtagcatggtgtcggccatgggtgaacaagacacagccagacaatgtggaccaatttcttcaaactacggcttttctgctgtctgcttgcagtgttgatggtggtggtgctggtcatcaatgttactcaggtagagtacttggaccatgagactgtttcagccactttcatcgacagcagtggacagtttgtttcctcccaggtgacaggaattagccgaaatccctactgtggctatgatcagcagaccctgtccagccaggagcgcatggaggaggactccttgctggctgccttgcaccggcaggttcctgatgtgggcccagtcccctttgtgaagagcactgacccttcttccagctactttgtcatcttgaactctgctgccttctttaaggtgggaagccagcttgaggtgctggttcatgtgcaggattttcaaagaaagcccaagaagtatggtggagactacctgcaggccagaattcactccctcaagctgcaggctggggctgtgggcagggtggtggattaccagaatgggttttacaaggttttctttactttgctatggccaggcaaagttaaagtatccgtatctctggtccaccccagtgaagggatcagagttcttcagcgcttacaggaagataaaccagacagggtctatttcaagagtctcttccgttcaggaagaatttctgaaactactgagtgcaacgtgtgtcttcctgggaatctgcccctgtgtaactttacagacctctacactggggagccctggttctgcttcaaaccaaagaagctcccttgcagcagcagaattacccatttcaaaggtggatacctgaaaggtctcctaaccgctgcagagagtgctttcttccagagtggtgtcaatatcaaaatgccagtcaactccagtggacctgattgggtaactgtgattcccaggagaataaaagaaactaacagtctagaactatctcaaggctcaggaacttttccttctgggtattattataaagaccagtggaggcccagaaagtttaagatgcgtcagtttaatgaccctgacaacattacagagtgcttacaaagaaaagtggtgcatttatttggtgactcaacaatcaggcaatggtttgaataccttactacatttgttccagatttagtggagtttaacttgggtagtcccaagaatgtgggtcccttccttgcagtggaccagaagcacaacatcctgctcaaataccgctgccatggtccacccatccgcttcacgactgtctttagcaatgagctccattatgtggcgaatgagctgaatggcattgtgggagggaagaacacagtggttgccatagctgtatggtctcacttcagcaccttccctttggaagtgtacatccggcggctcaggaacatccgtcgagcagtggttcggctcctcgatcgaagcccaaagaccgtggtggtcatccggacggccaacgcccaagagctgggacctgaggtgagccttttcaacagcgactggtacaactttcagctggacaccatccttcggaggatgttctcaggggttggagtatatctcgtcgatgcctgggagatgaccctggcccattatctaccgcacaagctgcatccagatgaagttattgtgaagaaccagctggacatgttcttgtcctttgtgtgccccttggaaacctagcctgtcttggaagggactggaggaatcatattcaatgaccttctcaattgacctgagttacagaaagtggccccagtgagagatgactgcccttaataagtataaaatttcaaaaagatctggacttaatatgatgacttataaggagcttagaaaatgcaggttacatttatatctacctataggattttatccaatgttgacttagccatggtagaactcttaactgcatctacacactatattgctcttgtaaccaaagatgctaatgagtgtatttgaattagcttctcctaggaggggtgactactttgctaaagagtatgaaaaatgttttgatggaagggacaagtttggttggtagtagagtgtttgtagcttatctggtaaaggaaattgagtgcatctgcatgcatagcacaagtaatccatcttctggcggttaactagagaaagcttatagtcagaggctcttgtgaatgcactgaagactgctgtgtctcaggagtttctcttgatgatctaccttttctgaattacttgaaaaggccaatgtgcttggttcgagttttttagtgaatatttacaatttcctgcttttatctagaaaagaagcaaaagggaaatatgaaagcagtatatataaaatctgtgctttggaattgatatttgcatttggtgattgttttttatttgattcagctaaattttatgtgttgaatacttactctagaataactacttttggaactggaagggggaaatctgtaaatggaaatttatttttatgttctgaaatttgagggtttaggaattgacttttgtgtaaagaatgctacggtattataaagctgtggaagttttttccactagtttcaggtgtttttttttttgttgttgttgttgttgttattttgaactacttaccaaaattagaagttaaaatctaattagaaattaataagatactaaaattcatgacagttttttgtttgtttgtttgtttgttttttggtatttcttgatttgggcataaaaggcacacccattctctcatgcttggaagaagctgctattcctactggctatctaagaagaatggaattattaattttatttgacttattaattttaaacgagtttaatttgggatcatttagtaagtactcttttctttttgagctgtgatagattatagtctagtttaagttgctcctaagtagacagatgaagaaactagggaggctttagagaggaagacagatgcttgaagtatgaacaatatatacccttagaagaatgggtcaaataatttgggtttttaatttaaaataggagggccccagatcttactttcctgtccttgaggaacaccttcaagtttttaaagtattttagggggaaagaagatttttaattgtttctgagcctaatgaggtaataaaatatattaaaatagtttaattttaatggtccttacgctttacagtacctaaggatcacttgtagtatctgacaaaaatgcagaattaaagagtcatggcagggtgtggtagctcaagcctgtaatcccagcactttgggaggccaggcaggaggattgcttgaggccaggagtttgagaccagcctgggcaacatagtaagacctcatctccacaaaaaaaaaaaaaaaaaa

SEQ ID NO: 1398 - DNA, 2451 bp, Homo sapiens
gcgccaggcccgctggggcaggtgtcccgtggaaatcgacggaggggctgccgtgggcggccgtgacagtcacagagaggggaagagaaaacagggacggtgacacacacagagagaaggaagagcagacagaggcacagcaggagacccccccaagcccgaggaggacagcctggggatgcagagcacatgccggccccagtggagggaaccgatttccccggagccgggaggcaagcctggggctcccctgccctgtccctgccggtagcccccccagccgtctccccaccatctgtcccgctgccgtcccaccaggtgggagccatgttcctgagcccgggcgaggggccggcaaccgagggtgggggtctggggccgggcgaggaggcccccaagaagaagcaccggaggaaccgcaccaccttcaccacctaccagctgcaccagctggagcgggcgttcgaggcctctcactacccggatgtgtacagccgtgaggagctggcagccaaggtgcacctacctgaggtgcgcgtgcaggtgtggttccagaaccgccgggccaagtggcgccgccaggagcggctggagtcaggctcgggtgccgtggcagctccgagactccccgaggccccagcgctgccgttcgcccgccccccggccatgtcgctgcccctggagccctggttgggccccggaccgccggccgtgccaggcctcccccgcctcctgggcccgggcccggggctgcaagcgtccttcgggcctcatgcctttgctcccaccttcgcagatggcttcgccctggaggaggcgtccctgcggctgctggccaaggaacatgcacaggctctggacagggcctggccgccagcctgagcctgccgccctcccgggccccctcctcggcccaacccgagaaccggggacgtgccctggtgacagccaccacgccttggcctaggccgaggtcatggagcaaccgtggtcaggccaggccaccaccactggggagcgggaccagagagacaggctgctgggttccctgcccccatcccgtctcccaccccatcgccacccgtcctgctggcagcggactggcccccagtgtcaggcaggaggtgacccaagtattctcaggccaggtgcggggacctcctcccctcctggggcctcagtctcctgtctgttaattgggcgtgggggcctccgaggttcgagggctgcgaggctgtgggtggcgggaccgctgactctgtaagatgagtgtaaatctctctgcttctcctaatccccatcagcagagctgcccactctccaggctcccagtcccctggaaataacaaatagcagcagctcccgcgagcctggtctcctctcaccgtgtgctcgccatgtgagcactcccctctccgttgtgccctggacctcgggcacagctgtcagcccattctatagagagggaaaccggggcttaggcaggaagccaggtccccaaagtcgcacggccaggagtggatggagctgcctttcagacccatcaccggtcctaccgtccggggcacagcgacaggttctggagagagggtgggtcccgggccaggtgctggtgggcctccaggtggaggcgggctgatgctgggtgtgtcgtcatcgtcagaccgttcctcacgtccccacagaccccaggccctgtgcatgtccccagtggaggcatggccagcatctgctctgtccaacccagtcgcatcgcccaagagctctgagcaaggaggctgtcgcggggccgagaacccgctgggactggcaagcacggctggcccagtgcagcaggagggggccctgaggcatgggatgggacagtctgggccagcgccacctcccgggacagaagtgcggcaccagggcaggagctgcagtagctaccctccccgtctccagcctgggctccccagatcactcccagatcaccaggtcaccccatctctaggcggcacctcacacaccagtcctgtggtccaacgccccgccatcacccaatgtcaccgcacaccaggcagtggggacacggcagtaagcacaagaaagatttttttttttttaaagctaaaccaggccaggtgcggtggctcatgcctgtaatcccagtgctttgggaggctgaggtgggaggattgcttgagaccagcctgggtgacacagcaagaccccatctccacaaacgtttttaaaatgtgccgggtgtactggtgcacacctgtcatcccagctacccaagaagctgaggcaagaggatcacttgagcccagaaggtcgaggctgcagggagctgtgatcacactgctgcactccagcctgtgcaacagagccagaccctgactcaatacaaataaaaaccaaatctaaaccaaaaaaaaaaaaaaaaaaaaaaaaaaaaaaaaaaaaaaa

SEQ ID NO: 1399 - DNA, 1257 bp, Homo sapiens
ctcagatattttgttgaacgtgggacctttgtttttttttgttgttttgttttgttttgtttttgttgttgttgttgttgttgtttaccagcaggggacccctgttttgtctatgtcaagaacaaagaccaggcaaaagaaatgtcaagccgcatttacaaatgcaaaaatggacttgtttttgatatgcttttcccaacaataagggacatgagtcattggggcatgttacagagagtttcagtaaaattcagaaaaaaataataaatatgaacagccacagcatgcccagaagcctttttatggagccaggcatggttgacctgctttccatgtctcaaaacattagtccctacaagaaccctatgaggtttatcttcttttcacccattttgagagaagaaaagttcagctcagagagctgcaggaacattggggacatctccaagtcacagccaataggtggcagtcatcagtgtgtcttggaagggacaaacattgagcttctgaacagctactccagaaactatggtgctgtggtgaagtcctggttaggagcctaggaaaatggtgaaggaaaagatggtcccagcctgcaaagctgaagtcaggaacccaccaggatctcccttctccctagcctggtggtccacatcatgcagatttactctagattcagcttagactcatttttatactactcgggggacaaggagggaactacagtcagtaacagcagcatgagcctcaggtgctttggggattgaaattcagaccaggaaattccaatacatcagtgcatgtggaggacatgagtatttaaggagaaggttctaggcttccgaagtaaaattggatgtggaggttggggattgattcaaacattaatactttcaagcgtttctatggtatttgtcagctgtggagcaacagcacacatctgtattaatagcctgtgttaagagattactgtgaatcctgaaaaacatcctcattgtagagatgagaaaacacaggcttttgcacatccaatgtctccttaaagcatgtggttcagaattgagaacgtgcagagtgagagtggtatgaattttcctgtaagctacctgaagttctgtttgctgtcatgtggaagaaaagagccttggagaagttttatttttttctgtttggaaagaatacccagagcaagatgatttccaataacccttttgccctaccgcaaaaaaaaaaaaaaaaaaaaaaaaaaaaaaaaaa

SEQ ID NO: 1400 - DNA, 3945 bp, Homo sapiens
gcggagtattccaggcgcctgcaactaaacgtggccgggtctgcaagctaggtgccagcggggaaagtttccctgcttcttatcgtctgctttaacgccttaaatagcccgctgaaggctgcagcaggtgctaggtagcagcctcccggccctcgggaaaggcggggtggggaggcgagagcagcttagcctcctcgacctcccttcctggtgacggacgaacagttcccgtagaatttcgcttcaccgagtgaccttgagcccagggcgacggtcagcttgttaattcctggctgcaggaactttgtgagaattttaatgcatggaaaagctgtccatgttccaactgctgtacatccaaaagtctcagtgtaatagcaggaccaaaatattctgtcaatcagctgaccatatacttaatgactcctaaaatctcgtggacttctaagaaagcgccatggcctgtgctgctgttatgattcctgggttgttgcggtgctctgttggagccatccgtattgaggctgcgtcactgagattgacactcagcactttgcgccaccttactctaaccagcataatgaaatccaaaaggaaaactgatcacatggagagaactgcaagtgtccttcgacgggagattgtgtcagcagctaaggtgtgtggagctgccagtgagtcaccgtcagtgaagagcctccgcttgcttgttgctgatcaagacttttcctttaaagctggccagtgggttgatttctttattccaggagtctctgtggttggtgggttttcaatatgctccagtcccagactgctagaacaagagagagtgatagaattggcagtgaaatatacgaaccaccctcctgccctctgggttcacaatacgtgtacacttgactgtgaagtggctgtgagagtgggtggagagttcttctttgaccctcagcctgcggatgcctctagaaacctcgtgttgattgcaggaggagtcggaattaaccctctgctttccatcctgcggcacgcagcagatctcctcagagagcaggcaaacaaaagaaatggatatgagataggaacaataaaactattctacagtgcaaaaaataccagcgaactcctgtttaagaaaaatatccttgatttagtaaatgaatttcctgagaagattgcatgcagtttgcatgttacaaaacagactacacaaatcaatgcggaactcaagccatacatcacggaaggaagaataacggagaaggagataagagatcatatttcaaaagagactttgttctatatttgtggcccacctccaatgacagactttttctccaagcaactggaaaacaaccatgtacccaaagaacacatttgctttgagaagtggtggtaggaggcagacaaaggcagaaaaaataaagaggtgagatctactcaggagagctcctgtcctttgtggcatgattaattttttttatctctacttgagttgtcttattttttaaggctataaacttagtgaccagctggataataaaagccagctggcagacttaaatgataaactttttgcaaagacctcagtgatcaaactattttttactatactgattttctgttattaacaacgatttaattgtctcatgatgtaccatgattggtcagtatagatttttcttttgtctttaggcaaaaaaaagatatatacttatgtctaatcataggaaaatgtgatttttgagtataaaatgtgggctagctttaaattatttgacagccatctatatatcttatgtttaatgaaagtataatttaaatacaatcttaataattttactttgaaaattctttttatttaatgcctttgtttactgtaccatggcctacagtcttatttggtccatcaaagttaagtttggacatggaaaattgttaggaaaactgctttagggagttaaatatccagcatatttgctttcttgttaatgaatatcctaagtgtgtatcctgactaattgttagtttcttctcaaatgaaaccctttctgtgtcttggctgtctgccttaacgctgtaggaggcagcttcttgcttgggacaaaggcattggtgatgtgttccatgttgaatctgccttcagtgcctgggctggcttgctatggaaatgtgcttagcattgattagggggtagagagctgtttctaaatcctgcttttctactttttatttcactcatttgccagaattgttcttggcaccagcagctccttaacatatagttgttgaatgactgaaagaaagcaactaatgttttaactccttgctaagtctgagattgggaggcagtcccctagagtggatagaaagaatggtggagcctcatcccaaagctgctctgatgaaactgctagaaagcagattgtagttctttgtttagatttttaaaaatccaaaagaagtcctgactgaggccaggccattccttttatgacaagtagtcctgggcccaaggttgcctgcatagagatcacaggagggtgaagggagcctgggaagaaggacagataagtgctggagacctaggagctccagttgagattctgttctggagcggatgagagaagacaggttaccctttcttatctttgttgttgcaggcctcccagggacttgtgggcttgaacagatatgattcatgggacctgaaggtgactctagcttctgcccagttttgagttttgtcaagttttaagcagagatcatttgtcaactattttgatcccagatttgaatttggggaggaagggaggagctactgacctgatgggaatatcataatccattcaaggaaatggtcattagtacctcagaggtgaagggaatatgtgaagctctggatcactacaaggagccctgacttaccagttggccccaaagtgcccaggctgagggcataggagcatgatgagatgcaaggatgtgggattatcaaggggcacgtctactaactggtgaaggcagtctgcgggggaggacacctaaaggtatgcggaaagtacctaacccagacctctctgcattaggagtggaggtgcaaagtgagcatctccagtgcagcatgggatgggaagatagggaggtgtcgcccactgtctcggtttagccagcaccacggctggctgtgtgcctgctactgtcagagagcaagggtcatctgtcctgcccagctatgcctgccaccctgttgctgactcagtattggcagaattgctgagatgggccaggtcatcacctttgcctggagtgttcatcctttcagtgccattattctggtgctaagtgctgaagaacattttcaggtctagccgagaatgtcctcttgctcttgcctgccaggcctgtccagatctttttggtacttaaattgagctaactccagccagagtggcttggaattcatagtgcggtggctcagagtataggctcgaaagcccttgagccagattgcctgggttcagatctcacctatactacttactaggtagatgaccttgagcaagtcacttaactgctctatgcctcatttaaaattacatacaactacatgtaaaagggagatgatactgctgcctacctacctacatgatagggctgttacggggattgaaggtgatcatacatgtaaagtgcttggcagagcactgcatgagtgtgttgtcgttattaatttgctattccttgtcctattcagaaaggatttcaagaggctggatgccttagatgtggtctaacttgaaaccttcatgtgggtgtgcgtctgtcttgtttattgctgtgccaggcacaaaataggtatttcataaatatttgttaatatgctcagagttgataagctggattaaagtgacttcttaaggaaaaaaaaaaaaaaaaaaaaaaaaa

SEQ ID NO: 1401 - DNA, 1657 bp, Homo sapiens
gacggaaaccagaatcgttttgggtctggtcgccaagatggcgtcctccgcctccgcccggactccggcagggaagcgagtgataaatcaggaagaattgcggcggttaatgaaggagaagcagcgtctgagcaccagtcggaaacggatagaatctccattcgcgaagtacaaccgtttggggcagctgagttgtgccctgtgtaacactccggttaagagcgagctcctgtggcagactcacgtcctgggaaagcagcaccgagagaaagtggccgagctgaaaggcgcgaaggaagccagccagggttcgtccgccagttcagcgcctcattccgtcaagaggaaagcgccggacgcagacgaccaagatgtcaagagagcgaaggccaccttggtgcctcaggtacagccctccacatctgcgtggaccaccaactttgacaaaataggaaaggagttcattagagcgactcccagtaagccttcaggactcagtttactccccgattatgaagatgaggaggaggaggaagaggaggaggaaggagatggagaaagaaaaaggggggacgccagcaagccgctctccgacgcacagggcaaggagcactcagtttcctcttcacgggaggtaacaagtagtgtgctgccaaacgatttctttagtactaatcctcccaaggcccccataattcctcattcagggtcaattgagaaagcagaaatacatgaaaaagtggtggaaaggagagaaaacaccgcggaagcgttaccggaaggtttttttgacgaccctgaggtagatgcaagagtacgaaaggttgatgctccaaaagatcagatggacaaagagtgggacgaattccaaaaagccatgaggcaggtcaacactatttccgaagccatagttgccgaagaggatgaggagggacggttggaccgccagattggggagatcgatgagcagatagagtgttaccgacgggtggaaaagctacggaatcgccaggatgaaataaaaaataaacttaaagaaatcctgaccataaaagaactgcagaaaaaggaagaagagaatgctgacagcgatgatgagggggaactacaggatttgttgtctcaggattggagggtgaaaggggcattgttatagggttttaaagacccaaggtttctaacagcctctgctgttgtataaaaagtgctgtctctcagtagtatagcggttacttcatgcctcaagatttgggtacctggattgctaaactggattgttgagataaaatgagccagtgagctacagcactttggaaaatttgtgtaacatgtttttgaggtaaagttgtttttgaaatttctgaagtgttatataccaaaatgccaacatttccacgacagacttaactgtataatttcgttgtaaaatctgtaagttgtaaatattgtacatagttaaatctgtattctgttttgaatttttttaattaatagaaagaccaaccggcaaactttcagatgaatgcttactgtggtatttggaatgtatgtatcttctgaaccctacatcaagttgaaaaggtttgttttcttgtttctttggtttttgtatggttttttagaacacttcataaacacataagtcattgtaggttaa

SEQ ID NO: 1402 - DNA, 1910 bp, Homo sapiens
aggtttcggcgggggctgcacgtgcgcaggggtgtggaaacttaccggctgagccatggatacaccgttaaggcgcagccgacggctgggaggcctaaggcccgaatcccccgagagcctcacctcagtttcgcggacgagacgggcccttgtggagttcgagtcgaacccagaagaaacgagggagcccgggtctcctccgagtgtgcagcgggctggcctggggtcccccgaaaggccgccgaagacaagcccaggatcaccccgtctgcagcagggtgcaggcttggagtcaccccaagggcagccagagccaggcgcagcgtccccccagcgtcagcaagacctacacctggagtcgcctcaaagacagccagagtacagtcctgaatccccacgatgtcagccgaagccaagtgaggaggcaccaaagtgttctcaggaccagggagtactggcctcggagttggcccagaataaggaggagctgaccccgggggccccccagcatcagctaccgccggtcccaggatcaccagagccttaccccggtcagcaagctcccggtccggagccctctcagccactactggagctgacacccagggcacctggctccccccggggtcagcatgagccgagcaagccacctccagctggggagacggtgacaggcggcttcggggcaaagaagcgaaaaggttcttcatcccaggccccagcgtccaagaagttgaataaagaggagcttcctgtaatcccgaaggggaagcccaaatcggggcgagtgtggaaggaccgctccaagaaaagattctcccagatgcttcaggacaagcccctgcgcacatcgtggcagcggaagatgaaggaacgacaggagaggaagctggccaaggactttgcccgtcacctggaggaggagaaggagaggcgccgccaggagaagaaacagcgccgggctgagaacctgaaacgccgcctggagaatgagcggaaggcagaggtcgtccaagtgatccgaaaccccgccaagctcaagcgggcaaagaagaagcagctgcgctccattgagaagcgggacaccctggccctgctgcagaagcagccgccccagcagccggcagccaagatctgagctcaggacggcccgaggccttccatggccaacgaccatgtcagacacagcacctcaggccgctgctcagatgcctctgctggagctggcactccaaacccatggctccagaacggggacccccaccccgaccggggctcctcggcctttgaaggcttccaggcaggtctgtgtgggacagaagcccagagggggcctgggacctggcagagatgggggcgggaagagattcagctcccatccctccttcctctccttctccaagtgccttcaaaccaagaactgtacattcttctggttcctcagtgagctggtgactggcaggtgactccctcagcagtgtatgccctttctcagcatcctaggtccatcccaggcctggaggctgacagttgggaatccagcttcccccacaccttcccaaaggctgctctgagcacctccacaccccactgcctctgtccccagcaaactgaatccggttcctctccacttttcaatactgaaagattaaaatggggaggttgcagggagcagagcttttccctagcacccactttcccaaaccagtctctgcagaagccccagagaatctaactcatgcctgtccagtctacagcaaaaatatttattgagtgcctgttgcatacaggcacaatcctaggcaccggcaaatacagacaatagaccaaagtccctgccctcgaggagctttcattctgatggagagaaaacataataaacaagcaaaatgcaaaaaaaaaaaaaaaaa

SEQ ID NO: 1403 - DNA, 2061 bp, Homo sapiens
atgaggcggacaggccccgaggaggaggcctgcggcgtgtggctggacgcggcggcgctgaagaggcggaaagtgcagacacatttaatcaaaccaggcaccaaaatgctaacactccttcctggagaaagaaaggctaatatttattttactcaaagaagagctccatctacaggcattcaccagagaagcattgcttccttcttcaccttgcagccaggaaagacaaatggcagtgaccagaagagtgtttcatctcatacagaaagtcagatcaacaaagagtccaagaaaaatgcgacccagctagaccatttgatcccaggcttagcacacgattgcatggcatcccctttagccacttcaaccactgcggacatccaggaagctggactctctcctcagtccctccagacttctggccaccacagaatgaaaaccccattttcaactgagctatctttgctccagcctgatactccagactgtgctggagatagtcataccccactggctttttccttcaccgaggacttggaaagttcttgtttgctagaccgaaaggaagaaaaaggggattctgccaggaaatgggaatggcttcatgagtctaagaagaactatcagagtatggagaaacacaccaaactacctggggacaaatgctgtcagcccttaggcaagactaaattggaaagaaaggtgtctgccaaagaaaacaggcaggcccctgtcctccttcaaacatacagggaatcctggaatggagaaaacatagaatcggtgaaacaaagccgtagtccagtttctgtgttttcctgggacaatgaaaagaatgacaaggactcctggagtcaacttttcactgaagattctcaaggccagcgggtcattgcccacaacactagagctccttttcaagatgtaaccaataactggaattgggacttagggccgtttcctaacagtccttgggctcagtgccaggaggatgggccaactcaaaatctgaagcctgatttgctctttacccaggactctgaaggtaatcaagttatcagacaccaattctaaatgtttgaagctttgtttctaaaagtaccttgaaatgatagagatgtaggaaaatatagttgtgggtggagagaggagtgagtttgtttaggtgggaaggtggcatgggatgaagttgtcattactgagcatcttctctgtgtaaataaagggcagtaccattgttaagacagtgggattggcatcatggctttccctcaggaaggtggtggctggtaaattccctgaatgagtctatgatgaacactgaggcagcacagtgggtatttatctctatgaaagtgccttttactcagcctgcacagagccatctctttgcccttccagatgtctgactgggaccttgcttatggatgtgtttttttttttttttttttgagatggagtctcgctctgtcgccaggctggagtgcagtggtgcgacctcagctcactgcaccctctgtgtcccggattcaagcgattctcctgcctcagcctcccgaatagcagggactacaggcatgcgccaccacgcccagctaattttttttggatttttagtagagacgaggtttcaccatattagccaggatggtctccatctcctgacctcctgatccgcccacctcagcctcccaaagtgctgagattacaggcataagccaccgcgcccagccagatgtgtgagcttttaatctctggctgatcttaacccacatcagcctaagcttgggatgattactcttgacccttttttttcagtgattagcaaatctccccacaacccaggtgtggagagaagagaggtagaatggtgctagtttcctattttatttttgtggtaactgtacagcactttaaagttatatactctatgtttaaatatctcccttaaaaagcctgagctgtacaacaatctggatgtgactctgttacccttttcccacaagataggagggaatcccctttgtaaaactatgaatccaaataaatgtttacaaagtg

SEQ ID NO: 1404 - DNA, 1348 bp, Homo sapiens
gcgagctcggcttcctcaacatggctgcgcccttgtcagtggaggtggagttcggaggtggtgcggagctcctgtttgacggtattaagaaacatcgagtcactttgcctggacaggaggaaccctgggacatccggaacctgctcatctggatcaagaagaatttgctaaaagagcggccagagttgttcatccagggagacagcgtgcggccaggaattctggtgctgattaacgatgccgactgggagctactgggtgagctggactaccagcttcaggaccaggacagcgtcctcttcatctccactctgcacggcggctgagggcccttctctgggcctgggcacccttagaggggagaacgaagcaatcagacatccccttgggccctgcttccaggtctccctgtcccccttgcctgccttcttccctgctctgtcccctaagctccctccaggcagggaaaagaggccaggtgctaaaaatgagcctttctcaagcacgtgagcagcggaaggcagacaggcgccagagcccagcactcccttttccagcagctgtggtgggggagggttcccctccagtttgtcaagagttgaaggaggctctgtggccaggtgacctggctgccttccaccccttgtacctcagtctaaacatggagtggccgctgacaaggcgctccagccccagagccagcgtcttcatggggaagatgaatggacctgagtagctgaaggaaggcccctccctacccaaagactggaggcttctcagcctcaatttccctgtctgtacagctgagggctctgcctgtcccccactgctatcagtatggaaccccagctggggtcccctattgagtgccgactccccccaccgccagcagctgctcctccagccacacccctcctgctccccccacccctagcccttgaccctggctggcctgccccgctccacaggccaccagatgggctcctgagaccctccccaggctgcttacagctcattctgctgggggtagagatgaggggagggagtaagttaaaccttggactagcaagtagaagcctggggggatgcgtgtgcctcagtttcctcctccacaactgaatatttatagtggctgaaaactggggagatacttgatggcgcgaatgtccgttttctctcccttcccacctcctgcaggaagcaggacggggcaggcagcacctggtaggcacagtgctttgcccctcctccccttcccttctggaagtcttggggcctcagtgcttgcaacagccggccttgggcaaataaaagactaggttgtttactaaaaaaaaaaaaaaaaaaa

SEQ ID NO: 1405 - DNA, 3082 bp, Homo sapiens
cccttcgcggccgagatggaccctgggctcggcgtcctccggaaaactgcactgtgaggcggggcgatggggaagggccgaagccccgccagcccagctaaagcagacggctcgcactgcgacccgaagcgcgagtcatggctggggccttagtggcaacaagtgctgagatcagcgggctcagtagcaggaacacaagcacccccttgcggtgtctggaggaagcggcgcggacagtctcccgctccaccgtgtcgggcctgaagaggccgctgaacgctcgcgattactgaggcatctggtaggatcgcaaggccatcaacctacaggtgaagctcgaggcgctgtggcgctttgaagccggagagaagctcagtagaatcgggaaggcgctggggctgtccaactccaccttggccaccattcgtgacaacaaggaaaagatctgggcgagttcccaggaggccacactgcaggcggccaccaagttgacgcgtggccgcagcctggtgatggagaacatggagcagctgctgagcatgcggatggaggaccagagccagcgcaacatgcccctcagtgtggtgctcattcgggagaaagcccacagcccgttcgagaaccgcaagcaggagcagggcgagggcgcctagcccgagagcttcggggccggtcgagggtgattcgctggctttaaggcgcgccacagcttgagcagcatcggggccagcggcccaagaacgcagcgtgcaagaatccagcgttaatgcgcagggtgatcccggagggcggctacacactctggctggtgttcaccatgaataagctctggctggtgttcaccatgaataagcccaggttcctctgtaagcgcctgccgagaggacgttcattttcctgtggaagatgagtcggcccctgggtcaaagccgccggagacctcctgaccctattgctcggtggcaacgcagccggcgacttcaagctgaaggccctgctggggtacccctcggagaacccgtgtttcctcaagggctccttcaagcccaacctgcccttggtgtggtgctcgcacaagaaagcctgggtacagcctgggtgacagagcgagactccgtctcaaaaaaaaaaaaaaaagcctgggtaaccatgagcctcttccaggagtggttcctgcacttctgctctacagtggagggcgctgcacccagtacgaccttccctacaaggggctgcccatcctggacagcactcccggccaccctgggtgttgagacagagtctggctctgtcgcgcaggctggagtgcggtggcgcgatctcggctcactgcaacctccgcctcccgggttcacgccattctcctgcctcagcctcccaggtagctgggactacaggcgcccgccaccacgcccggctaatttttttgtatttttagtagagacggggtttcaccgtgttagccagaatggtctcggtctcctgaccccatgatccacccgccttggcgtcccaaagtgctgggattacaggcgtgagccatggtgcctggccctttaattcccccaatatttttttatctgcattaatttattatttcaagtgaacttccatctcaaatacatggttctcagacgcttccatgaactctcaagtgtgacttattacagcctggggctccttggagcacagtgtgccagtgacctagtggaaggccatgagaaagccaggttcactgttcactgtgcagcatctccctccatggtcttcctggagcctattcccactgcactgagcattccgtgtgtccagaggtagggttagcagggatagatggacttcctgcttattttctgttcacatttccactgaccttcaatcctgtagactgcaaagattgagccagctgagcccccaaagagactcagcagtgcagaatgtgggcctgagtgggaggactgcccagccgcacaccttccagctctgttcttcccgggccctggatgcttcttgccacgctgtcctctgaaatgacgctctgccccagcagacctgtggtaggtgagctagtgaggaagcacacctgggctcttcccaccaggcatcccagccctggtgtggggtatccgcatggttgcaggcatcccctggccaggcctgggtgctcattctccctctctcttcttgtctcctcccctctccctgctttctctgccctgtcctcctcctttttgctgttttcccccggactcctgccatgcccccagactttctttttcccacggatatgggctcattccaaggaaagggtggcatttggacacaaggccctagatcccacgatggaggactggggggtacctgatgcccctcagaaagaggcctgcagggacagcacatgggaaagccccatggctttgtgatccatctggggatgtgatccatttgggtaaggacttgggtttcagggcatgagttggcttccttgcaggatgcaggtccttaggtgggtggcctctgtctccagctgtagggccctgccaggaagcctctatatgagcctacctccctcctgcaggaccagagaggggttgttatgaacagcccaggggattggttgcactaagcttgtcttgaagctttggctggggagtccaggtgcccatgtctctcacctgctccccatacacatctctgcacacctggctgaggcattcccagacctaacctcagataatgtgcatgtgatgaacactcccaagtggctaggcctcttgcacctgagcaggtggattctgccccagcactggggctttctctgggctgtccatcatgggtatatctctggattccaggattgctagttagcacctcacatttgagggtctgtgctattcagtctagaatcagagttggatgagaaatcaactttgaacaccacctttggggtggctgcattggctcacacctgtaatctcagcactttaggaggctgaggcaggaggatagcttgaggccaggagttcgagactaaccggagcaacatagtaaggccacatctgtacaaaaaaaaaaaaaaaaa

SEQ ID NO: 1406 - DNA, 4380 bp, Homo sapiens
ccttctgcgttcccagcgcgcggcccgaatggcggccgacaagggcccggcggctggacctcggtcgcgagctgccatggcccagtggaggaagaagaaagggctccggaagcgccgaggcgcggcctcccaggcccgcggcagcgactcggaggacggcgagtttgagatccaggcggaagatgacgcccgggcccggaagctgggacctggaagacccctgcccaccttccccacctcggaatgcacctcggatgtggagccggacacccgggagatggtgcgtgcccagaacaagaagaagaagaagtctggaggcttccagtccatgggcctgagctacccggtgttcaaaggcatcatgaagaaggggtacaaggtgccaacacccatccagaggaagaccatcccggtgatcttggatggcaaggacgtggtggccatggcccggacgggcagtggcaagacagcctgcttcctcctcccaatgttcgagcggctcaagacccacagtgcccagaccggggcccgcgccctcatcctctcgccgacccgagagctggccctgcagaccctgaagttcactaaggagctaggcaagttcactggcctcaagactgccctgatcctgggtggagacaggatggaagaccagtttgcagccctgcacgaaaatcccgacataattattgccacgcccggacggttggtgcatgtggctgtggaaatgagcctgaagctgcagagtgtggaatacgtggtgttcgatgaagctgaccggctttttgaaatgggtttcgcagagcagctgcaggagatcatcgcccgcctccccgggggccaccagacggtgctgttctccgccacgctgcccaaactgctggtggaatttgcccgggctggcctcacggagcccgtgctcatccggcttgacgtggataccaagctcaacgagcagctgaagacctccttcttcctcgtgcgggaggacaccaaggctgccgtgctgctccacctgctgcacaacgtggtgcggccccaggaccagaccgtggtgtttgtggccacgaagcaccacgccgagtacctcactgagctgctgacgacccagcgggtgagctgcgcccacatctacagtgccctagacccgacagcccgcaagatcaatctcgccaaattcacgcttggcaagtgctccactctcattgtgactgacctggccgcccgaggcctggacatcccgctgctggacaatgtcatcaactacagcttccccgccaagggcaaactcttcctgcaccgcgtgggccgtgtggctcgggctggccgaagtggcacagcctactccttggtggcccctgatgaaatcccctacctgctggatctgcacctgttcctgggccgctccctcaccctcgcccgacccctcaaggagccctcaggtgtggccggtgtggatggcatgctgggtcgggtgccacagagtgtggtggacgaggaggacagtggtctgcagagcaccctggaggcatcgctggagctacggggcctggcccgcgttgctgataacgcccagcagcagtatgtgcgctcacgcccggcgccctcgcctgagtccatcaagagggccaaggagatggaccttgtggggctgggcctgcaccccctcttcagctcgcgttttgaggaggaggagctgcagcggctgaggctggtggacagcataaagaactaccgctcccgggcgactatctttgagatcaacgcctccagccgagacctgtgcagccaggtgatgcgcgccaagcggcagaaggaccgcaaggccatcgcccgcttccagcagggacagcaggggcggcaggagcagcaggagggcccagtgggcccagccccgagccgcccagcactgcaggagaagcagcctgagaaggaggaggaggaggaggcgggagagagtgtggaggacattttctcagaggtcgtgggccggaagcggcagcggtcaggacccaacaggggagccaagaggcggagggaggaggcccggcagcgggaccaggaattctacatcccctaccggcccaaggactttgacagcgagcggggcctgagcatcagcggggaagggggagcctttgagcagcaggcagctggcgctgtcctggacttgatgggggatgaagcccagaacctgacgaggggccggcagcagctcaagtgggaccgtaagaagaagcggtttgtgggacagtcaggacaggaagacaagaagaagattaagacagagagcggccgctacatcagcagctcctacaagcgagacctgtatcagaagtggaaacagaaacagaaaattgatgatcgtgactcggacgaagaaggggcatctgaccggcgaggcccagagcgaagaggtgggaagcgagaccgtggccaagcaggtgcatcccggccccacgccccaggcacccctgcaggccgagtccgcccggaactcaagaccaagcagcagatcctgaagcagcggcgccgggcccagaagctgcacttcctgcagcgtggtggcctcaagcagctctctgcccgcaaccgccgccgcgtccaggagctgcagcagggcgccttcggccggggtgcccgctccaagaagggcaagatgcggaagaggatgtgaggaccaggacccagccccgtggctccttgattggccttagggtgggcatcagcagacgttcccgtgcaccactgtgtgcctggccctgtgctgggcactgggggcactccctgcaggagccatcatctgtgaaaaggagcactgtatggccacagaagggcagcagctgcgtcagcctaagacagagacatttgaacagggccttgaagggtgtgcaggagttcgccagcaaagccaggcaggccaagacttgagttggcaactcagctgctgctgcttccatgtgttctgggttcagaggtcatggctgcaccggtcagagccctgagtgcctcagggtttggcaatggaatttttaatgtaataaatctttattgagcactgctggtggccaggagtgcggtctacttggggaactggaatggagagacccaggtactaaaatcccagctaacgtggcagaggagttgcgggtctcctgagggtgagttctgctgccttgtccatttagcgatgaggaaagtgaagctcagagcacaaaccaggtgccagaggcgggagttggtcccccttcctcccactggacatggttgcagctgggagtgggctgggggaggggaacaggatgcccagcccagggggcaaggacacagctgctcccctctggctatgaagaggttaacgcggcccctccacacctggaggtcagaacctggcctgtcctctgtcttcttgccacccaccccctgtttgaggttctgagaaggtcaagggcagccccagcagctggattctcaggctgggcccctcacctggcagagtccatagtggagggggccttggtgatctctcatctagcatggaccctgttctgagacctgacaaagagttttttttcatgccccaaccaccctggcagggagggcctggtctgatctcattttagaggcagttgccccacacatagccccttgaccttcccatcacctcctcatcagggcctgcatttatggagtgcttgctatgtgcccctcatggcaggcccacagcactctgaacaggcacagccctcccatcttcccaatgaggaaacggattcaggaagagccactcagtccacaccccattggaaatgtgggccctcctatctcagggtctctcaggggttccctctcccgctgctcacctgtgtcagggctaggaggcaggggctgcaggctcagcctgacccaggccggccagcatggcagagaggtcctgcatgaacagcttcacctgggggggcccagcacgaagtcacatcccagccccagagtcactgtccagcccccacccctcaacacgcgggggaggccgaaaggtagggcggggactggagatcccctcattaaaagaacagtgatgatggtggttcccagaggtggtgactgagatcctaaaccgttctgggttttgaaagcctcaggccaaccttcccaactgctgcgtgagcagacaccttcacagcttcctcgctgctgtcacctgcactatccaattagtattttcatttacatcaatcagctttattttcttgtaactggatcagtcatattcattggtttgtgacctactcttatctccgtgggtggctctccttttgttttaattaacttctttatgaatatgaacttaataaataccatggatccattgtaaaaact

SEQ ID NO: 1407 - DNA, 2041 bp, Homo sapiens
aggagggagcaggcggccggcggcgcggggggagggggcccggtccgggagtgcgggaggcagtggtagagggaggtggcggcagcggctagcggactcgagtctcaaccgggctgaggcggacacttctgtggagcgaagcagtgggagcatcgagcactagaggcggcaccgggatccccggctccggggaggggggcgccggaccgggaggaggggagggggcgatgctggaagccatggcggagcccagtcccgaagatccacctccgacccttaagccagagactcagccaccagagaaacggcggagaacaattgaggatttcaacaaattctgcagttttgttttggcatatgctggttacattccccctagcaaagaggaaagtgactggccagcctctggctccagctctccattgcgaggagagagtgcggccgacagtgatggctgggactcggccccctcagatcttcgaaccatccagacttttgttaagaaagcaaagtcatccaagagaagggcagctcaagcaggtcccacccagccaggacccccaaggtccactttctctcgtctgcaggcccccgacagtgctaccttgcttgagaagatgaagctcaaggactctctctttgatctggatgggcccaaagtggcatctcctttgtcccccacatccctgacacatacctcccggccccctgctgctcttacccccgtgcccctttcccagggggacctctcccatcctcctcgaaagaaggaccgaaagaaccgaaagttggggccaggagctggggctggctttggggtgcttcggaggcctcggccaactcctggggatggggaaaagagatctcgaatcaagaagagcaagaagcggaagttaaaaaaggcagaacggggggatagactcccacctcctgggcctccccaggcaccccccagtgatacagactctgaagaggaggaggaagaggaggaagaggaagaagaagaagagatggcaacagtggtagggggtgaagccccagtccctgtgctgccaacaccccctgaggctcctaggccccctgccacagtgcaccctgaaggagtccctcctgctgacagtgaaagcaaggaggtgggcagcactgaaacaagccaagatggagatgccagctccagtgaaggcgagatgcgggtcatggacgaggacatcatggtagaatcaggtgatgactcatgggatctgatcacatgttactgtcgaaagccctttgcagggcggcccatgattgagtgcagcctgtgtgggacgtggatccacctctcctgtgctaagattaagaagaccaacgtccccgacttcttttattgccagaaatgcaaggaactgaggccagaggcccggcggttaggggggcctcccaaatctggagagccctgatggcaccaactttagcctggaacttccaaatgacaacatgatttgggaactgagcctcagggtcctcagcctatcccctggagcttggatactgtctgcacttcaaggcaggaattctcaagggagacttgtttgaaaatgagtgtctcactttcccaccctatccttcctccccactctgtggacttgaaattgaatccattacggttggggatgggaggctgtctgtgtcccgacacataatctctgtctcttggacctgccaccatcactttctgggtcaggattggaattgggatggaatgggacagttgtctataaaactctagtgtaaatattagcactcccctccctcatcttttcttctatttcactccccatttattttcttctacaccggttgtatttttaattttggacttcccctattgggcatggcagctcaaaggtggagtactagagcctggccaagtgaggaaggaaagcagaaaggtgacgattctcactcacctcttttgtttttaataatatcggccgctgtttgtacagacagcctgcgtgttgtaaataaagcagagtgggctcttttgtgtttataaaaa

SEQ ID NO: 1408 - DNA, 3399 bp, Homo sapiens
atgcagcaggccggcaggtcaataaacttgcttgcctgactttgagtatactcgtcttttctcttggccaaccttacggtagctgtaccagtttgcatttccaccagcaatgaatgagagttcctgttgctctgcatcctcaccagcatttggtgtggtcagtattttggattttcaccattctaatagagattcacggatccatccgggtggtccgggcaccactggcgcccctctgcggctattccccagttccattttctgaagccacaggtcagaagccgctgtacaacactttgccgaactccagaatcttgaaggagacgtaaggagcagccacctgccgcgcaggcgcaagcctttctttcggcacaaagaccgtgggaggaggggtcggcgcaagcgctcggtgtctctctgaaaagaacttcatcatactgcctcctggctgacggagcgcagcgcaacgcatgcgccttgaagacttatggaacttatttcacgctcagggcggcggtgacgtgtgaacgagaaggaggtggtcaaggaacggaagccgggagggaacgagggcggaagcggaccagggccaggcttgtgttcgcagccttgccggggctggggttccgatgtggtccccggagcgggaggccgaggccccagccgggggagacccggcgggccttctgccccccgagtgggaggaggacgaggagcgcatgtccttcctgttctccgctttcaagaggagtcgcgaggtgaacagcaccgactgggacagcaagatgggcttctgggcgccgttggtgctgagccacagccgccgccagggggtggtgcgcctgcgtctgcgggacttgcaggaggcctttcagcgcaaggggagcgtcccgctggggctggccacggtgctgcaggacctgctgcgtcgaggggagctgcagcgggagtcagacttcatggccagtgtagacagcagctggatctcctggggggttggggtcttcctgctgaagcctctcaagtggactctttctaacatgctgggagataataaggttccagctgaggaggtccttgtcgctgtggagctgttgaaggaaaaggctgaggaggtgtatcgtctgtatcagaactcgcccctctcctcccaccccgtggtggccctgtcagagctcagcaccctctgtgctaactcctgcccagatgagaggaccttctacttggtgttgctgcagctgcagaaggagaagagggtcacagtcctcgagcagaacggggagaagattgtgaagtttgcccgagggccacgtgccaaggtctctccagtcaatgacgtagatgttggggtgtaccagctgatgcagagtgaacagcttctctcacgcaaagtggagtccttatcccaggaagcagagaggtgtaaagaagaagcccgccgggcatgccgagcaggaaagaagcagctggcactgaggtctctcaaggccaagcaacggacagagaagcgcatcgaggccttgcatgccaagctggacactgttcaaggcatcctggaccggatctatgcctcccagacagatcagatggtttttaacgcctaccaggctggggtaggagcactcaaactctccatgaaggatgtcacagtggagaaggcagagagcctcgtggatcagatccaagagctctgtgacacccaggatgaagtttctcagactctggctggtggggtaacaaatggcttagattttgacagtgaagaactggagaaggaattggacatcctccttcaggataccaccaaagaacctttggatctgcctgacaacccccgcaataggcattttaccaacagcgtgcctaaccctaggatctcagatgctgaacttgaagctgaacttgagaaactgtccttatcagagggaggtttggtcccaagcagtaaatctccaaaaaggcaattggaaccgactctaaagccattgtaggaccctcaagtgaaggaccctcatgtaaaagagagaccaggcttgctgggtgtgtacatagttatttaaacaagaaactctcagaatgtgtttggaagaggagaaaggagaaccactgattttatctggatgctactacttactacaggacagatagaatttctggaagcgatgctccaaaggcttgctcccagctgtatcatggacctgccttctcatctttatagtgccacgatttatacagtcctgtgtctgacctgtcatttcatagcctgcagttcttgccattggcacacttagatttgtcttcacccaccagcttcgttccagcccatgaaggggaaagatttgcagctttgccaaatctgaatcagttcccactcccccctgcggttttttagaggggtttatcctgtcgctaatgtcagttaaatagcttattcctgtcccacttgatttcactggtaagaatgagaatgaaatacttaaaggttttatttgaggggacttagctgccattttatggaaaaacatgtagtataaaaggtttttctccagggtcatttgacagaattctccaggtgttcagagaaagaggtcgccccaagtggcccagagtcgtgacagtccggaggggctggtgtggccggtgggcgctgcctcttcatctgatggagccaggaggtccgccggtgggggaaaggcttcttccgaggcttctgcactcgcctgggaagaggcccagtcactacaggaccctgagatgtccagaccccttatgcaaagaggcaaaattgttgccttggccccatcatggagtaacttaaaaatacatatctatcttccagaacaagccacacaacaacacacctcccctccttgagcctggcacacagcaccgggctctctgaatttggaaagtgtttcattttgtggcctactgctcggggcaggggggctgagccaggatgtgcaatagaagcaggggttgtcccctctgccagatctgtggggagctgcccaggccacccgtgcacctgtcctgcttcctgcagtccccactccctgcctcctttgagggactgggggactcggggtagggggacagacgggaaagggtctgaatgctctggcaatggcgagaagaagcgatcgccacactgccactctgctgcccagccaccaggatttctgcctggagccctttgccctgtccctgctgcctgaggtggcgtagagcagaggagaagaatttgctccaggccaggagcacaaatcgttgttcaatgaatttctctccaactcgaccttggtaaacggaaatgttgggggtgaagagaaacaatcactatttttttcttttttatctggtaaataattaaaagaaaaaccgaaaaaaaaaaaaaaa

SEQ ID NO: 1409 - DNA, 1792 bp, Homo sapiens
gcttccctgcttgatctgtgtaccctgctctttctccttcattccgcagcctcctttgccctgtgacctgcaggtactggacggtccctagagaggataccgggacgctcctgaagccgcgagatgatttcaagcagatgcagcctgaccattagggccaaggccaaattgcaaaaaaaaaaagaagtttgcctttattctactccatccacatctaaactttggaggtcaaggctgtggacagatcagaagacatagttccctccttctggggctccacatccttcattcactgatctctgggaaggaggatgggtggcaggatgggtcttccatgatactgaagggagagccacatgttgatgcccaggaccagctgcctccttggtctgaaaggcctgatcgaggccaggattggctatgagagctgggaaatgggaccatctttgaagccatgggagagggtgagagccaccatcactcatgttcttgaatgggaactgcctggagaccctgaagaagaaggagcctgaaggaggaaggaggaggctgagccatcccgggaacatgggctggatgaggccaagccaggagacgacaccaccagatagaagtcaccattcaggatttggacttttctgtggagatcctggccccgagatcgaacccttctccctgtgggtgttcccgcaggagatggtgctggagatccaccagctgttcatggaccatgaatacccatgtcaccacatcacttctcactgcacctgggtggcagcacactggaccacgtctcagagctgcgcagcatggcagggctgcaggcgggcttgctgctccacgtggtggaagagccctgcacaatgcacaaggcccacggtgatgagtgccacatttgagactgctcaggagcctggacccagctgatgcagctccttgtccttcctgagcgtcttcactgacagtggcctgagagacggcaggagcagaaagacttggagatggaccccaccgactgcacaccacccaagtacatcctgctagggaccctggaacagccactgtgtcccctgcaaccccagaacggtgactaaaagcccctgaaagtgctcaccgtgagcggctggtacctgtcccctgggaactgcaagatgcacaggaccttgtgtacctgtttgtgatcacagccgaggaccagcgaggtagcattaccacatccacacagggcttttaccataaccgccccagtactggaacgaggagctgcagatgatgagggacctacccaacaagaaccaacctgagcagctgcttcaagaaaaagccatgttcaaggtgcctgaatcccctggtaagtgagtgacagcctcacagcctcaggcccacctggctcctgctggaaggttttcttgtgctcgggagagaagtgagggaagccggcagtcccagccctgtcaggtgccctgaaggcccgtcaggtttgccctgcaaggccttctagcattctgcttcctgggagaccatcccccacctttctccggcctctgagactttgagtccttgggaggagaaggccctccttgctatctgggctgagtggccagggccatccagcttcccaccctccactgactgccatggggccctcccctgagcacatggtgcccaactgtagcccttctagggcaggggctcattggcagcacttgcagcttgctggcacttaaaagtcattagtgcggttactgagagaaatgaggaaaaaataattgttaaaaaaaaaaaaaaaaaa

SEQ ID NO: 1410 - DNA, 1505 bp, Homo sapiens
gcacgaggccagcttggccagtggctccgcaggctgccggctccacccctcagggactggctggcttcgagcagggcatcggaaccaggcctcctggcactggcctgggtagagccagggcgagcaccagctgacccccagtggaaccctgtgacagtcctgccagggcccaggccatcccaaccgacttccatctcatggaccctccagcggagaagccgggagaggctggcggactgcagatcacaccccagctgctgaagtcacgcacaggcgagttctccctggagtccatcctgctactgaagctgcgtggcttgggactggctgacctgggctgcctgggagagtgcctgggcctggagtggctggacctatcaggcaacgcgctcacccacctgggcccgctggcctccttgcgccagctagctgtgctcaatgtctccaacaatcggctgacgggcctggagccactggccacctgtgagaacttgcagagtctcaatgccgcaggcaacctactggccaccccgggccagctgcagtgtctggctgggctaccgtgcctggagtacctgcggctccgagaccctttggcccggctcagcaacccgctctgtgccaacccctcctactgggctgcagtccgggagctgctgcctggcctgaaagtcatcgacggtgagcgtgtgattgggcgtggtagtgagttctaccagctgtgccgagacctggacagctccttgcgtcccagctccagtccaggccccagagccaccgaggcccagccctgggtggagccaggctactgggagtcctggcccagccggagcagctccatcctggaggaggcctgccggcagttccaggacacactgcaggagtgctgggacctggaccgccaggccagcgacagcctggcccaggcggagcaggtactcagctctgcgggccccacctcttccttcgtcttctgaacgtggcctatggcccaggacagcctggcaggtggcctcgctgcccccagttcccctctctgcccccacactcgtcttagttgcttcacactggtcactggccctgcacactgggctattgctttatccctatcctgagagcagcccctccccaccatccctccacatgctgcaaggacagactgaagggctgtgagcaggtgtaagggctcccacatccgtgagcctgtgtccgcagctgctgccactctgggctgctccagcctgcaacttagtggaaggaattacttcctcctgaggctacaggcgagaaaggtagggatgggccagcctcccgtctcagctgttgggagacagtaggcaggctgagtggcccagagcactcctggaagtgggactcccctgccttgcaaatgtgcctctccagactgctcctgcacttaccccctccccgcagcaccttctctgcccgttcttgtccacacatctattaaatgcttctgttttcaaaaaaaaaaaaaaaaaaaa

SEQ ID NO: 1411 - DNA, 1122 bp, Homo sapiens
aacatgatctctagactgggacggtggggttcctgccggctgtattcgggtcttggactggactgagaatctacggtggagaccatccatggaaaagaacccccctgatgatacgggccccgtgcacgtgcctttggggcatattgtggccaatgagaaatggcgcgggtcacagctggcgcaggagatgcaagggaaaattaagctcattttcgaggatggcttgacaccagacttttatctgtcgaacagatgctgcattctttatgtcaccgaagctgatttggtggcaggaaatggctacagaaagaggcttgttcgggttagaaattccaataatcttaaaggaattgtagtcgttgaaaaaacccggatgagtgaacaatacttcccagccctacagaagtttactgtgctggaccttggaatggtgctgcttccagtggccagccagatggaagcatcctgcctcgtcatccagttggttcaagagcaaaccaaagagcccagtaagaaccctcttctcgggaagaaacgggccctgctgctgtctgagccttcgctccttcgaaccgtgcagcagatcccaggagttggaaaagttaaagctccccttctcctccagaagtttccaagcatccagcaactgagtaatgcttccattggggaactggagcaggtggtcggacaagcagtggcacagcagatccatgccttcttcacgcagcccaggtgagggctggcctcagggccacggcatcttctcccgagaccacaaacaccaggatcttgttttcagctttaaaaaccaagagaatgggccgggtgcactggctcacgcctctaatctcagcactttgggaggccgaagacagcggatcatctgaggtcaggagttcaagaccagcctggccaacatggagaaacccctaaaaataggaacaattagccaggcatggtgacaggtgcctgtaatcccagctacttgggaggccgaggcatgagaatcacttgaacccgggaggcggaggttgcagtgagctgagatcgtgccactgcactccagcctgggcaccagagcgagactccgtctcaaagaaaacaacaaaaaaaaaaaaaaaa

SEQ ID NO: 1412 - DNA, 3177 bp, Homo sapiens
ccccgctcccaagtgcgcgcggacccctagctccctctgagttgcgctgggcttggctgctgcaccatgaccctggaggcgatccgctactcgcggggctccctgcagatcctagaccagctgctgctgcccaagcagagccgctacgaggcggtgggctcggtgcaccaggcctgggaggccatccgcgccatgaaggtgcggggcgccccggccatagccctggtgggctgtctcagcctcgccgtggagctgcaggcgggcgccgggggaccgggactcgccgcgctcgtggccttcgtgcgcgacaagctgagcttcctcgtcaccgcccggcccaccgctgtcaacatggcccgcgccgcccgcgacctggctgatgttgcagcccgggaggccgaacgggagggcgctacggaagaggcggtccgggagagagtgatctgctgcaccgaggacatgctggagaaagacctcagagacaaccgaagcattggggacctaggagcccgccacctcctggagcgggtggcccccagcggtggcaaggtgactgtgctgacccactgtaacactggtgctctggccaccgctggctatggtacagccctaggtgtgattcgctcactgcacagcctgggccgcctggagcatgccttctgcacagagacccggccctacaaccagggagcccggctgacggcctttgagctggtctatgagcagatccccgccacccttatcaccgacagcatggtggctgctgccatggcccataggggcgtgtcagctgtggtcgtgggagctgaccgcgtggttgccaacggcgacacagccaacaaggtgggcacctaccagctggccattgtcgccaagcaccatggcattcccttctacgtggctgcccccagctcttcatgtgacctccgtctggagaccggcaaggagatcattattgaagagcgaccgggccaggagctgaccgatgttaatggggtccggattgcagcacctgggattggagtttggaatcctgccttcgatgtcaccccccacgacctcatcactggtggcatcatcacagaactgggggtctttgcccctgaggagctccggacagccctaaccaccaccatctcttccagggatggaaccctagatggaccccagatgtaaccaactcagctctccctagcctgcctctctaggtttttcaatacatttcttgaatggctacccaaaagctgaccgtccagcccctgaccacacttgttcctagtgcagggagctcagacagggccttccatctagagcccagcacctagagccaggctgcccagattcaaatcctgactccgccacttttcccactgtatgatcttgggcaagtcacttcacctctctgtgccttggtttcctcatttataaaatgtggataacaggccgggcgcagtggctcacacctgtaatcccagcactttgggaggccgaggcaggtggatcacaagatcaggagattgagaccatcctggctaacatggtgaaaccccatctctactaaaaatacaaaaaattagccgggtgtggtggtgggcacctgcagtcccagctacttgggaggctgaggcaggagaatggcgtgaaactgggaggcagagcttgcagtgagccgagatagcgccactgcactccagcctgggcaacagagcgagactccgtctcaaaaataaatataattaattaattatttaattaaaaaaataaaaaataaatgtggataatactagtacctccctcttaaggtcagggctggagctagggtgacatctccagggcagaattttaagaggacaccaaaaaagctcagcaaccaagataaaaaatattttaaagcaatattttgttttgggttttttttttttgagatcaagtatcactcgttacccaggctggaatgtagaggcgagatctcagctcactgaaacctgtgcctccccggttcaagcgattctcctgccacagcctcctgagtagctgggattacaggcatgcgccaccatgcccagctaatttttctatttttagtagagacatgatttcaccatgttggccaggctggtctcgaactcctgactcaaatgatccccctgcctcagcctcccaaagtgctgggactacaggcatgagccactgtgcctgaccttacagcagtattttttaaaaatcaaaattaatgcaaaaatccatgatgaggccaggcttggtggctcatgcctgtaattccagcactttgggaggatcccttgagcccaggtgtttgagaccagtttgggtaacataggaagagcttgtctctacaaacaaaaatttaaaaacaatgagctgggcatggaactcacacctctagccccagctactcaggctgaagtgggaggatggcttgagcccaggagttcaaggatgcagtgtgctttgattgcactactgcacttcaccctaagcaacagagtgagaccccatctctttaaaaaaaaaaaaaaatccatgatgaacaaaacaagtatttgtttgagacggggtctcgctctgtcgcccaggctggagtacagtggtgccatctcagctcactgcaacctccgccttctgggttcaagcgactctcctgcctcagcctcccgagtagctgggattacaggagcctggcactatgcctggctaatttttgtatttttattggagacaccatgttagtcgtggctggtctccaactcctgacctcgggtgatccgcgccccgcggcctccgaaagtgctgggattacaagcgtgagccaccgtgcccggcctaaataaaattttgaagaggctagaaccccgcacttgtgccttgagcttactgacctcaacaccctggttccactaaaactttatttacaaaattatgctgccggtctgcaggatgtagtttaacaatttgattattttggatattaaaatattttttaagtcttgaaaatattgtttactattaccaaagtttttgaaccttcttaaattctgtaccagaggtgagtgccacaccctaacctagtctgagtttttatgtgtaaagatcataaaacgttgtaagttttctaaaacacataagctctcaataaacgttagcttatcattgtca

SEQ ID NO: 1413 - DNA, 3036 bp, Homo sapiens
ccccgctcccaagtgcgcgcggacccctagctccctctgagttgcgctgggcttggctgctgcaccatgaccctggaggcgatccgctactcgcggggctccctgcagatcctagaccagctgctgctgcccaagcagagccgctacgaggcggtgggctcggtgcaccaggcctgggaggccatccgcgccatgaaggtgcggggcgccccggccatagccctggtgggctgtctcagcctcgccgtggagctgcaggcgggcgccgggggaccgggactcgccgcgctcgtggccttcgtgcgcgacaagctgagcttcctcgtcaccgcccggcccaccgctgtcaacatggcccgcgccgcccgcgacctggctgatgttgcagcccgggaggccgaacgggagggcgctacggaagaggcggtccgggagagacgtgaaacggagctatgcgagcattgggaagagcataccaggcagagggaactgccactgcgagggcccctgggcgggactgtgctcgagacccggccctacaaccagggagcccggctgacggcctttgagctggtctatgagcagatccccgccacccttatcaccgacagcatggtggctgctgccatggcccataggggcgtgtcagctgtggtcgtgggagctgaccgcgtggttgccaacggcgacacagccaacaaggtgggcacctaccagctggccattgtcgccaagcaccatggcattcccttctacgtggctgcccccagctcttcatgtgacctccgtctggagaccggcaaggagatcattattgaagagcgaccgggccaggagctgaccgatgttaatggggtccggattgcagcacctgggattggagtttggaatcctgccttcgatgtcaccccccacgacctcatcactggtggcatcatcacagaactgggggtctttgcccctgaggagctccggacagccctaaccaccaccatctcttccagggatggaaccctagatggaccccagatgtaaccaactcagctctccctagcctgcctctctaggtttttcaatacatttcttgaatggctacccaaaagctgaccgtccagcccctgaccacacttgttcctagtgcagggagctcagacagggccttccatctagagcccagcacctagagccaggctgcccagattcaaatcctgactccgccacttttcccactgtatgatcttgggcaagtcacttcacctctctgtgccttggtttcctcatttataaaatgtggataacaggccgggcgcagtggctcacacctgtaatcccagcactttgggaggccgaggcaggtggatcacaagatcaggagattgagaccatcctggctaacatggtgaaaccccatctctactaaaaatacaaaaaattagccgggtgtggtggtgggcacctgcagtcccagctacttgggaggctgaggcaggagaatggcgtgaaactgggaggcagagcttgcagtgagccgagatagcgccactgcactccagcctgggcaacagagcgagactccgtctcaaaaataaatataattaattaattatttaattaaaaaaataaaaaataaatgtggataatactagtacctccctcttaaggtcagggctggagctagggtgacatctccagggcagaattttaagaggacaccaaaaaagctcagcaaccaagataaaaaatattttaaagcaatattttgttttgggttttttttttttgagatcaagtatcactcgttacccaggctggaatgtagaggcgagatctcagctcactgaaacctgtgcctccccggttcaagcgattctcctgccacagcctcctgagtagctgggattacaggcatgcgccaccatgcccagctaatttttctatttttagtagagacatgatttcaccatgttggccaggctggtctcgaactcctgactcaaatgatccccctgcctcagcctcccaaagtgctgggactacaggcatgagccactgtgcctgaccttacagcagtattttttaaaaatcaaaattaatgcaaaaatccatgatgaggccaggcttggtggctcatgcctgtaattccagcactttgggaggatcccttgagcccaggtgtttgagaccagtttgggtaacataggaagagcttgtctctacaaacaaaaatttaaaaacaatgagctgggcatggaactcacacctctagccccagctactcaggctgaagtgggaggatggcttgagcccaggagttcaaggatgcagtgtgctttgattgcactactgcacttcaccctaagcaacagagtgagaccccatctctttaaaaaaaaaaaaaaatccatgatgaacaaaacaagtatttgtttgagacggggtctcgctctgtcgcccaggctggagtacagtggtgccatctcagctcactgcaacctccgccttctgggttcaagcgactctcctgcctcagcctcccgagtagctgggattacaggagcctggcactatgcctggctaatttttgtatttttattggagacaccatgttagtcgtggctggtctccaactcctgacctcgggtgatccgcgccccgcggcctccgaaagtgctgggattacaagcgtgagccaccgtgcccggcctaaataaaattttgaagaggctagaaccccgcacttgtgccttgagcttactgacctcaacaccctggttccactaaaactttatttacaaaattatgctgccggtctgcaggatgtagtttaacaatttgattattttggatattaaaatattttttaagtcttgaaaatattgtttactattaccaaagtttttgaaccttcttaaattctgtaccagaggtgagtgccacaccctaacctagtctgagtttttatgtgtaaagatcataaaacgttgtaagttttctaaaacacataagctctcaataaacgttagcttatcattgtca

SEQ ID NO: 1414 - DNA, 3377 bp, Homo sapiens
aaagactgaccgactgactctgacaggatccggggctgagggaaggaggcggcggccatggagttgggcgagctgctctacaacaagtctgagtacatcgagacggcatctgggaacaaagtcagtcgccagtcagtgttgtgtggaagccagaacatcgttctcaatggcaagaccattgtgatgaatgactgtattatccgaggggatctggcaaatgtaagagttggacgtcattgtgttgtgaaaagtcgtagtgtcataaggccaccattcaagaagttcagcaaaggtgttgcattctttcctttacatattggagaccatgtctttattgaggaagattgtgtggtcaacgcagcacagattggttcctatgttcatgttgggaagaactgtgtgattgggcgccgatgtgtgttgaaagactgctgcaaaattcttgacaacacagtattacctccagaaactgtggttccaccattcactgtcttctcaggctgcccaggactcttctcaggggagctcccggagtgcactcaggagctgatgattgacgtcaccaagagctactaccagaagtttttgcccctgacgcaagtctagcatctctgcctcatgtcttgaatctgcttgagctctaagatgaacctggggacaaagtgagccagtcagcacctacaaagagcttttgtgtctttgacatctaccaccctcctccttttaaaaaatttctttagaatttctcaatcttcaaggctctaagtgcttaagaattcactaacagacagaccatctggaggagctgtcttcaaatgctgtgcttacaccttatctatgaacagtcactttgtaccattatctgtggaacacagaatcatctgttcccaacactccagccccttggtcctgtggatggctggatcccgcctgaaacggacctgcagagcagcagcacccttccggtgtggaggctatgtagctggtgcgctgctcacggccattcactgcccatgctgagcgcctctcacacaggtaatgcccagcttttctgctgctaacacatttggccagttgttgcagttgctcatcatcttgggaaaggtgtttgtgacttttcagagcccagattcctgttgtctattaaaacttgaagggaggggtgaatagtgtttctctcttcttcccaaaatgaccttagctgtcctaggatagttagtaaaagactttttagcattttgacctagggcctttggctttcactaaaagtggggacctcagtatcccagattgtaattttgccaagtgttagatttgagtctctcatgtggatgcattagtcaggtggttactccttgcttcaaggtacttaccttatttcattgaagacaccgcatttgtgaactcttgcttcctggcctagaaccattcagcctaccctgtatttgccataaactccacaattcacaccaaaatgtctgtacttagagctaattcgcatatatacaggaagggctcttagaatcagtttgtgggcacagagcctcaggagtaaatgaagttactagggctgttcttaccatctccttctggccaaatagcacaacatttcctcgttctgctctgacctcttagcttagaaggaagattcagaagtgaggggctaagaaggttgtccttgcctaatgctctgatctgtaagtgaatagggcagaacagttcagccttgaggttagaatttagcaggagctatcctgacttaatatccagttgtggggtttgcaaaacaaaacagctgtatgtaatcattgccactagttccatctagaactcctttctagtttgttatttttaaaatgtttatacataaaaccaccaaaatacatagcttcgacaagatggaagtttatttctctctcccataacagtgcagtgatagtcagctggtccaggccaggcaaggggctggtccatgatgtcatcaggcacccaggttcctactgtcttgccatgtggccacagttagcaacaaaggaggctgtaaatttagtttctacttgggcagccaaaactctgaggaaggagattctgctagtaaaaaggagtgggggaagaatggccattgggagacaacaagcagactcaaccaggcctctttgttggcttcctttcctcctgctgcacatgagccttcgccttgcatttggagccatgacagctgatagctccagacctgcatcctcctagcttgggggctctgaatgaaaggtttcttcccttccagttcgaatttggaaactcccaaagttctcaatggtttgttgtgagttccatgtcctcttggatcagtcactgtggccatgcatgtttggccacatgattaatccagtctgggtcatgaccttttcttcatccaaaacaaggtgatgggaagacaaaaacaatagctactacaaacaataggagtttataattatgtgctgatgtattcgaagatgtgttgacagtcgtgagtgtgtatcctaggaaaggcgagctggactctgtctccatggtggctctcaccccagggacctaggaacagcctgtcaccacacaattacttttataaccctggagatgaaaatctccttgtcctcaaaatacttccagaagaacaaccagatgggaaggaccttggttgggactctttccagttcacttggggcagagggaatttaatggctcacgtagctgaaaaggatgggctagattgggcttcaggctgcatcccaggactccaaacagggatctgtctctttggctctcagctctgctttcatttgagttggctttattcttgggcttcacagtgtggccccacagcaccagttattgataaaaagagctcccctttgctgacagaactgctggatttggttctcattggtccagacgaggaaggtatccagcctcaagtcatcattgtggccaggaagatggaatacaccaaatggacaggcctggcatgtacccacagagactgagagttggtgctggtggttgtggtggcagatgatattacctgaagaagggacgaatgggtgctgggcaggacaaagcatcagctgtccagttcaggcctctcctctttccctggtgtcttcattttcctccgtctccctgctgtcccttaccctctgcccaatctctcattactcctggtcttgggagttgccttctgaggatactccactgggggtacctgagcctggattagagggcagggggaggatattgcctagccaaagtgggtgttcaataaagaaccatttggagatggtaaaaaaaaaaaaaaaaaaaaaaaaaaaaaaaaaaaaaaaaaaaaaaaaaaaaaa

SEQ ID NO: 1415 - DNA, 1391 bp, Homo sapiens
ggaggcaggactgcccggcccagccttggaggaagacttctgggcagaagcggaacacaggagcagagacacatagtcttggctccagtttcgtttcagttatgcccaccctttcagtgttcatggatgtgcccctcgcccacaagctagagggcagcttgttaaagacctacaaacaagatgattacccgaacaagatattcttagcctatagagtctgcatgacaaatgaaggccatccctgggtttctctcgtggtgcagaagactcgactacagatttcacaggatccctccctgaattatgagtacttgcccaccatgggcctgaaatcattcatccaggcctctctagcactcctctttggaaagcacagccaagccattgtggagaacagggtagggggtgtacacactgttggtgacagtggtgccttccagcttggcgtccagtttctcagagcttggcataaggatgctcgtatagtttacatcatctcttctcaaaaagaactgcatggactcgtcttccaggacatgggctttacagtttatgaatactctgtctgggaccccaagaagctatgcatggaccccgacatactcctcaatgtggtggagcagatcccacatggctgtgtccttgtgatggggaacattatcgactgcaagttgacaccaagtgggtgggcaaagttgatgtccatgataaagagcaagcagatattcccattttttgatattccctgtcaaggtttatacaccagtggcttggaagaagatactagaatcttacaatactttgtgtctcaaggctttgagttcttctgcagccagtctctgtccaagaattttggcatttatgatgaaggagtggggatgctagtggtggtggcagtcaacaaccagcagctgctgtgtgtcctctcccagctggaaggattagcccaggccctgtggctaaacccccccaacacgggtgcacgtgtcatcacctccatcctctgcaaccctgctctgctgggagaatggaagcagagtctaaaagaagttgtagagaacatcatgctaaccaaggaaaaagtgaaggagaaactccagctcctgggaacccctgggtcctggggtcacatcaccgagcagagtgggacccacggctatcttggactcaactcccagcaggtggaatacctggtcaggaagaagcacatctatatccccaagaacggtcagattaacttcagctgtatcaatgccaacaacataaattacatcactgagggcatcaatgaggctgtcctcctcacagagagctcagagatgtgtcttccaaaggaaaaaaaaacactgattggaataaaactttagtctttgcaaaaaaaaaaaaaaaaa

SEQ ID NO: 1416 - DNA, 1315 bp, Homo sapiens
ctttcaccctgggctgcggctctgaggctgccgtggccatggagctctggaagctgggctgggggaggaagcctggtggctctgacctcccctggaggcgaaggaggcccagccatgacactcttaacggatgccacgccgctggtgaaggagccccatcccctgcctctggtcccacgtccctggttcctccctagcctctttgctgccttcaatgtggtgctgctggtctttttcagtggcctcttcttcgcattcccttgcaggtggctggctcagaacggggagtgggcctttcctgttatcacaggctccctctttgtccttaccttcttcagtcttgtttcactcaacttctcagaccctggcatcttacatcaaggctccgctgagcagggccccttgacggtgcacgtggtgtgggtgaaccacggggccttccgcctgcaatggtgtccaaagtgctgcttccaccgcccgccccggacttaccactgcccctggtgcaacatctgtgtggaggactttgaccaccactgcaagtgggtcaataactgcatcggtcaccgcaacttccgcttcttcatgctgcttgtcctgtccctgtgcctctactcgggcgccatgctggtcacctgtctcatcttcctggtgcgcacaacccacctgcccttctccaccgacaaggccatcgccatcgtggtggccgtgtccgccgcgggcctcctggtgccgctgtccctcctgctgctgatccaggcactgtccgtgagctcggccgaccgcacctacaagggcaagtgcagacaccttcagggatacaaccccttcgaccagggctgtgccagcaactggtatttaacaatttgtgcaccactgggacccaaggctgctgcatcctggatgaggctggcctcagcttcctgcagagctaagccctgggccgtgtgcttcccaagctgaggcgggcaggggagccggaccagggaggacggtggcccctgcatctggcctgctgctccccagttccacacgggcccagtgctgcccctgctgctgcaggagcccccaggcgaggttcggccttcctctcgcccctgtgcacccggagatgcccacagcaccagcacctgagctcacctccgaacccgcctcctgaacccgcctcctgaacctgcctccttacctcccacttcctgagccctgagtggaagcctttctgtgccttgccctttgcccactcccctggtgggactgccaagaccctcaatgcccattaaatactcttgcctgcctctcaaaaaaaaaaaaaaaa

SEQ ID NO: 1417 - DNA, 2865 bp, Homo sapiens
gcgggtgcggcggcggttgcgagagagatgagccgcggcgatgagcccggaaaagcagcaccgggaagaggatgaagttgactccgttctcctttcagcgtccaagatcctaaattcttcggagggggtgaaggaaagtggctgcagtgacacagaatatggctgcatagcagaatcagaaaatcaaatccaaccacaatcagcattgaaagtccttcagcagcagttggaatcatttcaggctttgcgaatgcagactttgcagaatgtcagcatggtacagtcggaaatcagtgaaatattgaacaaaagtattattgaagtagaaaacccacaatttagctcagaaaaaaatctggtgtttggcacgcgcattgaaaaggatttgcctacagagaatcaagaagaaaacctttctatggagaaaagtcatcattttgaggattccaagacacttcattcagtggaagaaaaattaagtggtgatagtgtgaacagtctccctcaaagtgtaaatgttccatcccagatacattccgaggacacattaactctgagaacttcaacagacaatttatcttcaaacataattatacacccttcagaaaattctgacatcttgaagaattataataacttttatcgttttctacctactgcacctccaaatgtgatgtctcaagctgatacagtaattctggataaatccaaaattactgtgccttttctcaagcatggattttgtgaaaatttagatgacatttgccattctatcaaacaaatgaaagaagagcttcaaaagtcacatgatggggaagtggcacttacaaatgaacttcagactttacaaactgatccagatgttcacaggaatggtaaatatgacatgtcccctattcaccaggataaaatgaactttattaaggaagaaaacttggacggtaacttaaatgaagatataaaatcaaagagaatttcagaattagaggcattagtgaagaaattactccccttcagggaaactgtgtcaaaattccatgtgcatttttgtagaaaatgtaaaaagttatctaagagtgaaatgcacaggggaaagaaaaatgagaaaaacaataaagaaattcccatcactggcaaaaatattacagatttaaaattccattccagagttccaagatacacactgtccttcctcgaccaaacaaaacatgaaatgaaagacaaagaaagacaaccatttctagtaaaacaaggatcaataatatctgaaaatgagaaaacttccaaagttaattccgttactgagcagtgtgttgcaaaaattcagtacttacagaattacctaaaagaatctgtgcagatacagaaaaaagtaatggaactggagagtgaaaatctaaaccttaagtccaaaatgaaacctcttatctttaccacacaatctctcatacagaaagttgaaacatatgaaaagcaacttaagaatctggttgaagaaaagagtactattcagtctaagttaagtaaaacagaagaatacagcaaagagtgtcttaaagaatttaaaaaaataattagtaaatataatgttctgcaaggccaaaataaaactctagaggaaaaaaatatacaactttctttagagaagcaacaaatgatggaagcattagatcaactaaaaagtaaggaacacaaaactcaaagtgatatggccattgtaaataatgaaaataatcgaatgagtatagaaatggaagcaatgaaaaccaatattctgttgatacaagatgaaaaagaaatgttagagaaaaaaacacaccagcttctaaaagaaaaaagctcacttggaaatgaactaaaagaaagccagctagagataatccagctaaaagagaaagaaagattggcaaaaacggaacaagagacacttcttcaaataatagaaacagttaaagatgaaaaactcaaccttgaaacaacattacaagaatctactgctgccagacaaattatggaaagagaaattgagaatattcaaacctaccaatctactgccgaagagaattttctgcaagaaataaaaaatgcaaaatcagaagcaagtatttataagaatagcttgtcagaaattggcaaggaatgtgaaatgttatcaaaaatggtaatggaaaccaaaacagataatcagattctaaaagaagaactaaagaaacatagtcaagaaaatataaaatttgaaaacagcatcagtagacttactgaagacaaaatacttttagaaaattacgtaagaagcatagaaaatgaaagggataccttggaatttgagatgcggcatcttcaacgagaatatttaagtttaagtgataaaatttgtaatcagcataatgacccttcaaaaacaacttatatttcaagaagagagaaattccattttgacaactatactcacgaagatacttctagtcctcagagtaggcctttggcttcggatttgaaaggttatttcaaagttaaagacagaactctcaagcatcattaggattcctcaagattgctaagaaactcccttcgagaaatagccaatgttaattgtactgctaactgaactatgcatatctaactcatctcaaatgactcataatgaggcgctatatatttgctttaaaaattatgcacagaatggtttggtgcagataacttaagctttctcagctgggaatttcagaagatgggggagaacttctacaagggagggcaggtacctgtacatggaaggagctgagatgtctaaagtcacccacatttgtcatttgaaaaagtatatataaataaaagatactattttgaaaaaaaaaaaaaaaa

SEQ ID NO: 1418 - DNA, 1337 bp, Homo sapiens
actggcttggcgacgccatgtttcaagggcagcgcggttggttttgcggcagcgttagccaggatctgaggcaattctgggtggctgaagggggaacgatcagtgacccgcgagccgccgacttcttgttcagctgtgatgcctcgcacccagacacgctgagaatatatcagagccttgattacatagaagataatgctacagtttttcatgcctactatctctctgcggtagctaatgccaaaataaaaaactcggtggctttgggtcatttcattcttcctcctgcgtgcctgcaaaaagaaataagaagaaaaattggtagttttatttgggaacaagaccaacattttctgatagaaaagcatgatgaagtaacaccaaatgaaataaagacccttagggaaaacagtgaactagcaacagagcacaaaaaagaattatccaaaagcccagaaaagcattttataagaactccagttgtagaaaagcagatgtacttccctctacagaattacccagttaacaacatggtaacaggttatatatcaattgatgccatgaagaaattccttggggagctacatgacttcattcctggaacctcaggatatttggcatatcatgttcaaaatgaaattaatatgtctgctataaaaaacaaattgaagaggaaatagtaaattaaattgtaaataccttggcatttattttctataaaatattatacagatgtgcatatcataaaatgctcccttttggtactgggggatagtgaaatgggaaataatttttctgtttctcaaagtatatctttaggaaatacagaatcattttggttctgtgttttgacatttttcccctagcttataacaacatgttcaaatattctcaatgcacagttgttaatgagtaattgccgttaaaatatatttcataagaagtctcaatctcaaactctccatctctcaatcctcctcctcctcctctttcttgctttctcttttccctctctctttctctcctccccttctctctttctgtctttcaaatgttcttttggctttaacattctattaattatattttttctagattgaatactgtgaatgctaagttttattaatctggtcatcttattttgattttaaaaattaggatgctagttgcattctgaattactgtttctggtttgaaacatggagaaaaacattttaataattcatatttcatgttggatggtttctaataataaatatctcaaaagtgacttaaaaaaaaaaaaaaaaaaaaaaaaaaaaaaaaaaaaaaaaaaaaaaggaaaaaaaaaaaaaaaa

SEQ ID NO: 1419 - DNA, 6101 bp, Homo sapiens
aatctcccggcagttggttcccggaggcagaatctgttaaactgacaaagcccacgtctccgggtccctgtctcggggagtcgggactattgggtcaccccgggtagtcgagactctagactgagctgtctcggtcactcaggaggcagttggcagagtattcgtggtcagggaggtgacccgtggtcagcagggtcaggccacccagggacaaagggtgctcctgcaccgggccttggagaaggacagagcggtggggacttggggtcagcgggggagcctccgcggatggggagtcaccacctgccggcaatcagccatgactgcctttgcactgtccatgctctcagcccaccacctcctccccctgccattgcagtggctaacactggagacgaagaccaagacaccacagcctttctccagtacctctcaaatcagcacagacaaggacaaaggcctcaatccacaactgctgaagatggaccctggccacatgggatggtcagacacgcctgcccagctatctgcaggcgaagaggctcagaagaggtttaggggcctgaaggacatcttgcttccatgtccatatgagcaggctatttctgctccatgagtcaattttgccatataaaatacttaatttcagccattccagggtgctataggatgcacagcttcccatcagcccacctgaactccagccatgccattttaataccaggaataaggtcacctgctttcctgccccttaggaggccggagccgtggaagcaaaatggcacttctgtttacctgttatattatttttttgtcatccttatatgtttgaaaaatgcaattatatgaaaaaagtttagtaattacagacataacagcagaaagtcctcggaaccaagcttattctcatggccgattctgctccacctgggactctgctgtgctgcgggcatcctgtggtcagaatcgcagaggggccatcagggaggaccttcccagaggatggacctcacgtgactgctgcgtgggcaagtggcactggccactctgcctggagagaggagtaaatgcagggctggccaggcgacctgcacactctgctaccggccttgtccatctttagcctctaatttgaaaatgaggatcacacagaccaagagtatctttgagggttagtacagaccacagaaatgccctgggcctttcactctctccttttgcaaattcccatgtgtggaaatgccgtttggataatgagggagcctgaaggaggtggacacatgagcagccccgacaggcctggctccatcctctgaaaatggggccccgtgcccggcgtgtggccttactggttcagtcttctttacagtggtaggttttgagtgcccagatgcccagtgcctcctacccggaacaggacaggaccaggctgtcccctggaagaatcccatgcacacttggctattcagggagtttccacccagccgagctcgcctctgtggctaccctggtcttgctgctcatatctgccaggaaaggcctggacttggagagaaacctgggatttggattcagtccttgccagcctggctggttcatatccttacctctgtctgtggaagcctatgttcctgagcagcgagtcagagggggcatctgaacgcagagcagggagcttcagatgggaagaagtcagaggaaccagaatgtatcagacgatgtggagttgggtgcctgagctcaaagcaagctgggccttgggctggctgtgtgatcttgggcaagttcgaccagcttctttgtgcctcttttctctccttaataagataaatgtcttcactagtacactgagggctgccattaagttctatgtgcagggatccaaggcaggccctaggtctcttggtgagtgctactcctccttacaatttgctgcccggagcaacattgggtgacagaacttcttagcaccttggcagtccttgtcctcctggaccctctgttttgagggtggaatgaggtgaagggcaagtgctttcccagctggtcaggtgctctaccaactgggcatattctaatccccccagagtatacagatcagagtttgatgtggccaatgggtccaatgcccaagtgagaatctcttgatgaagttattggtgtggggttttgctttggtttttaattatagagagcaaaagtattgaaagtattacatttaccctaaaggtgtaagcaagttatggtcaagtgaagatgaagtaccatcctcaaacacgggttccattcttagctcatctcatttaaaggagagaaaagccttgcaggtgaaacatggtgggggtagacaggggttcagccaatttcagtgtttggccccaagaagtgaatttgggtttgaggacctctctctggaaggattttatgaccagatcttcctggagatgatattagaagcttttctcaccaaatatttatttgcctggggtgcaacttctgcttcattctctctttgactccagctgtctttttggactgaagtgcaggttgctcacagcatcctacaaagtaactgtcttcccaaatctcacttacctctgagtttctgctgtattcctgtctttctctctctctttttgaactggaatctattactttggatgatgcatgctggcgttttctaaagttttctgattgattgtgtctttaaaaaataatctgatagtattttagcttcttgaattttgtggcatatttttaggcctctcctaaacccatttttgagtgctatgacattgttcatgtatgaagttatgccagtagaaacaaaatgctgtcatataggctcccctaaaacttcaaatctggtccagatcttagactggcagcttctgctgtcattggatctcagtgagacctttgcacccatttcctccctttgtgattcatccacggacatccccatctccttgagaacaatctcaggaatattccttgccttctttcggctctcactccatctcattttctgctgttcactcgggaataaagagatgtcccacactttaaagagtaaaaacaaaaattggagctcagagagggtgaacttgtcaatatcacacagagctgggagtgtggtaagcccttgaaatggggctcaatgacaccgctacctcccagggattcctaatgtctgagggttccagtgagctgagatgaacccagggcctaagaagaactctctgacctcctcacctccaaagccccacccagtgcacatggcctgaggcgtccatggtgatggtaaagaaacctcacctgccatctctcccattactgccatgtcccctctcatcctattctgtgccaaatgtccagatgtgatcaatagaatcaggagaaaattgaggcctgaggggagggggccagactctgggagtggagagtggattgaagtcagactagggctgttcagcaaggagttcagggccttcaagtgttgggagcttggcagcaatgccaaggggaatgggggtggatttgggtccaagtttatgttcgaagaatataagcatgatttggagactcctgatgttcatatgcccccatcaagcagagctaggggtcgccagaggagagaatggtgctagaagttcaggtgagaacagggcagacccctgcataaatgtgggatctctctgtttgaatcacggcccaaacaccgtggcagggacactcccaaggaactcaaacatgtattttatcagggctttaacataaggaatattgattcttaagaaaattggaaacatatgagaatctaatttactctgttatgagatgccatacacctggaagaacaggttaactgtcaaattactaccaaattgttgcaaaaaattgccaatgaagcaatcatacaaagctcaggtaacagagtgggtggccatcactctgggagagggagatagcactggagaaggtccttgtgactcagatcaaagagagcaaatggcaaagaagggggacagttgctgttttctgaagtaaagcctcttaggtgttatttgaccatttgttacctgtgaatgtataattttgatttttaaaataagtagaaaggagcctctttcttaaaaccaaccaatctctgagccccacagatggtattctggtttcttgcaggaggttctgggtcccacccgcctgcccccttctaggacaaccccaccagcaaggaggtcttttagttccttctgtgtgtgttcacctgctcgtcctggcttgggccccagggagcccaggaacctcagggttctctcagctgcacttccatccgtggtgcccaacctcagtgcctaggactctgtgtgcctgacctcctccaggcggggctgctccctccaggtgtccacctggtatgggcatcccgtggcagctctcctctgatgaccgagtgtggtgggggtgctaaggccaacttgctgctggcacgcccagaacttatttgctggctgtttcaaagactccctaaaggcaccatggattttccttagaatacagttctgtgcagtcccgcccatcctcttcccctctgtttcccactagggctgatacttgctttaaggtctgatggctcacccagtccttcataattttcacaatgttatgttccttcctaaaacccttgcagtttaatctgctcttggcgtctgcttctcagaggagctgaggaacagagacttcaacccttcttctctcagttcctgctgcccctgtagtgaggctgacagttgcagaccatagagccagcctggccttgcccagagcatacatgacctcttagtaaggctgggccctgctaagggctatgttttgcacacgttcctgctagtcacatccagcacatctgggctaccacttggatggcaacattacattgaagaccactgtggccatggcaggagtagacaaggtggcagtcttgtcttcagtcgtcatggaaatcccagctatgcagcactagcaggtgttttgtaatggaggatcagatgcttgagcttctgagcaggccccctccctctactgccttctgtcagggtcttggcagcagccggctctggaaggcatcccggctctgggttcaagagcttgctgggcttctacatgaaggtgtgaagtgtgaatgttaccttttctgatttacacttctgttttctgctacaaacttgggatgttttctgagggatgctgaatagatgggggtggatggggggagggaggcaggggctagaaagtgttcttctggggccaccctccagcctggggcatctgatggatgaggaggggagaatctttgagatcctgtttatgagggcactgcaaataccacatttttttcttgtttgcaaattctagtggagaagttttaccaggttgggagagaggcctcagaattaagtccctgtctcctgccacagtttacaccggtgaagcttcctggccgagcataaactcccaggtggagtacaaacagccttcaacaatggcaccatcattggtaccaatggcattgagaggaggtggcactgacaccctaagtgggtggcactgacacctaagacttatggtcttctgctgcctggagagctttgcctccatcactggtgcccaccttgggaattcccaggaattactcttcaaaggtacactcggacgcccactctgcaaggccattttgttcccttacagtgcctctgaaatcattttgagagaggagaatagggaattagggtaaacaacggttaaggcataagcaaaagaacagcaggtgcagccagctctagacagcatataggccacatcctcactcctgttataacaaaacagaagtttccacttcagccttttgtttcatcctgggtaagtccttcatagggtgtaaccaattggaggcctctaaagggcacctaggggtgttgctaaattattaatagcttaaaaccctaaagaacattgtaatcagcgctcttgagccctttacataagttggcttccactctgtggagtgtactttgcttcaataaatctgtgctttcatt

SEQ ID NO: 1420 - DNA, 3789 bp, Homo sapiens
agttgattcctagaggtggaatccattaaactgacaaagccccagtccccgggtcctaatagtcgggactattaggtcatcctgggtactcaggcctctagactctagactgagctgccttggtcactcggggacagttggcagagtattcgtggtcagggaggtgacccgtggtcagcaggatcaggccacccagggacaaagggtgcttctgcgccaggccctggagaaggacagagcggtggggactcggggtcggccgcagataggggagtcaccacctgccggcaatcagccatgactgcctttgcactgtccatgctctcagcccaccacctcctccccctgccattgcagtggctaacactggagacgaagaccaagacaccaccgcctttctccagtacctctcaaatcagcacaggcaaggacaaaggcctcaatccacaactgctgaagatggaccctggccacatgggatggtcagacacgcctgcccagctatctgcaggcgaagaggctcagaagaggtttaggggcctgaaggacatcttgcttccatgtccatatgagcaggctatttctgctccatgagttaattttgccatataaaatacttaatttcagccattccagggtgctgtaggatgcacagcttcccatcagcccacctgaactccagccatgccattttgataccaggaataaggtcacctgctttcctgccccttaggaggccagagccgtggaagcaaaatggcacttctgtttacctgttatattatttttttgtcatccttatatgtttgaaaaatgcaattatatgaaaaaagtttagtaattacagacataacagcagaaagtcctcggaaccaagcttattctcatggccgattctgctccacctgggactctgctgtgctgcgggcatcctgtggtcagaatcgcagaggggccatcagggaggaccttcccagaggatggacctcacgtgactgctgcgtgggcaagtggcactggccactctgcctggagagaggagtaaatgcagggctggccaggcgacctgcacactctgctaccggccttgtccatctttagcctctaatttgaaaatgaggatcacacagaccaagagtatctttgagggttagtacagaccacagaaatgccctgggcctttcactctctccttttgcaaattcccatgtgtggaaatgccgtttggataatgagggagcctgaaggaggtggacacatgagcagccccgacaggcctggctccatcctctgaaaatggggccccgtgcccggcgtgtggccttactggttcagtcttctttacagtggtaggttttgagtgcccagatgcccagtgcctcctacctggaacagcacaggatctggcagacccctggaagaatcacatgcacacttaaatattcagggagttcccacccagcagagctcgcctctgtggctaccttggtcttgctgctgatatctgccagaaaaggcctggacttggagacaagcctgggatttacactcagtccttccccatctggctggttccatttccttggctctcactgctggaggtctgtgctcctgaacatcaagtcagagggggcatctgaatgcagggcagggagcctcagatgggaagaagtcagaggaaccagaatgtgtcagaaaatgccaagtcatgtgcctgagctcaaaagtcagctgggccacaggctggctgtgtgatcttgggcaagttcaaccagcttctttatacctcttttcttgcctcaaaatgataagagaaaccacttcactaatacactgagggctgctattaagttctatgtacaaagacccatggcaggccctatgcccttcggtgagcactactcctccttacaatttactgccaggaacactgggcaagagaacttcagtggagcagggattggctgagcatgagccagggttgggggaagtaaataatgggctgttgccagggcctgagcccaacagagaaaggctgtgtgcagagggagggcctcaggtcctggggctcctcctggcctctttcgtcccgactacttcacaccctcctctaacaacgactcccacctccttttccagctctccttgatcctgctcagggtggcgcctgctgtccctggtcccttggtccccacctgcctcagtgccccccagtcacatctgctgtttctgccatgggtcagcagacagggtaggggtgactggtggtgcagaagaaaccatctgagagggggaccccaacacggacagggcacagacggggcttccaccaatctcagtggatgaagattctgtccctgccatccccgcattctctccctggtctcagaggccctcctgggtctccagttgtcctctctcccacctccacactttcttgttccagtcctgctcttggatttctttaataattttcctacctccaagatcccctgatgatcagtttctgcctggggtcaccaggcgactgaccatggtggggatggtgacttgagactcctggaccacagtgcaggtgacatatgcaacctacagagtgaaaaggaacagtgtcactgctgggtcattttgaagatgaggcttaggtaatggattaaagacttaaatgttagacctaaaaccataaaaaccctagaagaaaacctaggcaataccattcaggccataggcatgggcgaggacttcatgactaaaacaccaaaagcaatggcaacaaaagccaaaattgacaaatggcatctaattaaactaaagagcttctgcacagcaaaagaaactaccatcagaatgaacaggcaacctacagaatgggagaaaatttttgcaatctacccatctgacaaagggctaatatccagaatctgcaaagaacttaaacaaatttacaagataaaatcaaacaactccatcaataagtgggcaaaggatatgaacagacacttctcgaaagaagacatttatgcagccaaaagacacatgaaagaatgttcatcatcactggccatcagagaaatgcaaatcaaaaccaccgtgagatactatctcacaccagttagaatggcaatcattaaaaagtcaggaaacaacaggtgctggaaaggatatggagaaataggaacacttttacactgttggtgggactgtaaactagttcaaccattgtggaagacagtgtggcgattcctcaaggatctagaactagaaataccatttgatccagcgatcccattactgggtatatacccaaaggattataaatcatgctgctataaagacacatgcacacgtaagtttattttggcactactcacaatagcaaagacttggaaccaacccaaatgtccatcaatgatagactggattaagaaaatgtggcacatgtacaccatagaatactatgcagccataaaaagaatgagttcatgtcctttgtagggacatggatgaagctggaaactatcattctgagcaaactatcacaaggacagaaaaccaaacaccacatgttctcactcataggtgggaattgaacaatgggaacacttggacacagggtggggaacatcacacactggggcctgtcatggggtgaggggaggggggagggatagcattaggagatatacctaatgtaaatgacgagttaatgggtgcagcacaccaacatggcacatgtatacatatgtaacaaacctgcacgttgtgcacatgtacccgagaacttaaagt

SEQ ID NO: 1421 - DNA, 1077 bp, Homo sapiens
atccaagatagatcaactctccctaaaggctgacagtgaactcttggggccgttttattctctgaggttagcaaggagtcatctactagccattcaggaggccagctgggaagacaaaataggcaccccaaactcagcaacttcataacaccttcctctccccgcctgaagccttaaactgcatcaagtcaaagaaacctggggcaaatccttaacatgtttttgactgcagtaaatccacagccactctctactccgagctggcagattgagaccaagtattcaacgaaagtgctcactggaaattggatggaagagaggagaaagttcaccagagacactgacaagacaccccaatccatttacagaaaagaatacatccccttcccagaccacagaccagaccagatctccaggtggtatgggaagaggaaagttgaggggctaccttacaaacacctgatcacccaccaccaggagcccccacatcgctacctgatcagcacctatgacgaccattacaaccggcatggttacaacccggggctgcctccactccgcacttggaatggacagaagttgctgtggctgccagagaagtctgactttccccttcttgctccccctacaaactatggactctatgagcagctcaagcagagacagctcacacccaaggctggcctgaagcagagcacttatacttcatcctaccccagaccaccgttgtgcgctatgtcctggagggagcatgcggtcccggtccctccccatcgcctgcatcctctcccacacttctgagagctgccaccccaggagcagctcagatagaatcagctggagaccacagcatcactggacttgccagacaacaagtggcgcagataaactcagagtacgagatctggcccgtcaaaggtgctctcagaatcatcatctgcatttggcggtacctgtcccccctcaaaacccacaggttcctttcttttccatccaacaattaaagatctttgacactaaaaaaaaaaaaaaaaaaaaaaaaaaaaaaaaaaaaaaaaaaaaaaaaaaaaaaaaaaa

SEQ ID NO: 1422 - DNA, 2135 bp, Homo sapiens
accctcccagccccggacagcgcatgctgcggcttttcgtcctccactgagtcctgccggtggcccgagctcggtggcctcccggcgaccctcagcgcgaggcgacatggcaggcggccacagcctcctgctggagaacgcgcagcaagtggtgttggtgtgcgcccgcggcgagcgcttcctggcgcgggatgcgctgcgcagcctggcggtgctggaaggcgccagcctggtggtgggcaaagatggatttataaaagctattggtcctgctgatgttattcaaagacagttttctggagaaacttttgaagaaataattgactgctctgggaaatgtatcctaccaggtttggtggatgcacacacacatccagtatgggctggtgaaagagttcacgaatttgcaatgaagttggcaggagccacctacatggaaattcaccaggccggaggagggatccactttaccgtggagcgcacgcgccaagccacagaggaggagctgttccgctccttgcagcaacggctccagtgcatgatgagggctggcaccacgctggtggagtgcaagagtggatatggcctcgacctggagaccgagctcaagatgctgcgcgtgattgagcgcgcccggcgggagctggacatcggcatctcggctacctactgcggggctcattcagtgcctaaaggaaaaactgctactgaagctgctgatgacatcatcaataaccacctcccaaagctgaaggaacttggcagaaatggggaaatacacgtggacaatatagacgtattttgtgagaaaggtgtctttgatctcgattccaccagaaggattcttcaacgtggaaaagatatagggttacagattaacttccatggggatgaactccacccgatgaaggctgctgagcttggggctgaactgggagcgcaggcaatcagccacctggaagaagtgagtgatgaaggcatcgttgccatggcaacggccaggtgctctgccatccttctgcccaccacagcctacatgctgagactgaaacaacctcgagccaggaagatgttagatgaaggagtaatagttgctctgggaagtgatttcaaccccaatgcatattgcttttcaatgccaatggtcatgcatctggcctgtgtaaacatgagaatgtccatgcctgaggccttggccgctgccaccatcaatgcagcttatgcactgggaaagtctcacacacacggatcgttggaagttggcaaacagggagatctcattatcatcaattcatcccgatgggagcatttgatttaccagttcggaggccatcatgaattaattgaatatgttatagctaaaggaaaactcatctataaaacatgatagatttgaaaagagaagactttttgactatatgaaataagtcaatatagttatattaaaagttaaaacaccttaatatttacaagaattatatcacttaaacctaaatgtacttcaatgtctttttaagtcactcaaaaaacccaagggatagatttattttcatttaacacatgcatttgacatataaacaggtaaacctattgtgattaaaatcacaaaacatccaattagttcacaaatattggttacaaatattctgtagattaatatggtggggtatcacaaaaatgcctttgtggggaaaagtaggcttggcttaaaatttccattttgtgtctgtatttcacatctcagtttttaaactatatttagtgaacattgagggatcgaaagaaatctaagtgatacgccccaatggagctaaaatatagccttctgttaagcaaatagtatttcctttccccaagtagttcattttctagatgcttgtcaaatgaattaatgtcctctgatgaagagtgtccttccgtttctaaggtcttctcaatctcagcaatagagcttcccagcagcgttcaagacacatcatttatacacaggcacaggggccttcctgaaatgggtgcatttttaccaactacaatcatgtaatttttttggaaattttttaaaatttttgattctttacattacaattgggtgaaacacattttacagctctcaataaatgtttgctgtcgctctt

SEQ ID NO: 1423 - DNA, 3648 bp, Homo sapiens
cccacgcctaaggtccaggtcccagggctttcccttgcaccttcatccctggccctgcagaggcctgcttctcgcttccggggtcgccagagcgcccctcccgccaccccgccatctcttggccggatcgtgcgagagaaggggaggaggtctggggtttccagagtccgcggttttgctaagaagccgcagtgatgttgacgcggctggtcctcagtgcacacctgagtagcacgacctctccgccctggacgcacgctgccatcagctgggagctggacaacgtgctgatgcctagtcccagaatctggccccaggtgactccaacaggcaggtctgcctctgtcaggagtgagggtaacacctcctcactctggaatttctcagctgggcaggatgtgcatgccatagtaaccagaacctgtgagtctgtgctgagctctgccgtctacacccacggctgtggctgtgtgaggtctgccacaaacattacctgtcagtcctcaggacaacaaaggcaggcggcccggcaggaagaggagaactcaatctgcaaggcccatgatagtagagagggccgcctgggctaccccctcagtgcccatcagcctggttccggtggtcctaactagccctgtctccttgccaatagccctgtgctccccagccccctcccccatgcagacggctgctatgacatccctgttccttaaagtgcggggttcctcgctgccttctcctccctaactggcaccctgtgcaaacctgctgcagagaacagtgtcttgggcagtgcgatagtcctccagttcaccaacagtaaaaatggtctcaatggggagagatgtctgactgcaagcgctgagtccttccagaggagggctggagggacaggagggcggatcaggtggcctcctgagctggttcctggcgccgatgtaatggatgctgattaccagcggtgagggcatcgtggaagggactgcagaggtgtgcgagatgagtggaatgaggccccaggtgctgatttttatgcccaggatgctcctggctgtcatgggctcccaggggctccaggcatgcacagctcttccgcctcttctcgaagcagaatgccccagaaagggcacctttactatccagggtggctagagtcgccggtggctgtgcgtgggggctgagggctagaatcagggcaaggggctttcagtgaaacgcagagccaggcagggacagcgcggatctcagaacagtctttgtcagatgggacacttcatccccgcggagctgtccgtgcacacagcgttctctgattgccaagctgttaagcactctgcggaagggagctgctgggaaggcggacgaggcatctcaggtgggtgaggggctccgctgcatcagcgttgctcagacccaccatccctggggagctgtcactgacgcccaggtttccccttctcagtacatcctgtgcctcctttctgggctgcctcagtccctcaaaggggagctccccacatgggtgggattattgttgagaacagtcagggtgttgacgaggatgcaggactgaggttgctcccagagtcactcagtgtccctcgttttgctcggagacatcctgacctgggcaagctctttagggagcatctttcctgtctgtgccgcattctccatggcctttgcactctttttgcttttgttttaaacacgtcatcaattcattgcctgcagcagcttgtactgccttttggtttttctttgcagaacagctctggaagtgaagtgtgtgtgtgtgtgtttgcgtgcactactctggactgggtgccttacacgtgttaacacacttgatcagctcagcaacactgtggaataagtgtaatgtgtccattattcagatcaggagactgagattcagagcagggagggaacttgccagagaccacatggcttgcaagcagcagaacctgggtttgaactgacagcggcctgacttcagaacccacgctttcccaccctcctacttcacacccatttgagtccagccatcttggttctgaatcataaccctgactctcctggccacatcctatgctccacattacatgttactctacaggttaccaccctgggtctctttcctatataagaaatagaaatatttgtggaaatcctaatgttcatgacatctctgccattttatcaggaaaaattctatcctaccaaatactggtataatgtacttggcccccctggattggattggtataggttaagagcagatataaggtctgaaataatcccggtattcctagtatgtggaattattatcatggaatcataatggcagtttgcacctctgttgggctctttcaactcctgtgttggctcaggagaatcctatcacattagtccccttttgtagttggatagttgggcttgccagaaggcacacaaatttgggttaactcatttccaggattctggcattgtagacacagaaacaccgactgtgaagttttatgtaatacaaacactgggagatttagcaataggcctgccaggcggccctggcttctggctgcacaacaaaggggggtggctggtgccaaatggggcaacagaaggtgagtttggggcctgcagagcctcgggtagcccagaggagcgagagagtattggctgttcattttaactccatccttggaggattccccaccacaagcctaaggaagtaataaaacctcatgcattattttttgatatctggagagaaacacgtaccctagaaatgctgtggactaattccatggttactttgtcattaaagaaaccaaaatactgagaggtcaccataaacacaaaaaggcagagagagaaggattaaatggtgtttcatgtaaggatctttaaagggagacagaattctagtctgaaaggagcgcaggcagatctggcattttgcttggggagttcaattctttggagaaaatacagagacaaaaagaccattttgatggtatttaaaatatccctctgcccagtgtatctaagtgagtctaaatatattcagcaattttttaaagggcagatattaggcccgattcaaggtatggaatatagattcgaaagggttagtgataggtgagtgcctttcaggtagctttgcatcacagaccaagcccattattgaggactgtacgtatggagcaggcccgtgagcttgtgactgagtttcccaacctgccaggctcccatttgcttaggatgaatatttttctgccctccctggtgagccactgtgggccactcgccactccttacaccccttccctttaatacctcgcttggcttacttgcaaaatccacatgcatcctcctggatctcacagaagatgtatgaaaagtcatggccatgaaaagggcacggaaatcaaattaattaattttgctttttccccacgtttgtttctgtctgtctggtacttttcctttttaagcctgccatctctttgaaagtgagccgcacagtgataatccattttcttcattgtaaccccacagtgtatgtattccacattaaataataaaagggattaataattaaatcaaaatgaaaaaccaaaaaaaaaaaaaaaaaaaaaaaaa

SEQ ID NO: 1424 - DNA, 4006 bp, Homo sapiens
gcctcagctgagggcaagcgaggagatggctgtgaggcaggcggcgacggcgggcactcccgggcccaggagagaggaagaggcggcgcttctattcgagagggcccattaccggcacgacccgcgctggctgctgcccgtgaccccccgcctgtgcctggcctgcgcgctggagctgctgccggaccccggcgtgtcgttagtgcgcaagaagcacatgttgtcctgcttccaagatgcccttgtgaggcatacctccctggtcacgcaactggtgtctcaggatcagagagtctgcatccacttcataagtgtgctttttggactattatgcagcatggaagatgggagtgtgacagacctctgtattgaagtccttattcagatcacaacgcagctgaagctggagcagactatccgttgcctgctggatgagtgccacaaagagctgtgtaacatgccctccatgcgaggcagcctggccaccctgacccttcttggcaagttggtggatgccatccctgctctggcagacgagcttgtaatggagcatggcaacctgatggagcatctgttgagaggcttagtataccccagtgagggcatacaagcttctgtctgttacctttatgggaagctatactcctcaccagtggcagctgagatgctttcaggacacttccgtgagaagctttttcccctcttcctttccatcctggatggtgcccagacaaaggagctgcagattaactgcttgggtttgctgaggcagctgttgaagtatgatctctttgtgtccatgatcatgaaccaggatggactgggagaaagtgctaagaatatcgaagggtcatcaggaaatacctcactgcctttggtgctcaaaaagcttctcctctctagagatgaaaccctgcaggtggccagtgctcactgtataactgcggtgcttgtccactccccagcaaagcatgcgtcagccttcatccacgctgacatcccagagttcctctttgagcatctttcttcttccagtgaagtgctcgtctggtccagctgtaactgcttgacactcctggtagaagagccactctttttttccaagtgccacacggtgtatgggatcgaggcagtggtgaggagcctgcagggaagcctgaagatgaacaacatagagctgcacaagcagggcctgctgcttttcgctgaaatcctgacccggcagccagaggagatcaagctgttcacaagctcagccatgtgcagagatgctggccgtgccctccaagaagcagttagcagccctgtgctggaggtggctgctgaggccttgaaggccacttctgcttttctgaggaaggaccatcagagcactccacctgtgcagtatggggaactgcaggctttgctagaagccatgctaaaccgatgtgcggagttttcccagaccttgctgagcaggaggcccctgggccatgcctccagtagagattcagagaaggccattcttcaaaggggaaagttcctcctcagcactctggagggatttagaagtgcctgcaggttggctatagaattccagagtgagccttcagcccaggagaatccattcacagctcccagcgccaagaaggaagacaccttggaggccttctcagaatttcttctcagtgcctgtgactcgctgtgtatccccatggtgatgagacacttggagcagaccacccacccagctttgatggaagttttcctctcaattctacataacctctttgtcatcgttccccacatgaaggagaagttttccaagaagcttgcttcctcatccttcatacgactgaccctggagctgaaggccaggttttgcagtggtctgagtcactcagccctaaaccaggtgtgttccaatttcctctactatatgtgcctcaaccttctctcagctccagagaagacaggaccaccttccaaagaagaactctctgcagtgtctgagctcctgcagcatgggctgccccagataagcagcaggagccctgaaagccttgccttcctgtctgatcgccagtacatggagggagctgctcgccagagacagtactgcatcctgctcctcttctacttggcctacatccatgaagacaggtttgtctcagaggcagagttatttgaggctgtgcaaagcttcctcctgtcgctgcaggaccagggcgagcgccccccactggtggtcttcaaagcctccatctatctgcttgcaatctgccaggacaaagacaatacactacgtgagactatggtcagtgcaatcagaaaattcctagaaggcatcccagacctgcagctagtctatactcaccatccgctcctgctcaggttctttctgttgtatccagagctcatgagtaggtatgggcaccgtgtcctggaactttggttcttctgggaagagagcagctatgaggaactggatgatgtcacctctgctgggcagcccgcccttcctgccagcttagtagtcctgttccagttgctcagaagcatccccagcatcctgctcatcttgctggacctcatctattccagcccagtggacacagctcacaaggtactgattagcctgaggaccttcctgaggaggaatgaggatatccaagtgggcggtcttatccgaggccacttcctgctgatcctgcagcgtctgctagtggagcatggggcatccccatcaggagcctcggggaacctaccattgctgctgagcctcctctccctgatgcagctcaggaatgtgtcagagcaagaactggacagcgtggccatgaagctccttcaccaagtaagcaagctgtgtgggaagtgcagccccactgacgtggacatcctgcagccctccttcaacttcctgtattggagccttcatcagaccacacccagcagtcagaaaagagctgctgcagtgctcctgagcagcacaggcctgatggagcttctggagaagatgctggccctcaccttggcaaaggcagattctcccaggactgcactcctctgctctgcctggctgctcactgcctccttctctgcccagcagcacaagggcagtttgcaggttcaccagacactctctgtggaaatggaccaagtattgaaggctctcagctttccaaagaaaaaggctgcactactctcagctgccatcttatgcttcctgcggacagccctgcgacaaagcttttcctctgccctggtagccctggtgccctcaggggcccagccactgccagccaccaaggacactgtcctagctccactgcgaatgtcgcaagtccggtccctggtcattgggctgcagaacctcctggtgcagaaggaccctctattgtcccaggcctgtgttggctgcctggaggccttgcttgactacctggatgcccggagcccagacattgctctccacgtggcctcccagccttggaatcggtttttgctgtttaccctcttggatgctggagagaattccttcctcagacctgagattttgaggctcatgaccctgtttatgcggtaccggagtagcagtgtcctctctcatgaagaggtgggtgatgttctgcaaggtgtggctttggctgacctgtctaccctctcgaacaccacactccaggccctgcatggcttcttccagcagctccagagcatgggacacctggctgaccacagcatggcccagaccctgcaggcctccttggagggccttccccctagcacctcctcaggccagccacccctgcaggacatgctctgcctgggaggggtggctgtatccctgtcccacatcagaaactgatcctcaggacttgaaggcccagaagtggagagagaatgagacctggagacaaagggcataattgttggggaaatggatgacagctgaagctattcatatggagccatatactctattgttgaaatagaataaggaaataaaatgatacactcacat

SEQ ID NO: 1425 - DNA, 2164 bp, Homo sapiens
ggcggcggctggggagaagcgctctcgtcgcctgcccgaggccggagcggcggggcccgcgcctcctccccccagcgccgcggaggggggaggaggaagatggagacccacatctcatgcctgttcccggagctgctggccatgatcttcggctacctggacgtccgggacaaggggcgcgcggcgcaggtgtgcaccgcctggcgggacgccgcctaccacaagtcggtgtggcggggggtggaggccaagctgcacctgcgccgggccaacccgtcgctgttccccagcctgcaggcccggggcatccgccgggtgcagatcctgagcctccgccgcagcctcagctacgtgatccagggcatggccaacatcgagagcctcaacctcagcggctgctacaacctcaccgacaacgggctgggccacgcgtttgtgcaggagatcggctccctgcgcgctctcaacctgagcctctgcaagcagatcactgacagcagcctgggccgcatagcccagtacctcaagggcctggaggtgctggagctgggaggttgcagcaacatcaccaacactggccttctgctcatcgcctggggtctgcagcgcctcaagagccttaacctccgcagctgccgccacctttcggatgtgggcatcgggcacctggccggcatgacgcgcagcgcggcggagggctgcctgggcctggagcagctcacgctacaggactgccagaagctcacagatctttctctaaagcacatctcccgagggctgacgggcttgaggctcctcaacctcagcttctgtgggggaatctcggacgctggcctcctgcacctgtcgcacatgggcagcctgcgcagcctcaacctgcgctcctgtgacaacatcagtgacacgggcatcatgcatctggccatgggcagcctgcgcctctcggggctggatgtttcgttctgtgacaaggtgggagaccagagtctggcttacatagcccaggggctggatggcctcaagtctctctccctctgctcctgccacatcagtgatgatggcatcaaccgcatggtgcggcagatgcacgggctgcgcacgctcaacattggacagtgtgtgcgcatcacggacaagggcctggagctgatcgctgagcacctgagccaactcaccggcatagacctgtacggctgcacccgaatcaccaagcgcggcctggagcgcatcacgcagctgccgtgcctcaaggtactcaacctgggactctggcagatgacggacagtgagaaggaggcacgaggggatttttctccattattcactgtgagaactcggggaagctccagaaggtgagggagaggggacaacgacatggttcccgtggatctttaacttccagacttgcccgctctgcgcctccggcactctggtgatgacagctcaggtttccctgcctgtcactgctcgggcagaggctgctgcccagggcttctgctccggtaccttgtgaagctgcattctcctgccggtttctccagttctggggacagtggtttgctctgagacctcgcttcctttatggatccaaggagacttgctttttcagtctgttcagctttttacttgctaggatggaattgcaatttgcaagcttcttcgacaggaaactacaagttccacactttaattttatacatataaatatatacatgtacatatatctatgtacaggggtattatatatatacatataagatgatgatatatataatgatgatatgtattactgagaacgtaaaatatcattacatagtgatagctggacacacaaggaattcacaactccccaaagaaaatacatctggatgacctgcctagcagtttccccatgagatagaggaatgtctacgtatttcattccctgttcctgccctgaaacaatttcaatcactgacaaatcattatcattcattaataatgtttactgagtgcccatatgtgaaagaaatccactctacattccacagatgcatttcctctccccacggggtttccattttaatgggaacaatgtagaatatatctgtcttccctttatagattccaaaaaaaaaaaaaaaaaaaaaaaaaaaaaaaaaaaaaaaaaaaaaaaaaaaaaaaa

SEQ ID NO: 1426 - DNA, 2277 bp, Homo sapiens
gggaaatggcggccgcgggcttggtcgctgtggcagcggctgccgagtactctggcacggtagcgtcgggaggtaacctccctggtgttcactgcggcccaagctccggggcaggccctggttttggcccgggctcgtggagccgctctctcgatcgagccctggaggaggcggcggtcactggggtgctgagcctgagcggccggaaactgagggagtttccccggggagcggccaaccacgacctgacggacaccacccgggcggacctgtcgcgaaatcgcctttcagaaattcctatagaagcatgtcactttgtttctctggaaaatctcaacttgtaccaaaattgtattcgttatattccagaggcaattttaaacctacaagctctaacattcttaaatattagtcggaaccaactgtcaacattgccggtacacttgtgtaatttgccattgaaagtcttaattgctagtaataacaaattggtgtcacttccagaagaaattggacaccttagacatttgatggaacttgatgtgagctgcaatgaaattcaaactataccttcccaaattggtaacctggaggccttgagagaccttaatgtaagaagaaatcacctagtacatttgcctgaagagctggcggagttgcctttgatacggttagacttctcatgcaataaaattaccacaatccctgtttgttatcggaacctcaggcacctacagacgatcaccctagataacaatccactacaatcacctcctgcacagatatgtataaaaggcaaagtccacatatttaaatacctgaacatacaagcttgtaagattgctccagatctgccggattatgataggagaccgttgggttttggctcctgccatgaagaactgtactcaagtcgcccttatggagcccttgattcaggcttcaatagtgtggacagtggtgataagagatggtcagggaatgaacctacagatgaattttcagatctgcctcttcgagtagcagagattactaaagaacaaagactacgaagagaaagccagtaccaagagaaccgcggcagtttggtagtaacaaacggcggagtggaacatgatctggatcagattgactacatagacagctgcaccgcagaggaagaggaggccgaggtgagacagcccaagggaccagacccagacagccttagttcacagtttatggcgtatattgaacagcggcgaatctctcatgagggttcaccagtaaagccagtagccattagggagtttcaaaaaacagaagatatgagaagatacttacatcaaaacagggttccagctgagccatcttccctcctgtcactatcagcaagtcacaatcagctgtcacacacagacctggaacttcatcagagaagggagcagttagtagagcgcactcggagagaggctcagcttgctgccctgcagtatgaggaggagaaaataaggaccaagcagatccagagagatgctgtcctggactttgtcaaacaaaaagcatcacaaagtccacaaaaacagcacccgctcctagatggcgtagatggtgagtgccccttcccatccagaaggtctcagcacactgatgatagtgccttgtgcatgtcgctgtcagggttgaatcaagtgggctgtgctgctaccctgcctcattcttctgccttcacgcctcttaagagtgatgacagacctaatgctctattaagttcacctgcaacagaaacagttcatcattcccctgcatattcttttcctgctgctatccagagaaatcagcctcagcgccctgaaagcttccttttccgagcaggtgtcagggcagaaaccaacaaaggtcatgcttcaccccttcctccatctgctgcacctaccactgattctacagattccataacaggacagaattcaagacagagagaagaagagctggaattaatagaccaactgcgtaaacatattgagtaccggttgaaagtgtctctaccttgtgatctcggagcagctctaactgacggtgttgttctttgccatttggccaatcatgtgcgacctcgatctgtcccaagcattcatgttccctcaccagctgtagtaagttgataatcctaaaaagccttggctattcatcagacatttgttaagcacagtggacagacatttcttaagcattgtgctagatattaaggatacagatataaagagtccagtctctacaaaaaaaaaaaaaaaaaaa

SEQ ID NO: 1427 - DNA, 4698 bp, Homo sapiens
gttggtgaagagatcaggaagagatttcttcgagactaaggatggatgacccttagcaacagtgaccgtctcctcccggcatagcaagatggcctgccctcaggtacaggaagaaggaatggaatcggaaggaagaaaattcattccagagacaaaatagctcccctcctctgttgtagctgttcctctggcaatacaaactttctgctttcaggttctgcagcattccagaccttgagcactgaatcaggatgggaaaaagacgttgtgttcctccactcgagcccaagttggcagcaggctgttgtggggtcaagaagcccaaattatctggaagtggaacgcacagtcacgggaatcagtccacaactgtccccggctctagttcaggacctcttcaaaaccaccagcatgtggacagcagcagtggacgggagaatgtgtcagacttaactctgggacctggaaactctcccatcacacgaatgaatcccgcatcgggagcgctgagccctcttccccggcctaatggaactgccaacaccactaagaatctggtggtgactgcagagatgtgctgctactgcttcgacgtactctactgtcacctctatggcttcccacagccacgacttcctagattcaccaatgacccctatccgctctttgtgacgtggaagacagggcgggacaagcggcttcgtggctgcattgggaccttctcagccatgaatcttcattcaggactcagggaatacacgttaaccagtgcacttaaggacagccgatttccccccctgacccgagaggagctgcctaaacttttctgctctgtctccctccttactaactttgaggatgccagtgattacctggactgggaggtaggggtccatgggattcgaattgaattcattaatgaaaaaggtgtcaaacgcacagccacatatttacctgaggttgctaaggaacaagactgggatcagatccagacaatagactccttgctcaggaaaggtggctttaaagctccaattaccagtgaattcagaaaaacgatcaaactcaccaggtaccgaagtgagaaggtgacaatcagttacgcagagtatattgcttcccgacagcactgtttccagaacggcactcttcatgccccgcccctctacaatcattactcctgacacacggctgcatgaccagtcccacccccccgtggccaccaatggctatgacatcattggagcagatgcctcctcttcctggtccagttacttctattactgcaccattttatgatgctagcttccgttgccaagtctgcctcccgctgactgagggagggtagggttaccttgaacgaaacagaacttgaggggcccaagccttatctcagcctttcctcaatatggggttccgttggattggggctcctccatgactagtgggaattactgtgggttcagaagacccttgtctggtatttgccacatggggtattggccacacgctggaagctgaaattgatgatccctgaaggttgaacccacacacacccctgcagcctccccagatgaagtaggtgtattcccctggcagtctgggcaacggagaccaagaaacatttttaggttgttttaaattcctttttttaaacttccagtttattgcgtaccaagagttgattacaacctccatgcttcataagcggacgccacgttagggttggacgtgggcaccacgagtcctttgaggctcctggacagagacccacatcaagatcggaagccctttgggtggcgttgcagatctcattgctcagtaggccgtgaagattttcatcctcatcccactctcagttggattttctggcactcttcctgcattgagtctcctgattactgaacagagctccgtcatgtagcctgctgaggaatggaatggaatggagatgcccacaggaggtcctgatgtcatcactgcacgcaggtgtgagaggagagacctcttctgcaccgcctggctacctcactcctctgctggtagcagtgcctatagctggacctaagttctcagaagcgtagatgtgcaaacaagcgattgagttgggctttaggaggacacatcataggagagaatccagggtctgtaagctggttttcttttcaggtgacatcctgaggggcctgtaagcaggggagctcctttttctagtttgcctgtagaggtgggaagactgttggtgtttctgtcctttacaggacattaggaaacagttgtgtaattacacaaggtggacctttatcttgcctgacatgctgggaatcttcaccccaccagggcaaatttccaaatagctcattttattctaggtctttcaaactttcatgtgacatatttccctttcccattgttgctgatttccaaatcgctgtcagcaattttttcctctctccttgcctattcttcactcatttggtggcaaagttcatagaactaggggacttggaagatgctttgaaaatattgttacaaaggcactgctaaaatgattcacagggagagtggccagttggaagaaggatcctaaggatgtgacactggttttcaacaacatgcttagagaactcatgaagtggattgggtgtcaacccagtgaacatgtttttatttaatttattttttgaagtttatgtggtgatggtgtggctttccgaaatgggcaaatattcagaagatcttttgcattttcttctgtcaggaatggggaaggggagtgggggcacaatctgagaaaggacacctgtgctgttctaggcatcgctggcaagtttgtgggaagggatgggcaagggtgagtgggtttgctccacaccgtcctgtgctgctcgagaggacctgggacgtgcgagggaaacgtgggtgacggtgcctaggctgcggcccttcactgctgtgctgggttcctgcagcctgctacgtttcccttggcaatgtaaatgaagatggaggggtcgtttcgtgatttcctgctgctgagaataaatgtcttgttaaaaacgtggcaacggttactcttaggtgccatggatcgatgtcagggtggtcagctctggactaagccacccacctccaatttgtacaacagtattgatacatagggctacactcattactgttcaagtgttctatgttaagagttgtgtttaatttctaaagattaaaaaaagcaaaaaaattggtgctaaaccttcacccctgagcacgctcagtgagactggtcatgcaagcatttacagtgccatgctcctcaagccgattttttcttgtagaaatgttgccctatttgtcttctccaatgtatggtatgttattttattttattattttattttattttattttattttatcgagggggggtacgatacctgccatttaagaaaatgaatagaaaattttaaaacccgagaaatggggaaaaaaaaatcagtgcacaagaattgggctggttaggcccagcaccacactgaagtgggctcagtggtttttggagtgaagaagccttactccctgcacattccctcatgctcccacacaagtccagcaatggaaatgcttgggttcctcttgctttgtcaggggactcaggagtcgaccaagggaaaccatttggccccgtgaggaatgggcattgtcagtatccgtcctgaacggggcctagtcaggaagcggtctagaagtgtacggtcacggtcgcctcatgaaagtgtgtagcaggtggctctcaggaaaaataccaagtctggatcatccatgtggcagctttgcatagggagaggatagctccgaactggaactgaactgccttctctgcacgcttgaccaaagcagtgatgagggcggccagtacctgcggtgtgcgtggtaggtttaaagaaaagggaatgttttctgctgagtgtttcctttgtccttgggctgctcgagctggacagtaggtaaccactgttttcaaggaccagcccaatttctctggcttggttcggagttcgtttcatccctagctgtgagtgccttttggtctggaaagttggcttgtctcataatacccacagctaggacattctctctgtaattatgaattgtccttgttttacattaaaagagaatgtctttgatcactagagtctgtcggtgttggattatttccactgtgagattcttaaaacttttttgcttcataataataaaacaactcatgttagagaccctttcaacatgaaaggtttgtagttgagacattacatatattttattgtttataataaaaatcatctatacaaaagaagtcctgggtgttaatattttgcacaagatctgttttccatgatgtgttgacatctacaatttcactaactgttgacgttattttctattgagattctggagcctagggagctatgtgttctttttgttcatttcgttcttacttccctgaagcaagagactatatggccttcagtgcaaagacttcagaccaattctttgtattacacttggttgcctcttggctatataacttctgagtgcaaatcattgaacactttaacgaagtattgtagagaataaatcataatggataaaaaaaaaaaaaaaaaaaaaaaaaaaaaaaaaaaaaaaaaaaaaaaaaaaaaaa

SEQ ID NO: 1428 - DNA, 2126 bp, Homo sapiens
cgcgcgcggccccgcccccgaaagtcggctcggctccgctccaatcccggaagtgcgcgcggccccgcccccgccggttcgcgtctctctgctgcggcgcggggaccgctgtgctctcgacccctcctcctgtagagagtggtgctgccctctcgggatgtacctgcaggtggagacccgcaccagctcccgcctccatctgaagagggctccaggcatccggtcctggtccctgctggttggaatcttgtcgattggcctggctgctgcctactacagcggagatagcctgggctggaagctcttctacgtcacaggctgcctgtttgtggctgtgcagaacttggaggactgggaggaagccatcttcgacaagagcacagggaaggttgttttgaagacgttcagcctctacaagaagctgctgactcttttcagagctggccacgaccaggtggtggtcctgctccatgatgtccgtgatgtgagcgtggaggaggagaaggtccggtacttcgggaaaggctacatggtggtgctccggcttgcgacgggcttctcccaccccctcacgcagagtgcagtcatgggccaccgcagtgatgtggaagccatcgccaagctcatcaccagcttcctggagctgcactgccttgagagccccacagagctgtctcagagcagcgacagtgaggccggtgaccctgcaagccagagctgacagccccactgtgcctgagcccgtgcaccgcccacaggacccatggcacattcccggtgtgcctgagcccgtgcaccgcccacaggacccgtggcacattcccggtgtgcctgagcccgtgcaccgcccacaggacccgtggcacattcccggtgtgcctgagcccgtgcaccgcccacaggacccgtggcacattcccggtgtgcctgagcccgtgcaccgcccacaggacccgtggccttggcttcagttggtgcctccagccgagttggcctattgcctgctcatgctgctgcttgcacactgcatgaaacagcaggccagaccaggacatccagactttctccatcgtgaggcctgggcctgcctttctgcagccggaggtctcgccagccctggactcctgctttgggccacagcaagacctcgggcgagtggagaggcggggccaggccgggcccttgtgggtgctgatgctgcatgttgtccccgacacagcgtcctctccctggtggacatccccagcggtcaggtgcttccccaagggcagtgaggggtgaacatccagggcctacctggctgtgcacgctgcagccacactgtggaagctgcccctccccgaggacccgcctcccttgctgatgccaggatctcggcgcatagaccactctgccccagcggtcgtcacagaaaggtctctctgttcctcacactcagcttcagcataagctgtgaggccagaaaaaaggtcagctcttctagtatcgtgcagtgcttaaaaaccgggagctccagccgggcgcagtggttcatgccagtaatcccagcactttcggaggccgaggtgggaggattgcttgaggccaggagttcaagaccagcctgggcaacacagcaagatcctgtctttgtaaaaaaactaaccaaacaggaaaaactgggagattttctgcagaaattgagttccagcctctctcgaacctgggaagacctggcaggagggggctgggctctcggctacagacttctccccaccccgtaggagctgaacgccaaccatcctgacccgccagtgctcttggtctcctgagtgtacccaggtcctcccaggtgcggtgtgcaccgagcgcgcctggcctgatgccctggcctgtgagctggggactcctgggccctgtgagcccctaggcggcaggcccaggaatggctgggtaggacagggaacacctttgccccacgtctggctgtgacctcggtgaaagccgacaggagagagatgggaccctcctcctcagtagtggctgccagtccctcgttgcaggacagggtcatcataaccataaataacccttcacgtgtcaaaaaaaaaaaaaaaaaaaaaaaaaaaaaaaaaaaaaaaaaaaaa

SEQ ID NO: 1429 - DNA, 1476 bp, Homo sapiens
ccccgccgggctcgcgccgcagaggccggtgaggcgccggcggccacgccgcggaaggcgcgggccgagcagagccgggcgttggagcccgcgcgcgcatggaggcgttgccggcagccccctgagggcagcggggagacaagacccggcgacctcgcgcatccctcgagccgccacgcgctctcgccaccgggcggcgacgggccgcggagccggcgcggccatggcgacgggcggccagcagaaggagaacacgctgcttcacctcttcgccggcgggtgtggaggcacagttggtgctattttcacttgtccactagaagtcattaagacacggttgcagtcttcaagattagctctccggacagtctactatcctcaggttcatctggggaccattagtggagctggaatggtgagaccaacatccgtgacacctggactctttcaggttctgaagtcgatcttggagaaagagggaccaaagtcactttttagaggcttgggtccaaatttggttggagttgcaccatcaagggctgtatactttgcatgttactccaaagccaaagagcaatttaatggcattttcgtgcctaacagcaatattgtgcatattttctcagctggctctgcagcttttatcacaaattccttaatgaatcctatatggatggttaaaacccgaatgcagctagaacagaaagtgaggggctctaagcagatgaatacactccagtgtgctcgttacgtttaccagaccgaaggcattcgtggcttctatagaggattaactgcctcgtatgctggaatttccgaaactataatctgctttgctatttatgaaagtttaaagaagtatctgaaagaagctccattagcctcttctgcaaatgggactgagaaaaattccacaagtttttttggacttatggcagctgctgctctttctaagggctgtgcctcctgcattgcttatccacacgaagtcataaggacgaggctccgggaagagggcaccaagtacaagtcttttgtccagacggcgcgcctggtgttccgggaagaaggctaccttgccttttatagaggactgtttgcccagcttatccggcagatcccaaatactgccattgtgttgtctacttatgagttaattgtgtacctgttagaagaccgtactcagtaacaggccggaaaattgtgctctagaagaataaaactgaaaaactctagagaattttttttccccattgatgtttagaaagtttgagactgaaacaggaaaggccataaaatatctggttcatatcacctgttggacatttccttttggattcatgctttctggaaggtttaaattcattaacgttaatagttaattataactttttttttaacttaagaggattcagggttaagcaccaactaaattaaatcatgctatttaatttaagtataaaaaaaaaaaaaaaa

SEQ ID NO: 1430 - DNA, 1064 bp, Homo sapiens
cgcgatgggctctgaggcggcgcagctgctggaggctgccgacttcgcggctcgcaagcaccggcagcagcggcggaaggaccccgaggggaccccctacatcaaccaccccatcggtgtggcacggatcctgacccacgaggcgggaatcactgacattgtggtgttacaggcggccctgctccatgacacggtggaggacacagacaccaccctggatgaggtggagctacactttggggcacaagtgcggcgcctggtggaggaggtaacagatgacaagactctgcccaagctggagagaaagaggctgcaggtggagcaagcgccccacagtagccccggggccaaactggtgaagctggcagacaagctgtacaatctgagggacctgaatcgctgcaccccagaggtaaaaatacaatagctgggccaaggggaagttttcaggacagctcattgcatcaggaactcatggccttgaaccaagcttgccaggaagtggggaaaaggcagtgctttccttgacatcacgctagcaagtttctgtcgactcttatgcaggatggtcagaacatcgagtccaggaatacttcgagtgggcagcgcaggtggtgaaggggcttcagggaacaaaccggcaactggaagaggctctaaagcatctgttcaagcagcgggggctgacaatctgatcagtgcttgaagctatccagaggcacaactccagcctcgttcaggccggacaggattcatacgccatcttttctgtgtctcctgagctccctccatccttcccagatattagaggccaaaaaaagacttgcattttttctcagtctgaaggtctcctgctaactaagctgagccccgcgtggtgggaatcagatgtacccatccatttctgatgcactcaccgcctctccccaagtcttgggtctgtttgctattttgcatggtggggtctctggcccctcagggacttgagattatttaagtactagttcctaacacgttctggaaaataaaaataactctgggttaaaaaaaaaaaaaaaaaaaaa

SEQ ID NO: 1431 - DNA, 4310 bp, Homo sapiens
ggcaaccgcggcgtgactacggcgcgcgcggtctgggcgcggacgggtggggccgggcggtgccggtgcgggctggggcagtgcagtgagtagcggtcttggggtgtgcgatctcgctgagcctcctcacacggttcgtcgtctcgggttcgagcccagtgggcttagccactcgccatggactcccagaaagaagctctacagaggatcatttcaactctggcaaataaaaatgatgaaattcagaactttattgatacactacatcatacactaaaaggagttcaggaaaattcgtccaacatactctcagagttagatgaagaatttgatagtttatactctatactggatgaagtaaaagaaagtatgattaactgtatcaagcaggaacaagctcgtaaatcccaagagttacagagtcagattagtcaatgtaataatgccctggagaactctgaagaactattagaatttgcaacaaggtcattagatataaaggaacctgaagaattttcaaaggctgccagacagatcaaggatagagtcacaatggcttcagcctttcgcctttctttgaaaccaaaggtcagtgacaacatgactcatttaatggtggatttctcacaggaaagacagatgctgcaaactttgaagtttttgccagtccccaaagctccagagatagatccagtagagtgtttggtggcagataactctgtaacagtggcttggagaatgccagaagaagataataagattgaccattttatactggaacataggaagactaattttgatggacttccacgtgtaaaggatgagcgatgctgggagataattgataatattaagggtactgaatatacactatcaggcttaaaatttgattcaaagtatatgaatttcagagtgcgagcttgtaacaaggctgtggctggagagtattctgatccagtgactctagagaccaaagcacttaacttcaatttggataactcctcatcccatttgaacctgaaagttgaagatacatgtgtagagtgggatcctactggaggaaaaggtcaagaaagtaaaattaaaggaaaagagaacaagggcagaagtggtacaccatccccaaaacgaacatctgtaggctccaggccaccagcagtaagaggcagtagagatcgttttactggagaatcatacacagtgctgggagacactgctattgaaagtggacaacattattgggaggtcaaggcccagaaggattgtaaatcctacagtgtgggagtagcatacaaaacgttggggaaatttgaccaattgggaaagacaaacactagttggtgtatccatgtcaacaactggctacaaaacacatttgcagcaaagcataataataaagtcaaagctttggatgttactgttcctgaaaaaataggtgtattttgtgattttgatgggggtcaactttcattctatgatgcaaattctaaacagttgctatattcctttaagacaaaatttactcagccagtactacctggtttcatggtatggtgtggtggactttctttgagtactgggatgcaggttccaagtgctgtgagaacacttcagaaaagtgaaaatggaatgactggttcagctagcagcctgaacaatgttgttactcaatagtgtctactcagaatacgtttaccctccgtcttgattaggtggccttttctgtgcagttactaatcacaggaatttggtagtagtgaaaatcaggtttgctgtgttctgctttgaggcctggaatcttttatcattaaacacctagtacgaagcatttgcaggaacctactgtgcagtatcatagaagcaagcagataccaagcaaaaaactgatgattgaagagtaaatgggggaaaaggcagtgtttaattaacataaaaactcatttttgtatttcttggattactttgactattctaatgtttaattacatatggtaaccctaaggcctggggagaaaagcttttaaatcttgccttctttcttctgtactttgtctttttaaaatctcattactatctattatttagttctaacacagaagctttaaaaatacatagtcatccaaggttttctaaaaattgaaatcatatgttgggaatggtaaaaaggttttcaaatggtttatttttcctcttttataaataagttttacaaaattttcctcttttgtttattgactagattgtatataattttcttttttccaaaatattgtgataagaaatttctagacacaacagcttaaaatcacccaaatttcagttctttacctactgcactaacaatggcaaggggggtattctttatatgttgccttgtttaactacagttcttttcattccatcactttaggtgatgggtaagatttttgaaagccttatattttttgattttgttgtctagtttaatcctacctttaatagttgtgtttggtaaaattcccacttgaatgtgacactgataataattatgctgatttttagcatctcttataggaatcaaagtttattaaagttacatagaggattgaaaaatgtatatcactcaatttttatctaagaaggataggttataaagggaggtacctaaatactcaaataatgtatatattctttttcataacatatggaatgctttaagcaattgttttgaaaaaaatctgcgtatctttgacttaattggcacatgactttttcaagcagccattcattcagaggtttgttttctctcagtccttttgctacattcactttcttttcaaagaaatgttaattattacaaaaattgacatagatatctttcccaaacttggggtaaaacccatggttatgtggaacataactgttcttaaaaagtcaattataatttgtaactcacatcctttgagctaaactaaattaaaattacagtatttaataattctttgggcatttttaagaggtctgaatttgtatttttcttcatttttgaaactttacatttgttgactttttttcattctcatttaaaatatattgtgctatgataaccaaccttcttccaaggagtgaccattactgcctacatttgcgttgctttctacatagagacttgtataatagtattaatagtagctcattctctctaaaaatttactgcccactgataggatgttttgtttccttgataaaacaaatgtaaatgaggaattttatttgaattggaatattgtttttctagaggacattcatatctgcactattatctgatgacatgttggtaattttaaagactgcaaggcagtttagagaatgaagtaaaccaatagatactcttttgattctccaaagaaatataattttggtttttgttcctcagagagagtttgaaagaaattttcagatgttctgttccctatagagggcctattccaggatctaaatgaatgggaatttataattcctttcatagactcaaacctgaaagcagaaatttttagtagttgagttgctttaagtgaattttaacaaatatgacacagaaaaggtcagatgctgttgtataaaattttttactagtgtgtcttatataattctttcttctcattaattcagtgcctttttcctctaagcatactcttggtccatgccccatgcagtgtcaactgatgtttaagctacagagcattgttgtagtggtgagggccctctgttgcaggggcatggggaaatgcatatattaatcaggggctggaggagtatacatgattcttgtgttcatgttgtcatttgaaactcttcacataaaattttctaatattcatttggaaaacctctccactggagaggtttcatctctgagaggttttgtaataatagtgtaagttcagtaaatccagtccaaattctcatcacatgtattatttgatactaaattttcaattattacttcaaaataagagtctgaggatttcttcttactggcgttcttaaaggtctctaaaattaaagaacaagatgtggttttttgtttaagacgtttttagtttatttgttgttaagttaaactggagaaagtttgtcatcctcattttcaaactgaaaactaatcaaatatagtgcctatttagtctcaaaataaggtaactattaacttgattatactatataatattctcaattacatttgaatttaaaaatattgagctcttgattacaatttaatacattgtaaaaagtattaaatcctttgaaacatcaaaaaaaaaaaaaaa

SEQ ID NO: 1432 - DNA, 3159 bp, Homo sapiens
attcaaaaatcactcctcaaaaacgacatacccaggcaggagaaggtacctctcttgaaacgaagacaccaagaactcctaagaggcaaggtactcagccgcctgggtttttgccaaactgtacttggccacattcagtgaattccagtccagaaagcccctcctgtccagcccctccaacttcatcgactgcccagcccaggagagagtgtctcactcccatcagagaccctctcagaacacctccgagagcagcagccttcatgggcacgcctcagaatcaaacacaccaacagccccatgtcctcagagctgctcgggcagaggaaccagcccagaaactaaaggataaagctatcaaaactccaaaaagaccagggaattcaactgtgacttcttccccacctgttacgccaaagaaactgtttacctctcctttatgtgatgtctccaagaagagtccatttaggaaatctaaaatagagtgtccttccccaggagaactggatcagaaagagccccagatgtcacccagcgtagctgcatctctctcctgccctgttccctcaactccccctgaactctcacagagagctacattggacaccgtccctcctccacccccttctaaagttgggaaacggtgtagaaagacctctgatcccagaaggagcatcgtggagtgtcagcctgatgcctccgctactcctggggttggcacagctgacagcccagctgcccccacagactctagagatgaccagaagggaccgagcctctctcctcagtctcctcctgaaagacggggctacccaggccctggtctcaggagtgattggcatgcatcctctcctctgctcattacaagtgacacagagcatgtcactctcctcagtgaagccgaacaccatggcattggtgacttgaaaagtaacgtcttatcagtggaagagggtgaggggctaaggacagcagatgctgagaagtcttctctgtctcaccctgggattcccccatctcctccttcctgtgggcctggctctcctctgatgccttcctgtgacgtgcactgtaccacagatgggagacagtgccaggcttcggcacaactagacaacctgccagcatcagcttggcattccacagactctgccagcccacagacctatgaggttgagctggagatgcaagcttctggccttcccaaacttcgaattaagaagatagaccccagctcttcattagaggctgagcccctcagcaaggaggagagctctctgggagaagagagcttcctccctgctctcagcatgcccagggccagcaggtccttaagcaaacctgaacccacctatgtgtcacccccctgcccccgcctctcccacagcacacctggcaagagcagggggcaaacctacatctgccaggcctgtacccccacccacggcccttctagtaccccctctccatttcaaacagatggggttcctcggacaccatcccccaagcacagtgggaagacaactccagacataattaaagactggcccaggaggaagagggcggtgggctgtggcgccggctcctcttccgggaggggcgaggtcggtgcagaccttcctgggagcctgtcactgcttgagacagagggcaaggaccacggccttgaactcagcatccacaggacgcccatcttggaggattttgagctcgagggagtgtgccagctcccagaccagtcgcctcccaggaacagcatgcctaaggccgaggaagcctcttcctggggacagtttgggttgagttccaggaagagagtcctgttggccaaggaagaagctgaccgtggagccaaaaggatctgtgacctgagagaagattcagaagttagtaagagtaaagaggggtctccaagttggagtgcatggcagctaccctccacgggagacgaagaggtgtttgtttccggctccaccccacctcccagctgtgccgtgcggagctgcctctctgccagtgccctccaggctctgacccagtctccgctgctgttccaggggaaaacaccttcctctcagagcaaagaccccagagatgaggatgtggatgttcttccctccactgtagaagactctcctttcagttgcgctttctccaggaggcgccccatcagcagaacttatacacggaagaagctcatgggaacctggctggaggacttatagccacaaacattactgagcccaaaagatcaaggagtcagccaggaccctgtggacataaagaagttggatgcctggtcccaagcctcttttgccatggtcagtgttcagattgccattagaatgccttagggttttctaattccccttatggatccaatccatctcctggccctgccccttgttggggaagttgcaggaggagaggtggatggcaatgtgattggtgctataactcaggcagcctgggagtcaggaacccagacaaggaatcccattccagcctcaccccaaccatgaccttggcaagtcagggggccactctgcctcatttatgcaaatggagaaaggcgccctccctggggtcccttgagctgctgtaaggctgggctgctgcgacacaggcagcgctttgtaaactgtgaagccatatacgtgaaactgaagagtgcattgggcagtggaagctattttttgccttccctgtgtaacagtaaaatcatctctagtgactgagcactcagtacatttttgtttaatgttgggcctgaggttaactgtgaccatggtccagcttgagtggcttctggagcagccacattttcaaggactgtccaaaagccagccagttcagggctcaggcctcacccattgcccactcctggggagaccatcacctggctcatcgtttccaccaagagtgccccacaggagtgccccacagacccgctggaccagcctgctgcgggtcctggccaggggtctggctaacggtgagggctgactctgaactgtctctcagtctccagaaagtgttcaagcctgttgtgttcccaaatctgattcctcctattgtcttgtaaatcaaactctaagtgaaaacttcccatttgtcccttcaaagattttttttttattaaatggttttttaagatcc

SEQ ID NO: 1433 - DNA, 1735 bp, Homo sapiens
ctcccgtcccccttccgccgcgtgggtgccatggcaacggagagagacggcaacctgggttccggaagccggagagctggagctttgaagccaccccggtcaaaggatgctgagtccggagcgcctagccctaccggactacgagtatctggctcagcgacatgtcctcacctacatggaggatgcagtgtgccagctgctagaaaacagggaagatattagccaatatggaattgccaggttcttcactgaatattttaacagtgtatgccagggaacacacattctctttcgagaattcagcttcgtccaagccaccccccacaatagggtatcatttttacgggccttctggagatgcttccgaactgtgggcaaaaatggcgatttgctgaccatgaaagaatatcactgtttgctgcaattactgtgtcctgatttcccgctggagctcactcagaaagcagccaggattgtgctcatggacgatgccatggactgcttgatgtctttttcagatttcctctttgccttccagatccagttttactactcagaattcctggacagtgtggctgccatctatgaggacctgctgtcaggcaagaaccccaacacagtgattgtgccgacgtcgtccagtgggcagcaccgccaacgacctgccttgggcggggccggcacgctggagggcgtggaggcgtcgctgttctaccagtgtctggaaaacctgtgtgatcggcacaagtacagctgcccacccccagcacttgtcaaagaggccctcagcaatgttcagagactgaccttctatggattcctcatggctctctcaaagcaccgtggaatcaaccaagccctcggagctttgcctgacaagggggatctgatgcacgacccagcaatggatgaagagctggaacggctgctggcccaggtcccaggcctggtcaactcggtcacagccagtccagaggccagttgcctgccttcccggacccctccccgggttggctctccctggagacctctccatcattcccgaaaagtggatggagagagtgatggctccactgaagagacagacgagtcggagacttgaggagtccaaagggtcctgcccacagcgccctgtacctgctcccacccagcccttggtgtgcccacccagcctcctctccagcaccttgctgtgctgccctctgctgctgacaaggtgaataacagccccaagaccagccagaggggctctgatgatcagcccagccagtggccccggaaggtgaatggcctgctctccctggccctatcagcctgtgaacttcacttaggccccaagctgacagactgtgctgaggccaccttgtcacgccgtagcctgttagtcctcctaacctcttaagagcagtctcttctgagccagcctctgcgggtcccccaataaggttcatctcctcacagcaactccattaagggggagaacccgaatagccacgcagggccttgcaccatcaagggtgacacctgcgacgcaagtaccaggaggacataaccgctgtggcctgttggagaacagccagtagccttggtaatatgaagggtgggccagaagatgatttcacttgcaaaaactgcttcaagtcttgacccctttgtgtctaatagctaaacaaacatgtgaaacgaataaaaagtccctcatgtctggtaaaaaaaaaaaaaaaaaaaaaaaaaa

SEQ ID NO: 1434 - DNA, 1124 bp, Homo sapiens
ccagggcgcgacgcgctgcggctcagcgacgcggcttctagaaccgggtgattgaactaaaccttcgccgcaccgagtttgcagtacggccgtcacccgcaccgctgcctgcttgcggttggagaaatcaaggccctaccgggcctccgtagtcacctctctatagtgggcgtggccgaggccggggtgaccctgccggagcctccgctgccagcgacatgttcaaggtaattcagaggtccgtggggccagccagcctgagcttgctcaccttcaaagtctatgcagcaccaaaaaaggactcacctcccaaaaattccgtgaaggttgatgagctttcactctactcagttcctgagggtcaatcgaagtatgtggaggaggcaaggagccagcttgaagaaagcatctcacagctccgacactattgcgagccatacacaacctggtgtcaggaaacgtactcccaaactaagcccaagatgcaaagtttggttcaatgggggttagacagctatgactatctccaaaatgcacctcctggattttttccgagacttggtgttattggttttgctggccttattggactccttttggctagaggttcaaaaataaagaagctagtgtatccgcctggtttcatgggattagctgcctccctctattatccacaacaagccatcgtgtttgcccaggtcagtggggagagattatatgactggggtttacgaggatatatagtcatagaagatttgtggaaggagaactttcaaaagccaggaaatgtgaagaattcacctggaactaagtagaaaactccatgctctgccatcttaatcagttataggtaaacattggaaactccatagaataaatcagtatttctacagaaaaatggcatagaagtcagtattgaatgtattaaattggctttcttcttcaggaaaaactagaccagacctctgttatcttctgtgaaatcatcctacaagcaaactaacctggaatcccttcacctagagataatgtacaagccttagaactcctcattctcatgttgctatttatgtacctaattaaaacccaagttaaaaaaaaaaaaaaaaaaaaaaaaaaaaaaa

SEQ ID NO: 1435 - DNA, 1463 bp, Homo sapiens
cttagagggagctgtgttttggtgacctctgaaactcagtactgcagcgaatgagctcctgaccttgaggagtacttaacagaattatgtctcgaagaatcattgtgggaacccttcaaagaacccagcgaaacatgaattctggaatctcgcaagtcttccagagggaactcacctgccccatctgcatgaactacttcatagacccggtcaccatagactgtgggcacagcttttgcaggccctgtttctacctcaactggcaagacatcccaattcttactcagtgctttgaatgcataaagacaatacagcagagaaacctcaaaactaacattcgattgaagaagatggcttcccttgccagaaaagccagtctctggctattcctgagctctgaggagcaaatgtgtggcattcacagggagacaaagaagatgttctgtgaagtggacaggagcctgctctgtttgctgtgctccagctctcaggagcaccggtatcacagacactgtcccgctgagtgggctgctgaggaacactgggagaagctgttaaagaaaatgcagtctttatgggaaaaagcttgtgaaaatcagagaaacctgaatgtggaaaccaccagaatcagccactggaaggcttttggagacatattatacaggagtgagtccgtgctgctgcacatgccccagcctctgaatctagcgctcagggcagggcccatcactggactgagggacaggctcaaccaattctgagtggatattactctgcatcacaatgaagccaacagtcatatcttccgatgtggagatttgagaagcatttgtattggatgtgaccgtcaaaatccgccccatatcactgcaacacctacaagttttcttgcatggggtgctcagactttcacctctggcaaatattactgggaggtccatgtgggggactcttggaattgggcttttggtgtctgtaataagtattggaaagggaagaatcagaatggcaatatatatggagaggagggactctttagtcttgggtgtgttaagaacgacattcagtgcagtctctttaccacctccccaattacactgcagtatgtcccaagacctaccaaccatgtagaattattcctggattgtgaagctagaactgtgagcttcgttgatgttagtcaaagctcccctatatacaccatccctaattgctccttctcacctcctctcagacctatctttttctgtattctcctctgaccagagacaaatcagaaatgtgttcatctgctgtgggaacccctttatcccagaaagccctcttccttgtgccttatcaaacaggacaaataggttcggttttatgtcttgaattgcattctaatgttattaaaactcatttattgtgttactattaaatgtagtaaaaacactaaaagtataaaaaaaaaaaaaaaaaaa

SEQ ID NO: 1436 - DNA, 1498 bp, Homo sapiens
cagagtttgggcgccaggcgagacggcagggcttaaagttccgggaatcaaagatcaactcccactgaggacaaatggacctgtaattccgggtgtgacgagagaacgagatttaccttcctgaattaaaaaacaggtcattaagcttgggccctgacttttctttgtgagaaggtacagagatggaaaccttacaatccgagactaaaacgagggtccttccctcatggctgacagcccaggtggctacaaagaatgtggcaccaatgaaggcccccaagaggatgagaatggcagcagtgccagtggcagcagcaagactccctgcgacaaggactgtgtactgcatgaatgaggctgagatagttgatgttgctctgggaatcctgattgagagccgcaaacaggaaaaggcctgcgagcagccggccctggcgggggctgataacccagagcactcccctccctgctccgtgtcgcctcacacaagttctgggagcagcagtgaggaagaggacagtgggaaacaggcactggctccaggcctcagcccttcccagaggccggggggttccagctctgcctgtagcaggagccctgaggaggaggaggaagaggatgtgctgaaatacgtccgggagatctttttcagctagggcataaactgtgcactgaactgtctgccgagagcagctggaggacagctgagcttccactggtgctgctgggccgcccgcctgtgggaatggggctctctgtgctcctacctttgtgccttcttgggcctggcagattcacctcaggccagaagcccctggacactccgggccttggggctgccgttctgagtgtgcggaaggcaggactcaaaatgagatcccatttgactccctctgtatgtactgtgccctctcctggctcttgaggctctggagtcccaattgtctgtgttagtcagtgaccaggttccagggaaaatgatgtcatgtggtggtccaacttactggaaccaaagagacagtactttgcaaagaaaaggatcactgccaggtgcactggaattgctacagtttagtccgcatgatctctcctgaaggaggaagcctgtttcaaaaatagtttccatcatgagtctatcaatgagctcccacctctccagccagcctagaaagcaaacgagctgcccacagttctctgccctgtctgggaggttgaggccacagtgtatagactggtaagccagacaggcctcctcccgcaagctgctaccttgctttcacctgtaccttggtccccgggcagctagctataaagcaagagggacaggagcccagaagagacactgaggacaagagatcacaccagagtacatgtctctgcctctgttttcagtgtggctttggacaggaatatatgaataaatcactgccatacaggttttccaatacacaagtgctagaaaatacacacaattccccaatgaaaaaaaaaaaaaaaa

SEQ ID NO: 1437 - DNA, 1214 bp, Homo sapiens
gcgcgggccggcgcgggagcaagcggcatggcgttccggcaggcgctgcagctggcggcctgcgggctggccgggggctcggccgccgtgctcttctcggccgtggcggtagggaagccgcgcgcaggcggggacgcggagccacgcccggctgagccgccggcctgggcggggggcgcgcggccgggccccggtgtctgggaccccaactgggacaggcgagaaccactgtctctgatcaacgtgcggaagaggaacgtggaatctggggaagaagagctggcgtccaagctggaccactacaaagccaaggccacgcggcacatcttcctcatcaggcattcccagtaccacgtggatggctccctggagaaggaccgcactctgaccccgctgggtcgggagcaggctgaactcactgggctccgcctggcaagcttggggttgaagtttaataaaatcgtccattcgtctatgacgcgcgccatagagaccaccgatatcatcagccggcacctgccaggcgtctgcaaagtcagcacagatctgctgcgggaaggcgcccccatcgagccagacccgcccgtgtctcattggaagccggaagctgtgcagtattacgaagacggagcccggatcgaggccgccttccggaactacatccaccgcgcagatgccaggcaggaggaggacagttacgaaatcttcatctgtcacgccaacgtcatccgctacatcgtgtgcagcatcccgccgctgttgtccgctggggattttgtggttctggggtcctgacctctttcacttgctgatctgtgggcgctcccacccgtgtgccagcgtgacggctcggggtgtccgctcccctctgggtcgaggccacagctgagtcacgttgctgctcgggctgctccctcggggggcccttgtccctcaacctgctctggtgccccactctcagcaccacagaatgatccgggttcaggttgcgttttccctgccaccaccctgcaatcagccacttctttaaggagctccagggctgcagccacgttagagggccccttggggggcagggccagctctacggttacatgcctgaaacagtcagaagggttggccaaatctcactaaatgcaaatttgaaacaacaaaaaaaaaaaaaaaaaaaaaaaaaaaaaaaaaaaaaaaaaaaaaaaaaaaaaaaaaaaaaa

SEQ ID NO: 1438 - DNA, 1435 bp, Homo sapiens
ctgaacttccccgttcctcttctcggctgcctccttttccgttgtcccttcgcgccccaaaccacatcctggagcgcactctccagcgtggctggcagcggggacggtgcgccggggcgcaggcccaagagtcgcgtgcgcggccccttgcaccatccccccgggcccacccccgggccgcgctgattgggcaggtagggactctgcccagcggaaagttttgggtgccgggaggaagtctaacctttgggagactccaagacagcagctccgaggtcggcgggggtctgggtggccatggaggagccccctgtgcgagaagaggaagaggaggagggagaggaggacgaggagagggacgaggttgggcccgagggggcgctgggcaagagccccttccagctgaccgccgaggacgtgtatgacatctcctacctgttgggccgcgagcttatggccctgggcagcgacccccgggtgacgcagctgcagttcaaagtcgtccgcgtcctggagatgctggaggcgctggtgaatgagggcagcctggcgctggaggagctgaagatggagagggaccacctcaggaaggaggtggaggggctgcggagacagagccctccggccagcggggaggtgaacctgggcccaaacaaaatggtggttgacctgacagatcccaaccgaccccgcttcactctgcaggagctaagggatgtgctgcaggaacgcaacaaactcaagtcgcagctcctggtggtgcaggaagagctgcagtgctacaagagtggcctgattccaccaagagaaggcccaggaggaagaagagaaaaagatgctgtggttactagtgccaaaaatgctggcaggaacaaggaggagaagacaatcataaaaaagctgttcttttttcgatcggggaaacagacctagatccaaggccacaagtaaggctatggctctgattctagaagacaaccttccaagatgcctggcaaaaccacctccctgtgccacacagacacactaggcctgtgtatttatttccccttcaaagcagactgaggagggaggagacgaggttctcttggcatcactttctccctggctgcagaactagacacccttgaagatttggcctgggccagtgagactgaaatcaagaaaaacagaagggatgtgcagggtgggggggtccacttcctgctcccatgtcaacccccagggcctccagtgtgcagacgcgtgtcctactcatctgctcccacggatgaccctggtcttcaatggttagcagaagggagaaaagaaagcaggaaaatgtgctattgagattccagtggtgacttcactgatatttagtgaatatttgatttagccaacatgcctttctttatgtgattttgtattaaagtaaaatgatttttatactttc

SEQ ID NO: 1439 - DNA, 1249 bp, Homo sapiens
ggggctcctggctgtgggtgtggtaccgaggcttcagcgggtgccgcccgcctagagggagtggagcggtgagcacgtcaggggtggggggcgcaggtcaagctttcaccagtttttaattctttgatggggtaaatttgagcaattttctcgacttgtcgacattcgttattaactgagcaggaatcaggagaggaacccggtcctctccacacagcccagcaggtacgccgcccatgtgcctgtggagaagagaggttcctgtggggcagacagagagcctacgactagatttgcatctttacgtcctgcgcggaggctgctacacacatgcagaagtcatgctggtggcctggacagtgaagggagagaagtggatttgggagacatttaggagatggcaccaaaagcgaaggaagctcctgctcatcctaaagccgaagccaaagcgaaggctttaaaggccaagaaggcagtgttgaaaggtgtccgcagccacacgcaaaaaagaagatccgcatgtcactcaccttcaggcggcccaagacactgcgactccggaggcagcccagatatcctcggaagagcacccccaggagaaacaagcttggccactatgctatcatcaagtttccgctggccactgagtcggccgtgaagaagatagaagaaaacaacacgcttgtgttcactgtggatgttaaagccaacaagcaccagatcagacaggctgtgaagaagctctatgacagtgatgtggccaaggtcaccaccctgatttgtcctgataaggagaacaaggcatatgttcgacttgctcctgattatgatgctttcgatgttgtaacaaaattgggatcacctaaactgagtccagctggctaactctaaatatatgtgtatcttttcagcataaaaaaataatgtttttcataagaatgacaacttaattagaatcaaatctataagctttaagattttacgtttctagtaagtataatattagcttatttgactagaactcaagcagaataggaatttatgcttgttttatattcaataatgataattttgaagatatagttgttttattacaccaaaaatactatattaatcttatttaactaagttttatccaaatcatgttaacttaagaaacatttgatcagttcctatatttctaggagtttggtgaatatttatttataaatgcttatttttttccaagccaagttagaatagagcactt

SEQ ID NO: 1440 - DNA, 1485 bp, Homo sapiens
atgccgtttgggtgtgtgactctgggtgacaagaagaactataaccagccatcggaggtgactggcagatatgatttgggacaggtcatcaagactgaggagttttgtgaaatcttccgggccaaggacaagacgacaggcaagctgcacacctgcaagaagttccagaagcgggacggccgcaaggtgcggaaagctgccaagaacgagataggcatcctcaagatggtgaagcatcccaacatcctacagctggtggatgtgtttgtgacccgcaaggagtactttatcttcctggagctggccacggggagggaggtgtttgactggatcctggaccagggctactactcggagcgagacacaagcaacgtggtacggcaagtcctggaggccgtggcctatttgcactcactcaagatcgtgcacaggaatctcaagctggagaacctggtttactacaaccggctgaagaactcgaagattgtcatcagtgacttccatctggctaagctagaaaatggcctcatcaaggagccctgtgggacccccgagtatctgggcaacccacctttctatgaggaggtggaagaagatgattatgagaaccatgataagaatctcttccgcaagatcctggctggtgactatgagtttgactctccatattgggatgatatttcgcaggcagccaaagacctggtcacaaggctgatggaggtggagcaagaccagcggatcactgcagaagaggccatctcccatgagtggatttctggcaatgctgcttctgataagaacatcaaggatggtgtctgtgcccagattgaaaagaactttgccagggccaagtggaagaaggctgtccgagtgaccaccctcatgaaacggctccgggcaccagagcagtccagcacggctgcagcccagtcggcctcagccacagacactgccacccccggggctgcaggtggggccacagctgcagctgcgagtggagctacctcagcccctgagggtgatgctgctcgtgctgcaaagagtgataatgtggcccccgcagaccgtagtgccaccccagccacagatggaagtgccaccccagccactgatggcagtgtcaccccagccaccgatggaagcatcactccagccactgatgggagtgtcaccccagccactgacaggagcgctactccagccactgatgggagagccacaccagccacagaagagagcactgtgcccaccacccaaagcagtgccatgctggccaccaaggcagctgccacccctgagccggctatggcccagccggacagcacagccccagagggcgccacaggccaggctccaccctctagtaaaggggaagaggctgctggttatgcccaggagtctcaaagggaggaggccagctgagtaggcagcctggtgagggggggcaggggatgggcaggagggtgggagagtggatgaggggct

SEQ ID NO: 1441 - DNA, 1977 bp, Homo sapiens
acgggccgcagcggcagtgacgtagggttggcgcacggatccgttgcggctgcagctctgcagtcgggccgttccttcgccgccgccaggggtagcggtgtagctgcgcagcgtcgcgcgcgctaccgcacccaggttcggcccgtaggcgtctggcagcccggcgccatcttcatcgagcgccatggccgcagcctgcgggccgggagcggccgggtactgcttgctcctcggcttgcatttgtttctgctgaccgcgggccctgccctgggctggaacgaccctgacagaatgttgctgcgggatgtaaaagctcttaccctccactatgaccgctataccacctcccgcaggctggatcccatcccacagttgaaatgtgttggaggcacagctggttgtgattcttataccccaaaagtcatacagtgtcagaacaaaggctgggatgggtatgatgtacagtgggaatgtaagacggacttagatattgcatacaaatttggaaaaactgtggtgagctgtgaaggctatgagtcctctgaagaccagtatgtactaagaggttcttgtggcttggagtataatttagattatacagaacttggcctgcagaaactgaaggagtctggaaagcagcacggctttgcctctttctctgattattattataagtggtcctcggcggattcctgtaacatgagtggattgattaccatcgtggtactccttgggatcgcctttgtagtctataagctgttcctgagtgacgggcagtattctcctccaccgtactctgagtatcctccattttcccaccgttaccagagattcaccaactcagcaggacctcctcccccaggctttaagtctgagttcacaggaccacagaatactggccatggtgcaacttctggttttggcagtgcttttacaggacaacaaggatatgaaaattcaggaccagggttctggacaggcttgggaactggtggaatactaggatatttgtttggcagcaatagagcggcaacacccttctcagactcgtggtactacccgtcctatcctccctcctaccctggcacgtggaatagggcttactcaccccttcatggaggctcgggcagctattcggtatgttcaaactcagacacgaaaaccagaactgcatcaggatatggtggtaccaggagacgataaagtagaaagttggagtcaaacactggatgcagaaattttggatttttcatcactttctctttagaaaaaaagtactacctgttaacaattgggaaaaggggatattcaaaagttctgtggtgttatgtccagtgtagctttttgtattctattatttgaggctaaaagttgatgtgtgacaaaatacttatgtgttgtatgtcagtgtaacatgcagatgtatattgcagtttttgaaagtgatcattactgtggaatgctaaaaatacattaatttctaaaacctgtgatgccctaagaagcattaagaatgaaggtgttgtactaatagaaactaagtacagaaaatttcagttttaggtggttgtagctgatgagttattacctcatagagactataatattctatttggtattatattatttgatgtttgctgttcttcaaacatttaaatcaagctttggactaattatgctaatttgtgagttctgatcacttttgagctctgaagctttgaatcattcagtggtggagatggccttctggtaactgaatattaccttctgtaggaaaaggtggaaaataagcatctagaaggttgttgtgaatgactctgtgctggcaaaaatgcttgaaacctctatatttctttcgttcataagaggtaaaggtcaaatttttcaacaaaagtcttttaataacaaaagcatgcagttctctgtgaaatctcaaatattgttgtaatagtctgtttcaatcttaaaaagaatca

SEQ ID NO: 1442 - DNA, 1445 bp, Homo sapiens
gtccggaggaggcgttgtgaggtgagctttttcagaagcgcgatcccaggacacgtcgggaagcaagcatccccagagctgcttggaaagaggaccaaagacgtctaaaaagtcatttggaaatatctctaaatatttgttaccatgtataagctgctaaagagaaattgggcccaacaaaactaattgaataattgaggcagatttgtgtgtatcatcaaattctatccagaagttgaagaatctgaatttaaagattgtgtgcatttaataagaggatgacctttcagtttaatttcactatagaagaccatctggaaaatgaattaacacccattagagatggagctttgaccctggattcctcaaaagagctgtcagtctcagaaagtcaaaaaggagaagagagggacagaaaatgttctgcagaacaatttgacttgcctcaggatcacttgtgggaacataagtcaatggaaaatgcagctccctctcaagacacagacagtccactcagtgcagccagcagttcaaggaacttggagccacatggaaaacagccctccttgagagctgccaaagagcatgctatgcctaaagatttaaagaagatgttagaaaataaagtcatagaaacattaccaggtttccagcatgttaagttatcagtagtgaaaaccatcttgttgaaagagaacttccctggagaaaacatagtttcaaaaagcttttcttctcactctgatctgattacaggtgtttatgagggaggcttaaaaatctgggaatgtacctttgacctcctggcttatttcacaaaggccaaagtgaaatttgctgggaaaaaagtcttggatcttggttgtggatcaggtttactaggtataactgcattcaagggagggtccaaagaaattcactttcaagattataacagtatggtgattgatgaagtaaccttacctaatgtagtagctaactccactttggaagatgaagaaaatgatgtaaatgagccagatgtgaaaagatgcaggaaaccaaaagtaacacaactatataaatgccgatttttttctggtgagtggtctgagttttgtaagcttgtactaagtagtgaaaaactttttgtaaaatatgatctcattctcacctcagaaaccatttacaacccagattattatagtaatttgcaccagactttccttagactgttaagtaaaaatggacgtgtacttttggccagcaaagcacattattttggtgtaggtggaggtgttcatctctttcagaagtttgtagaagaaagagatgtttttaagaccagaatactcaaaataattgatgaaggattgaagaggttcataattgaaataacttttaagtttcctggttaattaacattcactgagtatccaaaatgaaataaacagaaggaccaaaaa

SEQ ID NO: 1443 - DNA, 661 bp, Homo sapiens
tggttcttataaaaacctcacagccttccactaacatcccgtaggagcctctctccctactgctgctacacaagaccctgagactgacctgcaggacgaaaccatgaagagcctgatccttcttgccatcctggccgccttagcggtagtaactttgtgttatgaatcacatgaaagcatggaatcttatgaacttaatcccttcattaacaggagaaatgcaaataccttcatatcccctcagcagagatggagagctaaagtccaagagaggatccgagaacgctctaagcctgtccacgagctcaatagggaagcctgtgatgactacagactttgcgaacgctacgccatggtttatggatacaatgctgcctataatcgctacttcaggaagcgccgagggaccaaatgagactgagggaagaaaaaaaatctctttttttctggaggctggcacctgattttgtatccccctgtagcagcattactgaaatacataggcttatatacaatgcttctttcctgtatattctcttgtctggctgcacccctttttcccgcccccagattgataagtaatgaaagtgcactgcagtgagggtcaaaggagagtcaacatatgtgattgttccataataaacttctggtgtgatacttt

SEQ ID NO: 1444 - DNA, 538 bp, Homo sapiens
agggagagagggaggggaggaaattggagaccccagcacccccttgctcactctcttgctcacagtccacgatggcccggtccctggtgtgccttggtgtcatcatcttgctgtctgccttctccggacctggtgtcaggggtggtcctatgcccaagctggctgaccggaagctgtgtgcggaccaggagtgcagccaccctatctccatggctgtggcccttcaggactacatggcccccgactgccgattcctgaccattcaccggggccaagtggtgtatgtcttctccaagctgaagggccgtgggcggctcttctggggaggcagcgttcagggagattactatggagatctggctgctcgcctgggctatttccccagtagcattgtccgagaggaccagaccctgaaacctggcaaagtcgatgtgaagacagacaaatgggatttctactgccagtgagctcagcctaccgctggccctgccgtttcccctccttgggtttatgcaaatacaatcagcccagtgcaaac

SEQ ID NO: 1445 - DNA, 1365 bp, Homo sapiens
cactgcttgagccgctgagagggtggcgacgtcggggccatggggctgggcccggtcttcctgcttctggctggcatcttcccttttgcacctccgggagctgctgctgagccccacagtcttcgttataacctcacggtgctgtcctgggatggatctgtgcagtcagggtttctcactgaggtacatctggatggtcagcccttcctgcgctgtgacaggcagaaatgcagggcaaagccccagggacagtgggcagaagatgtcctgggaaataagacatgggacagagagaccagagacttgacagggaacggaaaggacctcaggatgaccctggctcatatcaaggaccagaaagaaggcttgcattccctccaggagattagggtctgtgagatccatgaagacaacagcaccaggagctcccagcatttctactacgatggggagctcttcctctcccaaaacctggagactaaggaatggacaatgccccagtcctccagagctcagaccttggccatgaacgtcaggaatttcttgaaggaagatgccatgaagaccaagacacactatcacgctatgcatgcagactgcctgcaggaactacggcgatatctaaaatccggcgtagtcctgaggagaacagtgccccccatggtgaatgtcacccgcagcgaggcctcagagggcaacattaccgtgacatgcagggcttctggcttctatccctggaatatcacactgagctggcgtcaggatggggtatctttgagccacgacacccagcagtggggggatgtcctgcctgatgggaatggaacctaccagacctgggtggccaccaggatttgccaaggagaggagcagaggttcacctgctacatggaacacagcgggaatcacagcactcaccctgtgccctctgggaaagtgctggtgcttcagagtcattggcagacattccatgtttctgctgttgctgctgctgctatttttgttattattattttctatgtccgttgttgtaagaagaaaacatcagctgcagagggtccagagctcgtgagcctgcaggtcctggatcaacacccagttgggacgagtgaccacagggatgccacacagctcggatttcagcctctgatgtcagatcttgggtccactggctccactgagggcgcctagactctacagccaggcagctgggattcaattccctgcctggatctcacgagcactttccctcttggtgcctcagtttcctgacctatgaaacagagaaaataaaagcacttatttattgttgttggaggctgcaaaatgttagtagatatgaggcgtttgcagctgtaccatatt

SEQ ID NO: 1446 - DNA, 2497 bp, Homo sapiens
actggataagcggtcgctgagcggggcgcaggtgactaaatttcgacggggtcttctcacgggtttcattcagttggccactgctgagcagctgagaaggtggcgacgtaggggccatggggctgggccgggtcctgctgtttctggccgtcgccttcccttttgcacccccggcagccgccgctgagccccacagtcttcgttacaacctcatggtgctgtcccaggatggatctgtgcagtcagggtttctcgctgagggacatctggatggtcagcccttcctgcgctatgacaggcagaaacgcagggcaaagccccagggacagtgggcagaaaatgtcctgggagctaagacctgggacacagagaccgaggacttgacagagaatgggcaagacctcaggaggaccctgactcatatcaaggaccagaaaggaggcttgcattccctccaggagattagggtctgtgagatccatgaagacagcagcaccaggggctcccggcatttctactacgatggggagctcttcctctcccaaaacctggagactcaagaatcgacagtgccccagtcctccagagctcagaccttggctatgaacgtcacaaatttctggaaggaagatgccatgaagaccaagacacactatcgcgctatgcaggcagactgcctgcagaaactacagcgatatctgaaatccggggtggccatcaggagaacagtgccccccatggtgaatgtcacctgcagcgaggtctcagagggcaacatcaccgtgacatgcagggcttccagcttctatccccggaatatcacactgacctggcgtcaggatggggtatctttgagccacaacacccagcagtggggggatgtcctgcctgatgggaatggaacctaccagacctgggtggccaccaggattcgccaaggagaggagcagaggttcacctgctacatggaacacagcgggaatcacggcactcaccctgtgccctctgggaaggcgctggtgcttcagagtcaacggacagactttccatatgtttctgctgctatgccatgttttgttattattattattctctgtgtcccttgttgcaagaagaaaacatcagcggcagagggtccagagcttgtgagcctgcaggtcctggatcaacacccagttgggacaggagaccacagggatgcagcacagctgggatttcagcctctgatgtcagctactgggtccactggttccactgagggcacctagactctacagccaggcggccaggattcaactccctgcctggatctcaccagcactttccctctgtttcctgacctatgaaacagagaaaataacatcacttatttattgttgttggatgctgcaaagtgttagtaggtatgaggtgtttgctgctctgccacgtagagagccagcaaagggatcatgaccaactcaacattccattggaggctatatgatcaaacagcaaattgtttatcatgaatgcaggatgtgggcaaactcacgactgctcctgccaacagaaggtttgctgagggcattcactccatggtgctcattggagttatctactgggtcatctagagcctattgtttgaggaatgcagtcttacaagcctactctggacccagcagctgactccttcttccacccctcttcttgctatctcctataccaataaatacgaagggctgtggaagatcagagcccttgttcacgagaagcaagaagccccctgaccccttgttccaaatatactcttttgtctttctctttattcccacgttcgccctttgttcagtccaatacagggttgtggggcccttaacagtgccatattaattggtatcattatttctgttgtttttgtttttgtttttgtttttgtttttgagacagagtctcactctgtcacccaggctgcagttcactggtgtgatctcagctcactgcaacctctgcctcccaggttcaagcacttctcgtacctcagactcccgaatagctgggattacagacaggcaccaccacacccagctaatttttgtattttttgtagagacggggtttcgccaagttgaccagcccagtttcaaactcctgacctcaggtgatctgcctgccttggcatcccaaagtgctgggattacaagaatgagccaccgtgcctggcctattttattatattgtaatatattttattatattagccaccatgcctgtcctattttcttatgttttaatatattttaatatattacatgtgcagtaattagattatcatgggtgaactttatgagtgagtatcttggtgatgactcctcctgaccagcccaggaccagctttcttgtcaccttgaggtcccctcgccccgtcacaccgttatgcattactctgtgtctactattatgtgtgcataatttataccgtaaatgtttactctttaaatagaaaaaaaaaaaaaaa

SEQ ID NO: 1447 - DNA, 2202 bp, Homo sapiens
gcgcctctccggagatggtctgaggtgggagaagagctgaagagacctggagccgacagacgggtgaaggccatgccgcctcctgggaaagttccccgaaaggagaatctgtggctacagtgtgagtgggggtcctgctcctttgtgtgctcaaccatggaaaagttctttgagcatgtcactcagcacctgcagcagcacctgcatggctctggggaggaggaggaagaggaagaggaggatgacccacttgaggaagaattctcctgcttgtggcaggaatgtggcttttgttctctggacagttctgctgacctcatccgccatgtctacttccactgctaccacaccaagctgaaacagtgggggctgcaggccttgcaaagccaggctgaccttggcccctgcatcctggacttccagagccggaacgtcatccctgatatccctgaccacttcctgtgtctgtgggagcactgtgagaattccttcgacaatcctgagtggttttatcggcatgtggaagcacacagtctgtgctgtgaatacgaagcagtcggcaaggacaacccggtggtgctgtgtggctggaaaggctgtacctgcaccttcaaggaccgcagtaaacttcgagagcacctccgcagccatacccaggagaaagtggtagcctgccccacctgtgggggcatgtttgccaacaataccaagttcttagatcacatccgtcgccagacctcattggatcagcagcacttccagtgttctcactgttccaagagatttgccacagagcggctattgcgggaccacatgcgcaaccatgtgaatcactataagtgccctctgtgtgacatgacctgcccgctgccttcctccctccgcaaccacatgcgctttcgtcacagtgaggaccggccctttaaatgtgactgttgtgactacagctgcaagaatcttattgacctccagaagcacctggatacccacagcgaggagccagcctacaggtgtgattttgagaactgcaccttcagtgcccgatccctctgctctatcaagtcccattaccgcaaagtacatgaaggagactctgagccaaggtacaaatgtcatgtgtgtgacaaatgcttcacacggggcaacaacctcaccgtgcaccttcgcaagaagcaccagttcaagtggccctcagggcatccccgttttcggtacaaggaacatgaagatggctatatgcggctgcagctggttcgctacgagagtgtagagctgacacagcaactgctgcggcaaccacaagagggatcgggcctgggaacgtcgctgaacgagagcagcctgcagggcattattctagaaacagtgccaggggagccaggacgtaaggaagaggaagaggagggcaagggtagcgaagggacagccctctcagcctctcaggacaaccccagttctgtcatccacgtggtgaatcagaccaatgcccaaggccagcaagagattgtctactatgtgctgtctgaagccccaggggagcctcccccagcccctgagccaccttcagggggcatcatggaaaagcttcaaggaatagctgaggagccagagatccagatggtttgaaggccgcagagccagaccatttcttccccaggtcctgaagtttgagccaggcaagtggcagtgcccctagtgggcagccgttgccaatggatgcctttaggagtggtgccgagagcagtgtggtccactctggcctgggtttgcatcattctgcagactctaaagacttcccttttctgccagactacattttgtggggagcctgaggactctggattctttgaggggatcctggatgtgtgtgttcttgttaaagaggctgttatcaggcttaaccataaccctcaagatctgcttgacagtgattaaatccttagctcacatccattcccatctttcgggctccttaggcccaaggatggcatgtgactggtccctgcaagggtcctttctttgtcaccagccaaggcattgataaccaagtagccattttcctcttaaggtttcctctacaaccccaaggactttcatgattatcctcagggacaggattggaggcattgagcgtgtttattaacaaattgtttttggtaataaaataaatgcttggactcttaaaaaaaaaaaaaaaaaaaa

SEQ ID NO: 1448 - DNA, 1735 bp, Homo sapiens
ggggcggagctggagggggtggttcggcgtgggggccgttggctccagacaaataaacatggagtccatcttccacgagaaacagccttctggaaatatggatgacagtggttttttctctattcaggttataagcaatgccttgaaagtttggggtttagaactaatcctgttcaacagtccagagtatcagaggctcaggatcgatcctataaatgaaagatcatttatatgcaattataaggaacactggtttacagttagaaaattaggaaaacagtggtttaacttgaattctctcttgacgggtccagaattaatatcagatacatatcttgcacttttcttggctcaattacaacaggaaggttattctatatttgtcgttaagggtgatctgccagattgcgaagctgaccaactcctgcagatgattagggtccaacagatgcatcgaccaaaacttattggagaagaattagcacaactaaaagagcaaagagtccataaaacagacctggaacgagtgttagaagcaaatgatggctcaggaatgttagacgaagatgaggaggatttgcagagggctctggcactaagtcgccaagaaattgacatggaagatgaggaagcagatctccgcagggctattcagctaagtatgcaaggtagttccagaaacatatctcaagatatgacacagacatcaggtacaaatcttacttcagaagagcttcggaagagacgagaagcctactttgaaaaacagcagcaaaagcagcaacagcagcagcagcagcagcagcagggggacctatcaggacagagttcacatccatgtgaaaggccagccaccagttcaggagcacttgggagtgatctaggtgatgctatgagtgaagaagacatgcttcaggcagctgtgaccatgtctttagaaactgtcagaaatgatttgaaaacagaaggaaaaaaataatacctttaaaaaataatttagatattcatactttccaacattatcctgtgtgattacagcatagggtccactttggtaatgtgtcaaagagatgaggaaataagacttttagcggtttgcaaacaaaatgatgggaaagtggaacaatgcgtcggttgtaggactaaataatgatcttccaaatattagccaaagaggcattcagcaattaaagacatttaaaatagttttctaaatgtttctttttcttttttgagtgtgcaatatgtaacatgtctaaagttagggcatttttcttggatctttttgcagactagctaattagctctcgcctcaggctttttccatatagtttgttttctttttctgtcttgtaggtaagttggctcacatcatgtaatagtggctttcatttcttattaaccaaattaacctttcaggaaagtatctctactttcctgatgttgataatagtaatggttctagaaggatgaacagttctcccttcaactgtataccgtgtgctccagtgttttcttgtgttgttttctctgatcacaacttttctgctacctggttttcattattttcccacaattcttttgaaagatggtaatcttttctgaggtttagcgttttaagccctacgatgggatcattatttcatgactggtgcgttcctaaactctgaaatcagccttgcacaagtacttgagaataaatgagcattttttaaaaaaaaaaaaaaaaaaaaaa

SEQ ID NO: 1449 - DNA, 1900 bp, Homo sapiens
ggggcggagctggagggggtggttcggcgtgggggccgttggctccagacaaataaacatggagtccatcttccacgagaaacaagaaggctcactttgtgctcaacattgcctgaataacttattgcaaggagaatattttagccctgtggaattatcctcaattgcacatcagctggatgaggaggagaggatgagaatggcagaaggaggagttactagtgaagattatcgcacgtttttacagcagccttctggaaatatggatgacagtggttttttctctattcaggttataagcaatgccttgaaagtttggggtttagaactaatcctgttcaacagtccagagtatcagaggctcaggatcgatcctataaatgaaagatcatttatatgcaattataaggaacactggtttacagttagaaaattaggaaaacagtggtttaacttgaattctctcttgacgggtccagaattaatatcagatacatatcttgcacttttcttggctcaattacaacaggaaggttattctatatttgtcgttaagggtgatctgccagattgcgaagctgaccaactcctgcagatgattagggtccaacagatgcatcgaccaaaacttattggagaagaattagcacaactaaaagagcaaagagtccataaaacagacctggaacgagtgttagaagcaaatgatggctcaggaatgttagacgaagatgaggaggatttgcagagggctctggcactaagtcgccaagaaattgacatggaagatgaggaagcagatctccgcagggctattcagctaagtatgcaaggtagttccagaaacatatctcaagatatgacacagacatcaggtacaaatcttacttcagaagagcttcggaagagacgagaagcctactttgaaaaacagcagcaaaagcagcaacagcagcagcagcagcagcagcagggggacctatcaggacagagttcacatccatgtgaaaggccagccaccagttcaggagcacttgggagtgatctaggtgatgctatgagtgaagaagacatgcttcaggcagctgtgaccatgtctttagaaactgtcagaaatgatttgaaaacagaaggaaaaaaataatacctttaaaaaataatttagatattcatactttccaacattatcctgtgtgattacagcatagggtccactttggtaatgtgtcaaagagatgaggaaataagacttttagcggtttgcaaacaaaatgatgggaaagtggaacaatgcgtcggttgtaggactaaataatgatcttccaaatattagccaaagaggcattcagcaattaaagacatttaaaatagttttctaaatgtttctttttcttttttgagtgtgcaatatgtaacatgtctaaagttagggcatttttcttggatctttttgcagactagctaattagctctcgcctcaggctttttccatatagtttgttttctttttctgtcttgtaggtaagttggctcacatcatgtaatagtggctttcatttcttattaaccaaattaacctttcaggaaagtatctctactttcctgatgttgataatagtaatggttctagaaggatgaacagttctcccttcaactgtataccgtgtgctccagtgttttcttgtgttgttttctctgatcacaacttttctgctacctggttttcattattttcccacaattcttttgaaagatggtaatcttttctgaggtttagcgttttaagccctacgatgggatcattatttcatgactggtgcgttcctaaactctgaaatcagccttgcacaagtacttgagaataaatgagcattttttaaaaaaaaaaaaaaaaaaaaaa

SEQ ID NO: 1450 - DNA, 11157 bp, Homo sapiens
gggggccgctacggtgctgacaagatggcggctggcggagctgtcgctgcggcgcccgagtgccggcttctcccctacgcgctacacaagtggagctccttttcctccacctaccttcccgagaacattttagtggacaaaccaaatgaccaatcttcaagatggtcttcagagagcaactatcctccccagtacttgattctaaagctcgaaaggcctgctatagttcagaatatcacatttggaaaatatgagaaaactcatgtttgcaatttgaagaaatttaaagtctttggtggaatgaatgaagaaaatatgacagagctgttgtccagtggcttaaagaatgattataacaaagaaacattcaccttgaagcataaaattgatgaacagatgttcccttgtcgattcattaaaatagttccactcttgtcctggggacccagctttaactttagcatctggtatgttgaacttagtggcattgatgatcctgatatagtacaaccttgtctcaactggtatagcaagtaccgtgaacaggaagctattcgcctttgcctaaaacacttcagacaacacaactatacagaagcttttgagtcactgcaaaagaaaaccaagattgcactggaacatcccatgttaacagatattcatgacaagctggtgttgaagggtgattttgatgcttgcgaagagttgattgaaaaggctgtaaatgatggcttgttcaatcagtatatcagtcaacaggaatataagccacgatggagtcaaatcattcccaaaagtaccaaaggtgatggggaagataaccgtccaggaatgagaggaggccatcagatggttattgatgttcaaacagagactgtttatttgtttggtggctgggatggaacacaagatcttgctgacttctgggcgtacagtgtgaaggagaaccagtggacatgtatctctagagacactgaaaaagagaatggtcctagtgccagatcgtgtcataaaatgtgcattgatattcaacggaggcaaatctacacattggggcgttacttggattcctctgtgaggaacagcaaatctctgaaaagtgacttctatcgttatgacattgatacaaacacatggatgttactaagtgaggatactgctgctgatggagggccgaaattggtgtttgatcatcagatgtgtatggactcagaaaaacatatgatctacacttttggtggtagaattttgacttgtaatggcagcgtagatgacagcagagccagtgaaccacaattcagtggcttgtttgctttcaactgtcaatgtcaaacctggaaacttcttcgagaggactcctgtaatgctgggcctgaggacatccagtctcgaataggacactgcatgttattccactcaaaaaatcgttgcttatatgtatttggtggccagcgatcaaagacctatttgaatgatttctttagttatgatgtggactctgatcatgtagacataatatcagatggcaccaagaaagactctgggatggttccaatgacaggatttacacagagagcaactattgatccagaactgaatgaaatacacgtcttatctggactcagcaaagataaggaaaagagggaagaaaatgttagaaattcattctggatttatgacattgtgaggaatagttggtcttgtgtctataagaatgatcaagctgcaaaggataatccaactaaaagtcttcaggaagaagaaccatgtccaaggtttgcccatcagcttgtatacgatgagctacacaaggttcattacttatttggtgggaatccaggaaaatcttgctctccaaagatgagattagatgacttctggtcactgaagttgtgtagaccttcaaaagattatttactgaggcattgcaagtacctcataagaaaacacaggtttgaagaaaaggcccaagtggatccccttagtgctctgaaatatttacaaaatgatctttatataactgtggatcattcagacccagaagagacaaaagagtttcagctcctggcatcagctctattcaaatctggttcagattttacagctctgggcttttctgatgtggatcacacctatgctcaaagaactcagctctttgacaccttagtaaatttctttcctgacagcatgactcctcctaaaggcaacctggtagacctcatcacactgtaactgaagagtcactggacacagaaatggaaaacaggagtcgattttccgtcttttggattgcagctccactgactgacagtaaagctgcagtgattgaggactgcaccagagttctgaagggatcttaaccatcacaagtttttaccctcttccttcatgcctgacctcaaccccgctctcctcatcctattcctaaattaggctaataaagtgaaattggtatactttccagttaaatatatatatatatatattttttcttactttatcttttaagaattaatgagtataaaagaaaaattaggcagtttacccttttcagatttttatttcttttttttttaattgggggaaataagcactattaacagattcagcactacaagtattttgaatgttgttgctgttggtcatttggcctgccttttcccttcctatttcactttgcctcccatcacacaactgcgtgtaaatggtgtcacttgttcacctctttacttcattcttaacaagtgtatagttctctaggacagttgatgtatgttaaggtgatatctgtgtctgtattgacttgtcttgtgttacattaaacagtaggcagaactgaggtctcaagtttgcactcttggccatagaactaaaaatgaaacctgagattgacccaagcacctatctgagattggtatataatatttctataatgatatattttatagtagatattacaatagcatctgactttgagtcacagaaaccttaaactgaggagacaatagttcagaacctttttaagagccattctaaaagtgaccagcaggagggatctagtagtgaataatatcttaatagcaattttaggagaaaatgactctttcgtccagaagagctctgcagaaccagggctcccgtttatcttgtgctatctctgtagtattttcatttgagagaggaggctgagtttccagagctttgctttcatttatttttatacacattgtctctctatatctgcttgtggatattgttattttgaagagaaatggtttgtggttgtccagtggtatacaactgacaggcatttcattaagcacatagaccagactttgtgaatggttcagatattttttcattaaaaaacaaggtatggcagatggacttttccatgggtcaaattttttgtgtgagagatagaggtacatgtcttctgatgatgtgctgtggaatgcaatgtgggaaacctacatctggctagtgcttacatttgctcaaaaagcatgttgtatgaagctgactgccaccatgctaaagcagattcatattaagaagtgtcggtcgatccagtggctcttaagagtgaatagctttatggaatcaagtatgtccctgagtagcaagattaggcctcaccaaagaagaaattaacctgcactttcaaaaagtaccatgtataggaatgaaacattgaggtcccactttattctgtctttagtacatggttttacttattttggggatggatagaaatatatttttgctagttctaggcttgaatcatgggctccttggctttcctagcatcccaaagcagtcaacagtgatttcttaagcaatttgatctgtacctttacttgtgaaaggtatgctatataattcagcaagtaccaacttgtgtagctgcagaataaccaagtggctatccagtcaagtaaatacagtttgcttacatacttcaacagtttcataaaacgattcccctgagtgacacaagaacataaaatgttaatatcactaatatagcctgttaaatcttttgtggagacaggtgcaaatcagaagattgacaaggaagaacttgagcttgctaaataagacttcctaaatttaaaagctctagttttgcttagtgtgaattctggcactttaaaaagattaagcaagtgaaattctgctgccctccaccatttatttttacagtgctttgtaatttttttcatcagttccttaaatgttatttggaggaaactaagttcttgacctcagtaattttatttttgtttttccctaaatgtttccctactagtctttttggaaaacatgtttgttttaatttcatcttccctcactttatttaggtagaatttttcccccttcatttctgaaattttttgctcaccgccatgtttaaatggggttgaatcatagcgagccatttgctcttgccaaagtgagatagatgtactgaggagataattgaaaagtcagactctgtactgtggggctttaatcggagcactgctggaaatgattgcagagaatgtagtgcttcatatatccatgaccaagattgacatgttgctcacaacatgtcacaatttagtgaggagctacatgtatttccaagaattccagcatagattataatttaaataatcgaatttggtatttaggtacattgtttatatagccaagtgtatatgctttactacctaacaattattctagcctaggtgaatccctaattgaaacacctggctaacactttagacacataaattaagtgggatacagttttctcatttgtattatctccagcttcaacctcatttatcctttttcctagtataatacattgttttcaaccagaaattaaagtagatatccaacattattttcagtgcttgtacttcatgagaaataatctgattttcaagacacctcttaagtgcatttgcattttattttggtaatggcagagacctcatgtggccagtttgattgattgaagaatgtatcactcttattcaagcaaaggaattcagacttaaatgcctacctctgtgctgaagctgacagacagtattaactcttatcaaggccatcttttagacctgattttcatttatatgaaaacagacctgtccatgtctaataagtaaaaactgatagaatacattaaaaagtcactggtttatcatagaaaagtttgatgggtttagagctcagtgatttaagcttgtaaaactgcattcttgggcaaaatatttatattgtatataaatggttggcagcttattccagttgatctcttcacatctgccttaaaagtgctatgtagagatacattaacagagttataataaaacagtgttttaaaatctagcctataaacaaaaactagtttgaggcacccaagcatttagtgagagattgagaatgatgcttaatggatcaaaaaagcaattaggagtatgttcctgattttattctctaaattatactcaatttcatggtaattacatgaagaagttacctgcaattattcttaacactacatggaattcactgggtaattgtgggtcatttatttcctgaaagtcacgtgaaatccttagctggttgaatgttgcacagtatttgagaattacggtttgaagtgatttctgtgggagggaatcattgcaatgtatattctaaataaagtcatctaactattaaaaaaaaaacacccttcctaacccttcttttcttaaaattccacattcatccacaatctcatccctttgtagaaattcttgcctgaattctcaccaagttttgaattcctaaggtagccccgatctaggatgtgaaggctgcccagaaaaagtttatggctggaggagtatcatacagtgtctacatatgatagtacttacagattaggtctttggatgctttaacacaaaagatttttgttatccttattagtcaaataacgctattcttttgtggttctagaccctggcttctatctccctgtgatttgttttaatgctgaaatgacttggctatccaaagcttctagtctagaggtctgttggttgaaggcagacatttccaagtttgttgaaataatacgaagctgactagcttacgtgaatgatgttgccctcatttgttttgggtgaggactcattactgcagtatattgatctcttcaccaaatgctttttctttttctgaataaatgctgtattagaggttctatttatatatgatttttaaaactttggtttccttctatccaccaaatactgtgaattgtttttccatttatttttcttagctaatgtaactttattcttcacttttttttagccctagacttcctagattttctgtggcattctgtaggacattgtattgcttggaaaaaaaaagatcaaaatcattctggggcaaatgctctattatccttatttatgacaagagaataatgaaattcataagaaattaataacattcagatattgctataaatgtacttgagtcattttcatttggggatagtaataatggctgtggcagctttaatggagaaacctgtgttggcctctttttctggcattaggatctcttgtcatagaactattggtaaagtacaggtttgatagcagagttcctgaattcagcatatcatcagaatttccatttaccttttgtcttttctttttattgtattttttaacctttttgtttctattcctacctcccatgagtaacattgatttctgctgaagttagaatttgtgttaagaattgactttaaatttctgaaatagttgaatattagaagtggcttcagttgccatgaaatgattgcttttctttttctttttttttccttaaataaaaataatgcagccttatatatgtctcttcccctcaagaatgtgaatttaggctgggcatagtgactcacgcctgtaatcccagacctttgggaggctgacacgggaagattgcttgagcccaggaatttcagaccagcctgggcaacacaggaagactccatctctacttaaaatatttttgttttttagccaggtgtggtggtatgtgcctgtagtcccagctacttgggaggctgaggtgggaggatcacttgaacccaggagtttggggtgcagtgagctatgattgcgacactgcactccagcctgggcaacagagcaagaccctgtctcaaaaaaaaaaaaaaaaaaacaaaactgatttagctccaattccaaatgactaactcttaggccagtcatagccaatgaaatcatctgacggtagcttctgtagcccttaacctaaggagtcattagaggttatagtaaattagtttctctagtggtgcagagagaaatgccatcggggaaattatcactgtctttttggctaaagttttatattgtgaactggatcccacttaacagcttaaaaacacaaaaatgaaagggtagtcctagtttatcttcttaattagaatcattatttggaaataagatttgcaatgtgctgtctatccccaaacactgctgagcttgctggaaaacagaatttaacatgaatgttgtctgaaagctgtaggatcaatggcaaaaaaggggaaatgtttggtagggaattggaccagttctaaggtatcacttttaattataaaataatgtcttcctttttatctgcttttcagacagcctcagtgaactattaaacatttgtgtgcaaagtcctattttgcttatctaaggcattttgacttggaagtattaaacttcaggaacgagctagagaagacaatgagggtatgttagagaaggaaaaataggagctttttgcttatggattttagaggtccacaaatcgaaaggaaaaataaatttcttcatttctaaccctaaaataattttgttaatgagatgctgggaagaagactaccaaaaggcctcaaagctcatgcttctagaatattcagtaattctgaatagtctttgggaagtagcatttcttgggaagtagcatttcccttcttccaaataactgtttgagatcttaaaacagaaaatccagtgttaatgggctctagatcttaaactaggtgagcagcttcttacatacaaccagttccttgttaaggatccagcaggaaaaccagccataaaacatttcaacatgcagtttgggggctcccttgcttattcactgagtttaagctcttgctgcaacatagctctgtaccatctgggatgctagcagtcacagcagttagctcagatatctgagctgtctgccacacaaagcctgaggagatcatcattcttcagtttcattcattacttaatgaatgccaaattaattggcaggaagaagaaacactgtgtgatatactgaacaagcctgtgtgcatgaataaggagccactcaaaaagccaattttgagctttatttctccgttgttaacaaatctcaagaaagcctttgttacagtttagctcatgtcatttggttggttttattttctagccctttaacataggaggaaaattgtcatttcatgtataacttgtaacacagaattgaactgatactagtttccttgccttaaattaattatatgtcatcccaagggtctctgttaattctgctttgccaagcaataatgagatctgggtttggcattagaagtatttcataattttggttttttatttaggtttcctccacatctgtaaagtgattgattaaattagaggaggcgtgtagaataaatcccaatcccattgcaactggcagagctttataaatctttataaattcagttacaacaaaggagaggatcctacaccattagagccatgccatcaggtgtttgcaagtgacagctgtagtgtgttgcctcaaataataccaagttataaataataccaagtaattatcaactcactcccaaatttaataagatatcaaagtccaaaaggttacttaggagtagtcttccgtgggggaagataaatttattaaagagtcatgtactgatctttttcttgggattttttttcctttcccagaaaaaaaaattattttggtgactgatcaattgtaaacaattttcttccttacttacaaatcatccgttcagaaaaataaaagtggacttcctttcctaagcattacaattagcctgggcaagaggtgttatgattgtcttattctttaagccggcttactttttggatttgtgtgaaatgtcttttgaaaagaaagtagatagtatagtattaattaactactttgtatagtcttctgcataatttagagttgaaaataatgtaacattttcctgtgaacagattcctttatgcgtacatactttataaatatacatacatacacatacacatacatttttaaaatgctctttttaaagagattcttatcttgctcccactccaaaagctatgtacagttgagttattagcctcagaggaagagtacaggaaagtgaagatgaggacctccttttcttgtgttggtcttgggaacaaacagtattccgtctttcaaatatggcatatttctaaacagtttgggaaagatgttagaattttttaaaagtcagctcttttataaattggaagtactcagtagtcagaaattaagatcccctctgatagagatagattctcaaaaccaaaattggactgaaaattagattgagaagaaagatacaacttcctccatagccaataaaatctgtctttccaagtctgcttattaatgctgtgaatcgctccttctgtttgtgaaaacatctcctggactggaaatgtggtgctgtaaccagctgagccgaaagttggagaatgttaaatatcttatatgggacttacgataaaatgtattgatgttagtgattgtcaaaataggtttatcatttaaaaaactaggaaattactaagtataaagaagaaaaaccagtattaattaagtgatgagacctgttcattttgttttccctgacttatttccattaccaaacatagtaaaggccagaaaagattaaaaaaaaaattaacacagccattccattgttttttaccacatggagaaaggaccaggctggaagcatatgtccccccacccttatttatattcctttgagcattgccgttttctagacagacaatccgaaaataattgtgttgataggtctgtttaagcctgaactctgggtgtaaaatgttatccagaagctatagggagctgccttgctcaggtcattggaaatttcaaccctaagactcattggaatttctaagtccgttatgcaccattatgggcatatggagcatattcataccatgaggaggagtctttgtttatgatggactttttaatatggccataattaaactcacactcaaaaaggatgagctattgtcaaaagccaaaagaaaaacagacaaaatgaacatgaagcaaggagtccataaaacaagagttctttaccacgtttaagcaaatgtctctcaaaaaaaattgtatttctgtgcacattagctgagattcacacattttgcacctcagtagtatttcagatgagactcaatgtgtggagaaaactgctaacttgtttggttctactcttaccccctcttctgtggcaatgtggggtcagggccgtatcctaaagtatccacatggtcttaaatggaaatcatgggactctggaaagctggcatgagctggttggagcttttaaacagaagtgctttatgggtatcagatctcttctgacatcaattgtttcaaatcattgttgggctctgtcgtgttctgcaatcttccccattcccctcatgatctctggcttatcttttatccaatctgtatggactttttaggattttttttttcttatagtacaaataattttcagatcccagctttggtaaatgtgttaattctactttgtgaataaataaatgagtgatctgctaaaaatggcaattgtagaattatgttgtatgtaatgtacatatggagaaagaatgtattttgttcattttcttaataaaatgttatatatggatgctaaaaaaaaaaaaaaaaaaaaaa

SEQ ID NO: 1451 - DNA, 2524 bp, Homo sapiens
attggctgaaggcacttccgttgagcatctagacgtttccttggctcttctggcgccaaaatgtcgttcgtggcaggggttattcggcggctggacgagacagtggtgaaccgcatcgcggcgggggaagttatccagcggccagctaatgctatcaaagagatgattgagaactgtttagatgcaaaatccacaagtattcaagtgattgttaaagagggaggcctgaagttgattcagatccaagacaatggcaccgggatcaggaaagaagatctggatattgtatgtgaaaggttcactactagtaaactgcagtcctttgaggatttagccagtatttctacctatggctttcgaggtgaggctttggccagcataagccatgtggctcatgttactattacaacgaaaacagctgatggaaagtgtgcatacagagcaagttactcagatggaaaactgaaagcccctcctaaaccatgtgctggcaatcaagggacccagatcacggtggaggaccttttttacaacatagccacgaggagaaaagctttaaaaaatccaagtgaagaatatgggaaaattttggaagttgttggcaggtattcagtacacaatgcaggcattagtttctcagttaaaaaacaaggagagacagtagctgatgttaggacactacccaatgcctcaaccgtggacaatattcgctccatctttggaaatgctgttagtcgagaactgatagaaattggatgtgaggataaaaccctagccttcaaaatgaatggttacatatccaatgcaaactactcagtgaagaagtgcatcttcttactcttcatcaaccatcgtctggtagaatcaacttccttgagaaaagccatagaaacagtgtatgcagcctatttgcccaaaaacacacacccattcctgtacctcagtttagaaatcagtccccagaatgtggatgttaatgtgcaccccacaaagcatgaagttcacttcctgcacgaggagagcatcctggagcgggtgcagcagcacatcgagagcaagctcctgggctccaattcctccaggatgtacttcacccagactttgctaccaggacttgctggcccctctggggagatggttaaatccacaacaagtctgacctcgtcttctacttctggaagtagtgataaggtctatgcccaccagatggttcgtacagattcccgggaacagaagcttgatgcatttctgcagcctctgagcaaacccctgtccagtcagccccaggccattgtcacagaggataagacagatatttctagtggcagggctaggcagcaagatgaggagatgcttgaactcccagcccctgctgaagtggctgccaaaaatcagagcttggagggggatacaacaaaggggacttcagaaatgtcagagaagagaggacctacttccagcaaccccagaaagagacatcgggaagattctgatgtggaaatggtggaagatgattcccgaaaggaaatgactgcagcttgtaccccccggagaaggatcattaacctcactagtgttttgagtctccaggaagaaattaatgagcagggacatgaggttctccgggagatgttgcataaccactccttcgtgggctgtgtgaatcctcagtgggccttggcacagcatcaaaccaagttataccttctcaacaccaccaagcttagtgaagaactgttctaccagatactcatttatgattttgccaattttggtgttctcaggttatcggagccagcaccgctctttgaccttgccatgcttgccttagatagtccagagagtggctggacagaggaagatggtcccaaagaaggacttgctgaatacattgttgagtttctgaagaagaaggctgagatgcttgcagactatttctctttggaaattgatgaggaagggaacctgattggattaccccttctgattgacaactatgtgccccctttggagggactgcctatcttcattcttcgactagccactgaggtgaattgggacgaagaaaaggaatgttttgaaagcctcagtaaagaatgcgctatgttctattccatccggaagcagtacatatctgaggagtcgaccctctcaggccagcagagtgaagtgcctggctccattccaaactcctggaagtggactgtggaacacattgtctataaagccttgcgctcacacattctgcctcctaaacatttcacagaagatggaaatatcctgcagcttgctaacctgcctgatctatacaaagtctttgagaggtgttaaatatggttatttatgcactgtgggatgtgttcttctttctctgtattccgatacaaagtgttgtatcaaagtgtgatatacaaagtgtaccaacataagtgttggtagcacttaagacttatacttgccttctgatagtattcctttatacacagtggattgattataaataaatagatgtgtcttaacataa

SEQ ID NO: 1452 - DNA, 6725 bp, Homo sapiens
cgccgccattttcccagagcgagaggcagtgacactgagcgggcgcagggggccgagtcggagaccgtgccggagttcgggagcggcaacagagtgggcatagacactccgagcagcctcgccgtcgtctctgcgttcctgttgactgcctggctgccccctcccctactcctcggttcctggtgaagaggctgcgcgctgctgtttggggagggggtgtgtggagccgggtcctgtgtccgcagtggctgctgtcggggggtcgcctgttcgcggaggtgcggagagactccttgggggtcgagcactgtggctggcatgccccagtgttttggataccaatgcataggactccatagtaatcgaatttaccagaggcgaacgtcatgagcatagtgatcccattgggggttgatacagcagagacgtcatacttggaaatggctgcaggttcagaaccagaatccgtagaagctagccctgtggtagttgagaaatccaacagttatccccaccagttatataccagcagctcacatcattcacacagttacattggtttgccctatgcggaccataattatggtgctcgtcctcctccgacacctccggcttcccctcctccatcagtccttattagcaaaaatgaagtaggcatatttaccactcctaattttgatgaaacttccagtgctactacaatcagcacatctgaggatggaagttatggtactgatgtaaccaggtgcatatgtggttttacacatgatgatggatacatgatctgttgtgacaaatgcagcgtttggcaacatattgactgcatggggattgataggcagcatattcctgatacatatctatgtgaacgttgtcagcctaggaatttggataaagagagggcagtgctactacaacgccggaaaagggaaaatatgtcagatggtgataccagtgcaactgagagtggtgatgaggttcctgtggaattatatactgcatttcagcatactccaacatcaattactttaactgcttcaagagtttccaaagttaatgataaaagaaggaaaaaaagcggggagaaagaacaacacatttcaaaatgtaaaaaggcatttcgtgaaggatctaggaagtcatcaagagttaagggttcagctccagagattgatccttcatctgatggttcaaattttggatgggagacaaagatcaaagcatggatggatcgatatgaagaagcaaataacaaccagtacagtgagggtgttcagagggaggcacaaagaatagctctgagattaggcaatggaaatgacaaaaaagagatgaataaatccgatttgaataccaacaatttgctcttcaaacctcctgtagagagccatatacaaaagaataagaaaattcttaaatctgcaaaagatttgcctcctgatgcacttatcattgaatacagagggaagtttatgctgagagaacagtttgaagcaaatgggtatttctttaaaagaccatacccttttgtgttattctactctaaatttcatgggctagaaatgtgtgttgatgcaaggacttttgggaatgaggctcgattcatcaggcggtcttgtacacccaatgcagaggtgaggcatgaaattcaagatggaaccatacatctttatatttattctatacacagtattccaaagggaactgaaattactattgcctttgattttgactatggaaattgtaagtacaaggtggactgtgcatgcctcaaagaaaacccagagtgccctgttctaaaacgtagttctgaatccatggaaaatatcaatagtggttatgagaccagacggaaaaaaggaaaaaaagacaaagatatttcaaaagaaaaagatacacaaaatcagaatattactttggattgtgaaggaacgaccaacaaaatgaagagcccagaaactaaacaaagaaagctttctccactgagactatcagtatcaaataatcaggaaccagattttattgatgatatagaagaaaaaactcctattagtaatgaagtagaaatggaatcagaggagcagattgcagaaaggaaaaggaagatgacaagagaagaaagaaaaatggaagcaattttgcaagcttttgccagacttgaaaagagagagaaaagaagagaacaagctttggaaaggatcagcacagccaaaactgaagttaaaactgaatgtaaagatacacagattgtcagtgatgctgaagttattcaggaacaagcaaaagaagaaaatgctagcaagccaacccctgccaaagtaaatagaactaaacagagaaaaagtttttctcggagtaggactcacattggacagcagcgtcggagacacagaactgtcagcatgtgttcagatatccagccatcttctcctgatatagaagttacttcacaacaaaatgatattgaaaatactgtacttacaatagaaccagaaactgaaactgcactagcagaaataattactgaaactgaagttccagcacttaataaatgtcctaccaagtaccccaaaacaaagaagcacttggttaatgaatggttaagtgagaagaatgagaagacaggaaaaccttcagatggcctttcagaaaggcctctacgcataactacagatcctgaagtgttagctacacaactcaattctttaccaggtctcacttacagcccccatgtatactccactcctaagcattatattagatttacttcaccattcctttcagaaaaaaggagaagaaaagaacctactgaaaacatttctggttcatgcaagaagcgatggttgaaacaagctctggaagaagaaaattcagcaattttacatagatttaattcaccctgtcaagaaagatccagaagtcctgcagtcaatggtgaaaataaaagtccactactattaaatgacagctgttcccttccagatttaactacaccactaaaaaaacgaagattttatcagttgctagattcggtttactcagaaacctccacacctactccttccccgtatgctacaccaactcacaccgatattactcctatggacccatcttttgccacgcctccacggataaaatcagatgatgaaacttgtagaaatggttataaacccatatattcaccagttaccccagtaactcctggtacaccaggaaataccatgcactttgagaatatttcttccccagaaagttctccagaaataaagagacgcacttatagtcaagagggatatgacagatcttcaaccatgttaacattggggccttttagaaattctaatttaactgaactgggtctgcaagaaataaagactattggttatacgagccctaggagtaggactgaagtcaacaggcagtgtcctggagaaaaggaacctgtgtcagaccttcagctaggactcgatgcagttgagccaactgccctacataaaaccctggaaacgcctgcacatgacagggctgagcccaacagccaactggactcgactcactctggacggggcacaatgtattcttcctgggtaaagagccctgacagaacaggagttaacttctcagtgaactccaacttgagggacctgacaccctcgcatcagttggaggttggaggaggcttccgaataagtgagtcaaagtgcctgatgcaggatgatactagaggcatgtttatggaaacaactgtgttttgtacttccgaagatgggcttgtatctggtttcggacggactgttaatgacaatttgatcgacgggaattgcacaccccagaatccaccacaaaagaaaaaggtttctctattagaataccgtaagagacaacgtgaagctaggaaaagtggctctaagacagagaactttccactcattagtgtatcaccccatgcaagtggaagcttgagcaacaatggtgatggctgtgccagcagtaatgacaatggggagcaggtggaccacactgctagcctacctttaccaacaccagctacagtttataatgccacttctgaagaaactagcaataactgccctgttaaggatgctactgctagtgagaagaatgaaccagaagttcaatggactgcctcaacttcagtggaacaagtcagagaaaggagttatcagagagctttacttctcagtgatcaccgaaaagataaagatagtgggggagaatcaccatgtgtctcatgttcaccgagtcatgttcagtcttcaccttcatctcattcaaatcacataccccagttgcaagctaagggcccagtcccttctttcagtgaacttatggaagaccctgatcctgaaaatccagaacccacaactacgaatgaatgtccatccccagatacttctcaaaatacttgtaaaagtcctccaaaaatgagcaagcctggttcacctggatctgtaattcctgctcaagcacacgggaaaatattcacaaaaccagatccccaatgggactccacagttagtgcatccgaagctgaaaatggtgttcacctaaaaacagagctccaacaaaaacagctatcaaataacaaccaagcactttcaaagaatcatcctcctcagacacacgttcgtaattcatctgagcaactttcacaaaagctgccttctgtgccaacaaagttgcactgtcctccatcacctcacctagaaaatcctccaaagtcatccacgcctcacacacctgtacagcatggttatctttcaccaaagcctccttcacagcagttaggatctccctacaggcctcatcattcacagtcacctcaagttggaacacctcagcgagagcctcaaagaaacttttatccagcagcacagaaccttccagccaatactcagcaggcaacttctggaacattatttacacagacaccctcaggacaatcttcagcaacatacagtcagtttaaccaacaaagtctgaacagcacggcaccaccccctccacctcctccacctccttcttcgtcttactatcaaaaccagcagccctctgcaaactttcagaattataatcagctcaaaggtagtctttctcaacaaactgtgtttacatcaggaccaaatcaagcacttcctggcaccacaagccagcaaacagttccaggacaccacgtgactccagggcattttttgccctctcagaaccctaccattcaccatcaaactgctgctgccgtagtcccccctcctcctccaccaccacctgctccaggaccgcaccttgtacaacagccgaattcccatcagcaacactctgtagcacatgtagtagggcctgttcatgcggtcacccctgggtcgcatattcattctcaaactgctggacaccacttacccccacccccaccccctcctggtcctgcccctcatcaccatccaccaccccatccatccacaggactccaaggtctacaagcacaacaccagcatgttgtaaattcagcacccccaccaccccctccgccgccaccttccagtgttttggcttctgggcatcataccacatcagctcaagccttacaccacccacctcatcaaggacctccactttttccttcgagtgctcatccaactgtaccaccgtatccctcacaagctacacatcataccactttgggaccgggaccccagcaccagccttctggaacagggccacattgtccattacctgtcacaggtcctcatctccagccccaaggaccaaacagtattccaacacctactgcttcagggttctgtcctcatcctggctctgtggccctgccacatggggttcaaggacctcagcaggcatctccagtgcctggacagattccaattcacagagcacaggtgccaccaacatttcaaaacaattaccatgggtcagggtggcattaaaatggactccaaaaacatttttttaaatgttctgtaagataaactgtatatttcatatgtacctgttaaggtactttttaaagcttgtacatgaacctttgtataaaaaacaccagtgctctttcgttgtatttttctcatttttgctttttaaaattcctttaaaaaatgtgctgttaagccagtattaggtatctttattttgtaagtgaacattccagctgtttttttctggcagatctgatgctgatttgatgctgtatgatcttttttttttttttagttaaattcatttagtgaatgttctattattttatacatacacattaagtactcagctaagtaatggcactatgaggattttttttttctttcctgtcagcagcagttctgtgaatgcatcttaggtataaaaatgcaatacagatttttatattttggtgtggacatggctcattttgttttaccagttatttgcaagcaaaatgtaatttaatgtatagatgatttctaatgtctcctgacaaactgtaaatactgcatttcttttgcgtatataattgcttacagcttttctcatttgatatatagcattgtacatatgacaagtcttttgcaaaactgtgtgatctttgtgaaagtagtacagtatatgacctttaatttcttttttattttaaatatactgtcacactgaagcactggttgggcattttaattcatgttaataaatcacaattatgtcagttttaaaaaaaaaaa

SEQ ID NO: 1453 - DNA, 3354 bp, Homo sapiens
agacgttcggtgatgggagcgcaatatatgaggggatacagtgcctcaggtttaaaagagcaggaagctgagtgagaggttgcagaaaaagtgtcttcgctcggcagaggttacaggtggcatctcagaaagagctttgaggctacaggctgtagtcgggaaggggatcggagaactgtgtgaagggacagcttagggactagcgtcctgggactagggggaagttcgcgactttctgaagactggcaggaatgtgcctcctggccctcgatgcttcccccctgaggggaggcatcgtgagggactgtggcaggcttcactgaacgctgagccggggaggtccaactccacgtatggatccggggaatgagaattcagccacagaggctgccgcgatcatagacctagatcccgacttcgaaccccagagccgtccccgctcctgcacctggccccttccccgaccagagatcgctaaccagccgtccgagccgcccgaggtggagccagatctgggggaaaaggtacacacggaggggcgctcagagccgatcctgttgccctctcggctcccagagccggccgggggcccccagcccggaatcctgggggctgtaacaggtcctcggaagggaggctcccgccggaatgcctggggaaatcagtcatatgcagaactcatcagccaggccattgaaagcgccccggagaagcgactgacacttgcccagatctacgagtggatggtccgtactgtaccctacttcaaggacaagggtgacagcaacagctcagcaggatggaagaactcgatccgccacaacctgtccctgcacagcaagttcatcaaggttcacaacgaggccaccggcaaaagctcttggtggatgctgaaccctgagggaggcaagagcggcaaagccccccgccgccgggccgcctccatggatagcagcagcaagctgctccggggccgcagtaaagcccccaagaagaaaccatctgtgctgccagctccacccgaaggtgccactccaacgagccctgtcggccactttgccaagtggtcaggcagcccttgctctcgaaaccgtgaagaagccgatatgtggaccaccttccgtccacgaagcagttcaaatgccagcagtgtcagcacccggctgtcccccttgaggccagagtctgaggtgctggcggaggaaataccagcttcagtcagcagttatgcagggggtgtccctcccaccctcaatgaaggtctagagctgttagatgggctcaatctcacctcttcccattccctgctatctcggagtggtctctctggcttctctttgcagcatcctggggttaccggccccttacacacctacagcagctcccttttcagcccagcagaggggcccctgtcagcaggagaagggtgcttctccagctcccaggctctggaggccctgctcacctctgatacgccaccaccccctgctgacgtcctcatgacccaggtagatcccattctgtcccaggctccgactcttctgttgctgggggggcttccttcctccagtaagctggccacgggcgtcggcctgtgtcccaagcccctagaggctccaggccccagcagtctggttcccaccctttctatgatagcaccacctccagtcatggcaagtgcccccatccccaaggctctggggactcctgtgctcacaccccctactgaagctgcaagccaagacagaatgcctcaggatctagatcttgatatgtatatggagaacctggagtgtgacatggataacatcatcagtgacctcatggatgagggcgagggactggacttcaactttgagccagatccctgagtcatgcctggaagctttgtcccctgcttcagatgtggagccaggcgtgttcatatctactctttacccttgagccctccccaggaatttgggaccctgctttagagctagggtggggtctggtcacacacaggtgttgaagaaattataaagataaagctgccccatctggggacgatatggggagggagatgggaggggaaaggggagagggtttttctcactgtgccaattagggggtaaggccccctctcaggagccatcatcggctttccccattcctacccacttaggctttgtagcaagatgagcaatgctgttggaaatgtgaagtcaccagtggccttacccctgcctttgggagcaggatttttttgtagagagtcttatctgagctgagccaggctagctggagcctgggatttctatgcagtggccccttaggccagtgatgtgcggtgggtgggctgtttaggggatctggaagggccaaggtctgagcactggagtggctcgccaggccaaatcacccttagaaggctgcagataacagaaaggctttttataaacttttaaagaaatataaacacaaatatagagattttttaaccatggcagggtgctagtggtgggcagaatgcttttttttctttctgaaggctttgtgatagtgacatgatacaaacactacagacaataaatattaggagacacagggaagtggggagaggtggggagtaatagtaaacacagggaagagctcccctacggaccaggtatagagaaaggtctatgcagaaataggttagagtttccctaacaaaaaagctaacccaggtcccctcattccttcaacttgtgcctgggagtgtgtggtgttagggtgcagccacactcttctatgacccagcatgggttagtgctatggtgggagagtacattgaaggcctggaattagcttggggccagggaagggactgggaggggagagaagagaaggagggaaggatttaggatggtaaagttaggtacagagacctccctgttcaaggcccctgacagctgtccctgcccttcttccccttccctgactgcaggggttatgtggaagtgtgtgtggcagcaggcagcggggaggggaggaacagggaagggggagctggggagcttggctgagggtctgggaaatgagcagggatggggggggatgtggatcaggtttactagcacctgccagggaggccatctggggctccttctccaccccagcccccaaagcagcccttcccccagtgccctttgcatcgtcccctcccccacccctgctgtgggttcccatcatttcctgtgtcagcgcctggcctacccagattgtatcatgtgctagattggagtggggaagtgtgtcaaatcaataaatgaataaattcaataaatgcctataaccagcagaaaaaaaaaaaaaaaaaaaaaaaaaaaaaaa

SEQ ID NO: 1454 - DNA, 5943 bp, Homo sapiens
acttccgtggcttcgggcggggaggtcacaatcacattgagccaaaacgcatccagtgttttctccagttacaaataaaacgaatatgcccatgctgctaccacatcctcaccagcatttcctaaaaggccttttaagagcacctttccgatgttaccacttcatctttcactcaagtactcatctcggatcaggaatcccatgtgctcagccgtttaattctcttggactccattgtacaaagtggatgctgctgtcagatggcttaaagagaaaattatgtgtacaaacaaccttaaaggaccacacagaaggactttctgataaagagcaaagatttgtggataaactttatactggtttaatccaagggcaaagggcctgtttagcagaggccataactcttgtagaatcaactcacagcaggaaaaaggagttagcccaggtgcttcttcagaaagtattactttaccacagagaacaagaacaatcaaataaaggaaaaccactagcatttcgagtaggattgtctgggccccctggtgctggaaaatcaacatttatagaatattttggaaaaatgcttactgagagagggcacaaattatctgtgctagctgtggacccttcttcttgtactagtggtggatcactcttaggtgataaaacccgaatgactgagttatcaagagatatgaatgcatacatcaggccatctcctactagaggaactttaggaggcgtgacaaggaccacaaatgaagctattctgttgtgtgaaggagcgggatatgacataattcttattgaaaccgttggtgtgggtcagtcggagtttgctgttgctgacatggttgacatgtttgttttactactgccaccagcaggaggagatgagctgcagggtatcaaaaggggtataatcgagatggcagatctggtagctgtaactaaatctgatggagacttgattgtgccagctcgaaggatacaagcggaatatgtgagtgcactgaaattactccgcaaacgttcacaagtctggaaaccaaaggtaattcgtatttctgcccgaagtggagaggggatctctgaaatgtgggataaaatgaaagatttccaggacctaatgcttgccagtggggagctgactgccaaacgacggaagcaacagaaagtttggatgtggaatctcattcaggaaagtgtgttagagcatttcaggacccaccccacagtccgggaacagattccacttctggaacaaaaggttctcattggggccctgtccccaggactagcagcagacttcttgttaaaagcttttaaaagcagagactaataaaattcatcctgtataataattttacatatcatttcataaagtattttaatagaaaaatcacttgtatgcttatattttcagtaattattgtatggtgctcttgtcttctttgtttgtgacccatgcttgaaaacttgaaggaagttagatatgaatggcaaaagttaggcagtatttataaggtacctgttttatgttactgatatctgtttccttctcttcttataccctggcatggtggcctgtagggtagtttcttcttaatagtcaagaacagagaaagctgaggagagcagaaaatatcttgcactttaaaatgcttattttgattccatattatctgaatttccagagaggatgtaaacaagagtgaccatatttttggagtccttcttgaagccagaacaacacacagtgggttgctaagagccgacaatcataattgacatttagtgtaccagattattctaagaatttctgaaattaccatgtacatgagtaatgaaacaactggaataatgtgatgatgtgaacacaattttaaagtctgcttgtctggatttgcaggtacccttccgccaccccccaacatgataggtaagagagcaaaagggaactgggaaaaatcagctacaaataaaatgggtgactaatccccagttcttggacccattatatttgtagccaattggagtaaacccctaaaagacaaagtgaggtcagaatgattcaaggattattcagtttgaagactaccaaaggcttttgcttctcttcttccttggccatttcacttcattttagtattttaaaaatcttttttcttgatggtgaacaagttttgtcctatgctatggaggaggcatagcacagtgattaagagcttgggctctgtagttggactatgtgggtttaaactttaaacccagatcaattgtatattagctacatgagctaatctctttaagcttccatttcctccctggtaaaatgaaattggcaaataactttctaaggttagtgaagataggaaatactcgaaggctgcttactatccttattacattaaagttatgggtatcttgaaactacaaacctgatgtataatttcagttttctctcatggtcttgttactaccatcatactcttgatattttaggatactttaggattacctttgaagaaccctttctagttaattctttgaatatgttttatacttatttgatggtagttgtaactgtgtacatttgaataaaatttctaaccataaaatttcgccattgcacaaaaagcctttatagaagtttctaacatattctattctgaaccctgtagaatattttatgtagtatagcagcttgcattgttacttactgtactggaatcaaacctcttgagcattattttaacaaacatccctttacattttttggaaagatttttagtactccattggcatagctatttcatacaaggattaggagaaactttgaaaggttatccacttgacttttctgattttagaaaggactaccattaaaccaccctatcagacaaaaaaaactggtttttagaaacctgagagaaggaattttataatttccctgagtaagctgttacagggaataacaaatctcctgccacatgtggcacagtgtaagtaatgctggagcacacatactgcattgtaaagaaggtaggaaaggtggggggacttttgttagctttaattttaaggctaaaagcatttcttctcagtttgaactacttttaaatgttataaatgtcatcataaaaatcattagaaaactcatttctccttatgttgtcgttgtaccattgggtattgtatagagaccaatttctaagagattttttcacctctgtttctgttatttgctatactggaggtaatataataataatgaaatatagctttttttttcaactcagaaatcctattccctctccccatctgtgattatattgtactggacttctgacttggtcaaaagcataggttttgacttagatacatgtgggggcagatctcagctctatcactaactagctatatgatatttggcaagttttttctctatgtgcagtagtttctttatctgtaaaattaagataatagctactttacagggttggaagaattaatttagaaattgtacagtgcttagcctcaataattggtaggtggtggtgtaaatattttacatagatacttgtgacagttctttgttctacaaaacagactaatattaatttcagattggccaagctacttaatttctctgtgcctcagtttcctcactattaaatggggatgacaatagtgtccacctagagcaggactattttagtattacatataatccttggatataaatgctgatgaagtttggatatttgtccccacccaagtctcatgttgaaatgtaatccccaatcttggaggtggagcctggtgggaggtgtatggattagatcagatctctcatgaatgacttgggccatcctttgggtggtaagtgagctcttgctccgagttcacacgaggtctagatctggtcatttaaaagtgtgtggcatctccccatccctcactctatcacttgctcctactttcgtcatatgacatgcctgctcccctttcaccttctgccatgattgtaagcttcctgaggcctccctagaagctgagcagatgccagcaccatgcttcctgtagtctgtagaaccataagccaaataaacatcttttctttataaatttataaattacccagtcgcagatatttatagaaagaacagcctaatacaggtgctaaatacatatctgacaataaatggtagttatctcttagaactgttatgaggattaaacgagttacagtgtccatcttaaaaagataattctgaaaaaaatctcataggttcactttgccttgtcaagaatatgattaccattaacttctgtagataggaaaaaaatgtgctgagctccaaaactgacagacattttgctaaaacaatatcaaatctcattaaaatgatgacagttatttcaatagttgacagtagctatcccaatacaacctaacaaggcattttctcttcagaatcactcgatcatatggccatttccctaagcttttatagctattgcccagtgtacactgaagacaacagctaacgaacaacatacgtgtgataatttatgtagttgaacctctaaggcaaaaaaaaaaaaaaaaaggaaaaattagtgaaaatcattcaaacattatgctcaccaggtagactgccatcatagaagtcctaatgctactgctaaaaactagtaaactaccagtaaactgtgaagacagaagtaactcctgtgatctatatgtttgtgcagatggtggagcttttctgctcctaaagcctgagaaatgcaaatgtggcttcgttaatgcaaatgcttcctacgccagactttatgaaactcctcctaaagttgaattcttatccaagtggacatatgttagggtgccattgtaattcaggtagagtgtcagagtggtggctggcaccaacggtagatgttctcaacattagcgttattcaggtaagactacaacaatgatgaacatgtcaaaactttcctttaaaaggaacaatcagaaaaactctttaacaaatgtttttctttccgtagtattttaattaaaatttttaaaattttaaaatttactaaatttatgaacgtttttatcccacttgagatgaatacttatttatagtccctgtcccatgaagcttctgtggatttgctttgtttgtcatttgtggtatgtttgataacaaaaatattagtggcacaaaagcagttatattgaatgcttttgttttagagaaaatttcactctgtactagaaaatgtagatgatgtgagtcaaagttcattaatatttacctgaaaatttgtgtataaaggtaaccttggggcagtttattttgcttagacccctcagcttcttgatagagtgaggtgagggcatatgtaagtcagtaaactattctgttagtaaagtcaaaggcgtaatctaaattaattatgcttttaactaacacagaagaaatcatgtgacctcattctcaaagctcgtaacatccacctggccaatcttaagatgtggatagagttcttttttttcttttttcaatttttacaataatttttgacacattgaagctgtgcatgtttatgggggcacaatttgatgtttcaatacatgtatatgttgtgtaatgatcaaatcggagtacttagcatatctatcatctcgtgcatttatcatttctttgtggcgagaacatttaaaaatcctattttctagctattttgtaatatacactaccttactgttgcgaaccatagtcaccctactgtgcaatagaacacctgaacttattcctcctatctagttgtaactttgtacccattgaccccccttcccttccttccactctcccctccccagtctctggtaaccactgttctgttccctatgagataaaactttttttgtcttccata

SEQ ID NO: 1455 - DNA, 1825 bp, Homo sapiens
agaaaggaacacagtaaactgaattgatccgtttagaagtttacaatgaagtttcttctaatactgctcctgcaggccactgcttctggagctcttcccctgaacagctctacaagcctggaaaaaaataatgtgctatttggtgaaagatacttagaaaaattttatggccttgagataaacaaacttccagtgacaaaaatgaaatatagtggaaacttaatgaaggaaaaaatccaagaaatgcagcacttcttgggtctgaaagtgaccgggcaactggacacatctaccctggagatgatgcacgcacctcgatgtggagtccccgatgtccatcatttcagggaaatgccaggggggcccgtatggaggaaacattatatcacctacagaatcaataattacacacctgacatgaaccgtgaggatgttgactacgcaatccggaaagctttccaagtatggagtaatgttacccccttgaaattcagcaagattaacacaggcatggctgacattttggtggtttttgcccgtggagctcatggagacttccatgcttttgatggcaaaggtggaatcctagcccatgcttttggacctggatctggcattggaggggatgcacatttcgatgaggacgaattctggactacacattcaggaggcaccaacttgttcctcactgctgttcacgagattggccattccttaggtcttggccattctagtgatccaaaggccgtaatgttccccacctacaaatatgttgacatcaacacatttcgcctctctgctgatgacatacgtggcattcagtccctgtatggagacccaaaagagaaccaacgcttgccaaatcctgacaattcagaaccagctctctgtgaccccaatttgagttttgatgctgtcactaccgtgggaaataagatctttttcttcaaagacaggttcttctggctgaaggtttctgagagaccaaagaccagtgttaatttaatttcttccttatggccaaccttgccatctggcattgaagctgcttatgaaattgaagccagaaatcaagtttttctttttaaagatgacaaatactggttaattagcaatttaagaccagagccaaattatcccaagagcatacattcttttggttttcctaactttgtgaaaaaaattgatgcagctgtttttaacccacgtttttataggacctacttctttgtagataaccagtattggaggtatgatgaaaggagacagatgatggaccctggttatcccaaactgattaccaagaacttccaaggaatcgggcctaaaattgatgcagtcttctactctaaaaacaaatactactatttcttccaaggatctaaccaatttgaatatgacttcctactccaacgtatcaccaaaacactgaaaagcaatagctggtttggttgttagaaatggtgtaattaatggtttttgttagttcacttcagcttaataagtatttattgcatatttgctatgtcctcagtgtaccactacttagagatatgtatcataaaaataaaatctgtaaaccataggtaatgattatataaaatacataatatttttcaattttgaaaactctaattgtccattcttgcttgactctactattaagtttgaaaatagttaccttcaaaggccaagagaattctatttgaagcatgctctgtaagttgcttcctaacatccttggactgagaaattatacttacttctggcataactaaaattaagtatatatattttggctcaaataaaattgaaaaaaaaatca

SEQ ID NO: 1456 - DNA, 1956 bp, Homo sapiens
ctactgtgaggggatgaaggtgctccctgcatctggccttgctgtcttcctcatcatggctttgaagttttccactgcagccccctccctagttgcagcctcccccaggacctggaggaacaactaccgcctcgcacaggcgtatcttgacaaatattacacaaataaagaaggacaccagattggtgagatggttgcaagaggaagcaattccatgataaggaagattaaggagctacaagcgttctttggcctccaagtcaccgggaagttagaccagaccacaatgaacgtgatcaagaagcctcgctgtggagttcctgatgtggccaattatcgcctcttccctggtgaacccaaatggaaaaaaaatactttgacatacagaatatctaaatacacaccttccatgagttctgtcgaggtggacaaagcagtggagatggccttgcaggcctggagtagcgccgtccctctgagctttgtcagaataaactcaggagaagcggatattatgatatcttttgaaaatggagatcacggggattcctatccattcgatgggcctcgggggactctagcccatgcatttgctcctggagaaggcctgggaggagatacacatttcgacaatgctgagaagtggactatgggaacgaatggttttaatttgtttaccgttgctgctcatgaatttggccatgccctgggcctggcccattccacagacccatcagcactgatgtacccaacttataagtacaagaatccctatggattccacctccccaaagatgatgtgaaagggatccaggcattatacggacctcggaaagtattcctggggaagcccactctgccccatgccccccatcacaagccatccatccctgacctctgtgactccagctcatcctttgacgctgtgacaatgctggggaaggagctcctgctcttcaaggaccggattttctggagacggcaggttcacttgcggacaggaattcggcccagcactattaccagctccttcccccagctcatgtccaatgtggatgcagcttacgaagtggctgagaggggcactgcttacttcttcaaaggtccccactactggataacaagaggattccaaatgcaaggtcctcctcggactatttatgactttggatttccaaggcacgtgcagcaaatagatgctgctgtctacctcagggagccacagaagacccttttctttgtgggagatgaatactacagctacgacgaaaggaaaaggaaaatggaaaaagactatccaaagaatactgaagaagaattttcaggagtaaatggccaaatcgatgctgctgtagaattaaatggctacatttacttcttttcaggaccaaaaacatacaagtatgacacagagaaggaagatgtggttagtgtggtgaaatctagttcctggattggttgctaaatagaaaagcctagtcttctcaagcaatgaggatgactacaagcagcctctaactggatcttaaggactaaagcagaatgtaggagagggattcttccaaaggccttcaaatcaaattagaattcactgagaataataatacttccaatttttttcatagttgtataatcagaatttcaatccacattagaaaagtttttatatgggcaactttatgcgaaatccaaatcaacacaatgcactctgcagttagacaccattattttttcttacctaatatactgaagcagattgatccgtttgatttttatttccaggaggaagactagtggtggattccatgacatatattgtaattcttttcataggaaatgtcattacagtatgaattataattatttacaagcaatggcttttgtggccatcatttggccatcatttgttataataaatataaatttcccaatttttacttaaaagacatcacaaca

SEQ ID NO: 1457 - DNA, 2447 bp, Homo sapiens
tccacgagaaaatcccacagtggaaactcttaagcctctgcgaagtaaatcattcttgtgaatgtgacacacgatctctccagtttccatatgttgagattctacttattcatcagtttgttgtgcttgtcaagatcagacgcagaagaaacatgtccttcattcaccaggctgagctttcacagtgcagtggttggtacgggactaaatgtgaggctgatgctctacacaaggaaaaacctgacctgcgcacaaaccatcaactcctcagcttttgggaacttgaatgtgaccaagaaaaccaccttcattgtccatggattcaggccaacaggctcccctcctgtttggatggatgacttagtaaagggtttgctctctgttgaagacatgaacgtagttgttgttgattggaatcgaggagctacaactttaatatatacccatgcctctagtaagaccagaaaagtagccatggtcttgaaggaatttattgaccagatgttggcagaaggagcttctcttgatgacatttacatgatcggagtaagtctaggagcccacatatctgggtttgttggagagatgtacgatggatggctggggagaattacaggcctcgaccctgcaggccctttattcaacgggaaacctcaccaagacagattagatcccagtgatgcgcagtttgttgatgtcatccattccgacactgatgcactgggctacaaggagccattaggaaacatagacttctacccaaatggaggattggatcaacctggctgccccaaaacaatattgggaggatttcagtattttaaatgtgaccaccagaggtctgtatacctgtacctgtcttccctgagagagagctgcaccatcactgcgtatccctgtgactcctaccaggattataggaatggcaagtgtgtcagctgcggcacgtcacaaaaagagtcctgtccccttctgggctattatgctgataattggaaagaccatctaagggggaaagatcctccaatgacgaaggcattctttgacacagctgaggagagcccattctgcatgtatcattactttgtggatattataacatggaacaagaatgtaagaagaggggacattaccatcaaattgagagacaaagctggaaacaccacagaatccaaaatcaatcatgaacccaccacatttcagaaatatcaccaagtgagtctacttgcaagatttaatcaagatctggataaagtggctgcaatttccttgatgttctctacaggatctctaataggcccaaggtacaagctcaggattctccgaatgaagttaaggtcccttgcccatccggagaggcctcagctgtgtcggtatgatcttgtcctgatggaaaacgttgaaacagtcttccaacctattctttgcccagagttgcagttgtaactgttgccaggacacatggccataaataatagaaagaaagctacaaccacaggctgtttgaaagcttcacctcacctttctgcaaagcagaaaaagtatgaaaaaaccaaggcttttttcagtagcgtcctatggatgtcacattgtacatcaaacaaccttgtgattataaaacgatcctgggaaggagcccctaactagggcaagtcagaaatagccaggctcgcagcagcgcagcgctgtgtctgctgtgtcctggggcctcccttgttccgacctgtcaattctgctgcctgtcacgcgggtggttctgcccatcgcggctgcgggtcaagcatcttcaagggaaggacggactggaggcctcaccgtggactcaactctgcattctccgtgccacattcctccagttcccacacgtagaagggaacgaaactgacgtctacctcatggggctgctgtgtgggtttgggaggcaaaaatctatgaagggttttttgaaatcccataggtgccacatctatgagatgtttgataaatgtgaatatgcttttacatttgggcttatctaatttgcaataagagagcctctctctatcaacaccagcttctctctcgggctgtttgctcagggaaggcaagaaagccacgtgctggccctctgccttctctaaagtgctgttggagcatggaggagctggaggagatggggatggactgacagctaagagggcggctgctgggactagatagtggatgaagaaagaaggacgaggaagccgtggggcagcctcttcacatggggacaggggatggagcatgaggcaggggaaggaaaagcagagcttatttttcacctaaggtggagaaggatcactttacaggcaacgctcattttaagcaacccttaagaaatgtttatgtttctttattaccaatgtaatctatgattattgaaggaaatttagaaaatgcgtagatacaaaaaaaaaaaaaaaaaa

SEQ ID NO: 1458 - DNA, 3624 bp, Homo sapiens
atatacaggaggagataaaaaatttagtcaaattacagactagtagtgcttccttagcttcctgtgaaggaaattcttcaaacaaacaagtatcttcggaaagtcaaatgggttttttttctctaagcagtgagagaaatgaatctgttatccattatcctgaatccacagaacctgaaatacagcaagaaatgtccacgtcacaaccagactgcaatgtggatagttgctcagtaagcagtggatatggcaccttttgtatctcagaattaaatctgtacaaatctaaagaccctaaggagttcatggagcacatagatgttcccaaaggacagtatgtagcacctgcggtgccggctgagtcacttgtagatggtgtgaaaaatgagaatttttatatacagactcctgaagagtgtcatgtgtctttaaaggaagatgtatccatttctcctggtgaatttgaacataattttcttggtgaaaataaggtttctgaagtatacagtgggaaaacaaatagtaatgctataacatcatgggcacaaaaactgaagcagaaccaaccaaagagagcacatgtagaagatggaggttcaagatctaaacaaggaaatgagcaaagtaagaagacaccaattgagaaatctgattttgctgctgctacacatcctcgtgctttttacctcagtaaaccagatgaaactccaaatgcttggatgtctgattcaggaacaggattgacttactggaaactagaggaaaaggatatgcaccactctttgcctgaaactttagagaagacgttcatatcattgtcttccacagatgtgtcaccaaaccagtctaatactagtaatgagatgaagctaccgtcactgaaggatatttattataaaaaacaaagggaaaacaagcagttacctgagaggaatctcacttctgcttccaacccaaatcatccaccagaggtcctgactctagatcctacgttacacatgaagccaaagcagcagatttcagggattcaacctcacggccttccgaatgcccttgatgacagaatatccttttccccggactctgttctagagcctagtatgtctagtccctctgacatagactcattttcacaagcaagtaatgtcacttctcagttacctggatttccaaaatatccctcacacacaaaagcttctccggtggactcttggaaaaatcagacattccaaaacgaaagtaggaccagttccacgtttccgtcagtatataccattactagtaatgatatctcggtcaacactgtagatgaagaaaacactgtcatggttgcttcggcctcagtcagtcagtcccagcttccaggtacagccaacagtgtcccagaatgcatttcattgacttccttggaagatcctgtgatattgtctaagattaggcagaatctgaaggaaaagcatgctcgacacatagcagatcttcgagcttattatgaatcagaaataaatagtttgaaacagaagctggaggcaaaagaaatctctggagttgaagattggaagataaccaatcaaattcttgtagacagatgtggccaattagatagtgctttgcatgaagctactagtcgcgtgagaacacttgaaaataagaataacttactggaaattgaagtgaatgatttgagagaacgcttcagtgcagccagcagtgcttccaaaattttgcaggaacgaattgaagaaatgagaacaagcagtaaagaaaaagacaataccatcattcgactaaaatctagactgcaagatttagaagaagcatttgagaatgcttacaaactctcagatgataaagaagctcaactaaaacaagagaacaaaatgtttcaagatcttttaggagagtatgagtcccttggaaaagaacacaggagagtaaaggatgcattaaatacaactgagaacaaattgcttgatgcatatactcagatttctgatttgaaaagaatgatttcaaaacttgaagctcaggtcaagcaagtagaacatgaaaatatgttaagccttcgtcataattctagaattcacgtgagaccctcgcgtgccaacacactagcaacttcagacgtcagcaggcggaaatggctgattccaggtgcagagtattccatctttactggccagcctctggacacccaggacagtaacgtggataaccagctggaggaaacctgtagcctagggcaccgttcacctctggaaaaggattcttcacctggaagttcatcaacaagcttgttgataaaaaagcaaagagagacttcagacacgccgatcatgagagctttaaaagaacttgatgagggaaaaatatttaaaaattgggggacacagacagagaaagaggacacctcaaatataaatcctcggcaaactgaaacttcagttaatgcaagtcgttctccagaaaagtgtgcccaacagagacaaaagagacttaattcggcctcacagagatcatcatctttaccaccttcaaatcgtaaatcaagtactccaacaaaaagagagattatgctaacaccagtgactgtggcttatagtccaaagcgatcccctaaagaaaacttgtccccaggatttagtcatctgcttagcaaaaatgagagcagtccaattcgatttgatatacttttggatgatttagatactgttcctgtgtctacattacaacgtaccaatccaagaaagcaactccagtttcttcctctagatgactcggaagaaaaaacttattctgagaaagccaccgataaccatgttaatcatagctcttgccctgaaccggtgccaaatggagtgaagaaagtatctgtgagaacagcctgggagaagaataaatcagttagctacgaacagtgtaagccggtttcagtcactccacaggggaatgattttgaatatacagcaaaaattcggaccctagctgaaacagaacgattttttgatgaacttacaaaagaaaaggaccagattgaggcagcactaagcaggatgccttctcctggaggacgaatcactttacagacaagattaaatcaggaagccttggaagatcgtttggaaaggattaatcgagaactgggttcagttcgcatgacgctaaagaaattccatgttttgcgcacctctgcaaatctttgagatttgtagccattaaattttgagacatttttgtttgcactaatgtataattatgcagtcagaaaaggcaaactattttgtactgtttataagccttcaaacagtagttttacaatcatgctattcttacacttgctattttatacttcaaatggccacatattttcaagatatttttgttatgctcaggaatctcttgtatattttactatttaaaaagcattatttttaaatagtatctgtctccaatttatatcaagaataaggaaatataaacagaggaagcagcttgtttctaaacaaatagtgttatccttttacaattaactgcacatcaattttatagacttgttctacattgtaaatacaattcagtttttaaaaaataaagcttaatagcttccataaaaaaaaaaaaaaa

SEQ ID NO: 1459 - DNA, 2435 bp, Homo sapiens
gagattttatcgggagcagtgaggtgactttggcagctaacaggccactagtatcctactaaagcttttgtctggataggagcaacatgcatgtttacagtcttgcagtgtgctgagagctggtggccagtgggactgagtgagctgtgtgccgtgtattgacccgcttcctagtcctgaattcctttcagaagctccggcagggaggatgatacagtcagacaaaggagcagatccaccagacaagaaggacatgaagctttctacagccaccaatccacagaatggcctctcccagatcctgaggcttgtgctgcaagagctgagtctgttctacagcagagatgtgaatggagtgtgtctcttgtacgatctcctccactcgccgtggcttcaggctctgctaaagatttatgactgcctccaggaatttaaagaaaagaaactagttcctgccacaccacatgcacaggtgttatcctatgaggtagtggagttattacgtgaaacccctacttcccctgagatccaagagctgagacaaatgctccaggctccacacttcaaggccttgctcagtgcccatgacacgatagctcagaaagattttgaaccccttctccctccactgccagacaatatccctgagagtgaggaagcaatgaggattgtttgtttagtgaaaaaccaacagcccctgggagccaccatcaagcgccacgagatgacaggggacatcttggtggccaggatcatccacggtgggctggcggagagaagtgggttgctatatgctggagacaaactggtagaagtgaatggagtttcagttgagggactggaccctgaacaagtgatccatattctggccatgtctcgaggcacaatcatgttcaaggtggttccagtctctgaccctcctgtgaatagccagcagatggtgtacgtccgtgccatgactgagtactggccccaggaggatcccgacatcccctgcatggacgctggattgcctttccagaagggggacatcctccagattgtggaccagaatgatgccctctggtggcaggcccgaaaaatctcagaccctgctacctgcgctgggcttgtcccttctaaccaccttctgaagaggaagcaacgggaattctggtggtctcagccgtaccagcctcacacctgcctcaagtcaaccctatcaatttctatggaagaagaagatgacatgaagattgatgagaaatgtgtggaagcagatgaagaaacatttgaatctgaggaactttcagaagacaaggaggagtttgttggctacggtcagaagttctttatagctggcttccgccgcagcatgcgcctttgtcgcaggaagtctcacctcagcccgctgcatgccagtgtgtgctgcaccggcagctgctacagtgcagtgggtgccccttacgaggaggtggtgaggtaccagcgacgcccttcagacaagtaccgcctcatagtgctcatgggaccctctggtgttggagtaaatgagctcagaagacaacttattgaatttaatcccagccattttcaaagtgctgtgccacacactactcgtactaaaaagagttacgaaatgaatgggcgtgagtatcactatgtgtccaaggaaacatttgaaaacctcatatatagtcacaggatgctggagtatggtgagtacaaaggccacctgtatggcactagtgtggatgctgttcaaacagtccttgtcgaaggaaagatctgtgtcatggacctagagcctcaggatattcaaggggttcgaacccatgaactgaagccctatgtcatatttataaagccatcgaatatgaggtgtatgaaacaatctcggaaaaatgccaaggttattactgactactatgtggacatgaagttcaaggatgaagacctacaagagatggaaaatttagcccaaagaatggaaactcagtttggccaattttttgatcatgtgattgtgaatgacagcttgcacgatgcatgtgcccagttgttgtctgccatacagaaggctcaggaggagcctcagtgggtaccagcaacatggatttcctcagatactgagtctcaatgagacttcttgtttaatgctggagttttaacactgtacccttgatacagcgatccatagttgcaatctaaaacaacagtatttgacccattttaatgtgtacaactttaaaagtgcagcaatttattaattaatcttatttgaaaaaaatttttattgtatggttatgtggttacctattttaacttaattttttttcctttacctcatatgcagctgtggtagaaatatgaataatgttaagtcactgagtatgagaacctttcgcagatttcacatgatctttttaagatttaaataaagagctttcctaaat

SEQ ID NO: 1460 - DNA, 2201 bp, Homo sapiens
caactacgagccacgagtttgcagatggggctgctcggcggcgcctgtggctgagggagagcagcggcggcggggagcgaccgggagcggcggcagcggcggcgcggaggcggctgaggtgcgagccggactaaatcattttgctactttaaaaaaatcacgaaagtacattatttgaagtttggagaagaaagggatttggtaacaaaggacagccatttccattttaagcagctaaacagcaggagagatttctgtaagaaggtaccagctcagattccattgttcatcattttgcaatgcagcaagtcttggaaaaccttacggagctgccctcgtctactggagcagaagaaatagacctaattttcctcaagggaattatggagaatcctattgtaaaatcacttgctaaggctcatgagaggctagaagattccaaactagaagctgtcagtgacaataacttggaattagtcaatgaaattcttgaagacatcactcctctaataaatgtggatgaaaatgtggcagaattggttggtatactcaaagaacctcacttccagtcactgttggaggcccatgatattgtggcatcaaagtgttatgattcacctccatcaagcccagaaatgaataattcttctatcaataatcagttattaccagtagatgccattcgtattcttggtattcacaaaagagctggggaaccactgggtgtgacatttagggttgaaaataatgatctggtaattgcccgaatcctccatgggggaatgatagatcgacaaggtctacttcatgtgggagatataattaaagaagtcaatggccatgaggttggaaataatccaaaggaattacaagaattactgaaaaatattagtggaagtgtcaccctaaaaatcttaccaagttatagagataccattactcctcaacaggtatttgtgaagtgtcattttgattataatccatacaatgacaacctaataccttgcaaagaagcaggattgaagttttccaaaggagaaattcttcagattgtaaatagagaagatccaaattggtggcaggctagccatgtaaaagagggaggaagcgctggtctcattccaagccagttcctggaagagaagagaaaggcatttgttagaagagactgggacaattcaggacctttttgtggaactataagtagcaaaaaaaagaaaaagatgatgtatctcacaaccagaaatgcagaatttgatcgtcatgaaatccagatatatgaggaggtagccaaaatgcctcccttccagagaaaaacattagtattgataggagctcaaggtgtaggccgaagaagcttgaaaaacaggttcatagtattgaatcccactagatttggaactacggtgccatttacttcacggaaaccaagggaagatgaaaaagatggccaggcatataagtttgtgtcacgatctgagatggaagcagatattaaagctggaaagtatttggaacatggggaatatgaaggaaatctctatggaaccaaaattgattctattcttgaggttgtccaaactggacggacttgcattctggatgtcaacccacaagcactgaaagtattgaggacatcagagtttatgccctatgtggtatttattgcggctccggagctagagacgttacgtgccatgcacaaggctgtggtggatgcaggaatcactaccaagcttctgaccgactctgacttgaagaaaacagtggatgaaagtgcacggattcagagagcatacaaccactattttgatttgatcatcataaatgataatctagacaaagcctttgaaaaactgcaaactgccatagagaaactgagaatggaaccacagtgggtcccaatcagctgggtttactgatgattcagtaaggttaacaatgaaaattaaactcttaaaaagtgactgcaacaaataaaccttctactgagaaaatacatcacagatagaagattatctgctaagtccaggcatttttatggtgtagattgaaataatagtacacttctgaatttttatataaaatgtggttggaaggtgtactaatatataatttatcttaatttttctaactttgtatggataatctttctattcatatcacataaagaaatgcgttgaagcaaaaaaaaaaaaaaa

SEQ ID NO: 1461 - DNA, 3129 bp, Homo sapiens
gagtagttctcctgggtccgctctgcgggcttctgggagatgtagtttctggtctgtaggcaggacggaaggagcgggggaggccccttacgcaaactacaattcccggcggggagcgcggtgaagcgggggtgggatctgaacatggcggcggtggtagctgctacggcgctgaagggccggggggcgagaaatgcccgcgtcctccgggggattctcgcaggagccacagctaacaaggcttctcataacaggacccgggccctgcaaagccacagctccccagagggcaaggaggaacctgaacccctatccccggagctggaatacattcccagaaagaggggcaagaaccccatgaaagctgtgggactggcctggtacagcctgtacacccgcacctggctcgggtacctcttctaccgacagcagctgcgcagggctcggaatcgctaccctaaaggccactcgaaaacccagccccgcctcttcaatggagtgaaggtgcttcccatccctgtcctctcggacaactacagctacctcatcatcgacacccaggcccagctggctgtggctgtggacccttcagaccctcgggctgtgcaggcttccattgaaaaggaaggggtcaccttggtcgccattctgtgtactcacaagcactgggaccacagtggagggaaccgtgacctcagccggcggcaccgggactgtcgggtgtacgggagccctcaggacggcatcccctacctcacccatcccctgtgtcatcaagatgtggtcagcgtgggacggcttcagatccgggccctggctacacctggccacacacaaggccatctggtctacctactggatggggagccctacaagggtccctcctgcctcttctcaggggacctgctcttcctctctggctgtgggcggacctttgagggcaatgcagagaccatgctgagctcactggacactgtgctggggctaggggatgacacccttctgtggcctggtcatgagtatgcagaggagaacctgggctttgcaggtgtggtggagcccgagaacctggcccgggagaggaagatgcagtgggtgcagcggcagcggctggagcgcaagggcacgtgcccatctaccctgggagaggagcgctcctacaacccgttcctgagaacccactgcctggcgctacaggaggctctggggccggggccgggccccactggggatgatgactactcccgggcccagctcctggaagagctccgccggctgaaggatatgcacaagagcaagtgatgcccccagcgcccccagcccagcccactccccgcatggggaggccgccaccaccaacacctcatcatccttctcatcgctaacaccaccacctccatcggcacccaagcgggcatcatccccccacactgctcaggggaggggagggatcaggcgatgagactgtgaggccaaaagaagggggcctgttggaggctgggaaccccgcagcgcgaggctgcctcatcaacggcaagaggaaaggaggggtctcgggacatctccagaccctaccaactgggagggtcccctcctccttccctactcctgggacggcagcaaggacatgggggctgctgttagcttctccgtcaggaggcctcatctcactgtagccctggaacccagggtccatcttgcccttcccccatccatggttgggaaagaagctcagcccctcacagtggcctcaagtgtgatgccttacaaaagcaccactcagatgggcagctggactctggtgtcctgagactctgccctcttcccacagcctccctgccccacccatccctgcaaagccatttttcagacagagccattcctaagaacactgaagggctggaatgctggctggccactctctgcctcagtggcctccctacagcctggaagaaggagggtcctgattgccaaggaaacctcctcattgggctaaggagacactggagtctggagtgtggagccccacagtcttgcaggtcacatgctctccttgcacatctggcctggttgtacccactggcctctgcctctgccctgggccaaaagggcccctccttgccaggggagagacagccacggtcctctttggccgatgctgtattctcattttggcccttgttcttaggcccgtctgcccgccttcctccatctaacctttcctgttttatccgcagcccttttcttctttgagttagtaaagatttattctgtaacctgacactcatctggccctttgcagtttgccagccatattcccatgtgatttcccactggatccaggcccccatccggctggcaggagggggctctgacgtgcaggttggaaatcagaagtctgtgagagcgcgggagtgcatggcagctctgggtcccagacctggcccgacccctctgcttcacctccagctctgctgctcctctactcttgggtcgagatccctttggagccacagcgaggaaccctgtggtcctcaggcaggtgtaccttgagtcagccaggagccctcttttcctgtgtcaaagcctgccctcgggctctgctcacctctggtgaccctccaagatgcccctgccctcagtttcccctcatgatctggcctctgcccccttctctagccacagcctctagtacactttagcaataccaccagactagttagagttccccactcaccaagcaagacatgcagtttcatgcctctgtgccttcgctcatgctgtttcttccgactggaatgccttcccctgctcctcctgccttgtctgcctggcaagttcatctctcacgatcccctcaaaggccccctcctccaggaaggcaacccctgtgcccctcccctccaggctacctctgcactttgtcaatgcttctcttgtggcacttatcacactgtattttacttgtttacatgtttgtctccccttctagactgtgaatccttaagggcatggactgtatcttatgcatctctgtatttctgcgcctagcacggtgcctagcacacagtaggcgctcaataaatgttgaatgaatgaatgatttaatcaagaaaaaaaaaaaaaaaa

SEQ ID NO: 1462 - DNA, 2986 bp, Homo sapiens
cgcggggggccggggccgggccgttgcctagcaacgccgagccccgcccggccggcgcgtgcctgcccccagcatggcttggcagggctggcccgcggcgtggcagtgggtcgccggctgctggctcctcctcgtccttgtcctcgtcctacttgtgagcccccgcggctgccgagcgcggcggggcctccgcggtctgctcatggcgcacagccagcggctgctcttccgaatcgggtacagcctgtacacccgcacctggctcgggtacctcttctaccgacagcagctgcgcagggctcggaatcgctaccctaaaggccactcgaaaacccagccccgcctcttcaatggagtgaaggtgcttcccatccctgtcctctcggacaactacagctacctcatcatcgacacccaggcccagctggctgtggctgtggacccttcagaccctcgggctgtgcaggcttccattgaaaaggaaggggtcaccttggtcgccattctgtgtactcacaagcactgggaccacagtggagggaaccgtgacctcagccggcggcaccgggactgtcgggtgtacgggagccctcaggacggcatcccctacctcacccatcccctgtgtcatcaagatgtggtcagcgtgggacggcttcagatccgggccctggctacacctggccacacacaaggccatctggtctacctactggatggggagccctacaagggtccctcctgcctcttctcaggggacctgctcttcctctctggctgtgggcggacctttgagggcaatgcagagaccatgctgagctcactggacactgtgctggggctaggggatgacacccttctgtggcctggtcatgagtatgcagaggagaacctgggctttgcaggtgtggtggagcccgagaacctggcccgggagaggaagatgcagtgggtgcagcggcagcggctggagcgcaagggcacgtgcccatctaccctgggagaggagcgctcctacaacccgttcctgagaacccactgcctggcgctacaggaggctctggggccggggccgggccccactggggatgatgactactcccgggcccagctcctggaagagctccgccggctgaaggatatgcacaagagcaagtgatgcccccagcgcccccagcccagcccactccccgcatggggaggccgccaccaccaacacctcatcatccttctcatcgctaacaccaccacctccatcggcacccaagcgggcatcatccccccacactgctcaggggaggggagggatcaggcgatgagactgtgaggccaaaagaagggggcctgttggaggctgggaaccccgcagcgcgaggctgcctcatcaacggcaagaggaaaggaggggtctcgggacatctccagaccctaccaactgggagggtcccctcctccttccctactcctgggacggcagcaaggacatgggggctgctgttagcttctccgtcaggaggcctcatctcactgtagccctggaacccagggtccatcttgcccttcccccatccatggttgggaaagaagctcagcccctcacagtggcctcaagtgtgatgccttacaaaagcaccactcagatgggcagctggactctggtgtcctgagactctgccctcttcccacagcctccctgccccacccatccctgcaaagccatttttcagacagagccattcctaagaacactgaagggctggaatgctggctggccactctctgcctcagtggcctccctacagcctggaagaaggagggtcctgattgccaaggaaacctcctcattgggctaaggagacactggagtctggagtgtggagccccacagtcttgcaggtcacatgctctccttgcacatctggcctggttgtacccactggcctctgcctctgccctgggccaaaagggcccctccttgccaggggagagacagccacggtcctctttggccgatgctgtattctcattttggcccttgttcttaggcccgtctgcccgccttcctccatctaacctttcctgttttatccgcagcccttttcttctttgagttagtaaagatttattctgtaacctgacactcatctggccctttgcagtttgccagccatattcccatgtgatttcccactggatccaggcccccatccggctggcaggagggggctctgacgtgcaggttggaaatcagaagtctgtgagagcgcgggagtgcatggcagctctgggtcccagacctggcccgacccctctgcttcacctccagctctgctgctcctctactcttgggtcgagatccctttggagccacagcgaggaaccctgtggtcctcaggcaggtgtaccttgagtcagccaggagccctcttttcctgtgtcaaagcctgccctcgggctctgctcacctctggtgaccctccaagatgcccctgccctcagtttcccctcatgatctggcctctgcccccttctctagccacagcctctagtacactttagcaataccaccagactagttagagttccccactcaccaagcaagacatgcagtttcatgcctctgtgccttcgctcatgctgtttcttccgactggaatgccttcccctgctcctcctgccttgtctgcctggcaagttcatctctcacgatcccctcaaaggccccctcctccaggaaggcaacccctgtgcccctcccctccaggctacctctgcactttgtcaatgcttctcttgtggcacttatcacactgtattttacttgtttacatgtttgtctccccttctagactgtgaatccttaagggcatggactgtatcttatgcatctctgtatttctgcgcctagcacggtgcctagcacacagtaggcgctcaataaatgttgaatgaatgaatgatttaatcaagaaaaaaaaaaaaaaaa

SEQ ID NO: 1463 - DNA, 791 bp, Homo sapiens
gcgtccgccgggctgggcctggcgcgcaggcgctaggaagaggccgcgtggggcgaaggcggcgcttggctggtggggcccgcggcgggattttcccgggcggcgagagcggatctatcttgggatcccatggctttctttactgggctctggggccccttcacctgtgtaagcagagtgctgagccatcactgtttcagcaccactgggagtctgagtgcgattcagaagatgacgcgggtacgagtggtggacaacagtgccctggggaacagcccataccatcgggctcctcgctgcatccatgtctataagaagaatggagtgggcaaggtgggcgaccagatactactggccatcaagggacagaagaaaaaggcgctcattgtggggcactgcatgcctggcccccgaatgacccccagattcgactccaacaacgtggtcctcattgaggacaacgggaaccctgtggggacacgaattaagacacccatccccaccagcctgcgcaagcgggaaggcgagtattccaaggtgctggccattgctcagaactttgtgtgagttgagcccaggcctctggttgcaggactcgtgaatggagcagttctgagaaccacccttttgctaagggagcttgggagccacatggctgctcccttcacactgggtaacagtgtagtatcctgtgagagaataaatgtattcatttatgtgtttttccagagctttctgggatgtgggaaaataaattacactgaagcagttgaaaaaaaaaaaaaaaaaaa

SEQ ID NO: 1464 - DNA, 787 bp, Homo sapiens
ggactgtggaggggcgcacgcccggaagcggcgagggtagccatgacggcctccgtgctgcgaagtatctcgctagccctgcgcccgactagcgggcttctgggaacttggcagacgcagcttagagagactcaccagcgagcgtcattgttgtctttctgggaactcattcccatgagatcagaacctcttcgaaaaaagaagaaggtagatcctaaaaaagaccaagaagcaaaggagcgcttgaaaaggaagatccgaaaactggaaaaggctactcaagagctaattcctattgaagattttattacccctctaaagttcttggataaagcaagagagcggcctcaggtggagctcacctttgaggagactgagaggagagctctgcttctgaagaagtggtccttgtacaagcagcaagagcgtaagatggagagggacaccatcagggctatgctagaagcccagcaggaagctctggaggaactgcaactggaatccccgaagctccatgctgaggccatcaagcgggatcctaacctgttcccctttgagaaggaagggccacattacacaccaccgatccctaactaccaaccccctgaaggcaggtacaatgacatcaccaaggtgtacacacaagtggagtttaagagatagacttgcaggctgctatccttaacatgctgcccctgagagtaggaatgaccagggttcaagtctgctttccacagaatcaggcatgctgttaataaatactggtttaatcaaaaaaaaaaaaaaa

SEQ ID NO: 1465 - DNA, 616 bp, Homo sapiens
ctaggaagcccagagctgcggttcgcaggcctgctaagcagccggcggccggaagtctatcccgcagaagcgcagccattcacggcctcacgcaatgcgacacttccgcctgcacgagttcttccggggcggaggtcaccatggcagctgccttggctcggcttggtctgcggcctgtcaaacaggttcgggttcagttctgtcccttcgagaaaaacgtggaatcgacgaggaccttcctgcagacggtgagcagtgagaaggtccgctccactaatctcaactgctcagtgattgcggacgtgaggcatgacggctccgagccctgcgtggacgtgctgttcggagacgggcatcgcctgattatgcgcggcgctcatctcaccgctctggaaatgctcaccgccttcgcctcccacatccgggccagggacgcggcgggcagcggggacaagccgggcgctgatactggtcgctgacagcgccaaagagaccaacaagatgattttagcgtggactaggacacttaacctaagaagagtttcacttaatcattcaaatcactatctgaagggtcacggagcgcaaaataaagtttaaaaccctgctaccacaa

SEQ ID NO: 1466 - DNA, 2835 bp, Homo sapiens
aagcctcccattacggagcacgagagagtccatgaaggtccccgcgactcccggactggagaaaacggctcttgcgatggggcgaagtccgagctgcggcgggcgttggtccgtgcagggaagtgggaatcgttaggttcgttctggacccgccgccccatggcccaggcgtctcgctcaggtagcctgcctccactcgttatcgtgcccccgctgagggcgcaacccgggggcactggggaggagcagtgggagagaagtcgaacgggcggtcttcgctgggaggttcactgctggccgagcggaacttctggagggacgccgtggtggccgacgccggcggatgtgagcgaggactacgaggctgatgctgcggcctggaggcgggggcccgcaggtggcggcccgatccctcccgcgctgcagcgtctccgggcggtgttgctgcggctgcatcgcgagcgggagcagctcctccaggcccgagactgcgcctaccacctacagtcggctgtgcgactcatgaagaccctgagtcctggctcgccatccggcggccctagccccttgccccagtggtaccgcgacctgcagctgcacccttcccaaggggcggttctgcgaatcggccctggggagactctcgagccgctgctgctagcgcgccccatcggactagccgcccagtgcctggaggctgtcatcgagatgcagcttcgcgctctcggccgggagcccgccagcccgggcctgtcgtcccaactcgccgagctgctctttgcacttcccgcctaccacacactacagagaaaagccttgagccacgtcccaggggccgcacgtcctttccccacgtcccgtgtgctccgcctcttgacgggggagcggggttgccaggtggcaagtcggctggacgaggcgctccaaggatcggcgttgagggaccagctccgcaggcggtgccaagaggagggggatctgctaccagggctgctgggcctggtcgggggcgtggcgggttcagccagctgtggactagggctcggaggggctggggccttgtggtgccaatactggaccctgctgtgggcagcctgtgctcagagtctggacctaaatctgggaccctggagggaccccagggcaacagcgcaacagctgagtcaggcactgggtcaggcatccctgcctcaggagtgtgagaaggagctggcatctttgtgtcacagactacttcatcagtcgcttatctggagctgggaccaaggtttctgccaggccttgggatcagctcttgggggtcagagcagccttcccacatcctctggcactgctgaacttttgcagcagctctttcctcctctcttggatgcccttcgagagcccaggttacgacggattttctgccagcctgcaggtctctgtacccttcagaccaccttgctctggttcctgggcagagctcagcagtacttggcagcatgggacccagcttccttcctgctcctgatccaaaaggacttacctcctctgttgcatgaggcagaagctttgtatagcctggcctcagaggaaagcttagctctggaagtggagcagcagctgggcctggagatccagaagctgactgcacagatccagctcctgcctgaagagtcactaagtgtcttttctcaagaatgtcataaacaagccatgcaaggtttcaagctctacatgccacggggtcggtactggcggcttcgtctctgtcctgaacctcccagtgctcctagtgagtatgctggtttagtggtccgcaccgtactggagcctgtgttgcaaggattgcaagggttgccacctcaagcccaggcccctgcccttggtcaggctctgacggccatcgtgggtgcctggcttgaccacattcttacccatgggattcggttcagcctgcagggagcgctgcagctcaaacaagactttggagtggtcagggagttgctggaagaggagcagtggagcctgtcccctgatctccgccagaccctgctcatgctcagcatcttccagcagctggatggggccctactgtgtctgttgcagcagcccctgcccaagtctcaagtccacaggaggcccccctgttgctgtgcttgtcaggaggtccagaccacgaaattgcccagcagctgcctcaatagcctggagagcttggagcccccgctccagcctggaacatctccagcccagacaggtcagctgcaaagcacactaggaggaaggggacctagcccggagggctacctggtgggaaatcagcaggcctggcttgccctcaggcaacaccagcgaccccgttggcacctgccgtttttttcctgcctgggaaccagtcctgaatcctaaggagcctgggaccaggagccagaaagttaagagctccccatctctagctggaaaatccagacatttggaattgcatattaaggaagcccagaactggaagcttggaggaaagcatactggagaataagctacaaagagcctgggcttaagaatccaagattaggggctgggcgaggtggctcacgcctgtaatccagcactttgggagaccgaggcaggcggatcatgaggtcaggagatcaagaccatcctggctaacacggtgaaaccctgtttccactaaaaatacaaaaaattagccgggcgtggtggcgggtgcctgtagtcccagctactcgggaggctgaggcaggagaatggtgtgaacctgggaggcggagcttgcagtgagctgagatccagccacagcactccagcctgggtgacagagcaagactctgtctc

SEQ ID NO: 1467 - DNA, 1155 bp, Homo sapiens
tgataatcatggcgcccctcggaacaactgtattgctgtggagcctcttgaggagttctccgggcgtggaacgggtctgtttccgggctcgaatccagccctggcacggtggcctgctccaaccgctaccttgctctttcgagatggggctgccacgccgccggttcagctccgaggccgcagaatctggtagcccagagaccaagaaacctacatttatggatgaggaagttcaaagcatactcacgaaaatgacaggcttgaacttgcagaagacttttaagccagctatacaagaactgaagccaccaacctataagctaatgactcaggcacagttggaagaggctacaagacaggcagttgaggcagctaaagtacgattaaaaatgccaccagttctggaagagcgagtaccaataaatgatgtgttagctgaagataagattttggaaggaacagaaacaaccaaatatgtgtttactgatatatcatatagcataccacaccgggagcgttttattgtcgtcagagaaccaagtggcacactacgcaaagcctcttgggaagaacgggaccgaatgatacaagtttatttcccaaaagaaggtcgtaaaattttgacaccaataattttcaaggaagaaaatcttaggactatgtatagccaggacaggcatgttgatgtcctcaatctctgctttgcccagtttgagccagattccacagagtatatcaaggttcatcacaagacctatgaagatatagataaacgtggaaaatatgaccttttacgttcaacaagatactttggtggaatggtgtggtattttgtaaataataaaaagattgatggtttgctgattgaccagattcagagagatttaatcgatgatgcaaccaacttggtccagctgtatcacgtgctccatccagatggccagtcggctcaaggggccaaggatcaggctgctgagggaataaatttaatcaaggtctttgcaaaaacagaagcacagaagggagcctatatagaactaacactgcagacttatcaagaagcactcagtcgccattctgcagcttcctaaaaatattttaaaaatacatttattttactaaaaaaaaaaaaaaaaaaaaaaaaaaaaaaaaaaa

SEQ ID NO: 1468 - DNA, 653 bp, Homo sapiens
gggacgagggcgcgtgggtgaggaaggtcaggtctaggaactctaactccttgccactcaagaaatgtcctccctttcagaatatgccttccgcatgtctcgtctcagtgcccggctatttggtgaagtcaccaggcctactaattccaagtctatgaaagtggtgaaactgtttagtgaactgcccttggccaagaagaaggagacttatgattggtatccaaatcaccacacttacgctgaactcatgcagacgctccgatttcttggactctacagagatgagcatcaggattttatggatgagcaaaaacgactaaagaagcttcgtggaaaggagaaaccaaagaaaggagaagggaaaagagcagcaaaaaggaaatagtgttggtccctcaagagggagactttcttcctcagtggcggagagaagaaagtgcatttattgtctttccacatattggaggaatgtcatcttcctaaatgaagtttatttggaggaacacagtcatctccttggtgaaatctaatccggttacattgtggctggtttcttgaacacattctaactgtgcaaaattatcttggccttggccgtgtaatgtgaggtttacctgattctctaatgaaataaatacctaagttattgtttg

SEQ ID NO: 1469 - DNA, 1878 bp, Homo sapiens
ctgacactgaacgccgcttgtcccctccggcttgccgtcctcgcagccatggcggccgccgcgctcccagcatggctgtctctgcagtcgagggcaaggactctgcgtgcattctccactgccgtctactcggccactccggtcccgacacctagcctgccggaaagaacacccggaaatgaaaggccaccaagaagaaaggcactacctcctaggacagagaaaatggctgttgaccaggactggcctagtgtttacccagttgcagcaccatttaaaccctctgcagtacctcttcctgttcgaatgggttatccagtaaaaaagggcgtgcccatggcaaaggagggaaatctagaacttttaaagattcccaattttctgcatttgactcctgtagcaattaaaaagcactgtgaagcccttaaagatttttgcactgagtggccagccgcactggacagtgacgagaaatgtgagaagcattttccaattgaaattgacagcactgattatgtttcatcaggaccatctgttcggaaccccagagcacgagtagtagtcttaagagtaaagctttccagtttgaatttagatgatcacgcaaagaagaaattaattaaacttgtaggagagcgatactgcaagaccacagatgtgcttaccatcaaaacagataggtgccctttaaggaggcagaattacgattatgcagtgtatctactaacagtgttataccatgagtcttggaatactgaagaatgggaaaaaagtaagactgaagcagacatggaagagtatatatgggaaaatagctcatcagaaagaaatatcctggaaacgcttctccagatgaaagctgctgagaaaaatatggaaataaataaagaagagctccttggtactaaagaaattgaagagtacaaaaagtctgttgttagtcttaaaaatgaggaggaaaatgaaaattccatttctcagtacaaagaatccgtgaagagactattaaatgtgacatgaattatggagtagaaaaatctgcttgatttattaattttatgatatatgtgatcagtatctaatttgatataaaattgaaaatgttaaaaaatcattttttttcctcagagttaaaattatttccctcatactaatgcttaatggcaatgattactccagagttttttaatttttacactggggcaatagactaggaggtctctgatttcttcttggtctaaagtgttttgattttatttctacataatagctttggtattcatgtatatacatgcatttaattgtgattttatcacctttcccatttctttccccacaagctggcatttcagtagttgcttttgaataatggttttggttacctgggaaggcaggcccagaacccatttccttgacttgcagttccgggctgtgttcacatgactgctgtctagctgatgcatttttcacatttgtcaactctggttagaaacaggtcctcaggagtattctctaacctgatattttctaaaaagatatgttgattcaactttgtttagcatcctactttctagattgtggggctcattttgccagggccaagctaccagaaaagtagaagtggagattacctggtatgtatctctctgggtgccccagttagagctgccacagctcaggaaaaagatgaggcataacgaccttgaatgtaattggagtaagtgacaaaataagaactaccctgggaaaccctgcattcaatgtagctgtcaattcagtatttttaagtacacctgtcagctgtttcttaccacttcgatggttgtgattaatttaaaatcaaaataaaggaattactgagtttaaaaaaaaaaaaaa

SEQ ID NO: 1470 - DNA, 1678 bp, Homo sapiens
aacgggaggcgcccgcggggctgtccgcggtcgcgccgggctccgcctgcagtgtggcccgtccggacagtccctcaccccggcctgcgctgctgcgtggactcgggcctcaggaattccgctgcggcccaaggcttgccgtttgacgaggagcagtcgcggtaggcggtgggcaaggctgccctgggcggaggccgaggcgcggctcggactccagcatggcgaccgcggtgcgcgctgtgggctgcctccccgtgctgtgtagcgggacggcaggtcatttattggggaggcagtgttccctaaacaccttaccagcagcttccattttggcatggaagagtgttctcggcaatggccatttgtcatcactgggaaccagagacacccatccctacgccagcttgagccgtgcactgcagacacaatgctgtatttcttctcccagtcacctgatgagccagcagtatagaccatatagtttcttcactaaattgactgcagatgagctgtggaaaggcgctttagcagagactggtgctggagcaaaaaaaggaagaggcaaaagaactaaaaagaagaaaagaaaggatctgaacaggggtcagatcattggtgaagggcgttatggttttctatggcccggactgaatgtccctcttatgaaaaatggagcagtgcagaccattgcccaaagaagcaaggaagagcaggagaaggtggaggcagacatgatccagcagagagaagagtgggaccgaaagaagaagatgaaggttaaacgggagcgaggatggagtggaaactcatggggaggcatcagtcttggcccccctgaccctggtccctgtggagaaacatatgaggattttgataccaggatacttgaggtaagaaacgttttcactatgactgcgaaagagggaagaaagaaatcgatccgtgtcttggtggctgtggggaacggaaaaggagctgcaggtttttctattgggaaagctactgatcggatggatgctttcaggaaagcaaagaacagagcagttcaccatttgcattatatagaacgatatgaagaccatacaatattccatgatatttcattaagatttaaaaggacgcatatcaagatgaagaaacaacccaaaggttacggcctccgctgccacagggccatcatcaccatctgccggctcattggcatcaaagacatgtatgccaaggtctctgggtccattaatatgctcagcctcacccagggcctcttccgtgggctctccagacaggaaacccatcaacagctggctgataagaagggcctccatgttgtggaaatccgggaggaatgtggccctctgcccattgtggttgcgtccccccgggggcccttgaggaaggatccagagccagaagatgaggttccagacgtcaaactggactgggaagatgtgaagactgcacagggaatgaagcgctctgtgtggtctaatttgaagagagccgccacgtaacctctctggccttgtgcagccagttcctgtgctgccctgcacctaggagagactcagcccctcacagcttgggatgttaccttgccttttgtttgttttgagggaagtttaatctttaaactctttggaaataaataattatagctttcaaaaaaaaaaaaaaaaaa

SEQ ID NO: 1471 - DNA, 1393 bp, Homo sapiens
gcgacggatacagggagggcaagggtttccttttggcgcttccctttggaccccggagtgaaaaactctaacgtccagatcagtggagagaaacgcagatttaggaccctgaggagtctttttcacccgtttcccgtcactcgctcaggcgcgccgagggcagtccttgtggggtcctcgtggccagccaagatggttgcccccgcagtgaaggttgcccgaggatggtcgggcctggcgttgggcgtgcggcgggctgtcttgcagcttccagggctaactcaggtgagatggagccgctatagtcctgaattcaaggatcccttgattgacaaggaatattatcgcaagccagtggaggagctaactgaggaggagaaatatgttcgggagctcaagaagactcagctcatcaaagctgctccagcagggaaaacaagttctgtgtttgaagacccagtcatcagtaaattcaccaacatgatgatgataggaggaaacaaagtactggccagatccctcatgattcagactctggaagctgtgaaaaggaagcagtttgagaagtaccatgccgcttctgcagaggaacaggcaaccatcgaacgcaacccctacaccatcttccatcaagcactgaaaaactgtgagcctatgattgggctggtacccatcctcaagggaggccgtttctaccaggtccctgtacccctacccgaccggcgtcgccgcttcctagccatgaagtggatgatcactgagtgccgggataaaaagcaccagcggacactgatgccggagaagctgtcacacaagctgctggaggctttccataaccagggccccgtgatcaagaggaagcatgacttgcacaagatggcagaggccaaccgtgccctggcccactaccgctggtggtagagtctccaggaggagcccagggccctctgccgcaagaaacagtgtgagctactgccacgctgaaaactacctgtgggttaaggatgtagttcctttgtaagggtgggcaggcctcgtaagaaagatgtagcagcatattcactatccgttaatccttctttctttgaggctggaacttgctctctctgcccctatttccttgtaaagagggagcacattgacttgggaatttcctccaggaaactcagggctgttttctcttcccttaggttggggcggacctttggacatataaaggaagcagttttagtatcagaaaagatttattagaaaattctcacgctgaactggtgtagcatgtggtgcagcattcagtgaaactggctggaggaaataggcttgtttccagagttgtccttatacaaaatgtataaaaagcagtttctggtgaaaaaaaaaaaaaaaaaaaaaa

SEQ ID NO: 1472 - DNA, 3331 bp, Homo sapiens
gtctatcagcgatttcatcttcaggcctggactacaccactcaccctcccagtgtgcttgagaaacaaactgcacccactgaactccgcagctagcatccaaatcagcccttgagatttgaggccttggagactcaggagttttgagagcaaaatgacaacacccagaaattcagtaaatgggactttcccggcagagccaatgaaaggccctattgctatgcaatctggtccaaaaccactcttcaggaggatgtcttcactggtgggccccacgcaaagcttcttcatgagggaatctaagactttgggggctgtccagattatgaatgggctcttccacattgccctggggggtcttctgatgatcccagcagggatctatgcacccatctgtgtgactgtgtggtaccctctctggggaggcattatgtatattatttccggatcactcctggcagcaacggagaaaaactccaggaagtgtttggtcaaaggaaaaatgataatgaattcattgagcctctttgctgccatttctggaatgattctttcaatcatggacatacttaatattaaaatttcccattttttaaaaatggagagtctgaattttattagagctcacacaccatatattaacatatacaactgtgaaccagctaatccctctgagaaaaactccccatctacccaatactgttacagcatacaatctctgttcttgggcattttgtcagtgatgctgatctttgccttcttccaggaacttgtaatagctggcatcgttgagaatgaatggaaaagaacgtgctccagacccaaatctaacatagttctcctgtcagcagaagaaaaaaaagaacagactattgaaataaaagaagaagtggttgggctaactgaaacatcttcccaaccaaagaatgaagaagacattgaaattattccaatccaagaagaggaagaagaagaaacagagacgaactttccagaacctccccaagatcaggaatcctcaccaatagaaaatgacagctctccttaagtgatttcttctgttttctgtttccttttttaaacattagtgttcatagcttccaagagacatgctgactttcatttcttgaggtactctgcacatacgcaccacatctctatctggcctttgcatggagtgaccatagctccttctctcttacattgaatgtagagaatgtagccattgtagcagcttgtgttgtcacgcttcttcttttgagcaactttcttacactgaagaaaggcagaatgagtgcttcagaatgtgatttcctactaacctgttccttggataggctttttagtatagtatttttttttgtcattttctccatcaacaaccagggagactgcacctgatggaaaagatatatgactgcttcatgacattcctaaactatcttttttttattccacatctacgtttttggtggagtcccttttgcatcattgttttaaggatgataaaaaaaaataacaactagggacaatacagaacccattccatttatctttctacagggctgacattgtggcacattcttagagttaccacaccccatgagggaagctctaaatagccaacacccatctgttttttgtaaaaacagcatagcttatacatggacatgtctctgccttaacttttcctaactcccactctaggctattgtttgcatgtctacctacttttagccattatgcgagaaaagaaaaaaatgaccatagaaaatgccaccatgaggtgcccaaatttcaaataataattaacatttagttatatttataatttccagatgacaaagtatttcatcaaataacttcatttgatgttccatgatcaagaaagaatccctatctctattttacaagtaattcaaagaggccaaataacttgtaaacaagaaaaggtaacttgtcaacagtcataactagtaattatgagagccttgtttcataaccaggtcttcttactcaaatcctgtgatgtttgaaataaccaaattgtctctccaatgtctgcataaactgtgagagccaagtcaacagcttttatcaagaatttactctctgaccagcaataaacaagcactgagagacacagagagccagattcagattttacccatggggataaaaagactcagactttcaccacatttggaaaactacttgcatcataaatatataataactggtagtttatatgaagcagacactaagtgctatagacactctcagaatatcatacttggaaacaatgtaattaaaatgccgaatctgagtcaacagctgccctacttttcaattcagatatactagtaccttacctagaaataatgttaacctagggtgaagtcactataatctgtagtctattatttgggcatttgctacatgatgagtgctgccagattgtggcaggtaaagagacaatgtaatttgcactccctatgatatttctacatttttagcgaccactagtggaagacattccccaaaattagaaaaaaaggagatagaagatttctgtctatgtaaagttctcaaaatttgttctaaattaataaaactatctttgtgttcttttctgcaacagatgattccaacatgggtgtttgtctattcttctttactcttgaaacattagaccatgggaggctcttacagccttgagttgatatttatacaacccaaatctaggtttgaacggtgaggtgtcaggtcatcaaatattcatgtctatatagtcttacacaggttctcaaaaaaaatgttcatgggataggtcattgataatggattccttattctgagaactccagacgactgaaatatatgagagaaggaaaaggacatagtaggagcaggcctgagaaaaaaatgaaagtcagaaatctttaaaaaaatacaagatcttatttctatcttattttttctcctcttctgaaatatatatgaggattcctctccaaacccatggtttctctaagaattttgagtcatttgtatgacctcaaataattagttttagctgacctcacataactccttataataggagacatctttaatgtctgctattaaagaaggatgaaaattcctatgaccttctccccgattatccctttggcaatatagagtcaaataataacattgaccaatagtaaacatgctttgccaagaagtagaagatatattctctagccttagtttttcctcccaatttgcatttttgtaaaaataatgttgtatccacaaaggaaataaactttaaaaacccaagtgca

SEQ ID NO: 1473 - DNA, 3145 bp, Homo sapiens
ggcgggaaacagcttagtgggtgtggggtcgcgcattttcttcaaccaggaggtgaggaggtttcgacatggcggtgcagccgaaggagacgctgcagttggagagcgcggccgaggtcggcttcgtgcgcttctttcagggcatgccggagaagccgaccaccacagtgcgccttttcgaccggggcgacttctatacggcgcacggcgaggacgcgctgctggccgcccgggaggtgttcaagacccagggggtgatcaagtacatggggccggcaggagcaaagaatctgcagagtgttgtgcttagtaaaatgaattttgaatcttttgtaaaagatcttcttctggttcgtcagtatagagttgaagtttataagaatagagctggaaataaggcatccaaggagaatgattggtatttggcatataaggcttctcctggcaatctctctcagtttgaagacattctctttggtaacaatgatatgtcagcttccattggtgttgtgggtgttaaaatgtccgcagttgatggccagagacaggttggagttgggtatgtggattccatacagaggaaactaggactgtgtgaattccctgataatgatcagttctccaatcttgaggctctcctcatccagattggaccaaaggaatgtgttttacccggaggagagactgctggagacatggggaaactgagacagataattcaaagaggaggaattctgatcacagaaagaaaaaaagctgacttttccacaaaagacatttatcaggacctcaaccggttgttgaaaggcaaaaagggagagcagatgaatagtgctgtattgccagaaatggagaatcaggttgcagtttcatcactgtctgcggtaatcaagtttttagaactcttatcagatgattccaactttggacagtttgaactgactacttttgacttcagccagtatatgaaattggatattgcagcagtcagagcccttaacctttttcagggttctgttgaagataccactggctctcagtctctggctgccttgctgaataagtgtaaaacccctcaaggacaaagacttgttaaccagtggattaagcagcctctcatggataagaacagaatagaggagagattgaatttagtggaagcttttgtagaagatgcagaattgaggcagactttacaagaagatttacttcgtcgattcccagatcttaaccgacttgccaagaagtttcaaagacaagcagcaaacttacaagattgttaccgactctatcagggtataaatcaactacctaatgttatacaggctctggaaaaacatgaaggaaaacaccagaaattattgttggcagtttttgtgactcctcttactgatcttcgttctgacttctccaagtttcaggaaatgatagaaacaactttagatatggatcaggtggaaaaccatgaattccttgtaaaaccttcatttgatcctaatctcagtgaattaagagaaataatgaatgacttggaaaagaagatgcagtcaacattaataagtgcagccagagatcttggcttggaccctggcaaacagattaaactggattccagtgcacagtttggatattactttcgtgtaacctgtaaggaagaaaaagtccttcgtaacaataaaaactttagtactgtagatatccagaagaatggtgttaaatttaccaacagcaaattgacttctttaaatgaagagtataccaaaaataaaacagaatatgaagaagcccaggatgccattgttaaagaaattgtcaatatttcttcaggctatgtagaaccaatgcagacactcaatgatgtgttagctcagctagatgctgttgtcagctttgctcacgtgtcaaatggagcacctgttccatatgtacgaccagccattttggagaaaggacaaggaagaattatattaaaagcatccaggcatgcttgtgttgaagttcaagatgaaattgcatttattcctaatgacgtatactttgaaaaagataaacagatgttccacatcattactggccccaatatgggaggtaaatcaacatatattcgacaaactggggtgatagtactcatggcccaaattgggtgttttgtgccatgtgagtcagcagaagtgtccattgtggactgcatcttagcccgagtaggggctggtgacagtcaattgaaaggagtctccacgttcatggctgaaatgttggaaactgcttctatcctcaggtctgcaaccaaagattcattaataatcatagatgaattgggaagaggaacttctacctacgatggatttgggttagcatgggctatatcagaatacattgcaacaaagattggtgctttttgcatgtttgcaacccattttcatgaacttactgccttggccaatcagataccaactgttaataatctacatgtcacagcactcaccactgaagagaccttaactatgctttatcaggtgaagaaaggtgtctgtgatcaaagttttgggattcatgttgcagagcttgctaatttccctaagcatgtaatagagtgtgctaaacagaaagccctggaacttgaggagtttcagtatattggagaatcgcaaggatatgatatcatggaaccagcagcaaagaagtgctatctggaaagagagcaaggtgaaaaaattattcaggagttcctgtccaaggtgaaacaaatgccctttactgaaatgtcagaagaaaacatcacaataaagttaaaacagctaaaagctgaagtaatagcaaagaataatagctttgtaaatgaaatcatttcacgaataaaagttactacgtgaaaaatcccagtaatggaatgaaggtaatattgataagctattgtctgtaatagttttatattgttttatattaaccctttttccatagtgttaactgtcagtgcccatgggctatcaacttaataagatatttagtaatattttactttgaggacattttcaaagatttttattttgaaaaatgagagctgtaactgaggactgtttgcaattgacataggcaataataagtgatgtgctgaattttataaataaaatcatgtagtttgtgg

SEQ ID NO: 1474 - DNA, 3981 bp, Homo sapiens
cgacaggggcggctctttcctgggtggggtttgtgaagtcgtggcccgttagcaggaagcctaacagtcgccccgacgctagtgagggacccaatctgagtccccggccagccgaatccaagccgtgtgtactgcgtgctcagcactgcccgacagtcctagctaaacttcgccaactccgctgcctttgccgccaccatgcccaaaacgatcagtgtgcgtgtgaccaccatggatgcagagctggagtttgccatccagcccaacaccaccgggaagcagctatttgaccaggtggtgaaaactattggcttgagggaagtttggttctttggtctgcagtaccaggacactaaaggtttctccacctggctgaaactcaataagaaggtgactgcccaggatgtgcggaaggaaagccccctgctctttaagttccgtgccaagttctaccctgaggatgtgtccgaggaattgattcaggacatcactcagcgcctgttctttctgcaagtgaaagagggcattctcaatgatgatatttactgcccgcctgagaccgctgtgctgctggcctcgtatgctgtccagtctaagtatggcgacttcaataaggaagtgcataagtctggctacctggccggagacaagttgctcccgcagagagtcctggaacagcacaaactcaacaaggaccagtgggaggagcggatccaggtgtggcatgaggaacaccgtggcatgctcagggaggatgctgtcctggaatatctgaagattgctcaagatctggagatgtatggtgtgaactacttcagcatcaagaacaagaaaggctcagagctgtggctgggggtggatgccctgggtctcaacatctatgagcagaatgacagactaactcccaagataggcttcccctggagtgaaatcaggaacatctctttcaatgataagaaatttgtcatcaagcccattgacaaaaaagccccggacttcgtcttctatgctccccggctgcggattaacaagcggatcttggccttgtgcatggggaaccatgaactatacatgcgccgtcgcaagcctgataccattgaggtgcagcagatgaaggcacaggcccgggaggagaagcaccagaagcagatggagcgtgctatgctggaaaatgagaagaagaagcgtgaaatggcagagaaggagaaagagaagattgaacgggagaaggaggagctgatggagaggctgaagcagatcgaggaacagactaagaaggctcagcaagaactggaagaacagacccgtagggctctggaacttgagcaggaacggaagcgtgcccagagcgaggctgaaaagctggccaaggagcgtcaagaagctgaagaggccaaggaggccttgctgcaggcctcccgggaccagaaaaagactcaggaacagctggccttggaaatggcagagctgacagctcgaatctcccagctggagatggcccgacagaagaaggagagtgaggctgtggagtggcagcagaaggcccagatggtacaggaagacttggagaagacccgtgctgagctgaagactgccatgagtacacctcatgtggcagagcctgctgagaatgagcaggatgagcaggatgagaatggggcagaggctagtgctgacctacgggctgatgctatggccaaggaccgcagtgaggaggaacgtaccactgaggcagagaagaatgagcgtgtgcagaagcacctgaaggccctcacttcggagctggccaatgccagagatgagtccaagaagactgccaatgacatgatccatgctgagaacatgcgactgggccgagacaaatacaagaccctgcgccagatccggcagggcaacaccaagcagcgcattgacgaatttgagtctatgtaatgggcacccagcctctagggacccctcctccctttttccttgtccccacactcctacacctaactcacctaactcatactgtgctggagccactaactagagcagccctggagtcatgccaagcatttaatgtagccatgggaccaaacctagccccttagcccccacccacttccctgggcaaatgaatggctcactatggtgccaatggaacctcctttctcttctctgttccattgaatctgtatggctagaatatcctacttctccagcctagaggtactttccacttgattttgcaaatgcccttacacttactgttgtcctatgggagtcaagtgtggagtaggttggaagctagctcccctcctctcccctaccactgtcttcttcagggtcctgagatttacacggttggagtgttatgcggtctagggaatgagacaggacctaggatatcttctccaggatgtcaactgacctaaaatttgccctcccatcccgtttagagttatttaggctttgtaacgattgggggataaaaagatgttcagtcatttttgtttctacctcccagatcggatctgttgcaaactcagcctcaataagccttgtcgttgactttagggactcaatttctccccagggtggatgggggaaatggtgccttcaagaccttcaccaaacatactagaagggcattggccattctattgtggcaaggctgagtagaagatcctaccccaattccttgtaggagtataggccggtctaaagtgagctctatgggcagatctaccccttacttattattccagatctgcagtcacttcgtgggatctgcccctccctgcttcaatacccaaatcctctccagctataacagtagggatgagtacccaaaagctcagccagccccatcaggactcttgtgaaaagagaggatatgttcacacctagcgtcagtattttccctgctaggggttttaggtctcttcccctctcagagctacttgggccatagctcctgctccacagccatcccagccttggcatctagagcttgatgccagtaggctcaactagggagtgagtgcaaaaagctgagtatggtgagagaagcctgtgccctgatccaagtttactcaaccctctcaggtgaccaaaatccccttctcatcactcccctccaaagaggtgactgggccctgcctctgtttgacaaacctctaacccaggtcttgacaccagctgttctgtcccttggagctgtaaaccagagagctgctggggattctggcctagtcccttccacacccccaccccttgctctcaacccaggagcatccacctccttctctgtctcatgtgtgctcttcttctttctacagtattatgtactctactgatatctaaatattgatttctgccttccttgctaatgcaccattagaagatattagtcttggggcaggatgattttggcctcattactttaccacccccacacctggaaagcatatactatattacaaaatgacattttgccaaaattattaatataagaagctttcagtattagtgatgtcatctgtcactataggtcatacaatccattcttaaagtacttgttatttgtttttattattactgtttgtcttctccccagggttcagtcctcaaggggccatcctgtcccaccatgcagtgcccctagcttagagcctccctcaattccccctggccaccaccccccactctgtgcctgaccttgaggagtcttgtgtgcattgctgtgaattagctcacttggtgatatgtcctatattggctaaattgaaacctggaattgtggggcaatctattaatagctgccttaaagtcagtaacttacccttagggaggctgggggaaaaggttagattttgtattcaggggttttttgtgtactttttgggttttttaaaaattgtttttggaggggtttatgctcaatccatgttctatttcagtgccaataaaatttaggaagacttcaaaaaaaaaaaa

SEQ ID NO: 1475 - DNA, 3352 bp, Homo sapiens
accgcctcccaggccaggcgagcaggcgggtggctggggcgcctccacctcctcttcctaaagcggcgaggcgcagaggagcggcatcactcgagcccaggtcccagccaccaccactcacagcgctcggcgttcaggaagaggagcagcagcggaggcggctgcttcagcggcgggcgggcgccagaaaggccccgatcgaaaagcctgggagggccgccgaactacccccggagggaggagccagtccgaacccaaggcgccaccgccgcagaagcggagcgaggcagcattcgcctccatggcccactcgccggtggctgtccaagtgcctgggatgcagaataacatagctgatccagaagaactgttcacaaaattagagcgcattgggaaaggctcatttggggaagttttcaaaggaattgataaccgtacccagcaagtcgttgctattaaaatcatagaccttgaggaagccgaagatgaaatagaagacattcagcaagaaataactgtcttgagtcaatgtgacagctcatatgtaacaaaatactatgggtcatatttaaaggggtctaaattatggataataatggaatacctgggcggtggttcagcactggatcttcttcgagctggtccatttgatgagttccagattgctaccatgctaaaggaaattttaaaaggtctggactatctgcattcagaaaagaaaattcaccgagacataaaagctgccaatgtcttgctctcagaacaaggagatgttaaacttgctgattttggagttgctggtcagctgacagatacacagattaaaagaaatacctttgtgggaactccattttggatggctcctgaagttattcaacagtcagcttatgactcaaaagctgacatttggtcattgggaattactgctattgaactagccaagggagagccacctaactccgatatgcatccaatgagagttctgtttcttattcccaaaaacaatcctccaactcttgttggagactttactaagtcttttaaggagtttattgatgcttgcctgaacaaagatccatcatttcgtcctacagcaaaagaacttctgaaacacaaattcattgtaaaaaattcaaagaagacttcttatctgactgaactgatagatcgttttaagagatggaaggcagaaggacacagtgatgatgaatctgattccgagggctctgattcggaatctaccagcagggaaaacaatactcatcctgaatggagctttaccaccgtacgaaagaagcctgatccaaagaaagtacagaatggggcagagcaagatcttgtgcaaaccctgagttgtttgtctatgataatcacacctgcatttgctgaacttaaacagcaggacgagaataacgctagcaggaatcaggcgattgaagaactcgagaaaagtattgctgtggctgaagccgcctgtcccggcatcacagataaaatggtgaagaaactaattgaaaaatttcaaaagtgttcagcagacgaatccccctaagaaacttattattggcttctgtttcatatggacccagagagccccaccaaacctacgtcaagattaacaatgcttaacccatgagctccatgtgccttttggatctttgcaacactgaagatttggaagaagctattaaactattttgtgatggcgtttatcattttatattttgaaaggattattttgtaaggaataacttttaatactatagtttcacctgtattctagtaaatgttgagacaccgttttgcttttaagtatccctatttcttaagttacgaggatgaatacctttcacattttgatctttagttgactctacagtcatgaaacatacaggtctttcaaagtcattctcaatattcagcttttgtaaattatcaagcttcaaaaagcttttttttttaaaaaaaaacatgcatattctaaaaatgactattggtggggaggtgtaaataagtcataccttcttaaaacagaaaatttaagtaaagtcttttaaatgaaacctgtaaaagtattgactcttctaccaagttggtatgatattccaggcagctcaatgattatcacatttgagaccctgtgtttgaagcatttacaggcaatgtacagcaacagaggtacctcttggtgtatagtatttacattctcttttaggtagaagaggcaattttacccttatttcacatggttagaaatttaaagcaagatcatttacccaaggataggtgtttggtaatgttgaaggagttagtctggcttcatgttttacatcttcaactaaaatcccatactatctgcttggatttggagagccaaaaaataaagctgattgtcatgtgattaaatatctgatcaacaggtatgaatataacttaaatcagcatatttttgccatggtaataaattgtcctataaactatttatatatttttgttcttcataattatcactaataagcatcagtttgttgtttttaaaaggatatttaagtgagcattttctagttcatatgaaaataaccatagtacaggatgatttctgtccacacaaaggttaaattagattgcacagttaattttcacttatatttatggtactattatgtgggtgatgcctttttcttttaagcccagtacatatattatgcctgcctaagttctgaactggggctgtatttcagtagttgtagaattattgatatttagttttgatagctaatgtttaattgtttggatctgcacagtttggtttttgcacaaaagtcatttaaaaaaatctgagtaattgtcaaatattaaaagaaagatattcttcctgtaaggaatacagtttttagtcaaagtggccattacatcctctttttaatttacataatacagatacttgagaaagttgttgtggtgttgtatgccaagaaaattctttttattggtgcctatattgtaacaattatttttaatgcattgtattttgaagtaacggttcagttaaatttttcacctgctgtgtaactgaaacacaattacagtttataatcatctgtagaagtctggagataattttgcaactcatgttatgggttaaatgaatatttttgtaaaagtaaaagcaacaaatttataaattgattatttgaaactttacaacacaattgcatcccaaatacaaattgtattgcttattcattatagctattcgtcctgtaatctgtttctaggtgaagcatactccagtgttttaggggttttgaaaataaatatttaaatttcacagtcaaaaaaaaaaaaaaaa

SEQ ID NO: 1476 - DNA, 2875 bp, Homo sapiens
attcgcctccatggcccactcgccggtggctgtccaagtgcctgggatgcagaataacatagctgatccagaagaactgttcacaaaattagagcgcattgggaaaggctcatttggggaagttttcaaaggaattgataaccgtacccagcaagtcgttgctattaaaatcatagaccttgaggaagccgaagatgaaatagaagacattcagcaagaaataactgtcttgagtcaatgtgacagctcatatgtaacaaaatactatgggtcatatttaaaggggtctaaattatggataataatggaatacctgggcggtggttcagcactggatcttcttcgagctggtccatttgatgagttccagattgctaccatgctaaaggaaattttaaaaggtctggactatctgcattcagaaaagaaaattcaccgagacataaaagctgccaatgtcttgctctcagaacaaggagatgttaaacttgctgattttggagttgctggtcagctgacagatacacagattaaaagaaatacctttgtgggaactccattttggatggctcctgaagttattcaacagtcagcttatgactcaaaacgtcctacagcaaaagaacttctgaaacacaaattcattgtaaaaaattcaaagaagacttcttatctgactgaactgatagatcgttttaagagatggaaggcagaaggacacagtgatgatgaatctgattccgagggctctgattcggaatctaccagcagggaaaacaatactcatcctgaatggagctttaccaccgtacgaaagaagcctgatccaaagaaagtacagaatggggcagagcaagatcttgtgcaaaccctgagttgtttgtctatgataatcacacctgcatttgctgaacttaaacagcaggacgagaataacgctagcaggaatcaggcgattgaagaactcgagaaaagtattgctgtggctgaagccgcctgtcccggcatcacagataaaatggtgaagaaactaattgaaaaatttcaaaagtgttcagcagacgaatccccctaagaaacttattattggcttctgtttcatatggacccagagagccccaccaaacctacgtcaagattaacaatgcttaacccatgagctccatgtgccttttggatctttgcaacactgaagatttggaagaagctattaaactattttgtgatggcgtttatcattttatattttgaaaggattattttgtaaggaataacttttaatactatagtttcacctgtattctagtaaatgttgagacaccgttttgcttttaagtatccctatttcttaagttacgaggatgaatacctttcacattttgatctttagttgactctacagtcatgaaacatacaggtctttcaaagtcattctcaatattcagcttttgtaaattatcaagcttcaaaaagcttttttttttaaaaaaaaacatgcatattctaaaaatgactattggtggggaggtgtaaataagtcataccttcttaaaacagaaaatttaagtaaagtcttttaaatgaaacctgtaaaagtattgactcttctaccaagttggtatgatattccaggcagctcaatgattatcacatttgagaccctgtgtttgaagcatttacaggcaatgtacagcaacagaggtacctcttggtgtatagtatttacattctcttttaggtagaagaggcaattttacccttatttcacatggttagaaatttaaagcaagatcatttacccaaggataggtgtttggtaatgttgaaggagttagtctggcttcatgttttacatcttcaactaaaatcccatactatctgcttggatttggagagccaaaaaataaagctgattgtcatgtgattaaatatctgatcaacaggtatgaatataacttaaatcagcatatttttgccatggtaataaattgtcctataaactatttatatatttttgttcttcataattatcactaataagcatcagtttgttgtttttaaaaggatatttaagtgagcattttctagttcatatgaaaataaccatagtacaggatgatttctgtccacacaaaggttaaattagattgcacagttaattttcacttatatttatggtactattatgtgggtgatgcctttttcttttaagcccagtacatatattatgcctgcctaagttctgaactggggctgtatttcagtagttgtagaattattgatatttagttttgatagctaatgtttaattgtttggatctgcacagtttggtttttgcacaaaagtcatttaaaaaaatctgagtaattgtcaaatattaaaagaaagatattcttcctgtaaggaatacagtttttagtcaaagtggccattacatcctctttttaatttacataatacagatacttgagaaagttgttgtggtgttgtatgccaagaaaattctttttattggtgcctatattgtaacaattatttttaatgcattgtattttgaagtaacggttcagttaaatttttcacctgctgtgtaactgaaacacaattacagtttataatcatctgtagaagtctggagataattttgcaactcatgttatgggttaaatgaatatttttgtaaaagtaaaagcaacaaatttataaattgattatttgaaactttacaacacaattgcatcccaaatacaaattgtattgcttattcattatagctattcgtcctgtaatctgtttctaggtgaagcatactccagtgttttaggggttttgaaaataaatatttaaatttcacagtcaaaaaaaaaaaaaaaa

SEQ ID NO: 1477 - DNA, 3121 bp, Homo sapiens
accgcctcccaggccaggcgagcaggcgggtggctggggcgcctccacctcctcttcctaaagcggcgaggcgcagaggagcggcatcactcgagcccaggtcccagccaccaccactcacagcgctcggcgttcaggaagaggagcagcagcggaggcggctgcttcagcggcgggcgggcgccagaaaggccccgatcgaaaagcctgggagggccgccgaactacccccggagggaggagccagtccgaacccaaggcgccaccgccgcagaagcggagcgaggcagcattcgcctccatggcccactcgccggtggctgtccaagtgcctgggatgcaggggtctaaattatggataataatggaatacctgggcggtggttcagcactggatcttcttcgagctggtccatttgatgagttccagattgctaccatgctaaaggaaattttaaaaggtctggactatctgcattcagaaaagaaaattcaccgagacataaaagctgccaatgtcttgctctcagaacaaggagatgttaaacttgctgattttggagttgctggtcagctgacagatacacagattaaaagaaatacctttgtgggaactccattttggatggctcctgaagttattcaacagtcagcttatgactcaaaagctgacatttggtcattgggaattactgctattgaactagccaagggagagccacctaactccgatatgcatccaatgagagttctgtttcttattcccaaaaacaatcctccaactcttgttggagactttactaagtcttttaaggagtttattgatgcttgcctgaacaaagatccatcatttcgtcctacagcaaaagaacttctgaaacacaaattcattgtaaaaaattcaaagaagacttcttatctgactgaactgatagatcgttttaagagatggaaggcagaaggacacagtgatgatgaatctgattccgagggctctgattcggaatctaccagcagggaaaacaatactcatcctgaatggagctttaccaccgtacgaaagaagcctgatccaaagaaagtacagaatggggcagagcaagatcttgtgcaaaccctgagttgtttgtctatgataatcacacctgcatttgctgaacttaaacagcaggacgagaataacgctagcaggaatcaggcgattgaagaactcgagaaaagtattgctgtggctgaagccgcctgtcccggcatcacagataaaatggtgaagaaactaattgaaaaatttcaaaagtgttcagcagacgaatccccctaagaaacttattattggcttctgtttcatatggacccagagagccccaccaaacctacgtcaagattaacaatgcttaacccatgagctccatgtgccttttggatctttgcaacactgaagatttggaagaagctattaaactattttgtgatggcgtttatcattttatattttgaaaggattattttgtaaggaataacttttaatactatagtttcacctgtattctagtaaatgttgagacaccgttttgcttttaagtatccctatttcttaagttacgaggatgaatacctttcacattttgatctttagttgactctacagtcatgaaacatacaggtctttcaaagtcattctcaatattcagcttttgtaaattatcaagcttcaaaaagcttttttttttaaaaaaaaacatgcatattctaaaaatgactattggtggggaggtgtaaataagtcataccttcttaaaacagaaaatttaagtaaagtcttttaaatgaaacctgtaaaagtattgactcttctaccaagttggtatgatattccaggcagctcaatgattatcacatttgagaccctgtgtttgaagcatttacaggcaatgtacagcaacagaggtacctcttggtgtatagtatttacattctcttttaggtagaagaggcaattttacccttatttcacatggttagaaatttaaagcaagatcatttacccaaggataggtgtttggtaatgttgaaggagttagtctggcttcatgttttacatcttcaactaaaatcccatactatctgcttggatttggagagccaaaaaataaagctgattgtcatgtgattaaatatctgatcaacaggtatgaatataacttaaatcagcatatttttgccatggtaataaattgtcctataaactatttatatatttttgttcttcataattatcactaataagcatcagtttgttgtttttaaaaggatatttaagtgagcattttctagttcatatgaaaataaccatagtacaggatgatttctgtccacacaaaggttaaattagattgcacagttaattttcacttatatttatggtactattatgtgggtgatgcctttttcttttaagcccagtacatatattatgcctgcctaagttctgaactggggctgtatttcagtagttgtagaattattgatatttagttttgatagctaatgtttaattgtttggatctgcacagtttggtttttgcacaaaagtcatttaaaaaaatctgagtaattgtcaaatattaaaagaaagatattcttcctgtaaggaatacagtttttagtcaaagtggccattacatcctctttttaatttacataatacagatacttgagaaagttgttgtggtgttgtatgccaagaaaattctttttattggtgcctatattgtaacaattatttttaatgcattgtattttgaagtaacggttcagttaaatttttcacctgctgtgtaactgaaacacaattacagtttataatcatctgtagaagtctggagataattttgcaactcatgttatgggttaaatgaatatttttgtaaaagtaaaagcaacaaatttataaattgattatttgaaactttacaacacaattgcatcccaaatacaaattgtattgcttattcattatagctattcgtcctgtaatctgtttctaggtgaagcatactccagtgttttaggggttttgaaaataaatatttaaatttcacagtcaaaaaaaaaaaaaaaa

SEQ ID NO: 1478 - DNA, 3950 bp, Homo sapiens; identical to SEQ ID NO: 759

SEQ ID NO: 1479 - DNA, 2208 bp, Homo sapiens
ggggcctgccacgaggccgcagtataaccgcgtggcccgcgcgcgcgcttccctcccggcgcagtcaccggcgcggtctatggctgcgacttctctaatgtctgctttggctgcccggctgctgcagcccgcgcacagctgctcccttcgccttcgccctttccacctcgcggcagttcgaaatgaagctgttgtcatttctggaaggaaactggcccagcagatcaagcaggaagtgcggcaggaggtagaagagtgggtggcctcaggcaacaaacggccacacctgagtgtgatcctggttggcgagaatcctgcaagtcactcctatgtcctcaacaaaaccagggcagctgcagttgtgggaatcaacagtgagacaattatgaaaccagcttcaatttcagaggaagaattgttgaatttaatcaataaactgaataatgatgataatgtagatggcctccttgttcagttgcctcttccagagcatattgatgagagaaggatctgcaatgctgtttctccagacaaggatgttgatggctttcatgtaattaatgtaggacgaatgtgtttggatcagtattccatgttaccggctactccatggggtgtgtgggaaataatcaagcgaactggcattccaaccctagggaagaatgtggttgtggctggaaggtcaaaaaacgttggaatgcccattgcaatgttactgcacacagatggggcgcatgaacgtcccggaggtgatgccactgttacaatatctcatcgatatactcccaaagagcagttgaagaaacatacaattcttgcagatattgtaatatctgctgcaggtattccaaatctgatcacagcagatatgatcaaggaaggagcagcagtcattgatgtgggaataaatagagttcacgatcctgtaactgccaaacccaagttggttggagatgtggattttgaaggagtcagacaaaaagctgggtatatcactccagttcctggaggtgttggccccatgacagtggcaatgctaatgaagaataccattattgctgcaaaaaaggtgctgaggcttgaagagcgagaagtgctgaagtctaaagagcttggggtagccactaattaactactgtgtcttctgtgtcacaaacagcactccaggccagctcaagaagcaaagcaggccaatagaaatgcaatatttttaatttattctactgaaatggtttaaaatgatgccttgtatttattgaaagcttaaatgggtgggtgtttctgcacatacctctgcagtacctcaccagggagcattccagtatcatgcagggtcctgtgatctagccaggagcagccattaacctagtgattaatatgggagacattaccatatggaggatggatgcttcactttgtcaagcacctcagttacacattcgccttttctaggattgcatttcccaagtgctattgcaataacagttgatactcattttaggtaccaaaccttttgagttcaactgatcaaaccaaaggaaaagtgttgctagagaaaattagggaaaaggtgaaaaagaaaaaatggtagtaattgagcagaaaaaaattaatttatatatgtattgattggcaaccagatttatctaagtagaactgaattggctaggaaaaaagaaaaactgcatgttaatcattttcctaagctgtccttttgaggcttagtcagtttattgggaaaatgtttaggattattccttgctattagtactcattttatgtatgttacccttcagtaagttctccccattttagttttctaggactgaaaggattcttttctacattatacatgtgtgttgtcatatttggcttttgctatatactttaacttcattgttaaatttttgtattgtatagtttctttggtgtatcttaaaacctatttttgaaaaacaaacttggcttgataatcatttgggcagcttgggtaagtacgcaacttacttttccaccaaagaactgtcagcagctgcctgcttttctgtgatgtatgtatcctgttgacttttccagaaattttttaagagtttgagttactattgaatttaatcagactttctgattaaagggttttctttcttttttaataaaacacatctgtctggtatggtatgaatttctgaaaaaaaaaaaaaaaaaaaaaaa

SEQ ID NO: 1480 - DNA, 3625 bp, Homo sapiens
acccttcccccttctccaaccgccaacggccgcctgcgcctgaggcccggcccacgccccatcccgctcgctccacgctgcggcagccccggcggccccaggtgcgcggcccccgccatcccgccccgccgccctgcgccatggaggagggccctctgccgggcgggctgcccagccccgaggatgcgatggtgacggagctcttaagccccgagggtccgttcgcttcggagaacatcggcctgaaggcccccgtgaagtacgaggaggacgagttccacgtcttcaaagaagcgtacctgggcccggcggaccccaaggaacccgtcctgcacgcgttcaaccccgcgctgggcgccgactgcaagggccaggtcaaggcgaagctcgcggggggcgacagcgacggcggggagctcctcggggagtaccccgggatcccagagctcagcgcgctggaggacgtcgcgctcctgcaggccccgcagccgcccgcctgcaacgtgcacttcctgtcctcgctgctacccgcgcaccgcagcccggcggtgttgcccctgggcgcctgggtcctggaaggagcctcccacccgggcgtccgcatgatcccagttgaaatcaaggaagcaggtggtactactacaagtaataatccggaagaagcaactttgcagaatcttcttgctcaggaatcctgttgcaagttcccatcgtcccaggaactagaggatgcctcctgctgttctcttaagaaagattccaacccaatggtgatatgccaattgaaagggggcacacaaatgctatgtatagacaattctagaacaagagaactaaaagcactccatttggttcctcagtatcaagatcaaaataattatctacagtcagatgtccctaaaccaatgactgctttagtagggagatttttgccagcatcaacaaaattaaatctcattacacaacaacttgagggagccttaccatcggtagtcaacgggtctgctttcccctcgggatcaactcttccaggaccaccaaaaataactttggctgggtaaggattagaagcaatacattgtcactctaatgtaataatttaagagactcttggatacgttcacgattttcttctatactataaaatgagcttcactgcacaccttcatgacttctgagaaatgtttttaccatcagcaatgccactaacggtgttgctgtctgtgtctggtttcactggggctgcaaaggctgctggaaagtctggcccataacctgcatctgtccctgtcctcctgtccgctgtcctatgttggtgtttctgaggcttgttgccatttatagctctttgtcttcattccatgttgattcaaactgtactggcctctcttttttgctgtcgtccgtggaaataatggtgtggcagccatgcagcatgaacggggggctgcagagtgccctccagctgcctccgcccgctgccttccatgctgagttggctcgagctctatggcaggtgctaatgcatgatctgtcttcacatctccaggtggacataggctgcacttatctgggacctcatcttgctatttcttgcctgtcttgtgtttataatcttgctatttcttgcctgtcttgtgtttataattgttgctaattaaactaatcagctggttgaaattatcaggttaacatttatgtattaacagtggtttgggcaaccctctccattcgttgagccctgtagttgattatggagatcagcatattcctgcctccaagaggtgtttgtttgtttgtttgttttttcttgttttttgtttgtttgtttgttttgtttttttgagacggactcttgctctgtcacccaggctggaatacaatggcatgatctctgctcactgcaacctccgcctcctgggttcaagcaattctccttcctcagcctcccgagtagctgggaccacaggcgcataccactataccaggctaatttttgtattttttagtagagactgggttttaccatgttggccaggctggtcttgaaatactgacctcagatgatccgcccatctcagcctcccaaagtgctgggattacaggcgtgcccggcctgcctgcaggagttctttgggcccacagtctaaggcaaacacataccctgggcctgagagacagcagtcaaacaccttacaggatacagcccgcagcctccagtgctttccaggctcctgcagagttctgccatcgggcatggcttcgtgatggccttggtaagtgtgaggagagtggtttggggctggaatgaaaggccgtgaatctggaaacacactggaaccgatcaacgctatcagccctcatggtcgctgaagggcgttggttgctcctgggcaccgctgcttcagtttctgcagtggctctttcagctgttgtaattctgtgcctaggctgttgacaacttttgctgagttggacagaataagactgtgggccatgctgcttgcttcactctctgggtgtgatggatcggtgagggtgcagttgctatgattgtaattggtcatctcatcatggctgttaacatttctggaccaaacaaaaatgacttcagctacttccagattctgctgatacattacacaggatgatctaaaaggctacagttctgaagatactcatctttcttgtaatctgggggcatctggtcaatagtattgcctctgtgctgtattgtgtctagaacattcaaggacatttgatacttctcatactttaattgcgtgctctcccagttgcagcaccctctgaggcttctatgtgttgcagccgatgggcatttgcacagagcagcagtcatgacagcgttttcagggcagctatttctccttttcccccttttcctctcccccggcttcccattctcctcctcctccttcctcttctcgtcccctcctcctcctctttgttctcctccccctgctcttcttcctctctccttttcctccttctgtgtctatactagattattttcaatcagtcacatgtttttctttattttgaatgttacaaaatatttctctattgtaaacggtgtgccaggaaaaacatgagatgtgtatttgtattttttatgcacataattacttaatccaatgcctctccacttaattgggcctgatgatttttatctcgacatctgcaatactgatgatatactggaatctctaccaatttatttttggtggtaagaaagcagtcagagaacgttttgctggttatttcattccgtgtgagttcccaaccaagactgtcagcccagtgtggttcagccatatctaacctatagaggccatagaagcagttcagcttaggctggaggccagcaggctgagtgtgcgagctgacccgatggtcatttgttagggttggggggtgaactggctaacttattaactagcttatcatattaataaaaactctttaatacaaatccttgtcctgacactctgtagctttaataatcctattaccaatctggtaataaatgtgaattctgacacattgttgatgctactggttttagtaacataatgaacatcataataaagaatattcaagagtc

SEQ ID NO: 1481 - DNA, 2732 bp, Homo sapiens
gacagctaatggcggcggccgcctgaggcgggcgggcggtatagagcgggcggcaggaggcaagcagcgaaaccttcccggccgccgctcccgtcccgacggcggcttccccaaggcggcaggactcggcgcgccatggacaggccggcggcggcggcggcggcgggctgcgagggcggcgggggcccgaacccggggccggcgggcggcaggaggcctcctcgggccgcggggggcgccaccgccggctcccggcagcccagcgtggagaccctggacagtcccacaggatcacatgttgaatggtgtaaacagcttatagctgctacaatttctagtcagatttcaggttcagtgacatcagaaaatgtgtccagagattacaaggctctaagggatggaaataagctggcacagatggaagaggctccacttttcccaggagaatcaattaaagccattgtgaaagatgtcatgtatatctgcccatttatgggagcagtgagtggaaccctgacagtgacggactttaagctgtacttcaaaaatgtcgagagggacccgcattttatccttgatgttccccttggagtgatcagcagagtggagaagattggagcacagagccatggagacaattcctgtggtatagagatagtgtgcaaggatatgaggaacttgcggcttgcttataaacaggaagaacagagtaaactagggatatttgaaaacctcaacaaacatgcatttcctctttctaacggacaggcactatttgcattcagctataaagaaaaatttccaattaatggctggaaagtttatgatccagtatctgaatataagagacagggcttgccaaatgagagttggaaaatatccaaaataaacagtaattatgagttctgtgacacctaccctgccatcattgttgtgccaactagtgtaaaagatgatgacctttcaaaagtggcagcttttcgagcaaaaggcagagtccctgtgttgtcatggattcatccggaaagtcaagcaacgattacccgttgcagccagccacttgtgggtcccaatgataagcgctgcaaagaggatgaaaaatacttgcaaacaataatggatgctaacgcacagtcacacaagcttatcatctttgatgctcgacaaaacagtgtcgctgataccaacaagacaaagggtggaggatatgaaagtgaaagtgcttacccaaatgcagaacttgtgttcttggagatccacaacattcatgtcatgcgagagtcactacgcaaattaaaagagattgtgtacccttcgatcgatgaggcgcggtggctctccaatgtggatgggacgcattggctggaatatataaggatgctgcttgctggggcagtaagaattgctgataaaatagaatctgggaaaacatctgtggtggtgcattgcagcgacggttgggaccgaacagcccagctcacatctctggctatgctaatgttggacagttactacaggaccattaaaggatttgaaactctcgtagaaaaggagtggataagctttggacacaggtttgcactgcgagtgggccatggtaatgacaaccatgcggatgctgaccgatctcccatatttctgcagtttgttgattgtgtttggcaaatgacaaggcagtttccttcagcattcgagtttaatgagctattcttgattacaattttggatcacctttatagctgtctttttgggacctttttgtgcaactgtgaacagcagcgattcaaagaggatgtatatacaaagacgatatctttatggtcgtatatcaatagccagctagacgagttttctaatcccttctttgtgaattatgaaaaccacgtgttatatcctgttgctagtctgagtcatttggaattgtgggtaaattattatgtacgatggaatccacggatgagacctcagatgcccattcaccagaatctcaaggagctgctggccgtcagggcggagctgcagaagcgtgtggagggcctacagcgggaggtggccacgcgcgccgtctcatcctcatctgagcggggctcctcgccctcccactccgccacctccgtccacacctcggtctgatgggcgagaaatatgtaatcccctggctgactaggactgttaaacatagtgtggactggatgatgccttcgacaaaccagagaagccaagttggggggagctggtgcctggagtgggccctgtgcacctcacctggcggaggctggggggggctctgtcagcaggaccctagaggagactctcattcgattttaaagaagcacaacgggtcattttcctttgtatgttcctagcgcagaactgtttctaaaacaacttgaagtatagttttgttatctaagcaatttttgttttaagtaagtaagtgtactagaatgcgaagccgttatggttcaggtttttaaaaactggtacagtattgtatttgtctcatctgttgcactgtatttcaatcatctgtaattaaaatgatcatatgtttgctccctggtcttttttaagtaagtaagtaagtatcttagtagatttttcctttgaggaaaatcggtaataaaataacatggattgaatgtttactgtgcgtcaagcacagttaatatatgatgatgtaaagtaactaactttatgtgatttaattcattcagtaaattgtaaatgta

SEQ ID NO: 1482 - DNA, 3769 bp, Homo sapiens
cggacgcgtgggctgctgggcccggtggccgcaaaagaactttctttctcccgcccgaacggtcgccgcggccaactgcctcgcccgcctggcagcctaaccctccttctcttcttctcctctccggcttcgcgcggccctgcctccctctcgcccggcggcatccgcttgctgctgccaccgcctcctcatcttctgcccggccaaccggcctgccccgctgcagtgatgtgcgacaaggagttcatgtgggccctgaaaaacggagacttggatgaggtgaaagactatgtggccaagggagaagatgtcaaccggacactagaaggtggaaggaaacctcttcattatgcagcagattgtgggcagcttgaaatcctggaatttctgctgctgaaaggagcagatattaatgctccagataaacatcatattactcctcttctgtctgctgtctatgagggtcatgtttcctgtgtgaaattgcttctgtcaaagggtgctgataagactgtgaaaggcccagatggactgaccgcctttgaagccactgacaaccaggcaatcaaagctcttctccagtgatggatggatggactgataactccggaagaatgactctcctgtggcctcacactgctgcctgtctgtctgtcactctctatctgccagcttcttcagctaaatactttaagaggggtgaggggagagagaaattcataacaaatccgactaccagaaaaaaaaaattgttttggaggaggggcaaaaggaaccatgatcaggcttttactgggattcctgatcaagtaagcctcttccctttctaataaaatatacaccttatacccaagggagagcaaagacaaaatacaccagtaacatttgaccttttcagctccctagctaatttattagattgtgttgaaggtctgattctacaaaggccaactctacatatttggtagccctaactgtctgagcagtagtggctgctgtgatgtaaacttagggtgctgagataagcaattagctctagccttctgccttaagaatgcactctactggggatttcctggcatagttaagagcgctgcctataaggttggtgaccaaatctttcctcggtgactttaagctttatgtgaaagcttagttaaggtgaggaggggcacactcctaaattgctggatgactgaactttggattttctctcccctttcacatggatttcatgtctctttagataaaactgactagttttatttataaaatcttaagttttggaagtctaaaggagaaaccattccagtatgcatatttttttctcctctagattcatacatttatatagcattgaaacactttcaaactcctgctggtagtaaaaggggatttaaaaatagaatcatagccataagcctgttagtatcatatgaagagagaacagttatcttagtacctatggattttctttatttgctgtttgaatggattgaccttggttatgtgttgagaattaaggaacattctttgaaatgcctctctcagacccatcttggaggctgattacttactgcaccaaagctatcactggggtgagatttactgtttggacaaatttagccccatcccttcaaaaatacacttgtaaccaggtttcccagagttgttgataggcttctgctgaacatatgccaacccacctgcataatatatttttgttgcttttataaatcatgcattacataaagtgtgacaacttcaaaatgtattctctgttcttggaatacagtgccctaaaatggtgttcttatgacctgcagaaaatatttacacatatttccaaatatttatttcatgagcagtacagctaattaaaatatataagcttaaattttatatcttacatttaaaatattaagattcctttgacttgccatccatataagcttgctaaaaatattaagaccaagtcatgcaataattgaatgtacctcaaatttttaggggagggtgggttagggactgatactcagattgtggataataattgaattggtttttaaaggcaacatagcattctacagcagggttaatctattatcaagaacagtcaccctggttaataacaagttttactgatcagttgctggttggttggttggttggcatgtgggtgtgtgggtgtataggtgtgtgtgggtgtgtgtgtgtatttttccccatgagtcctttttttaatcctgtggctttttcacttacaactagcctaaccctgtaattttcctacatccaagaaaacaatcacaaagtagtggtttaaatactttgttgtatttggctaattttgctgtcttaatgcagcctattaagagttgggttaaaaatcagtaatcagtactttattacatcactgaactaaaatatggagacatcctcattgaaaatggagggcactctatcagtctataactatcaacgtagtgcaacagggtgttttgatacctttgttttcacctcttgacataatgctatttaaaggcttgaatttttccctttatataattttcacctttactttcaaagtgttttgttgtagttggctattgcagagagtgcattgtcctatcattcctaaacctggtctgctttctacattcatggtatggaaaccatgtgattctttgtacagtttatcctgatgttgcttgtaatgcagtagaggctatttcgccttcgcttttctttctcgacctttttgtaaaccctataattatgaagcgattgcttgagaaaataacatataaacatagaatagaatagactgaccaagatggttcacagtttctttttttaactaggttatttataatgtatttctgaaccacttggcagacaaattcacaacacttaatgttcatattttgagtaaaggaagctaaaaccatgtttgctttctggtactacatgcattagcgaaaggttaagtaagttttgttctccactgaagtaatacttaacatctcagaaaaaattttgcatgttctgtagttttgtattaaatcagtcatttcatatgcactatatcaagtacaaacaggtagtttacctgtttatagtagtgtactaacaaagtctcccttgcagcttcagactgttatctataggcttatcgttcaaatacagcacttgaatatcccaagtagttcttctacgcatagctcacctttctaaacccagttaagcatggaagagaggtagtaggtaggtgcagtgtgtggaagctgcaaacaagtaggccttttattcattgatatcttttcccaagtactggattttaaatctgtatgtatctgtttgatttttttttctaatatttcagttgagctgctgttttcttccatgcaatattgtatactcaattgtgtatagaagaagctggtgagagtgccctcctacataaataagcaattgcagtgttttgcatgcaaaatataaaaaatttaaattgtcctgattctattttgtaaatggagaaacaatcatatctttctaagcggtaatggaggaagactagtgctttgtgcattttgatatatttgagttcattttttccacaatgtcatacttttgacgcagttgggtttctcataagtatcctagttcatgtacatccgaatgctaaataatactgtgttttaagttttgtgttgcaagaacaaatggaataaacttgaattgtgctacgaaaaaaaaaaaaaaaaaa

SEQ ID NO: 1483 - DNA, 15253 bp, Homo sapiens
gaatctacagcctaccacaggagcccgggctcaactcaaacaatgcacttccctgaaagctccacaacttcaggccatagtgaagaatcagcaactttccacggcagcacaacacacacaaaatcttcaactcctagcaccacagctgccctagcacatacaagctaccacagcagcctgggctcaactgaaacaacacacttccgtgatagctccacaatctcaggccgtagtgaggaatcaaaagcatcccacagcagcccagatgcaatggcaacaacagtcttacctgccggctctacaccctcagttcttgttggagactcgacgccctcacccatcagttcaggctcaatggaaaccacagcgttacccggcagtaccacaaaaccaggcctcagtgagaaatctaccactttctacagtagccccagatcaccagacacaacacacttacctgccagcatgacaagctcaggcgtcagtgaagaatccaccacctcccacagccgaccaggctcaacacacacaacagcattccctggcagtaccaccatgccaggcctcagtcaggaatctacagcttcccacagcagcccaggccccacagacacaacattgtcccctggcagtaccacagcatcatcccttggtccagaatatactaccttccacagccgcccaggctccactgaaacaacactcttacctgacaacaccacagcctcaggactccttgaagcatctatgcccgtccacagcagcaccagatcgccacacacaacactgtcccctgccggctctacaacccgtcagggagaatctaccacattccatagctggccaagctcaaaggacactaggcctgcacctcctactaccacatcagcctttgttgagccatctacaacctcccacggcagcccgagctcaattccaacaacccacatttctgcccgctccacaacctcaggcctcgttgaagaatctacgacctaccacagcagcccgggctcaactcaaacaatgcacttccctgaaagcgacacaacttcaggccgtggtgaagaatcaacaacttcccacagcagcacaacacacacaatatcttcagctcctagcaccacatctgcccttgttgaagaacctaccagctaccacagcagcccgggctcaactgcaacaacacacttccctgacagctccacaacctcaggccgtagtgaggaatcaacagcatcgcacagcagccaagacgcaacgggaacaatagtcctacctgcccgctccacaacctcagttcttcttggagaatctacgacctcacccatcagttcaggctcaatggaaacgacagcgttacccggcagtaccacaacgccaggcctcagtgagagatctaccactttccatagtagccccagatcaccagccacaacactctcacctgccagcacgacaagctcaggcgtcagtgaagaatccaccacctcccgcagccgaccaggctcaacgcacacaacagcattccctgacagcaccaccacgccaggcctcagtcggcattctacaacttcccacagcagcccaggctcaacggatacaacactgttacctgccagcaccaccacctcaggccccagtcaggaatcaacaacttcccacagcagctcaggttcaactgacacagcactgtcccctggcagtaccacagccttatcctttggtcaagaatctacaaccttccacagcaacccaggctccactcacacaacactcttccctgacagcaccacaagctcaggcatcgttgaagcatctacacgcgtccacagcagcactggctcaccacgcacaacactgtcccctgccagctccacaagccctggacttcagggagaatctactgccttccagacccacccagcctcaactcacacaacgccttcacctcctagcaccgcaacagcccctgttgaagaatctacaacctaccaccgcagcccaggctcgactccaacaacacacttccctgccagctccacaacttcgggccacagtgagaaatcaacaatattccacagcagcccagatgcaagtggaacaacaccctcatctgcccactccacaacctcaggtcgtggagaatctacaacctcacgcatcagtccaggctcaactgaaataacaacgttacctggcagtaccacaacaccaggcctcagtgaggcatctaccaccttctacagcagccccagatcaccaaccacaacactctcacctgccagcatgacaagcctgggcgtcggtgaagaatccaccacctcccgtagccaaccaggttctactcactcaacagtgtcacctgccagcaccaccacgccaggcctcagtgaggaatctaccaccgtctacagcagcagccgaggctcaactgaaaccacagtgttccctcacagcaccacaacctcagttcatggtgaagagcctacaaccttccacagccggccagcctcaactcacacaacactgttcactgaggacagcaccacctcgggcctcactgaagaatctacagccttccccggcagcccagcctccacccaaacagggttacctgccacactcacaaccgcagacctcggtgaggaatcaactacctttcccagcagctcaggctcaactggaacaaaactctcacctgcccgctccaccacctctggcctcgttggagaatccacaccctcacgcctcagtccaagctcaaccgaaacaacaactttacctggcagtcccacaacaccaagcctcagtgagaaatcaaccaccttctacactagccccagatcaccagatgcaacactctcacctgcaaccacaacaagctcaggcgtcagcgaagaatccagcacatcccacagtcaaccaggctcaacgcacacaacagcattccctgacagcaccaccacctcagacctcagtcaggaacctacaacttcccacagcagccaaggctcaacagaggcaacactgtcccctggcagtaccacagcctcatcccttggtcaacaatctacaaccttccacagcagcccaggcgacactgaaaccacactcttacctgacgacaccataacctcaggcctcgtggaggcatctacacccacccacagcagcactggctcgctacacacaacactgacccctgccagctccacaagcgctggccttcaggaagaatctaccactttccagagctggccaagctcaagtgacacaacaccttcacctcccggcaccacagcagcccctgttgaagtatccacaacctaccacagccgcccgagctcaactccaacaacacacttttctgccagttccacaaccttgggccgtagtgaggaatcaacaacagtccacagcagcccaggtgcaactggaacagcactcttccctacccgctctgcaacctcagttcttgttggagaacctacaacgtcacccatcagttcaggctcaacggaaacaacagcgttacctggcagtaccacaacagcaggcctgagtgagaaatctaccaccttctacagtagccccagatcaccggacacaacactctcacctgccagcacgacaagctcaggcgtcagtgaagaatccaccacctcccacagccgaccaggctcaacgcacacaacagcattccctggcagtaccaccatgccaggcgtcagtcaggaatctacagcttcccacagcagcccaggctccacagacacaacattgtcccctggcagtaccacagcatcatcccttggtccagaatctactactttccacagcagcccaggctccactgaaacaacactcttacctgacaacaccacagcctcaggcctccttgaagcatctacgcccgtccacagcagcactggatcgccacacacaacactgtcccctgccggctctacaacacgtcagggagaatctaccaccttccagagctggccaagctcaaaggacactatgcctgcacctcctactaccacatcagcctttgttgagctatctacaacctcccacggcagcccgagctcaactccaacaacccacttttctgccagctccacaaccttgggccgtagtgaggaatcgacaacagtccacagcagcccagttgcaactgcaacaacaccctcgcctgcccgctccacaacctcaggcctcgttgaagaatctacggcgtaccacagcagcccgggctcaactcaaacaatgcacttccctgaaagctccacagcttcaggtcgtagtgaagaatcaagaacttcccacagcagcacaacacacacaatatcttcacctcctagcaccacatctgcccttgttgaagaacctaccagctaccacagcagcccgggctcaactgcaacaacacacttccctgacagctccacaacctcaggccgtagtgaggaatcaacagcatcccacagcagccaagacgcaacgggaacaatagtcctacctgcccgctccacaacctcagttcttcttggagaatctacgacctcacccatcagttcaggctcaatggaaacgacagcgttacccggcagtaccacaacgccaggcctcagtgagaaatctaccactttccacagtagccccagatcaccagccacaacactctcacctgccagcacgacaagctcaggcgtcagtgaagaatccaccacctcccacagccgaccaggctcaacgcacacaacagcattccctgacagcaccaccacgccaggcctcagtcggcattctacaacttcccacagcagcccaggctcaacggatacaacactgttacctgccagcaccaccacctcaggccccagtcaggaatcaacaacttcccacagcagcccaggttcaactgacacagcactgtcccctggcagtaccacagccttatcctttggtcaagaatctacaaccttccacagcagcccaggctccactcacacaacgctcttccctgacagcaccacaagctcaggcatcgttgaagcatctacacgcgtccacagcagcactggctcaccacgcacaacactgtcccctgccagctccacaagccctggacttcagggagaatctaccgccttccagacccacccagcctcaactcacacgacgccttcacctcctagcaccgcaacagcccctgttgaagaatctacaacctaccaccgcagcccaggctcgactccaacaacacacttccctgccagctccacaacttcgggccacagtgagaaatcaacaatattccacagcagcccagatgcaagtggaacaacaccctcatctgcccactccacaacctcaggtcgtggagaatctacaacctcacgcatcagtccaggctcaactgaaataacaacgttacctggcagtaccacaacaccaggcctcagtgaggcatctaccaccttctacagcagccccagatcaccaaccacaacactctcacctgccagtatgacaagcctaggcgtcggtgaagaatccaccacctcccgtagccaaccaggttctactcactcaacagtgtcacctgccagcaccaccacgccaggcctcagtgaggaatctaccaccgtctacagcagcagcccaggctcaactgaaaccacagtgttccctcgcacccccacaacctcagttcgtggtgaagagcctacaaccttccacagccggccagcctcaactcacacaacactgttcactgaggacagcaccacctcgggcctcactgaagaatctacagccttccccggcagcccagcctccacccaaacagggttacctgccacactcacaaccgcagacctcggtgaggaatcaactacctttcccagcagctcaggctcaactggaacaacactctcacctgcccgctccaccacctctggcctcgttggagaatccacaccctcacgcctcagtccaagctcaaccgaaacaacaactttacccggcagtcccacaacaccaagcctcagtgagaaatcaaccaccttctacactagccccagatcaccagatgcaacactctcacctgcaaccacaacaagctcaggcgtcagtgaagaatccagcacatcccacagtcaaccaggctcaacgcacacaacagcattccctgacagcaccaccacgccaggcctcagtcggcattctacaacttcccacagcagcccaggctcaacggatacaacactgttacctgccagcaccaccacctcaggccccagtcaggaatcaacaacttcccacagcagcccaggttcaactgacacagcactgtcccctggcagtaccacagccttatcctttggtcaagaatctacaaccttccacagcagcccaggctccactcacacaacactcttccctgacagcaccacaagctcaggcatcgttgaagcatctacacgcgtccacagcagcactggctcaccacgcacaacactgtcccctgccagctccacaagccctggacttcagggagaatctaccaccttccagacccacccagcctcaactcacacgacgccttcacctcctagcaccgcaacagcccctgttgaagaatctacaacctaccaccgcagcccaggctcgactccaacaacacacttccctgccagctccacaacttcgggccacagtgagaaatcaacaatattccacagcagcccagatgcaagtggaacaacaccctcatctgcccactccacaacctcaggtcgtggagaatctacaacctcacgcatcagtccaggctcaactgaaataacaacgttacctggcagtaccacaacaccaggcctcagtgaggcatctaccaccttctacagcagccccagatcaccaaccacaacactctcacctgccagtatgacaagcctaggcgtcggtgaagaatccaccacctcccgtagccaaccaggttctactcactcaacagtgtcacctgccagcaccaccacgccaggcctcagtgaggaatctaccaccgtctacagcagcagcccaggctcaactgaaaccacagtgttccctcgcagcaccacaacctcagttcgtggtgaagagcctacaaccttccacagccggccagcctcaactcacacaacactgttcactgaggacagcaccacctcgggcctcactgaagaatctacagccttccccggcagcccagcctccacccaaacagggttacctgccacactcacaaccgcagacctcggtgaggaatcaactacctttcccagcagctcaggctcaactggaacaacactctcacctgcccgctccaccacctctggcctcgttggagaatccacaccctcacgcctcagtccaagctcaaccgaaacaacaactttacccggcagtcccacaacaccaagcctcagtgagaaatcaaccaccttctacactagccccagatcaccagatgcaacactctcacctgcaaccacaacaagctcaggcgtcagtgaagaatccagcacatcccacagtcaaccaggctcaacgcacacaacagcgttccctgacagcaccaccacctcaggcctcagtcaggaacctacagcttcccacagcagccaaggctcaacagaggcaacactgtcccctggcagtaccacagcctcatcccttggtcaacaatctacaaccttccacagcagcccaggcgacactgaaaccacactcttacctgacgacaccataacctcaggcctcgtggaggcatctacacccacccacagcagcactggctcgctacacacaacactgacccctgccagctccacaagcgctggccttcaggaagaatctaccactttccagagctggccaagctcaagtgacacaacaccttcacctcccggcaccacagcagcccctgttgaagtatccacaacctaccacagccgcccgagctcaactccaacaacacacttttctgccagttccacaaccttgggccgtagtgaggaatcaacaacagtccacagcagcccaggtgcaactggaacagcactcttccctacccgctctgcaacctcagttcttgttggagaacctacaacgtcacccatcagttcaggctcaacggaaacaacagcgttacctggcagtaccacaacagcaggcctgagtgagaaatctaccaccttctacagtagccccagatcaccggacacaacactctcacctgccagcacgacaagctcaggcgtcagtgaagaatccaccacctcccacagccgaccaggctcaacgcacacaacagcattccctggcagtaccaccatgccaggcgtcagtcaggaatctacagcttcccacagcagcccaggctccacagacacaacactgtcccctggcagtaccacagcatcatcccttggtccagaatctactaccttccacagcggcccaggctccactgaaacaacactcttacctgacaacaccacagcctcaggcctccttgaagcatctacgcccgtccacagcagcactggatcgccacacacaacactgtcccctgccggctctacaacccgtcagggagaatctaccaccttccagagctggcctaactcgaaggacactacccctgcacctcctactaccacatcagcctttgttgagctatctacaacctcccacggcagcccgagctcaactccaacaacccacttttctgccagctccacaaccttgggccgtagtgaggaatcgacaacagtccacagcagcccagttgcaactgcaacaacaccctcgcctgcccgctccacaacctcaggcctcgttgaagaatctacgacctaccacagcagcccgggctcaactcaaacaatgcacttccctgaaagcgacacaacttcaggccgtggtgaagaatcaacaacttcccacagcagcacaacacacacaatatcttcagctcctagcaccacatctgcccttgttgaagaacctaccagctaccacagcagcccgggctcaactgcaacaacacacttccctgacagctccacaacctcaggccgtagtgaggaatcaacagcatcccacagcagccaagacgcaacgggaacaatagtcctacctgcccgctccacaacctcagttcttcttggagaatctacgacctcacccatcagttcaggctcaatggaaacgacagcgttacccggcagtaccacaacgccaggcctcagtgagaaatctaccactttccacagtagccccagatcaccagccacaacactctcacctgccagcacgacaagctcaggcgtcagtgaagaatccaccacctcccacagccgaccaggctcaacgcacacaacagcattccctgacagcaccaccacgccaggcctcagtcggcattctacaacttcccacagcagcccaggctcaacggatacaacactgttacctgccagcaccaccacctcaggctccagtcaggaatcaacaacttcccacagcagctcaggttcaactgacacagcactgtcccctggcagtaccacagccttatcctttggtcaagaatctacaaccttccacagcagcccaggctccactcacacaacactcttccctgacagcaccacaagctcaggcatcgttgaagcatctacacgcgtccacagcagcactggctcaccacgcacaacactgtcccctgccagctccacaagccctggacttcagggagaatctaccgccttccagacccacccagcctcaactcacacgacgccttcacctcctagcaccgcaacagcccctgttgaagaatctacaacctaccaccgcagcccaggctcgactccaacaacacacttccctgccagctccacaacttcgggccacagtgagaaatcaacaatattccacagcagcccagatgcaagtggaacaacaccctcatctgcccactccacaacctcaggtcgtggagaatctacaacctcacgcatcagtccaggctcaactgaaataacaacgttacctggcagtaccacaacaccaggcctcagtgaggcatctaccaccttctacagcagccccagatcaccaaccacaacactctcacctgccagtatgacaagcctaggcgtcggtgaagaatccaccacctcccgtagccaaccaggttctactcactcaacagtgtcacctgccagcaccaccacgccaggcctcagtgaggaatctaccaccgtctacagcagcagcccaggctcaactgaaaccacagtgttccctcgcagcaccacaacctcagttcgtcgtgaagagcctacaaccttccacagccggccagcctcaactcacacaacactgttcactgaggacagcaccacctcgggcctcactgaagaatctacagccttccccggcagcccagcctccacccaaacagggttacctgccacactcacaaccgcagacctcggtgaggaatcaactacctttcccagcagctcaggctcaactggaacaaaactctcacctgcccgctccaccacctctggcctcgttggagaatccacaccctcacgcctcagtccaagctcaaccgaaacaacaactttacccggcagtcccacaacaccaagcctcagtgagaaatcaaccaccttctacactagccccagatcaccagatgcaacactctcacctgcaaccacaacaagctcaggcgtcagcgaagaatccagcacatcccacagtcaaccaggctcaacgcacacaacagcgttccctgacagcaccaccacctcaggcctcagtcaggaacctacaacttcccacagcagccaaggctcaacagaggcaacactgtcccctggcagtaccacagcctcatcccttggtcaacaatctacaaccttccacagcagcccaggcgacactgaaaccacactcttacctgacgacaccataacctcaggcctcgtggaggcatctacacccacccacagcagcactggctcgctacacacaacactgacccctgccagctccacaagcactggccttcaggaagaatctaccactttccagagctggccaagctcaagtgacacaacaccttcacctcccagcaccacagcagtccctgttgaagtatccacaacctaccacagccgcccgagctcaactccaacaacacacttttctgccagttccacaaccttgggccgtagtgaggaatcaacaacagtccacagcagcccaggtgcaactggaacagcactcttccctacccgctctgcaacctcagttcttgttggagaacctacaacgtcacccatcagttcaggctcaacggaaacaacagcgttacctggcagtaccacaacagcaggcctgagtgagaaatctaccaccttctacagtagccccagatcaccggacacaacactttcacctgccagcacgacaagctcaggcgtcagtgaagaatccaccacctcccacagccgaccaggctcaatgcacacaacagcattccctagcagtaccaccatgccaggcgtcagtcaggaatctacagcttcccacagcagcccaggctccacagacacaacactgtcccctggcagtaccacagcatcatcccttggtccagaatctactaccttccacagcagcccaggctccactgaaacaacactcttacctgacaacaccacagcctcaggcctccttgaagcatctacacccgtccacagcagcactggatcgccacacacaacactgtcccctgccggctctacaacccgtcagggagaatctaccaccttccagagctggccaaactcgaaggacactacccctgcacctcctactaccacatcagcctttgttgagctatctacaacctcccacggcagcccgagctcaactccaacaacccacttttctgccagctccacaacattgggccgtagtgaggaatcgacaacagtccacagcagcccagttgcaactgcaacaacaccctcgcctgcccgctccacaacctcaggcctcgttgaagaatctacgacctaccacagcagcccgggctcaactcaaacaatgcacttccctgaaagcaacacaacttcaggccgtggtgaagaatcaacaacttcccacagcagcacaacacacacaatatcttcagctcctagcaccacatctgcccttgttgaagaacctaccagctaccacagcagcccgggctcaactgcaacaacacacttccctgacagctccacaacctcaggccgtagtgaggaatcaacagcatcccacagcagccaagacgcaacgggaacaatagtcctacctgcccgctccacaacctcagttcttcttggagaatctacgacctcacccatcagttcaggctcaatggaaacgacagcgttacccggcagtaccacaacgccaggcctcagtgagaaatctaccactttccacagtagcccgagctcaactccaacaacccacttttctgccagctccacaaccttgggccgtagtgaggaatcgacaacagtccacagcagcccagttgcaactgcaacaacaccctcgcctgcccgctccacaacctcaggcctcgttgaagaatctacggcgtaccacagcagcccgggctcaactcaaacaatgcacttccctgaaagctccacagcttcaggtcgtagtgaagaatcaagaacttcccacagcagcacaacacacacaatatcttcacctcctagcaccacatctgcccttgttgaagaacctaccagctaccacagcagcccgggctcaattgcaacaacacactttcctgagagctccacaacctccggccgtagtgaggaatcaacagcatcccacagcagcccagatacaaatggaatcacacccttacctgcccattttactacctcaggccgcattgcagaatctaccaccttctatatctctccaggctcaatggaaacaacattagccagcactgccacaacaccaggcctcagtgcaaaatctaccatcctttacagtagctccagatcaccagaccaaacactctcacctgccagcatgacaagctccagcatcagtggagaacccaccagcttgtatagccaagcagagtcaacacacacaacagcgttccctgccagcaccaccacctcaggcctcagtcaggaatcaacaactttccacagtaagccaggctcaactgagacaacactgtcccctggcagcatcacaacttcatcttttgctcaagaatttaccacccctcatagccaaccaggctcagctctgtcaacagtgtcacctgccagcaccacagtgccaggccttagtgaggaatctaccaccttctacagcagcccaggctcaactgaaaccacagcgttttctcacagcaacacaatgtccattcatagtcaacaatctacacccttccctgacagcccaggcttcactcacacagtgttacctgccaccctcacaaccacagacattggtcaggaatcaacagccttccacagcagctcagacgcaactggaacaacacccttacctgcccgctccacagcctcagaccttgttggagaacctacaactttctacatcagcccatcccctacttacacaacactctttcctgcgagttccagcacatcaggcctcactgaggaatctaccaccttccacaccagtccaagcttcacttctacaattgtgtctactgaaagcctggaaaccttagcaccagggttgtgccaggaaggacaaatttggaatggaaaacaatgcgtctgtccccaaggctacgttggttaccagtgcttgtcccctctggaatccttccctgtagaaaccccggaaaaactcaacgccactttaggtatgacagtgaaagtgacttacagaaatttcacagaaaagatgaatgacgcatcctcccaggaataccagaacttcagtaccctcttcaagaatcggatggatgtcgttttgaagggcgacaatcttcctcagtatagaggggtgaacattcggagattgctcaacggtagcatcgtggtcaagaacgatgtcatcctggaggcagactacactttagagtatgaggaactgtttgaaaacctggcagagattgtaaaggccaagattatgaatgaaactagaacaactcttcttgatcctgattcctgcagaaaggccatactgtgctatagtgaagaggacactttcgtggattcatcggtgactccgggctttgacttccaggagcaatgcacccagaaggctgccgaaggatatacccagttctactatgtggatgtcttggatgggaagctggcctgtgtgaacaagtgcaccaaaggaacgaagtcgcaaatgaactgtaacctgggcacatgtcagctgcaacgcagtggcccccgctgcctgtgcccaaatacgaacacacactggtactggggagagacctgtgaattcaacatcgccaagagcctcgtgtatgggatcgtgggggctgtgatggcggtgctgctgctcgcattgatcatcctaatcatcttattcagcctatcccagagaaaacggcacagggaacagtatgatgtgcctcaagagtggcgaaaggaaggcacccctggcatcttccagaagacggccatctgggaagaccagaatctgagggagagcagattcggccttgagaacgcctacaacaacttccggcccaccctggagactgttgactctggcacagagctccacatccagaggccggagatggtagcatccactgtgtgagccaacgggggcctcccaccctcatctagctctgttcaggagagctgcaaacacagagcccaccacaagcctccggggcgggtcaagaggagaccgaagtcaggccctgaagccggtcctgctctgagctgacagacttggccagtcccctgcctgtgctcctgctggggaaggctgggggctgtaagcctctccatccgggagcttccagactcccagaagcctcggcacccctgtctcctcctgggtggctccccactctggaatttccctaccaataaaagcaaatctgaaagctcagaatgagaagtga

SEQ ID NO: 1484 - DNA, 4179 bp, Homo sapiens
ggcggaggcggtgagcgcgggcggcgcggacggcagcggttggcgggcgggtcctccgctgttgcggccgctgcggcctccttgcccgggcttggggcgccgcgctggggaaagccgggggcccggacacattggcgtgagacctgggagtacgttgtgccaaatcattgccacttgccacatgagtgtaaatgatggcggatgccaagtatgtcctctgccgatgggaaaagcgattatggcctgcgaaggttttggcccgaaccgcgacttcaacaaaaaataagagaagaaaggaatattttctagctgtgcaaatcctctctctagaggaaaaaattaaggtgaaaagcactgaagttgagatcctagagaagtctcaaattgaagccattgcttcctcgttagcctcacagaatgaggttcctgcggcacccctggaagaactggcctacagacggtcgcttcgcgtggctctggacgttctgagcgagggctcgatttggagtcaagaaagctctgcagggacaggtagagctgaccggtctctgcgagggaagcccatggagcatgtctcctcgccctgtgattcgaactcctcatctcttccccgcggagacgtgttgggcagttccagacctcacaggaggaggccatgtgtgcaacaaagcctgtcaagttcgttcacttgtgaaaaggaccccgagtgcaaagtggaccacaagaaggggctcaggaaaagtgaaaacccaagaggcccgttggtcctcccagctggaggtggtgcccaagatgagagtgggtccagaatccaccacaaaaattggactcttgcaagtaagaggggaggaaactcagcgcagaaggctagcttgtgcctgaatggatcttccctttcagaggacgacacggagagagacatggggagcaaaggaggcagctgggcagccccgtccttgccctccggggtcagggaggacgatccctgtgccaacgctgagggacacgaccccggtctgccgttgggcagcctcactgcgcccccagcccctgagccctcggcctgctcagagcctggagaatgccctgcgaaaaagaggccgcgcctggatggcagccaaaggccgcctgccgtgcagctggagcccatggcagcaggggccgcaccatcccccgggccggggccagggcccagagagtctgtgaccccgcgcagcaccgccaggctgggcccgcctccctcccacgcctctgcggatgcaaccagatgtcttccttgcccggattcccagaagctggagaaagagtgccagtcttccgaagagtccatggggtctaattccatgcgttctatcctggaggaagacgaggaagacgaggagccaccaagagtccttttataccacgaaccacgttcgtttgaagtaggaatgctagtctggcataaacataaaaaataccccttctggccagcagtggtcaaaagcgtcaggcagagagataagaaagcaagtgtgctatacatcgaaggacacatgaacccgaaaatgaaaggtttcacagtgtctcttaaaagtttaaagcactttgattgtaaagagaaacagacgcttctgaatcaagccagggaggacttcaaccaggacatcggctggtgtgtctccctcatcaccgactacagggtccggttaggctgcgggtcttttgctggctctttcctggaatattacgcggctgatataagctatcctgtccgaaaatccatccagcaggacgtcttggggaccaagcttcctcaactgagcaaggggagccccgaggagcccgtggtggggtgccccctggggcagaggcagccctgccggaaaatgctccccgaccgctcgcgggccgcccgggaccgggccaaccagaagctggtggagtacattgtgaaggccaagggcgcggagagccacctgcgggccatcctaaagagcaggaagccatctcgctggctgcagaccttcctgagctccagccagtacgtgacctgtgtggagacctacctggaggatgaggggcagctggacctggtggtgaagtacctgcagggcgtctaccaggaggtgggggccaaggtgctccagcgcaccaacggcgaccggatccggttcattctggacgtgcttctgcccgaggccatcatctgtgcgatctctgcggtggacgaggtggactacaagacggctgaggagaagtacatcaaggggccttcgctgagctaccgggaaaaagaaatatttgacaaccagctccttgaagagcggaaccggcgccgtcggtgagggagcagccggctgtgctgtcagcggggcctggcggtggaagcgcctccagtgtgcatgagcgtgtctgaagatggggggctcagggggcacgtttgcgtttggacctgtctgtgcgttctcctgcgtggcagtcctgatttccatgcttctggagaatccatttcgttaacactgaaagccagttctcttttcctggcagtttttttcattttatttttggcattttttacaagataccgttcgggaaaggcttttgaaaggacggaagcgtattcactgtgcgccagtactcctggctgtgctgtggtttctcccgacgtgcacatcgatctcgtatgtgtggcatctgatattaaacgggaggttttaagaagcgtctgccgtgatcatggagcttcggaagcgggaatggttcttccgggtttgctgttttgtctgtttcccccttgtgtggtttccgcctgcgacagttccagaatttgctctcccactcagtgtgctctgcagctgtgaggaaacagccttcgttagaggcgggagcagagacgagccgctgctctgtgtcgtgtttgctgtggccgcagggagaggagcaggacacgcacctttccaggggcctctgtgtcccgcactgtgtgtgagtggaccgcagcgcgcagccacatgccctggctgccatgggccagaccgcctccacctcccccgcccgcctggcctgtcctgagtgcatttccctgcactgtgtcgtcactgcacagccagtcaccgcggtctcagtcatcggcgcggatggctatgctggggtcccagggtggccgcagcagtcagggtcactgtgggagccctggggtggagtgacaaaccgcattgtcctgtgcccgccatggcagaagcgcagcctttgtatggaggcccaaccgcgctcccgtctggagaagcggcttccggggtgtggctgccgggtcggctctggtccacagcacggtgccggggctgcaggttgttgagggctgtgactccgtggggctcagccaggctccagcagggtcagacgtgctgttaagagcaaagccacagacgatgacttgtccattctcagtggatgctccaggctgtgcctacacagcagtgctggtgacatgtccagggttccagggcccggtggcctgggagctgctttctccccactggctgggctgcatctggccctggctggaggccttgctttgaggggctgtgaccctcttcccccaggccctccccagccgacgacagccaccggagaggagatcggaacacgattgtctcagatgcagggcgctgtgcgggacgaagccgcaaggactctcgtatcgggcccttgggactcgggaggtgccagaggcggcggctgctctggacctcggtgttcactgacctttgtttcacttgcctctgctcgactccgagagcaggaaacccggccgtggcctggcagctccgcctcccatgcccgcacgctggggtctgtcttgtctggagcagtggggcacaccccggaggaggcgggggtcagggctgtcggccttggccccctgctggtcgctgtttcggggactcggggcggccagtaccaccgcctgaggcggggctcagcagcgttgcatgtacgggcctcgtactgcctcatggaaaatcctccggagccgccctccattgtgggttcctgagagtaggacacattgccatggttttgtgggaatcacgcgcccctgatggaacttttctgctgttgtgaagtacttttatccatttgcttctctgctgaccttgccaagttgttcgaggtggaattaaacacctcccagac

SEQ ID NO: 1485 - DNA, 4879 bp, Homo sapiens
gagggaagcggctagaggatcggggagaaggagcattcgccggaggctggaggaggctgacccgcgtccccgcccagcctgctcctatgcggtacttgaaggatggcgaagaggtcgcgcagtgaggatgaggatgatgaccttcagtatgccgatcatgattatgaagtaccacaacaaaaaggactgaagaaactctggaacagagtaaaatggacaagggacgaggatgataaattaaagaagttggttgaacaacatggaactgatgattggactctaattgctagtcatcttcaaaatcgctctgattttcagtgccagcatcgatggcagaaagttttaaatcctgaattgataaagggtccttggactaaagaagaagatcagagggttattgaattagttcagaaatatgggccaaaaagatggtctttaattgcaaaacatttaaaaggaagaataggcaagcagtgtagagaaagatggcataatcatctgaatcctgaggtaaagaaatcttcctggacagaagaggaggacaggatcatctatgaagcacataagcggttgggaaatcgttgggcagaaattgccaaactacttccaggaaggactgataattctatcaaaaatcattggaattctactatgcgaagaaaagtggaacaggagggctatttacaagatggaataaaatcagaacgatcttcatctaaacttcaacacaaaccttgtgcagctatggatcatatgcaaacccagaatcagttttacatacctgttcagatccctgggtatcagtatgtgtcacctgaaggcaattgtatagaacatgttcagcctacttctgcctttattcagcaacccttcattgatgaagatcctgataaggaaaagaaaataaaggaacttgagatgcttcttatgtcagctgagaatgaagttagaagaaagcgaattccatcacagcctggaagtttttctagctggtctggtagtttcctcatggatgataacatgtctaatactctaaatagccttgacgagcacactagtgagttttacagtatggatgaaaatcagcctgtgtctgctcagcagaattcacccacaaagttcctggccgtggaggcaaacgctgtgttatcctctttgcagaccatcccagaatttgcagagactctagaacttattgaatctgatcctgtagcatggagtgacgttaccagttttgatatttctgatgctgctgcttctcctatcaaatccaccccagttaaattaatgagaattcagcacaatgaaggagccatggaatgccaatttaacgtcagtcttgtacttgaagggaaaaaaaacacttgtaatggtggcaacagtgaagctgttcctttaacatccccaaatatagccaagtttagcactccaccagccatcctcagaaagaagagaaaaatgcgagtgggtcattccccaggcagcgaacttagggatggctcattgaacgatggtggtaatatggcgctaaaacatacaccactgaaaacactaccattttctccttcacagtttttcaacacatgtcctggtaatgaacaacttaatatagaaaatccttcatttacatcaacccctatttgtgggcagaaagctctcattacaactcctcttcataaggaaacaactcccaaagatcaaaaggaaaatgtagggtttagaacacctactattagaagatctatactgggtaccacaccaagaactcctactccttttaagaatgcgcttgctgctcaggagaaaaaatatggacctcttaaaattgtgtcccagccacttgctttcttggaagaagatattcgggaagttttaaaagaagaaactggaacagacctattcctcaaagaggaagatgaacctgcttacaaaagctgcaaacaagagaataccgcttctgggaagaaagtcagaaaatcactagtcttagataattgggaaaaagaagaatcaggcactcaactgttgactgaagacatttcagacatgcagtcagaaaatagatttactacatccttattaatgataccattattggaaatacatgacaataggtgcaacttgattcctgaaaaacaagatataaattcaaccaacaaaacatatacacttactaaaaagaaaccaaaccctaacacttccaaagttgtcaaattggaaaagaatcttcagtcaaattgtgaatgggaaacagtggtttatgggaagacagaagaccaacttattatgactgaacaagcaagaagatatctgagtacttacacagctaccagtagtacttcaagagctctcatactgtaattgttattaaaattgatgaaatgccccactcccttactgcagtctctactaaattaggttgcagtgaaatttttctcaattagttgtttttaaagttgtaagatagcccttttaatacagcatcttttttctattctatatagtaggcagaaagctagtaagtcacttaaggggtagatagtttcatagtttattttttaagagatgagatttttaaaaattgtttttaaagaacaagatgggaaaataatagaatgttcatggatttctaaaagtaaattctcatatattttcttcacaagatatatgttgctactctcttgatgctgcagttttgttatagataggtgtatgagtatatatgatttctgaaattagtctatgtatggaaagcacacatgattttatgaagtacttttgcccatgtgctgatttacttaggctaccatttacaaagaaacacattgaaaaggaatttaaaggaaggatagaaagttgcactactaattttttgttttttttttcagaagcagtaaaattaactacagtgttaaatgtatttatttgagcatagtactgaaaacaaaaagcattcaaaaaagagttttttctttattagtaaatagtattttcttaatctcagaggagctgagagttttgttgaatgtattgtacagtatgtaggagcaggagaactttgtaaattggaaagaagtctgtttttataatttatttttatttttaaagcttaaatgtagatatttatacgtatacagggtgcctagaagccaatgttgtttcctgttattacagctaacacagtaaagaataattttgactttaagtatgaaacagtagtaagttatagctgcaaagaatacaatatctatactgtatgtcacatctacctaaatgttgcactatgccctttaaatcatgctggttataaagtagttctaaaaatgtactaaataataatttaatattttctttttaaattatatcgggggtggtcatatacattaatctggtgatttgtatatgtgtttgaaatttttgcattttgtttaaaaaataatatggtaccttggtccctaaaaacagtctgcacttagaagtttatatttactcagtgtttcagaagtggagaacattatcttttatttataaaaatattttgtccttttttaaatgttttgtgtttctctacaggttacaacagttgcttcagttgcctgttttaggtgtttgcacttattttatttcttcttgaaagaatttttatttgcttttgtggtagagattatatgtaattttttttcagtcatataatggtgtgctgtcaacttaaacactgacaggtaaatagaattgtacactgtagtttgaattatttataattgacacactctctccctctccactcctgaagtatgctgctatagaaaatagcagaatcggcttgctgctacgagagaaggaaagagcgaccaccacttgcactgtgtgaaaagataaaaaacaaatgatggcaagttctcaagttaactaaatggaatcaaccattaccaggcaaattcttgcaaataccaaaatactactatgccttataaaacaaaatgaaagcaggttaagattttctgctctgtttgtatgttaatagaaatggaaatactaagtattttaatgcttagctcttgaacagtagacctaaaagggttttaagctatttaaatctacttgctagtttttgcatattttatatatatatatatttatatatatatatagtgagaagtgaagaaaatgtatggtactaagattatgccttattgataaatagataaaccaatttgaatcctcttagcatgtttaagtatgttgattgctttctaattaatgaacttctcacagaaatttcacttagtgaaaccaatgattgtagcaaactcatactggatcatttcagttaccttgaactaatagcacataatggttttttgttgttgttgtttttaatgtagcccttacctggatatacatagtctgcaatcaccaaagtataatatcttgtaaggctatattttttaaagcatattttttcttgagcattaaattatcctaaatggtaatatattgtggataagtctgggcttattggacataatacatatttgggttggtactggttgaatccttcagttaactgctttgttgctttttgcaagattttttatcttaaacatgtcaggcatcttaagtcacctttatactgttttgttcctctgagtttctttcagtatgttatacaaatgccagacataacatgtagcagccatacttgcatggaaactgactacacatacataatactgcattttattgtaaggttttcacattaatacagcaattaccctgactaaattgagttttgtgatatatggaaaacttcattgtaagagaatcttgcatacaatgttgacatattaacatccaaaataaagcatctgtgtacaag

SEQ ID NO: 1486 - DNA, 3598 bp, Homo sapiens
ggcctagcgggacgcggctgcggtcagaggagcaggaggaggtcccccgacatgcctgaggcaaaaccagcggccaaaaaggcccccaaaggcaaagatgcccccaaaggagcccccaaggaggctccccctaaggaggctcctgcagaggcccccaaagaagccccacccgaggaccagtccccgactgcagaggagcccaccggcgttttcctgaagaagccggactccgtctcagtggagactgggaaggacgcagtggtcgtggccaaggtgaacgggaaggagctcccagacaaaccgaccatcaagtggttcaaggggaagtggctggagctgggcagcaagagtggcgcccgcttctccttcaaggagtcccacaactccgccagcaatgtgtacaccgtggagctgcacattgggaaggtggtactgggggaccgtgggtattaccgcctcgaggtcaaagccaaggacacctgtgacagctgtggcttcaacatcgatgtggaggcaccccgtcaggatgcctctgggcagagtctagaaagcttcaagcgtacgagtgaaaagaagtcggatactgcaggtgagctggatttcagtggcctgttgaagaagagggaggtggtggaggaggagaagaagaagaaaaagaaagatgacgatgacctaggcatccccccggagatttgggagctcctgaaaggggcaaagaagagcgagtacgagaaaatcgccttccagtatggcatcaccgacctccggggcatgctgaagcggctgaaaaaggctaaggtcgaggtcaagaagagtgcagcattcacaaagaagctggatccagcctaccaagtggacagaggcaacaagatcaagttgatggtagagatcagcgacccagacctgaccctcaagtggttcaagaacggccaggagatcaaaccaagcagcaagtacgtgtttgagaacgttggtaagaagcgaattcttaccatcaacaagtgcacgctggcggatgacgctgcctatgaagtagctgtcaaggatgagaagtgtttcaccgagctcttcgtcaaagaacctccagtcctaattgtcacacctcttgaggaccagcaggtgtttgtgggtgaccgggtggaaatggcagtggaggtgtcagaagagggtgcccaggtgatgtggatgaaagatggtgtggaactgactcgggaggattccttcaaggcccggtaccgcttcaagaaggacgggaagcgccacatcctcatcttctcagacgtggtccaggaggacaggggtcgctatcaggtcataaccaatggcggccagtgtgaggccgagctgattgtggaagagaaacagctggaggtcctgcaggacatcgcggatctgacggtgaaggcctcagaacaagctgtgttcaagtgcgaggtgtctgatgagaaagtgacgggcaagtggtataagaatggggtcgaggtgcggcccagcaagaggatcaccatttcccatgtaggcaggttccacaagctggtgatcgatgacgtccgccccgaggatgagggagactacacgtttgtgcctgacggctacgccctgtcgctctcggccaagctcaacttcctggaaatcaaggtggagtacgttcccaagcaagagccaccaaagatccacttggattgctcggggaagacctcagagaatgcgattgtggttgtggctggaaacaagctgaggcttgacgtgtccatcacaggggagccccctcccgtcgctacctggctgaagggagatgaggtattcacgaccaccgagggcaggacccgcatcgagaagcgggtggactgcagcagctttgtgattgagagtgcgcagcgggaagacgagggccgctacaccatcaaggtcaccaaccccgtcggcgaggacgtggcttccatcttcctgcaagttgtagatgtcccagaccccccggaggctgtgcgcatcacctcggttggagaggattgggccatccttgtctgggagccaccaatgtacgatggggggaagccagtcaccgggtacctcgtagagcggaagaagaagggctctcagcgctggatgaagctgaactttgaggtcttcacagagaccacctatgagtccaccaagatgatcgagggcatcctctatgagatgcgtgtcttcgccgtcaatgctataggggtctcccagcccagcatgaacaccaagccttttatgcctattgcacccacgagtgaacccctgcacctgatagtggaggatgtgacagacaccaccaccacactcaagtggaggcctccgaacaggatcggggcaggtggcatcgatgggtacctggtggagtactgcctggaaggctccgaggaatgggtccctgccaacaccgagcccgtggagcgctgtggcttcaccgtcaagaatctcccgaccggagccagaatcctcttccgagtagttggggtcaacatcgcggggcgcagcgagccggccaccctggcccagccggtcaccatcagggagattgcggagccacccaagatccggcttccccgccatctccgccagacctacatccgcaaagtgggcgagcagctcaaccttgtcgtccccttccagggaaagccccggccccaggtggtgtggaccaagggcggggccccgctggacacctcccgcgtgcacgtgcggaccagcgacttcgacaccgtgttcttcgtgcgccaggcggcccgctccgactccggggagtacgagctgagcgtgcagatcgagaacatgaaggacaccgccaccatccgcatccgcgttgtggaaaaggctgggccccccataaacgtgatggtgaaggaggtgtggggcacgaacgcgctggtggagtggcaggcccccaaagatgatgggaacagtgagatcatggggtatttcgtccagaaagcagacaaaaaaaccatggagtggttcaacgtctatgaacgtaacaggcacactagctgtactgtgtccgaccttatcgtgggcaatgaatactatttccgagtttacaccgagaacatctgtgggctcagtgactcacctggtgtctccaagaacacggcccgcatcctcaagacaggaatcaccttcaaaccgttcgagtataaggagcatgacttccggatggctcccaagttcctgacacctctcatagaccgcgtggtcgtggctgggtactcggcagccctcaactgtgctgtcagaggccacccgaagccgaaggtggtctggatgaagaacaagatggaaatccgtgaagatcccaagttcctgataaccaattaccaaggagtcctgacgctgaacatccgtcgcccctcgcccttcgacgctgggacttacacctgccgggccgtcaacgagctgggcgaggcgctggctgagtgcaagctggaggtccgagtgccgcagtgagacctgtcccctacctgccaagacaattggtggtggagtcctgaccccaatccccaacctcccaggactgtgttctttctggagttttcgctgagaacaaaacagtgttgtctggaccctg

SEQ ID NO: 1487 - DNA, 2377 bp, Homo sapiens
acccccgagctgtgctgctcgcggccgccaccgccgggccccggccgtccctggctcccctcctgcctcgagaagggcagggcttctcagaggcttggcgggaaaaagaacggagggagggatcgcgctgagtataaaagccggttttcggggctttatctaactcgctgtagtaattccagcgagaggcagagggagcgagcgggcggccggctagggtggaagagccgggcgagcagagctgcgctgcgggcgtcctgggaagggagatccggagcgaatagggggcttcgcctctggcccagccctcccgctgatcccccagccagcggtccgcaacccttgccgcatccacgaaactttgcccatagcagcgggcgggcactttgcactggaacttacaacacccgagcaaggacgcgactctcccgacgcggggaggctattctgcccatttggggacacttccccgccgctgccaggacccgcttctctgaaaggctctccttgcagctgcttagacgctggatttttttcgggtagtggaaaaccagcagcctcccgcgacgatgcccctcaacgttagcttcaccaacaggaactatgacctcgactacgactcggtgcagccgtatttctactgcgacgaggaggagaacttctaccagcagcagcagcagagcgagctgcagcccccggcgcccagcgaggatatctggaagaaattcgagctgctgcccaccccgcccctgtcccctagccgccgctccgggctctgctcgccctcctacgttgcggtcacacccttctcccttcggggagacaacgacggcggtggcgggagcttctccacggccgaccagctggagatggtgaccgagctgctgggaggagacatggtgaaccagagtttcatctgcgacccggacgacgagaccttcatcaaaaacatcatcatccaggactgtatgtggagcggcttctcggccgccgccaagctcgtctcagagaagctggcctcctaccaggctgcgcgcaaagacagcggcagcccgaaccccgcccgcggccacagcgtctgctccacctccagcttgtacctgcaggatctgagcgccgccgcctcagagtgcatcgacccctcggtggtcttcccctaccctctcaacgacagcagctcgcccaagtcctgcgcctcgcaagactccagcgccttctctccgtcctcggattctctgctctcctcgacggagtcctccccgcagggcagccccgagcccctggtgctccatgaggagacaccgcccaccaccagcagcgactctgaggaggaacaagaagatgaggaagaaatcgatgttgtttctgtggaaaagaggcaggctcctggcaaaaggtcagagtctggatcaccttctgctggaggccacagcaaacctcctcacagcccactggtcctcaagaggtgccacgtctccacacatcagcacaactacgcagcgcctccctccactcggaaggactatcctgctgccaagagggtcaagttggacagtgtcagagtcctgagacagatcagcaacaaccgaaaatgcaccagccccaggtcctcggacaccgaggagaatgtcaagaggcgaacacacaacgtcttggagcgccagaggaggaacgagctaaaacggagcttttttgccctgcgtgaccagatcccggagttggaaaacaatgaaaaggcccccaaggtagttatccttaaaaaagccacagcatacatcctgtccgtccaagcagaggagcaaaagctcatttctgaagaggacttgttgcggaaacgacgagaacagttgaaacacaaacttgaacagctacggaactcttgtgcgtaaggaaaagtaaggaaaacgattccttctaacagaaatgtcctgagcaatcacctatgaacttgtttcaaatgcatgatcaaatgcaacctcacaaccttggctgagtcttgagactgaaagatttagccataatgtaaactgcctcaaattggactttgggcataaaagaacttttttatgcttaccatcttttttttttctttaacagatttgtatttaagaattgtttttaaaaaattttaagatttacacaatgtttctctgtaaatattgccattaaatgtaaataactttaataaaacgtttatagcagttacacagaatttcaatcctagtatatagtacctagtattataggtactataaaccctaattttttttatttaagtacattttgctttttaaagttgatttttttctattgtttttagaaaaaataaaataactggcaaatatatcattgagccaaaaaaaaaaaaaaaaaaaaa

SEQ ID NO: 1488 - DNA, 5889 bp, Homo sapiens
aagcgggctcagagcgccgcggcattcagcccctcgtgttccgctaccgcgcgtgcgggattccggcgccgctctccgagctcgatccgctgctcgcacgggagccagctgggtgttatttctcaaactctgaggctgcggagttcacacattgaaatctgtcatctttttcagagagaaactttcgatgtaaccttctgtaatggaagatgattgaagacaaggggcctcgtgttgctgactactttgttgtagcaggattaactgatgtttcaaagcctctagaagaagaaattcacttcaatgatgcttgtcataaagtagctaaaccaaaagaacctattacagatgtttcagttattatcaaatctcttggggaggaagtcccacaggattatatctgtattgatgttaccccaactggattgtcagctgatcttaataatggaagtcttgtggggccacagatttacctttgctatagaagaggaagagataagcctccacttacagatctgggggttttatatgactggaaagaaagattgaaacagggttgtgaaattattcagagtactccctatgggcgccccgcaaatattagtgggagtacctcatcacaaagaatttatatcacttaccgaagagcctctgaaaacatgactcagaatacgttggctgtcactgacatatgtattattatacccagtaaaggagaaagcccaccacacacgttctgcaaagtcgacaagaatctcaataacagtatgtggggatcagcagtatacttgtgttataaaaaatcggtggcaaagacgaacactgtatcttacaaagctggcctaatttgtagatatcctcaagaagattatgagtcattctcactaccggaatctgttcctctattttgtttaccaatgggtgcaaccattgaatgttggccatcaaatagcaaataccctctgcctgtattttctacttttgttttaactggagcctcagctgaaaaggtttatggtgctgctattcagttttatgaaccatactctgaggagaatcccacagaaaagcagagacttcttttgggtttaacatcagcagatgggaagtctgatagttccaaaacaattcatactaacaaatgcatctgtcttctttctcactggcctttttttgatgcattcaggaagtttctgacttttctgtatcgttattccatctctgggcctcatgtccttccaattgagaagcatatttctcattttatgcataaagttccttttccatctcctcagagaccacggattttagttcagttatcaccacatgataatctgattctcagtcagcctgtgtcttcacctcttccactaagtggtggcaagttttcaacactactgcagaatttaggccctgaaaatgctgtgacactactggtgtttgcagtaacagaacataaaattcttatccattccctacggccatccgtgcttactagtgtgacagaagcattagtgtctatgattttccctttccactggccatgcccgtatgttcctctctgcccactggctttagcagatgtcttgagtgcaccatgtccattcatagtagggattgattcaagatactttgatctctatgatcctccaccagatgtcagttgtgttgatgtagataccaacactatttctcaaattggtgacaagaaaaatgtagcctggaagatacttccaaagaagccatgtaaaaatctgatgaacacactgaataatttgcatcagcaattggcaaaattgcagcagagaccgagagatgatggactcatggatttagcaataaatgactatgattttaattctggaaagaggttgcacatgatagatttggaaatccaagaggcatttttgtttttcatggcctctattttaaaaggttacagatcatacttaaggccaataacacaagccccatctgagacagccacagatgcagcctctctctttgccctacaagctttcttaagaagccgggaccggtcacatcaaaaattctataacatgatgaccaaaacacaaatgtttattcgcttcattgaagaatgttcttttgttagtgacaaagatgcaagcctggcattttttgatgattgtgtagataaagtggatatggacaagagcggtgaagtacgacttatagaactggatgaatctttcaaaagtgaacacactgtttttgtaacaccacctgagatcccccacctacccaatggtgaagaaccccctttacagtacagctataatggatttccagttcttaggaacaatttatttgaaagacctgaaggatttctacaagcaaagaagaacaaattgccttcaaaatcaagtagtcctaatagccctttgcccatgttcagaagaacaaaacaggaaattaaatcagcccataaaattgcaaagaggtactcttccatccctcagatgtggtctaggtgtctactgcgccactgttatggactgtggtttatttgtctcccagcttatgtgaaagtctgtcattcaaaagtcagggctctgaaaacagcatatgatgtgcttaaaaaaatgcagtcaaagaagatggatccacctgatgaggtatgctaccgcattcttatgcaactctgtggacaatatgatcagccagtgcttgcagttcgagtgctttttgaaatgcagaaagctggtattgaccccaatgccattacttatggttattataataaggctgttttggaaagtacctggccttcaagaagtcgtagtggctattttctttggacaaaagtaagaaatgttgttttaggagtaacacagttcaaaagagctttaaagaagcatgcacacttatcacaaacaactctctcaggtggccagtctgatcttggatataattcattatctaaagatgaagttagaagaggggatacatctactgaagacattcaagaagaaaaagataaaaaagggagtgattgtagttccttgtcagagagtgagagtacaaaaggaagtgctgattgccttcctaagctcagttatcaaaattcttccagtatcgttcgcctcactggtacaagtaacaacagtgctggtaaaatatcaggagaaagcatggaaagcacacctgagctgctcttaatatcatctcttgaagatacaaatgaaacacgaaacattcaaagtagatgcttcaggaaaagacataaaagtgacaatgaaactaatttgcagcagcaagtggtctggggaaatagaaaccgtaatcttagtggaggggtactgatgggatttatgctcaatagaattaaccaggaagcaacccctggagatatagttgaaaaattgggagctgatgcaaaaattctttcaaatgttatctcaaaaagcacgagaccaaatactcttgatattgggaagccacctttaagatcaaaaagagacagtctagaaaaggaatctagtgatgatgatacaccttttgatggttctaactatttggcagataaagtggattctcctgttatttttgacttagaagacttagacagtgaaacagatgtatcaaaagcaggatgtgttgctacacaaaatcccaagaggattcaacgtatgaacagcagcttttcagtaaaaccttttgaaaaaactgatgtcgcaacaggatttgatcccctctctcttttggttgctgagactgaacagcagcaaaaagaagaagaggaggaggatgaagatgatagcaaaagcatttcaacaccatctgctaggcgtgatttagctgaagaaattgtgatgtatatgaataacatgagcagtcctttgacaagtcgtacaccaagcattgatttacaacgggcatgtgatgataaattaaataagaaaagtccaccattggtcaaggcatgcagaagatctagtctgcctcctaattctcctaagccagtgagacttaccaaatctaaaagttacacaaaaagtgaggagaaaccaagggatagactttggtcttctccagccttctcacctacttgcccatttagggaagaatctcaggatacattaacccactcatcaccttcatttaacttagatacactactagtacctaaactagatgttctaagaaacagtatgttcactgctggaaaaggagttgcagagaaagcaagcaaatggtattcaagattcaccatgtacaccacatcatctaaggatcaaagttctgatcgtaccagtctttcttcagtgggagcccaggattctgaatctacctctttaacagatgaagatgtctgccatgagttggaaggacctatctcctctcaagagaccagtgctacttcagggactaagagaattgatctcagccgaataagcctggaaagttctgcatccttggaaggatctctgtcgaagtttgccttacctgggaaatcagaagtgacatcttccttcaacgcgagtaatacaaatatcttccagaactatgcaatggaggttctcatctcaagttgctctcggtgtagaacttgtgattgtcttgtccatgatgaggaaatcatggctggctggacagcagatgattcaaatctcaatactacatgcccattctgtggcaatatcttcttaccctttctgaatatagaaataagagatttaagacgacctggaagatactttctaaagtcaagcccatcaacagaaaatatgcactttccatcctccatttcaagtcagacgaggcagtcttgcatttcaacatcagcctctggtcttgacacatctgctctctctgttcaagggaattttgatctaaatagcaaatctaaactgcaggaaaatttttgcacccgaagtattcagatccctgctaatagatcaaaaacagctatgtctaaatgtccaatatttccaatggccaggagtattagtacttctggccccttggataaggaagatactggaagacagaagctcatttctacaggcagcctgccagctactttacaaggagctacagattctttaggtttagaatggcaccttccaagtcccgatcctgtcactgttccgtatcttagtcctttagtggtatggaaagaacttgaaagcttattggaaaatgaaggtgatcatgcaataacagtagcagactttgtggaccatcatccaattgttttttggaacctggtatggtatttcagacgtcttgacttgcccagtaacttacctggattgattctttcttctgagcactgtaacaagtattcaaagattccccgccactgtatgtctgaagatagcaaatatgttttaatacaaatgttatgggacaatatgaagttacatcaggatccgggacagcccttgtacattctctggaatgcacacacccaaaaatatccaatggtccatttattgcaaaaaagtgataactcatttaaccaggaactgttgaaaagtatggtaaaaagcattaaaatgaatgatgtctatggaccaatgagtcagattttagagacactgaataagtgtccacattttaaaagacagaggagtttatacagagaaatactatttctctcacttgtggcactgggaagagaaaacattgatatagatgcttttgataaagagtacaagatggcatacgatcgtctcacacctagtcaagtcaagagtacacacaactgtgatagaccaccaagtacaggggtgatggaatgtcgaaaaacctttggagaaccttatctttaagatgtatttgtatgtgtaaacattcaatgtatattgtatagtcagtgtataaaataacacttttagactctaaaaaaaaaaaaaaaaa

SEQ ID NO: 1489 - DNA, 6038 bp, Homo sapiens
atttccaccaagaacccagagagtggaacacttctgaacctgcatttttatctggaactccagaggcagaatcctttgctaaataaatcgcagccatgagtgcgagctcagacgctgagatggctgtttttggcgaagctgctccctaccttcgaaaatcagaaaaggagcggattgaggcccaaaacaagccgtttgatgctaaaacatctgtctttgtggcggagcccaaggaatcctatgtgaagagcactatacaaagcaaagaaggagggaaagtaaccgtaaagactgaaggtggagcaactctaactgtcagggaagaccaagtcttccctatgaaccctccgaaatatgacaaaattgaggacatggccatgatgactcatctacacgagcctggagtgctgtacaacctcaaagagcgctatgcagcctggatgatctacacctactcaggcctcttctgtgtcaccgtcaacccctacaagtggctgccggtgtacaagcccgaggtggtggctgcctacagaggcaaaaagcgccaggaggccccgccccacatcttctccatctctgacaatgcctatcagttcatgttgactgatcgagagaatcagtccatcctgatcaccggagaatctggtgccggaaagactgtgaacaccaagcgtgtcatccaatactttgcaacaattgcagttactggagagaagaagaaggatgaatctggcaaaatgcaggggactctggaagatcaaatcatcagcgccaatcccctactggaggcctttggcaatgccaaaactgtgaggaatgacaactcctctcgctttggtaaattcattagaatccactttggtactacagggaagctggcatctgctgatatagaaacatatcttttagaaaagtccagagttactttccagctaaaggcggaaagaagctaccatattttttatcagatcacttccaataagaagccagatctaattgaaatgctcctgatcaccaccaacccatatgactatgccttcgtcagtcagggggagatcacagttcccagtattgatgaccaagaagagttgatggccactgatagtgccattgacatcctgggcttcactcctgaagagaaagtgtccatctataaactcacaggggctgtgatgcattatgggaacatgaaattcaagcaaaagcagcgtgaggagcaagctgagccagatggcacagaagtcgctgacaaggcagcctatctccagagtctgaactctgcagacctactcaaagccctctgctaccctagggtcaaggttggcaatgagtatgtcaccaaaggccagactgtgcagcaggtgtacaatgcggtgggtgctctggccaaagccgtctacgagaagatgttcctgtggatggtcacccgcatcaaccagcagctggacaccaagcagcccaggcagtacttcatcggggtcttggacattgctggctttgaaatctttgattttaacagcctggagcagctgtgcatcaacttcaccaacgagaaactgcaacagtttttcaaccaccacatgtttgtgctagagcaggaggagtacaagaaggaaggcatcgagtggacgttcattgactttgggatggacctggctgcctgcattgagctcattgagaagccactgggcatcttctccatcctggaagaggagtgcatgttccctaaggcaacggacacctccttcaagaacaagctgtatgaccagcacctgggcaagtctgccaacttccagaagcccaaggtggtcaaaggcaaggctgaggcccacttctctctgattcactatgctggcactgtggactacaacattactggctggctggacaaaaataaggaccccctgaatgatactgtggttgggctgtaccagaagtctgcaatgaagactctagccagtctcttttccacgtatgctagtgctgaagcagatagcagcgcgaagaaaggtgctaagaaaaagggctcttctttccagactgtgtctgcccttttcagggaaaatttaaataaattgatgacgaatctgaggagcacacaccctcacttcgtacggtgtatcattcccaatgaaaccaaaactcctggggcaatggaacatgaacttgtgttgcaccagctgaggtgtaatggtgtgctggaaggcatccgcatctgtaggaaaggattcccaagcagaatcttatatggtgatttcaaacaaagatacaaggttttaaatgcaagtgctattccagagggacagttcattgacagcaagaaggcttctgagaaacttcttgcatctattgatattgatcatactcaatataaatttggacataccaaggttttcttcaaagctggacttctgggtcttctggaagaaatgagagatgaaaaattagcccaaattataacaagaacacaagctgtctgtaggggattcctaatgagggtagaatatcagaagatgttgcaaaggagagaagcacttttctgcatccagtataatgtccgtgccttcatgaacgtcaagcactggccctggatgaaactctttttcaagattaagcccctcctcaagagtgcagagaccgagaaagagatggccaccatgaaggaagaattccagaaaaccaaagatgaactcgccaagtcagaggcaaaacggaaggagctagaggaaaaaatggtcactctcttaaaagagaaaaatgacctgcaactccaggttcaatctgaagcagatagcttggctgatgcagaggaaaggtgtgagcaactgattaaaaacaaaatccaacttgaggccaaaatcaaagaggtgactgaaagagctgaggaggaggaagagatcaatgctgagctgacagccaagaagagaaaactggaggatgaatgttcagaactcaagaaagacattgatgaccttgagctgacactggccaaggttgagaaggagaaacatgccacggagaacaaggtgaaaaatcttacagaagagatggcaggcctggatgaaaccattgcaaaactgtccaaggagaagaaggctctccaagagacccaccagcagaccctggatgacctgcaggcagaggaggacaaagtcaacatcctgaccaaagctaaaaccaagctagaacagcaagtggatgatcttgaagggtctctggaacaagaaaagaagcttcgaatggatctagaaagagcaaagcggaaactggagggtgacctcaaattggcccaagaatccacaatggatatggaaaatgacaaacagcaacttgatgaaaagcttgaaaagaaagaatttgaaatcagcaatttgataagcaaaattgaagatgagcaagctgtagaaattcaactacagaagaagatcaaagagttgcaggcccgcattgaggagctgggggaagaaatcgaggcagagagggcgtcccgagccaaagcggagaagcagcgctctgacctctcccgggaactggaggagatcagcgagaggctggaagaagccggtggggcaacttctgctcaggtggaattgaacaagaagcgggaggctgagtttcagaaactgcgcagggacctggaggaggccaccctgcagcatgaagctatggtggctgctcttcggaagaagcacgcagacagtatggctgagcttggggagcagattgacaacttgcagcgggtcaaacagaagctggagaaggagaagagtgagctgaagatggagactgatgacctcagcagtaacgcagaggccatttccaaagccaagggaaaccttgaaaagatgtgccgctctctagaagatcaagtgagtgagcttaagaccaaggaagaggagcagcagcggctgatcaatgacctcacagcacagagagcgcgcctgcagacagaagcgggtgaatattctcgacaattagatgagaaagatgctttagtctctcagctttcaaggagcaagcaagcatctactcagcagattgaagagctgaaacatcaactagaggaagaaactaaagccaagaacgccctggcacacgccctgcagtcctcccgccatgactgcgacctgctgcgggaacagtatgaggaagagcaggaaggcaaagctgagctgcagagggcgctgtccaaggccaacagtgaggttgcccagtggagaaccaaatacgagacggatgccatccagcgcacagaggagctggaggaggccaagaaaaagttggcccagcgcctgcaagaagctgaggaacatgtagaagctgtgaacgccaaatgtgcttcccttgagaagacgaagcagcggctccagaatgaagttgaagacctcatgcttgatgtggaaaggtctaatgcagcctgtgcagcccttgataagaagcaaaggaactttgacaaggtcctatcagaatggaagcagaagtatgaggaaactcaggctgaacttgaggcctcccagaaggagtcacgttctcttagcactgagctgttcaaggtgaagaatgtctatgaggaatccctggatcaactcgaaacgctaagaagagaaaataagaacttgcaacaggagatttctgacctcactgagcagattgcagagggaggaaagcaaattcatgaattggagaaaataaagaagcaagtagaacaagagaaatgtgaaattcaggctgctttagaggaagcagaggcatctcttgaacatgaagaaggaaagattctgcgtatccagcttgagttaaaccaagtcaagtctgaagttgatagaaaaatcgcagaaaaggatgaggaaattgaccagctgaagagaaaccacactagagtcgtggagacaatgcagagcacgctggatgcagagattagaagcagaaatgatgctctgagagtcaagaagaaaatggaaggagatctgaatgaaatggaaatccagctgaaccatgccaatcgcttagctgcagagagtttaaggaactacaggaacacccaaggaatcctgaaggaaacccagctccacctggatgatgctctccggggccaggaggacctcaaggaacagctggcaattgtggagcgcagagccaacctgctgcaggctgagatcgaggagctgtgggccactctggaacagacagagagaagcaggaaaatcgccgaacaggagctcctggatgccagtgagcgtgtccagctcctccacacccagaataccagtctcattaacaccaagaagaaattagaaaatgacgtttcccaactccaaagtgaagtggaagaagtaatccaagaatcacgcaatgcagaagagaaagccaagaaggccatcactgatgctgccatgatggctgaggagctgaagaaggaacaggacaccagcgcccacctggagcggatgaagaagaacctggagcagacggtgaaggacctgcagcatcgtctagatgaggccgagcagctggcgctgaagggtgggaagaagcagatccagaaactggaggccagggtacgtgagcttgaaggagaggttgaaaatgaacagaaacgtaatgcagaggctgttaaaggtttacggaaacatgagcgacgagtaaaagaactcacctaccagactgaagaagatcgcaagaatgttctcaggctgcaggacttggtagataaattacaggcgaaggtgaaatcatacaagagacaagctgaggaggctgaggaacaatccaatgctaatctatctaaattccgcaaactccagcatgagctggaggaggccgaggaacgggctgacattgctgagtcccaggtcaacaaattgcgagtgaagagccgagaggttcacacaaaaatcagtgcagagtaaacacacctgcctgatgctatcaagaggctgaagaaaggcacaaaatgtgctatttttggtcacttgctttatgacgtttattttcctgttaaagctgaataaataaaaactacagtaaatgtatacatt

SEQ ID NO: 1490 - DNA, 7852 bp, Homo sapiens
ggcgctgagcgagctcggagcccgcgctgtgcgcctgcggccggggcgccccgccgagcgccggtgccccggctcccgggccgccttcgccgcgcgggaaggattcttcaaaattaacagaaaccaattcgggccagctgaagagaaaaaataaaggtggctcccggctgcctctgctgcagttcagagcaacttcaggagcttcccagccgagagcttcaggacgcctttcctgtcccactggcccagttgccacaacaaacaacagagaagacggtgaccatgggggatgtgaagctggttgcctcgtcacacatttccaaaacctccctcagtgtggatccctcaagagttgactccatgcccctgacagaggcccctgctttcattttgccccctcggaacctctgcatcaaagaaggagccaccgccaagttcgaagggcgggtccggggttacccagagccccaggtgacatggcacagaaacgggcaacccatcaccagcgggggccgcttcctgctggattgcggcatccgggggactttcagccttgtgattcatgctgtccatgaggaggacaggggaaagtatacctgtgaagccaccaatggcagtggtgctcgccaggtgacagtggagttgacagtagaaggaagttttgcgaagcagcttggtcagcctgttgtttccaaaaccttaggggatagattttcagctccagcagtggagacccgtcctagcatctggggggagtgcccaccaaagtttgctaccaagctgggccgagttgtggtcaaagaaggacagatgggacgattctcctgcaagatcactggccggccccaaccgcaggtcacctggctcaagggaaatgttccactgcagccgagtgcccgtgtgtctgtgtctgagaagaacggcatgcaggttctggaaatccatggagtcaaccaagatgacgtgggagtgtacacgtgcctggtggtgaacgggtcggggaaggcctcgatgtcagctgaactttccatccaaggtttggacagtgccaataggtcatttgtgagagaaacaaaagccaccaattcagatgtcaggaaagaggtgaccaatgtaatctcaaaggagtcgaagctggacagtctggaggctgcagccaaaagcaagaactgctccagcccccagagaggtggctccccaccctgggctgcaaacagccagcctcagcccccaagggagtccaagctggagtcatgcaaggactcgcccagaacggccccgcagaccccggtccttcagaagacttccagctccatcaccctgcaggccgcaagagttcagccggaaccaagagcaccaggcctgggggtcctatcaccttctggagaagagaggaagaggccagctcctccccgtccagccaccttccccaccaggcagcctggcctggggagccaagatgttgtgagcaaggctgctaacaggagaatccccatggagggccagagggattcagcattccccaaatttgagagcaagccccaaagccaggaggtcaaggaaaatcaaactgtcaagttcagatgtgaagtttccgggattccaaagcctgaagtggcctggttcctggaaggcacccccgtgaggagacaggaaggcagcattgaggtttatgaagatgctggctcccattacctctgcctgctgaaagcccggaccagggacagtgggacatacagctgcactgcttccaacgcccaaggccagctgtcctgtagctggaccctccaagtggaaaggcttgccgtgatggaggtggccccctccttctccagtgtcctgaaggactgcgctgttattgagggccaggattttgtgctgcagtgctccgtacgggggaccccagtgccccggatcacttggctgctgaatgggcagcccatccagtacgctcgctccacctgcgaggccggcgtggctgagctccacatccaggatgccctgccggaggaccatggcacctacacctgcctagctgagaatgccttggggcaggtgtcctgcagcgcctgggtcaccgtccatgaaaagaagagtagcaggaagagtgagtaccttctgcctgtggctcccagcaagcccactgcacccatcttcctgcagggcctctctgatctcaaagtcatggatggaagccaggtcactatgactgtccaagtgtcagggaatccaccccctgaagtcatctggctgcacaatgggaatgagatccaagagtcagaggacttccactttgaacagagaggaactcagcacagcctttgtatccaggaagtgttcccggaggacacgggcacgtacacctgcgaggcctggaacagcgctggagaggtccgcacccaggccgtgctcacggtacaagagcctcacgatggcacccagccctggttcatcagtaagcctcgctcagtgacagcctccctgggccagagtgtcctcatctcctgcgccatagctggtgacccctttcctaccgtgcactggctcagagatggcaaagccctctgcaaagacactggccacttcgaggtgcttcagaatgaggacgtgttcaccctggttctaaagaaggtgcagccctggcatgccggccagtatgagatcctgctcaagaaccgggttggcgaatgcagttgccaggtgtcactgatgctacagaacagctctgccagagcccttccacgggggagggagcctgccagctgcgaggacctctgtggtggaggagttggtgctgatggtggtggtagtgaccgctatgggtccctgaggcctggctggccagcaagagggcagggttggctagaggaggaagacggcgaggacgtgcgaggggtgctgaagaggcgcgtggagacgaggcagcacactgaggaggcgatccgccagcaggaggtggagcagctggacttccgagacctcctggggaagaaggtgagtacaaagaccctatcggaagacgacctgaaggagatcccagccgagcagatggatttccgtgccaacctgcagcggcaagtgaagccaaagactgtgtctgaggaagagaggaaggtgcacagcccccagcaggtcgattttcgctctgtcctggccaagaaggggacttccaagacccccgtgcctgagaaggtgccaccgccaaaacctgccaccccggattttcgctcagtgctgggtggcaagaagaaattaccagcagagaatggcagcagcagtgccgagaccctgaatgccaaggcagtggagagttccaagcccctgagcaatgcacagccttcagggcccttgaaacccgtgggcaacgccaagcctgctgagaccctgaagccaatgggcaacgccaagcctgccgagaccctgaagcccatgggcaatgccaagcctgatgagaacctgaaatccgctagcaaagaagaactcaagaaagacgttaagaatgatgtgaactgcaagagaggccatgcagggaccacagataatgaaaagagatcagagagccaggggacagccccagccttcaagcagaagctgcaagatgttcatgtggcagagggcaagaagctgctgctccagtgccaggtgtcttctgaccccccagccaccatcatctggacgctgaacggaaagaccctcaagaccaccaagttcatcatcctctcccaggaaggctcactctgctccgtctccatcgagaaggcactgcctgaggacagaggcttatacaagtgtgtagccaagaatgacgctggccaggcggagtgctcctgccaagtcaccgtggatgatgctccagccagtgagaacaccaaggccccagagatgaaatcccggaggcccaagagctctcttcctcccgtgctaggaactgagagtgatgcgactgtgaaaaagaaacctgcccccaagacacctccgaaggcagcaatgccccctcagatcatccagttccctgaggaccagaaggtacgcgcaggagagtcagtggagctgtttggcaaagtgacaggcactcagcccatcacctgtacctggatgaagttccgaaagcagatccaggaaagcgagcacatgaaggtggagaacagcgagaatggcagcaagctcaccatcctggccgcgcgccaggagcactgcggctgctacacactgctggtggagaacaagctgggcagcaggcaggcccaggtcaacctcactgtcgtggataagccagaccccccagctggcacaccttgtgcctctgacattcggagctcctcactgaccctgtcctggtatggctcctcatatgatgggggcagtgctgtacagtcctacagcatcgagatctgggactcagccaacaagacgtggaaggaactagccacatgccgcagcacctctttcaacgtccaggacctgctgcctgaccacgaatataagttccgtgtacgtgcaatcaacgtgtatggaaccagtgagccaagccaggagtctgaactcacaacggtaggagagaaacctgaagagccgaaggatgaagtggaggtgtcagatgatgatgagaaggagcccgaggttgattaccggacagtgacaatcaatactgaacaaaaagtatctgacttctacgacattgaggagagattaggatctgggaaatttggacaggtctttcgacttgtagaaaagaaaactcgaaaagtctgggcagggaagttcttcaaggcatattcagcaaaagagaaagagaatatccggcaggagattagcatcatgaactgcctccaccaccctaagctggtccagtgtgtggatgcctttgaagaaaaggccaacatcgtcatggtcctggagatcgtgtcaggaggggagctgtttgagcgcatcattgacgaggactttgagctgacggagcgtgagtgcatcaagtacatgcggcagatctcggagggagtggagtacatccacaagcagggcatcgtgcacctggacctcaagccggagaacatcatgtgtgtcaacaagacgggcaccaggatcaagctcatcgactttggtctggccaggaggctggagaatgcggggtctctgaaggtcctctttggcaccccagaatttgtggctcctgaagtgatcaactatgagcccatcggctacgccacagacatgtggagcatcggggtcatctgctacatcctagtcagtggcctttcccccttcatgggagacaacgataacgaaaccttggccaacgttacctcagccacctgggacttcgacgacgaggcattcgatgagatctccgacgatgccaaggatttcatcagcaatctgctgaagaaagatatgaaaaaccgcctggactgcacgcagtgccttcagcatccatggctaatgaaagataccaagaacatggaggccaagaaactctccaaggaccggatgaagaagtacatggcaagaaggaaatggcagaaaacgggcaatgctgtgagagccattggaagactgtcctctatggcaatgatctcagggctcagtggcaggaaatcctcaacagggtcaccaaccagcccgctcaatgcagaaaaactagaatctgaagaagatgtgtcccaagctttccttgaggctgttgctgaggaaaagcctcatgtaaaaccctatttctctaagaccattcgcgatttagaagttgtggagggaagtgctgctagatttgactgcaagattgaaggatacccagaccccgaggttgtctggttcaaagatgaccagtcaatcagggagtcccgccacttccagatagactacgatgaggacgggaactgctctttaattattagtgatgtttgcggggatgacgatgccaagtacacctgcaaggctgtcaacagtcttggagaagccacctgcacagcagagctcattgtggaaacgatggaggaaggtgaaggggaaggggaagaggaagaagagtgaaacaaagccagagaaaagcagtttctaagtcatattaaaaggactatttctctaaaactcaaaaaaaaaaaaaaaactcaagatagtaaaagcacctagtgtgatagattatcggttaggtcatttgtgggttgattcttcagaaacagcagttgatacctagcagcgttattgatgggcattaatctatgttagttggcaccttaagatactagtgcagctagatttcatttagggaaatcaccagtaacttgactgaccaattgattttagagagaaagtaaccaaaccaaatatttatctgggcaaagtcataaattctccacttgaatgcgctcatgaaaaataaggccaaaacaagagttctgggccacagctcagcccagagggttcctggggatgggaggcctctctctccccaccccctgactctagagaactgggttttctcccagtactccagcaattcatttctgaaagcagttgagccactttattccaaagtacactgcagatgttcaaactctccatttctctttccccttccacctgccagttttgctgactctcaacttgtcatgagtgtaagcattaaggacattatgcttcttcgattctgaagacaggtccctgctcatggatgactctggcttccttaggaaaatatttttcttccaaaatcagtaggaaatctaaacttatcccctctttgcagatgtctagcagcttcagacatttggttaagaacccatgggaaaaaaaaaatccttgctaatgtggtttcctttgtaaaccaggattcttatttgtgctgttatagaatatcagctctgaacgtgtggtaaagatttttgtgtttgaatataggagaaatcagtttgctgaaaagttagtcttaattatctattggccacgatgaaacagatttcaactgataaagagctggagaactccatgtactttggaatctcctccaagatagccagagtttaatacatcttcattctcaacactctccaaagaacttgacctaccttatgggttccatatttttcttcttaaatgtgcatcaatcatgccttgcccccaacctttaaatatattcttagacctggtaaatgcactcagacttgcgtctttaggaatttttaactttctttcactacattggcacttaaattttttctttataaagctttttgaaggtcataaacaaagaccataattgatgatagacctaatacatttcctctgtgtgtgtgtgtaacattccaaatactttttttttcttttccactgtttgtaaggtgcaacaatttaatatttttaagggactttttaagagttccttaagaaccaatttaaaattacttcagtgcaatcctacacagtatcaacattagaattttgatattagtcttatgttatcttccattctatttttatctgctttttgctgctagtttcaaactgccagtatttttccttttgcttttaaaatagttacaatatttttcatgatagccacagtattgccacagtttattataataaagggtttttatttgatttagcgcattcaaagcttttttctatcacttttgtgttcagaatataacctttgtgtgcgtgtatgttgtgtgtgtgcatgtgtggcgtatatgtgtgttacaggttaatgccttcttggaattgtgttaatgttctcttggtttattatgccatcagaatggtaaatgagaacactacaactgtagtcagctcacaatttttaaataaaggataccacagtgcatgctgtttgttcaaaaaaaaaaaaaaaaaa

SEQ ID NO: 1491 - DNA, 7699 bp, Homo sapiens
ggcgctgagcgagctcggagcccgcgctgtgcgcctgcggccggggcgccccgccgagcgccggtgccccggctcccgggccgccttcgccgcgcgggaaggattcttcaaaattaacagaaaccaattcgggccagctgaagagaaaaaataaaggtggctcccggctgcctctgctgcagttcagagcaacttcaggagcttcccagccgagagcttcaggacgcctttcctgtcccactggcccagttgccacaacaaacaacagagaagacggtgaccatgggggatgtgaagctggttgcctcgtcacacatttccaaaacctccctcagtgtggatccctcaagagttgactccatgcccctgacagaggcccctgctttcattttgccccctcggaacctctgcatcaaagaaggagccaccgccaagttcgaagggcgggtccggggttacccagagccccaggtgacatggcacagaaacgggcaacccatcaccagcgggggccgcttcctgctggattgcggcatccgggggactttcagccttgtgattcatgctgtccatgaggaggacaggggaaagtatacctgtgaagccaccaatggcagtggtgctcgccaggtgacagtggagttgacagtagaaggaagttttgcgaagcagcttggtcagcctgttgtttccaaaaccttaggggatagattttcagctccagcagtggagacccgtcctagcatctggggggagtgcccaccaaagtttgctaccaagctgggccgagttgtggtcaaagaaggacagatgggacgattctcctgcaagatcactggccggccccaaccgcaggtcacctggctcaagggaaatgttccactgcagccgagtgcccgtgtgtctgtgtctgagaagaacggcatgcaggttctggaaatccatggagtcaaccaagatgacgtgggagtgtacacgtgcctggtggtgaacgggtcggggaaggcctcgatgtcagctgaactttccatccaaggtttggacagtgccaataggtcatttgtgagagaaacaaaagccaccaattcagatgtcaggaaagaggtgaccaatgtaatctcaaaggagtcgaagctggacagtctggaggctgcagccaaaagcaagaactgctccagcccccagagaggtggctccccaccctgggctgcaaacagccagcctcagcccccaagggagtccaagctggagtcatgcaaggactcgcccagaacggccccgcagaccccggtccttcagaagacttccagctccatcaccctgcaggccgcaagagttcagccggaaccaagagcaccaggcctgggggtcctatcaccttctggagaagagaggaagaggccagctcctccccgtccagccaccttccccaccaggcagcctggcctggggagccaagatgttgtgagcaaggctgctaacaggagaatccccatggagggccagagggattcagcattccccaaatttgagagcaagccccaaagccaggaggtcaaggaaaatcaaactgtcaagttcagatgtgaagtttccgggattccaaagcctgaagtggcctggttcctggaaggcacccccgtgaggagacaggaaggcagcattgaggtttatgaagatgctggctcccattacctctgcctgctgaaagcccggaccagggacagtgggacatacagctgcactgcttccaacgcccaaggccagctgtcctgtagctggaccctccaagtggaaaggcttgccgtgatggaggtggccccctccttctccagtgtcctgaaggactgcgctgttattgagggccaggattttgtgctgcagtgctccgtacgggggaccccagtgccccggatcacttggctgctgaatgggcagcccatccagtacgctcgctccacctgcgaggccggcgtggctgagctccacatccaggatgccctgccggaggaccatggcacctacacctgcctagctgagaatgccttggggcaggtgtcctgcagcgcctgggtcaccgtccatgaaaagaagagtagcaggaagagtgagtaccttctgcctgtggctcccagcaagcccactgcacccatcttcctgcagggcctctctgatctcaaagtcatggatggaagccaggtcactatgactgtccaagtgtcagggaatccaccccctgaagtcatctggctgcacaatgggaatgagatccaagagtcagaggacttccactttgaacagagaggaactcagcacagcctttgtatccaggaagtgttcccggaggacacgggcacgtacacctgcgaggcctggaacagcgctggagaggtccgcacccaggccgtgctcacggtacaagagcctcacgatggcacccagccctggttcatcagtaagcctcgctcagtgacagcctccctgggccagagtgtcctcatctcctgcgccatagctggtgacccctttcctaccgtgcactggctcagagatggcaaagccctctgcaaagacactggccacttcgaggtgcttcagaatgaggacgtgttcaccctggttctaaagaaggtgcagccctggcatgccggccagtatgagatcctgctcaagaaccgggttggcgaatgcagttgccaggtgtcactgatgctacagaacagctctgccagagcccttccacgggggagggagcctgccagctgcgaggacctctgtggtggaggagttggtgctgatggtggtggtagtgaccgctatgggtccctgaggcctggctggccagcaagagggcagggttggctagaggaggaagacggcgaggacgtgcgaggggtgctgaagaggcgcgtggagacgaggcagcacactgaggaggcgatccgccagcaggaggtggagcagctggacttccgagacctcctggggaagaaggtgagtacaaagaccctatcggaagacgacctgaaggagatcccagccgagcagatggatttccgtgccaacctgcagcggcaagtgaagccaaagactgtgtctgaggaagagaggaaggtgcacagcccccagcaggtcgattttcgctctgtcctggccaagaaggggacttccaagacccccgtgcctgagaaggtgccaccgccaaaacctgccaccccggattttcgctcagtgctgggtggcaagaagaaattaccagcagagaatggcagcagcagtgccgagaccctgaatgccaaggcagtggagagttccaagcccctgagcaatgcacagccttcagggcccttgaaacccgtgggcaacgccaagcctgctgagaccctgaagccaatgggcaacgccaagcctgccgagaccctgaagcccatgggcaatgccaagcctgatgagaacctgaaatccgctagcaaagaagaactcaagaaagacgttaagaatgatgtgaactgcaagagaggccatgcagggaccacagataatgaaaagagatcagagagccaggggacagccccagccttcaagcagaagctgcaagatgttcatgtggcagagggcaagaagctgctgctccagtgccaggtgtcttctgaccccccagccaccatcatctggacgctgaacggaaagaccctcaagaccaccaagttcatcatcctctcccaggaaggctcactctgctccgtctccatcgagaaggcactgcctgaggacagaggcttatacaagtgtgtagccaagaatgacgctggccaggcggagtgctcctgccaagtcaccgtggatgatgctccagccagtgagaacaccaaggccccagagatgaaatcccggaggcccaagagctctcttcctcccgtgctaggaactgagagtgatgcgactgtgaaaaagaaacctgcccccaagacacctccgaaggcagcaatgccccctcagatcatccagttccctgaggaccagaaggtacgcgcaggagagtcagtggagctgtttggcaaagtgacaggcactcagcccatcacctgtacctggatgaagttccgaaagcagatccaggaaagcgagcacatgaaggtggagaacagcgagaatggcagcaagctcaccatcctggccgcgcgccaggagcactgcggctgctacacactgctggtggagaacaagctgggcagcaggcaggcccaggtcaacctcactgtcgtggataagccagaccccccagctggcacaccttgtgcctctgacattcggagctcctcactgaccctgtcctggtatggctcctcatatgatgggggcagtgctgtacagtcctacagcatcgagatctgggactcagccaacaagacgtggaaggaactagccacatgccgcagcacctctttcaacgtccaggacctgctgcctgaccacgaatataagttccgtgtacgtgcaatcaacgtgtatggaaccagtgagccaagccaggagtctgaactcacaacggtaggagagaaacctgaagagccgaaggatgaagtggaggtgtcagatgatgatgagaaggagcccgaggttgattaccggacagtgacaatcaatactgaacaaaaagtatctgacttctacgacattgaggagagattaggatctgggaaatttggacaggtctttcgacttgtagaaaagaaaactcgaaaagtctgggcagggaagttcttcaaggcatattcagcaaaagagaaagagaatatccggcaggagattagcatcatgaactgcctccaccaccctaagctggtccagtgtgtggatgcctttgaagaaaaggccaacatcgtcatggtcctggagatcgtgtcaggaggggagctgtttgagcgcatcattgacgaggactttgagctgacggagcgtgagtgcatcaagtacatgcggcagatctcggagggagtggagtacatccacaagcagggcatcgtgcacctggacctcaagccggagaacatcatgtgtgtcaacaagacgggcaccaggatcaagctcatcgactttggtctggccaggaggctggagaatgcggggtctctgaaggtcctctttggcaccccagaatttgtggctcctgaagtgatcaactatgagcccatcggctacgccacagacatgtggagcatcggggtcatctgctacatcctaaaccgcctggactgcacgcagtgccttcagcatccatggctaatgaaagataccaagaacatggaggccaagaaactctccaaggaccggatgaagaagtacatggcaagaaggaaatggcagaaaacgggcaatgctgtgagagccattggaagactgtcctctatggcaatgatctcagggctcagtggcaggaaatcctcaacagggtcaccaaccagcccgctcaatgcagaaaaactagaatctgaagaagatgtgtcccaagctttccttgaggctgttgctgaggaaaagcctcatgtaaaaccctatttctctaagaccattcgcgatttagaagttgtggagggaagtgctgctagatttgactgcaagattgaaggatacccagaccccgaggttgtctggttcaaagatgaccagtcaatcagggagtcccgccacttccagatagactacgatgaggacgggaactgctctttaattattagtgatgtttgcggggatgacgatgccaagtacacctgcaaggctgtcaacagtcttggagaagccacctgcacagcagagctcattgtggaaacgatggaggaaggtgaaggggaaggggaagaggaagaagagtgaaacaaagccagagaaaagcagtttctaagtcatattaaaaggactatttctctaaaactcaaaaaaaaaaaaaaaactcaagatagtaaaagcacctagtgtgatagattatcggttaggtcatttgtgggttgattcttcagaaacagcagttgatacctagcagcgttattgatgggcattaatctatgttagttggcaccttaagatactagtgcagctagatttcatttagggaaatcaccagtaacttgactgaccaattgattttagagagaaagtaaccaaaccaaatatttatctgggcaaagtcataaattctccacttgaatgcgctcatgaaaaataaggccaaaacaagagttctgggccacagctcagcccagagggttcctggggatgggaggcctctctctccccaccccctgactctagagaactgggttttctcccagtactccagcaattcatttctgaaagcagttgagccactttattccaaagtacactgcagatgttcaaactctccatttctctttccccttccacctgccagttttgctgactctcaacttgtcatgagtgtaagcattaaggacattatgcttcttcgattctgaagacaggtccctgctcatggatgactctggcttccttaggaaaatatttttcttccaaaatcagtaggaaatctaaacttatcccctctttgcagatgtctagcagcttcagacatttggttaagaacccatgggaaaaaaaaaatccttgctaatgtggtttcctttgtaaaccaggattcttatttgtgctgttatagaatatcagctctgaacgtgtggtaaagatttttgtgtttgaatataggagaaatcagtttgctgaaaagttagtcttaattatctattggccacgatgaaacagatttcaactgataaagagctggagaactccatgtactttggaatctcctccaagatagccagagtttaatacatcttcattctcaacactctccaaagaacttgacctaccttatgggttccatatttttcttcttaaatgtgcatcaatcatgccttgcccccaacctttaaatatattcttagacctggtaaatgcactcagacttgcgtctttaggaatttttaactttctttcactacattggcacttaaattttttctttataaagctttttgaaggtcataaacaaagaccataattgatgatagacctaatacatttcctctgtgtgtgtgtgtaacattccaaatactttttttttcttttccactgtttgtaaggtgcaacaatttaatatttttaagggactttttaagagttccttaagaaccaatttaaaattacttcagtgcaatcctacacagtatcaacattagaattttgatattagtcttatgttatcttccattctatttttatctgctttttgctgctagtttcaaactgccagtatttttccttttgcttttaaaatagttacaatatttttcatgatagccacagtattgccacagtttattataataaagggtttttatttgatttagcgcattcaaagcttttttctatcacttttgtgttcagaatataacctttgtgtgcgtgtatgttgtgtgtgtgcatgtgtggcgtatatgtgtgttacaggttaatgccttcttggaattgtgttaatgttctcttggtttattatgccatcagaatggtaaatgagaacactacaactgtagtcagctcacaatttttaaataaaggataccacagtgcatgctgtttgttcaaaaaaaaaaaaaaaaaa

SEQ ID NO: 1492 - DNA, 2676 bp, Homo sapiens
ttggagctgtctcagcctgcagttgctttatataaaccatcccttttatgggagttgaagcactgtatgaaaagggtttttgtctcatgttgaccttgtttagtcacattaacgcacacatcagttccaggccccattccattctctgaacatcttctgacacactgacagtgctgagcagagcaaggttgggttcgctcctctggcagaacctcggctctcaggaggtccttgttccagggaacagctgcttctctggggctgggctctactccctgcagcccctcgcactacccagctggaaccagggacaacgcctgagtccaaccctcgtgtctattttccagaaaacgggcaatgctgtgagagccattggaagactgtcctctatggcaatgatctcagggctcagtggcaggaaatcctcaacagggtcaccaaccagcccgctcaatgcagaaaaactagaatctgaagatgtgtcccaagctttccttgaggctgttgctgaggaaaagcctcatgtaaaaccctatttctctaagaccattcgcgatttagaagttgtggagggaagtgctgctagatttgactgcaagattgaaggatacccagaccccgaggttgtctggttcaaagatgaccagtcaatcagggagtcccgccacttccagatagactacgatgaggacgggaactgctctttaattattagtgatgtttgcggggatgacgatgccaagtacacctgcaaggctgtcaacagtcttggagaagccacctgcacagcagagctcattgtggaaacgatggaggaaggtgaaggggaaggggaagaggaagaagagtgaaacaaagccagagaaaagcagtttctaagtcatattaaaaggactatttctctaaaactcaaaaaaaaaaaaaaaactcaagatagtaaaagcacctagtgtgatagattatcggttaggtcatttgtgggttgattcttcagaaacagcagttgatacctagcagcgttattgatgggcattaatctatgttagttggcaccttaagatactagtgcagctagatttcatttagggaaatcaccagtaacttgactgaccaattgattttagagagaaagtaaccaaaccaaatatttatctgggcaaagtcataaattctccacttgaatgcgctcatgaaaaataaggccaaaacaagagttctgggccacagctcagcccagagggttcctggggatgggaggcctctctctccccaccccctgactctagagaactgggttttctcccagtactccagcaattcatttctgaaagcagttgagccactttattccaaagtacactgcagatgttcaaactctccatttctctttccccttccacctgccagttttgctgactctcaacttgtcatgagtgtaagcattaaggacattatgcttcttcgattctgaagacaggtccctgctcatggatgactctggcttccttaggaaaatatttttcttccaaaatcagtaggaaatctaaacttatcccctctttgcagatgtctagcagcttcagacatttggttaagaacccatgggaaaaaaaaaatccttgctaatgtggtttcctttgtaaaccaggattcttatttgtgctgttatagaatatcagctctgaacgtgtggtaaagatttttgtgtttgaatataggagaaatcagtttgctgaaaagttagtcttaattatctattggccacgatgaaacagatttcaactgataaagagctggagaactccatgtactttggaatctcctccaagatagccagagtttaatacatcttcattctcaacactctccaaagaacttgacctaccttatgggttccatatttttcttcttaaatgtgcatcaatcatgccttgcccccaacctttaaatatattcttagacctggtaaatgcactcagacttgcgtctttaggaatttttaactttctttcactacattggcacttaaattttttctttataaagctttttgaaggtcataaacaaagaccataattgatgatagacctaatacatttcctctgtgtgtgtgtgtaacattccaaatactttttttttcttttccactgtttgtaaggtgcaacaatttaatatttttaagggactttttaagagttccttaagaaccaatttaaaattacttcagtgcaatcctacacagtatcaacattagaattttgatattagtcttatgttatcttccattctatttttatctgctttttgctgctagtttcaaactgccagtatttttccttttgcttttaaaatagttacaatatttttcatgatagccacagtattgccacagtttattataataaagggtttttatttgatttagcgcattcaaagcttttttctatcacttttgtgttcagaatataacctttgtgtgcgtgtatgttgtgtgtgtgcatgtgtggcgtatatgtgtgttacaggttaatgccttcttggaattgtgttaatgttctcttggtttattatgccatcagaatggtaaatgagaacactacaactgtagtcagctcacaatttttaaataaaggataccacagtgcatgctgtttgttcaaaaaaaaaaaaaaaaaa

SEQ ID NO: 1493 - DNA, 2679 bp, Homo sapiens
ttggagctgtctcagcctgcagttgctttatataaaccatcccttttatgggagttgaagcactgtatgaaaagggtttttgtctcatgttgaccttgtttagtcacattaacgcacacatcagttccaggccccattccattctctgaacatcttctgacacactgacagtgctgagcagagcaaggttgggttcgctcctctggcagaacctcggctctcaggaggtccttgttccagggaacagctgcttctctggggctgggctctactccctgcagcccctcgcactacccagctggaaccagggacaacgcctgagtccaaccctcgtgtctattttccagaaaacgggcaatgctgtgagagccattggaagactgtcctctatggcaatgatctcagggctcagtggcaggaaatcctcaacagggtcaccaaccagcccgctcaatgcagaaaaactagaatctgaagaagatgtgtcccaagctttccttgaggctgttgctgaggaaaagcctcatgtaaaaccctatttctctaagaccattcgcgatttagaagttgtggagggaagtgctgctagatttgactgcaagattgaaggatacccagaccccgaggttgtctggttcaaagatgaccagtcaatcagggagtcccgccacttccagatagactacgatgaggacgggaactgctctttaattattagtgatgtttgcggggatgacgatgccaagtacacctgcaaggctgtcaacagtcttggagaagccacctgcacagcagagctcattgtggaaacgatggaggaaggtgaaggggaaggggaagaggaagaagagtgaaacaaagccagagaaaagcagtttctaagtcatattaaaaggactatttctctaaaactcaaaaaaaaaaaaaaaactcaagatagtaaaagcacctagtgtgatagattatcggttaggtcatttgtgggttgattcttcagaaacagcagttgatacctagcagcgttattgatgggcattaatctatgttagttggcaccttaagatactagtgcagctagatttcatttagggaaatcaccagtaacttgactgaccaattgattttagagagaaagtaaccaaaccaaatatttatctgggcaaagtcataaattctccacttgaatgcgctcatgaaaaataaggccaaaacaagagttctgggccacagctcagcccagagggttcctggggatgggaggcctctctctccccaccccctgactctagagaactgggttttctcccagtactccagcaattcatttctgaaagcagttgagccactttattccaaagtacactgcagatgttcaaactctccatttctctttccccttccacctgccagttttgctgactctcaacttgtcatgagtgtaagcattaaggacattatgcttcttcgattctgaagacaggtccctgctcatggatgactctggcttccttaggaaaatatttttcttccaaaatcagtaggaaatctaaacttatcccctctttgcagatgtctagcagcttcagacatttggttaagaacccatgggaaaaaaaaaatccttgctaatgtggtttcctttgtaaaccaggattcttatttgtgctgttatagaatatcagctctgaacgtgtggtaaagatttttgtgtttgaatataggagaaatcagtttgctgaaaagttagtcttaattatctattggccacgatgaaacagatttcaactgataaagagctggagaactccatgtactttggaatctcctccaagatagccagagtttaatacatcttcattctcaacactctccaaagaacttgacctaccttatgggttccatatttttcttcttaaatgtgcatcaatcatgccttgcccccaacctttaaatatattcttagacctggtaaatgcactcagacttgcgtctttaggaatttttaactttctttcactacattggcacttaaattttttctttataaagctttttgaaggtcataaacaaagaccataattgatgatagacctaatacatttcctctgtgtgtgtgtgtaacattccaaatactttttttttcttttccactgtttgtaaggtgcaacaatttaatatttttaagggactttttaagagttccttaagaaccaatttaaaattacttcagtgcaatcctacacagtatcaacattagaattttgatattagtcttatgttatcttccattctatttttatctgctttttgctgctagtttcaaactgccagtatttttccttttgcttttaaaatagttacaatatttttcatgatagccacagtattgccacagtttattataataaagggtttttatttgatttagcgcattcaaagcttttttctatcacttttgtgttcagaatataacctttgtgtgcgtgtatgttgtgtgtgtgcatgtgtggcgtatatgtgtgttacaggttaatgccttcttggaattgtgttaatgttctcttggtttattatgccatcagaatggtaaatgagaacactacaactgtagtcagctcacaatttttaaataaaggataccacagtgcatgctgtttgttcaaaaaaaaaaaaaaaaaa

SEQ ID NO: 1494 - DNA, 5798 bp, Homo sapiens
ggatggcgcggatggcgcggcctccacctgcgggcagtggagagagcggcgagaggaagaatattccccgcgagccgggataaggggccccttcggctcggttgacccaggtcagatcctcccgccgaccttcggcccgccctctacaggcggcccagttcttcccctgctcggctgcccctgcccgcccctcgagggagcgcccgtagccagcgcccccgtaaagaaataaggaggcgcccggcttcccgcccaggcccagggccccagtgcagcctggacacagtattcaaagttttggcgtctgagcattgttatgcgttattttcaagctttgctaacggtttttaaacctttgagatgtttccattaattggaaaaacaatcatctttgataactttcctgatccttctgatacatgggaaatcactgagacaattggcaaaggaacttatgggaaagtttttaaagtattgaataagaaaaatggccaaaaagcagcagtcaaaattcttgatccaattcacgatattgacgaagagattgaagcagaatataacatcttaaaagcactttctgaccaccctaatgtggtcagattctatgggatatactttaagaaggataaagtaaatggagacaagctgtggttggttcttgagctctgcagtggaggatcagtgactgaccttgtgaaaggatttctgaagaggggtgaaagaatgagtgagcctctaattgcctatattttacatgaagcactaatgggacttcaacatttgcataacaacaaaactatccacagagatgtgaaaggcaataacattctattgaccacggaaggtggagtgaaactagtagattttggtgtgtctgcacagctcaccagtacccggcaccgtcggaacacatccgtaggaacaccgttttggatggctcctgaggtgattgcatgtgaacagcaattggataccacttatgacgccagatgtgacacttggtccctgggtatcacggccattgagctgggtgatggagatcctccactagctgaccttcatcccatgagagcactcttcaaaataccaaggaatccacccccaaaactaaggcagcctgagctatggtcagcagaattcaatgacttcataagcaagtgcttgactaaagattatgaaaagcgtccaacagtgtcagaacttttacagcataaattcattactcaaattgagggcaaagatgtgatgctacaaaaacaactaacggaattcattggcatccatcaatgcatgggaggcacagaaaaggccagacgtgaacgtattcacacgaagaaagggaacttcaaccgacctctaatatccaatctgaaggatgtagatgatttagcaaccctagaaattttggatgagaatacagtctcagagcaacttgagaagtgttattccagagatcagatctacgtctatgtgggagacatactcattgctcttaacccttttcagagtctgggtctttactccacaaagcattccaaactatatattggatcaaagagaactgccagtcctcctcacatttttgcaatggctgacttaggatatcaatctatgataacatataattcagatcagtgcattgttatttctggagaaagtggtgctggaaagactgaaaatgctcatcttttagttcagcagctgacagtgcttggaaaggctaataacagaaccttgcaagagaagattttacaagtgaacaatttggtagaagcctttggcaatgcctgcactattataaatgacaattctagcagatttggaaaatacttagaaatgaaattcacctcttctggagcggtagtgggagcacagatttctgaatatctcctggaaaaatcccgagttatccaccaagctattggagaaaaaaattttcatattttttactacatttatgctggtttggctgaaaagaagaaactagcccattacaaactgcctgaaaataagcctcccaggtacctacaaaatgaccacctcagaacagtacaagacatcatgaataatagtttctataaatcccagtatgaattaattgagcaatgtttcaaagtcataggttttacaatggagcaacttggtagtatatacagcatactcgctgcaatcttgaatgttggcaacattgaattttcttctgtggcaactgaacaccagattgacaagagccacatttctaatcatacagccctggagaactgtgcttctttgctttgcattcgggcagatgagctacaagaagctctcacctcccactgtgtggtcactagaggagaaacaattatacgacccaatactgtagaaaaagctaccgatgtcagggatgccatggctaaaactttatatggacgtctctttagttggatagtcaattgcattaacagtttgttgaagcatgactcatcaccaagtgggaatggtgatgagctgagcattggcattcttgatatatttggctttgaaaatttcaaaaaaaattccttcgagcagctgtgcattaacattgcaaatgaacaaattcagtattattataatcaacatgtgtttgcatgggaacagaatgaatacctaaatgaagatgtggatgctagagttattgaatatgaggataactggcccctcttagatatgtttctgcaaaagccaatgggtttactttccctacttgatgaagaaagtagatttcccaaggccactgaccagactcttgtagaaaaatttgaaggtaacctgaaatcacaatacttctggagacccaaaagaatggaacttagttttggaattcaccattatgcaggaaaggtcctctataatgcaagtggattcttagccaaaaacagagacactcttcctactgacattgtgctacttttgaggtcatccgacaacagtgtaattaggcaactagtcaaccaccctctgaccaaaacaggtaatctgccacattctaaaactaaaaatgttataaactatcaaatgaggacttcagaaaaattaatcaacctggcaaagggcgacactggagaagccacacgtcatgccagagagacaaccaacatgaaaacacaaacggttgcatcatattttagatattccctgatggatttgttgtctaaaatggtggtgggccaacctcattttgtccgttgcatcaaaccaaatagtgagcgtcaggcaagaaaatatgacaaagagaaagttctgctacagcttcggtacacaggaattctggaaacagcaagaattcgaagactaggattctcccatcggatactttttgctaactttataaagcggtactaccttctctgctacaagtcgagcgaggagccccgcatgagccctgacacctgtgccaccattttggaaaaagctggtctcgataactgggctcttggaaaaacaaaagtgttccttaagtattatcacgtggagcagttaaatctaatgcgaaaggaagctattgacaagcttattttgattcaagcttgtgtcagagcattcttgtgttcaagaagataccaaaaaatacaggagaaaaggaaagaaagcgctataataatacagtcagctgcaagaggacaccttgtcaggaaacaaagaaaagaaattgttgacatgaaaaacacagcagtaacaaccattcaaacttctgatcaggaattcgactacaagaaaaactttgaaaatacaagggaatctttcgtgaagaaacaagcagaaaatgcaatctctgctaatgaaagattcatttcagctccaaataataaaggaagtgtatctgtagtgaagacttccactttcaaacctgaagaggaaaccaccaatgctgtggagagtaacaacagagtgtatcagactccaaaaaaaatgaataatgtgtatgaggaagaggttaagcaagaattctaccttgtagggccagaagtaagccccaaacagaagtctgtcaaagacctggaagagaacagcaatctaaggaaagtggagaaagaggaagctatgatccagagttactatcagaggtacacagaggagaggaattgtgaagagtcaaaagcagcatatctagaaaggaaggccatatcagaaaggccaagctacccagtgccttggttagctgaaaatgagacttcctttaaaaaaactttggaacctacacttagccaaaggtcaatttatcaaaatgcaaacagcatggaaaaagaaaagaagacatctgtagttacccagcgtgcaccgatatgcagccaggaggaaggcagaggccgtctgaggcatgagacagtcaaagagaggcaagttgaaccagtgacacaggcccaggaggaagaagataaagcagcggtattcattcagagcaaataccggggttacaagagaaggcagcagttgaggaaggacaagatgtcttcttttaagcatcagaggattgtcacaacaccaacagaagtagcaagaaacactcataatttgtattcctatcccacaaaacatgaggaaatcaataacatcaagaagaaggataacaaagactcgaaagcaacttcagaaagagaagcatgtggtttggcaattttttcaaaacagatatcaaagttatctgaagaatatttcattctgcagaaaaaattgaatgaaatgattttgtcacagcaactgaagtcactttatctgggtgtctcgcaccataagccaattaatagacgagtttcttctcagcagtgcctctcaggtgtctgtaaaggagaggagccaaaaatattgagacccccaagacgaccccggaaacccaaaacattaaataaccctgaagactccacatactattatctacttcataagtcaatccaagaagaaaaacgaagaccaaggaaagacagtcagggaaaattattagatttggaagatttctattataaggaatttttgcccagtcgttctggaccaaaggaacatagccctagtttaagagaacgaagaccacagcaagaactccagaatcaatgtattaaggctaatgaaaggtgctgggcggcggagagccccgagaaggaggaggagagagagccagcagccaacccctacgacttcaggaggctcctgcgcaaaacctcccagcgccggcgcctcgtccagcagtcctaaccgttcaacgaggcagtcaccgccgtcggaaggcgctggagcctgcggggcagcaggggccaagcaggcactctggggctggcaccagcaggcactgaagctgcggccctgatctccgcagaggctgcctgctgcgctcggccctcaagtgcccgggccggccttcgtgctccgaaacaagagacctgggagccctcgggaaacctcccccgacgctctctctcggaactcccgcaccctcctttctcaccagcccgccagttgtggcaaccctgtccttgttcccctaatctatcactttgttctttttttttgtgactcctgtggactccactgcgcctgggatctcgccaacccctctctcatttggggtgactgaattcacagatttttttttttattggaaacggcttttcttggccaacagaacacttgctagcggttgaatcttagagaaaaaagcccgggaggggtggggagaatttcgaagatgtatttcatctcaagcttgctctttctcttcctttggttattaaggtcactaaataaaggaagtgccttggaaaacccgtgaaaaaaaaaaaaaa

SEQ ID NO: 1495 - DNA, 5448 bp, Homo sapiens
ctagatcgaaagtcctttggtaatgatgtgtcatacattctagtcatcaaagacaccattttctgggcctgaagtgttctgctggtttttggaggaatgagaatccaatctctcataagccggattcagaaaataggtcatcgatgaaacatctgtatggattatttcactataatcctatgatgcttggacttgaatcacttccagatcccacagacacctgggaaattatagagaccattggtaaaggcacctatggcaaagtctacaaggtaactaacaagagagatgggagcctggctgcagtgaaaattctggatccagtcagtgatatggatgaagaaattgaggcagaatacaacattttgcagttccttcctaatcatcccaatgttgtaaagttttatgggatgttttacaaagcggatcactgtgtagggggacagctgtggctggtcctggagctgtgtaatgggggctcagtcactgagcttgtcaaaggtctactcagatgtggccagcggttggatgaagcaatgatctcatacatcttgtacggggccctcttgggccttcagcatttgcacaacaaccgaatcatccaccgtgatgtgaaggggaataacattcttctgacaacagaaggaggagttaagctcgttgactttggtgtttcagctcaactcaccagtacacgtctgcggagaaacacatctgttggcaccccattctggatggcccctgaggtcattgcctgtgagcagcagtatgactcttcctatgacgctcgctgtgacgtctggtccttggggatcacagctattgaactgggggatggagaccctcccctctttgacatgcatcctgtgaaaacactctttaagattccaagaaatcctccacctactttacttcatccagaaaaatggtgtgaagaattcaaccactttatttcacagtgtcttattaaggattttgaaaggcgaccttccgtcacacatctccttgaccacccatttattaaaggagtacatggaaaagttctgtttctgcaaaaacagctggccaaggttctccaagaccagaagcatcaaaatcctgttgctaaaaccaggcatgagaggatgcataccagaagaccttatcatgtggaagatgctgaaaaatactgccttgaggatgatttggtcaacctagaggttctggatgaggatacaattatccatcagttgcagaaacgttatgcagacttgctaatttacacatatgttggagacatcttaattgccttaaaccccttccagaatctaagcatatactctccacagttttccagactttatcatggggtgaaacgcgcctccaatcccccccacatatttgcatcagcagatgctgcttaccagtgcatggttactctcagcaaagaccagtgcattgtcatcagcggagagagtggctctgggaagacagaaagcgcccacctgattgttcaacatttgactttcttgggaaaggccaataatcagaccttgagagagaaaattctacaagtcaactccctggtggaagcctttgggaactcatgcactgccatcaatgacaactcgagccgttttggaaaatatctggaaatgatgtttacaccaactggagttgtgatgggggcaagaatctctgaatatctcctggaaaaatccagagttataaaacaggcagcgagagagaaaaattttcatatattttactatatttatgctggtcttcatcaccaaaagaagctttctgatttcagacttcctgaggaaaaacctcctaggtacatagctgatgaaactggaagggtgatgcacgacataacttccaaggagtcttacagaagacaattcgaagcaattcagcattgcttcaggattatagggttcacggacaaagaggtgcactcagtgtacagaattttggctgggattttgaatattgggaacattgagttcgcagctatttcctctcaacatcagactgataaaagtgaggtgcccaatgctgaagctttgcaaaatgctgcctctgttctgtgcattagccctgaagagctccaggaggccctcacctcccactgtgtggtcacccggggcgagaccatcatccgtgccaacactgtagacagggctgcggacgttcgagacgccatgtccaaagccctgtatgggaggctcttcagctggattgtgaatcgcattaatacactcctgcagccagacgaaaacatatgtagtgcaggaggtggaatgaatgtggggatcttggatatctttggattcgagaattttcagagaaattcatttgagcagctctgcataaacatcgccaatgagcaaatccagtactatttcaatcagcatgtttttgctcttgagcagatggaatatcagaatgaaggcattgatgctgtacccgtggaatatgaggacaaccgcccgctcttggacatgttcctccagaaacccctgggactgcttgcacttttggatgaggaaagtcggtttccccaagcaactgaccagaccctggttgataaatttgaagataatctacgatgcaaatacttctggaggcccaaaggagtggaactgtgctttggcattcagcattatgctggaaaggtattatatgatgcttctggggttcttgagaaaaatagagacactctccctgccgatgtggttgtggtcctgagaacgtcagaaaacatgcttcttcagcagctcttctcaatccctctgaccaaaacaggtaatttggcccagacaagagctaggataacagtggcctcaagttctttgcctccacatttcagtgctgggaaagccaaggtggacactctggaggtgatacggcatccggaagaaaccaccaacatgaagaggcaaactgtggcttcttacttccggtattctctgatggacctgctctccaaaatggtggttggacagccccactttgtgcgctgcattaaacccaatgatgaccgagaggccctgcagttctctcgagagagggtgctggcccagctccgctccacagggattctggagacagtcagcatccgccgccagggctattcccaccgcatcctttttgaagaatttgtgaaaaggtattattacttggcattcacagcacatcaaacacctcttgctagcaaagagagctgtgtggctatcttggaaaagtccagattagatcactgggtgctgggaaaaacaaaggtttttctcaaatattaccatgttgagcaattaaatttgctgcttcgagaagtcataggcagagtggttgtgctgcaggcatataccaaggggtggcttggagccaggagatacaaaaaggtcagagagaagagagagaagggagccattgccatccagtcaggggacacttcaaaccaaagcagtgggccacattcccccgtcgcagcaggtacgaggggaagtgccgaggttcaagactgcagcgagcctggtgaccataaagttctcaggggctctgtacatcgtaggagccattcacaagcagaatccaacaatggccgtacacagacttcaagcaactctcctgctgtcacagagaaaaatgggcattcacaagcccagagttctccaaaagggtgcgatatcttcgcaggacatgcaaacaagcactcggtttctgggactgatttgctgtcttctcggatatgccatcctgctccagatcagcaaggattgagtctctggggagcccctcaaaagcctggttcagaaaatggtcttgcacagaagcatcgaacacctcgccgacgatgtcagcagcccaaaatgctgagtagccctgaggacaccatgtactataaccagttaaatggaactctagaatatcaagggagcaagaggaagccaagaaaacttggccaaatcaaagtacttgatggggaagatgaatattacaaatctctgtcaccagtggactgtatccctgaggagaacaactcagcccacccttcctttttttcttcatcctcaaaaggagactcttttgctcaacattaaattgtgcttcctaaccctaaatctgtccagagtaggaacattcatggtaatcgactgtctgtcattgcgtaagaaagcactgatatggggtcagcttctttggacatatggtccatgcctgaaccttactgaaccacttgcagattccaaaacatcttatcctatcctctaccactctcccacatgtgttgtgcagcctgagctgggcgctgccttcctttctcatcccatggggccctgtgggacactgagaacacctttacaatagtttaaacagtcattcatgcccccagtgtctaggaagataacagccagtctcaccccagtctaatcatggaccctgataatattgcttgatttttcctatcaagttacttttcaatccattcagaatctgccccagtggagacccaggagttcctttcctgcactcttctccatcctcccacctttgctgggcttttctatcactcccacctcccccagagtcagggctccattgctgagtgccccatcctggaggattggccccaagatctcctagaacaggataattgcctgtgtttaggcagataggcctaaatctttcagattctttctacaaggcaaataacccctctcttgttaattatgatgctgagaaagcctctgtctctttatttcaccttgccaagacacccacactactttggtgatgaaaagaaaggaatgagagggaaagtttggacctgtcactttggtgacagggaaagtccaggtcactttattctgtaactctccattcactggtcaaataactccatgaggctatcagtggctacagtggaaggacctgatcttgtccatctttgtgtgcacagagcctagcacagggcttggtagagggtatatctagtgaatggagaatacatggagaaacttaactaagttacacaagcatatctgacaggaatgttaccttcaattgtatgttacatatgattagtcacttttcatacactataacctctgatttttcactcaagtttgggctgattatattgtaatgatgttagataatactcaacatgattcagtatgacaaacttttttgagcacctactttatataaaacatgacaaattgcagtgtgatgtaatcaaaaacaaagaagccctataagaccatttctctagaacagatgttcttaatatttttcttactctaaaatatgtggtagatagtatgcaagaaaagccgggtgcggtggctcaggcctgtaatcccagcactttgggaggccaagatgggcggatcatgaagtcaggagttcgagaccagcctgaccaacatggtgaaaccccgtctctactaaaaaaaa

SEQ ID NO: 1496 - DNA, 801 bp, Homo sapiens
tctttctgccaccatcttggttcctcgttccctgcacaaaatgccctgtgaagccacagaaaccgtccctgctacagagcaggagttgccgcagccgcaggctgagacagggtctggaacagaatctgacagtgatgaatcagtaccagagcctgaagaacaggattccacccagacgtccacacaagaagcccagctggtggcagcagctgaaattgatgaagagccagtcagtaaagcaaaacagatttggagtgaaaagaaggcacagaaggctatgtccaaactgggtcttcgacaggttacaggagtcactagagtcgctatccggaaatctaagaatatcctttttgtcatcacaaaaccaaatgtctgcaagagccctgctttggatacctacatagtttctggggaagccaagatcgaagatttatctgagcaagcacaactagcagctgctgagaaattcaatgttcaaggtgaagctgtctcaaacattcaagaaaacacacaaactccaactgtacaaaaggagagtgaagaagaagaggtcgatgaaacaggtgtagaagttaaggacatagaattggtcatgtcacaagcaaatgtgtggagagcaaaggcagtccatgccctgaagaacaacagtaatgatattgtaagtgccattatggaattaacaatgtaaccatctgaaagcaacttttcttggtgtctcaaaggagtaactgcagcttggtttgaaatttgtactgtttctatcataaataaagttatggcttcttgttggaaaaaaaaaac

SEQ ID NO: 1497 - DNA, 2798 bp, Homo sapiens
agtagggaagtagctatggcagtgcctgatacaaaataaactccaaatgtgtatttattagatggttggatggaagttatttgcgtgtgaaagcgcgttttacccgaaggcgctctgtgagggccagcgggtccccttcggccctggagccggggtcacacgctccccaccgcgtgcggtcacgagacgcccccaagggagtatcctggtacccggaagccgcgactcctggccctgagcccgggcttagccttcgggtccacgtggccggaggccggcagctgattggacgcgggccgccccaccccctggccgtcgcgggacccgcaggactgagaccatggaggcggtggcggtggccgcggcggtgggggtccttctcctggccggggccgggggcgcggcaggcgacgaggcccgggaggcggcggccgtgcgggcgctcgtggcccggctgctggggccaggccccgcggccgacttctccgtgtcggtggagcgcgctctggctgccaagccgggcttggacacctacagcctgggcggcggcggcgcggcgcgcgtgcgggtgcgcggctccacgggcgtggcggccgccgcggggctgcaccgctacctgcgcgacttctgtggctgccacgtggcctggtccggctctcagctgcgcctgccgcggccactgccagccgtgccgggggagctgaccgaggccacgcccaacaggtaccgctattaccagaatgtgtgcacgcaaagctactctttcgtgtggtgggactgggcccgctgggagcgagagatagactggatggcgctgaatggcatcaacctggcactggcctggagcggccaggaggccatctggcagcgggtgtacctggccttgggcctgacccaggcagagatcaatgagttctttactggtcctgccttcctggcctgggggcgaatgggcaacctgcacacctgggatggccccctgcccccctcctggcacatcaagcagctttacctgcagcaccgggtcctggaccagatgcgctccttcggcatgaccccagtgctgcctgcattcgcggggcatgttcccgaggctgtcaccagggtgttccctcaggtcaatgtcacgaagatgggcagttggggccactttaactgttcctactcctgctccttccttctggctccggaagaccccatattccccatcatcgggagcctcttcctgcgagagctgatcaaagagtttggcacagaccacatctatggggccgacactttcaatgagatgcagccaccttcctcagagccctcctaccttgccgcagccaccactgccgtctatgaggccatgactgcagtggatactgaggctgtgtggctgctccaaggctggctcttccagcaccagccgcagttctgggggcccgcccagatcagggctgtgctgggagctgtgccccgtggccgcctcctggttctggacctgtttgctgagagccagcctgtgtatacccgcactgcctccttccagggccagcccttcatctggtgcatgctgcacaactttgggggaaaccatggtctttttggagccctagaggctgtgaacggaggcccagaagctgcccgcctcttccccaactccaccatggtaggcacgggcatggcccccgagggcatcagccagaacgaagtggtctattccctcatggctgagctgggctggcgaaaggacccagtgccagatttggcagcctgggtgaccagctttgccgcccggcggtatggggtctcccacccggacgcaggggcagcgtggaggctactgctccggagtgtgtacaactgctccggggaggcctgcaggggccacaatcgtagcccgctggtcaggcggccgtccctacagatgaataccagcatctggtacaaccgatctgatgtgtttgaggcctggcggctgctgctcacatctgctccctccctggccaccagccccgccttccgctacgacctgctggacctcactcggcaggcagtgcaggagctggtcagcttgtactatgaggaggcaagaagcgcctacctgagcaaggagctggcctccctgttgagggctggaggcgtcctggcctatgagctgctgccggcactggacgaggtgctggctagtgacagccgcttcttgctgggcagctggctagagcaggcccgagcagcggcagtcagtgaggccgaggccgatttctacgagcagaacagccgctaccagctgaccttgtgggggccagaaggcaacatcctggactatgccaacaagcagctggcggggttggtggccaactactacacccctcgctggcggcttttcctggaggcgctggttgacagtgtggcccagggcatccctttccaacagcaccagtttgacaaaaatgtcttccaactggagcaggccttcgttctcagcaagcagaggtaccccagccagccgcgaggagacactgtggacctggccaagaagatcttcctcaaatattacccccgctgggtggccggctcttggtgatagattcgccaccactgggccttgttttccgctaattccagggcagattccagggcccagagctggacagacatcacaggataacccaggcctgggaggaggccccacggcctgctggtggggtctgacctggggggattggagggaaatgacctgccctccaccaccacccaaagtgtgggattaaagtactgttttctttccacttaaaaaaaaaaaaaaaaaa

SEQ ID NO: 1498 - DNA, 1796 bp, Homo sapiens
ctactccgccgagcctacgtgacacgacgtcaagtggcaatggcggcggacgagggctgtgcccccggcccgccccgttaggagccgcgagtaaggcgagtgtccaacgccgagctggctgacagagcccggccgcggcctccgcgggcccaggggcctccaggccccgtgaccaccggaccgagcaccctggaacggccccagcttggcctcgggacagtccgcgcgctcaccgactccctggtgaacgccgcttggccgccgccgccgccgcaggacccacgagaagcggaaaccggcgcaaggacccggtccccccggcgccgaatgtagtaagaaaacaaaaactgatgaccaagagaatgtgtcagccgatgcaccgagtccagcccaggaaaatggagagaagggagaattccacaagttggctgatgccaagatatttttgagcgactgcctggcatgtgacagctgtatgactgcagaggaaggagtccaactttcccagcaaaatgccaaggacttcttccgcgttctgaaccttaacaagaaatgtgatacctcaaagcacaaagtgctggtagtgtctgtgtgtcctcaatctttgccttattttgctgctaaattcaacctcagtgtaactgatgcatccagaagactctgtggtttcctcaaaagtcttggggtgcactatgtatttgatacgacgatagctgcggattttagtatcctggagagtcaaaaagaattcgtgcgtcgctatcgccagcacagtgaggaggaacgcaccctgcccatgctgacctctgcctgtcctggctgggtccgatacgccgagcgggtgctgggtcgccccatcactgcccacctctgcaccgccaagtccccccagcaggtcatgggctctttggtgaaggattatttcgccagacagcagaacctgtctccagagaagattttccacgtcattgtggccccttgttatgacaagaagctggaggctcttcaggaaagccttccccctgctttgcatggctcccggggcgctgactgcgtgttaacatcaggtgaaattgctcaaataatggagcaaggtgacctctcagtgagagatgctgccgtcgacactctgtttggagacttgaaggaggacaaagtgacgcgtcatgatggagccagctcagacgggcacctggcacacatcttcagacatgcggccaaggagctgttcaacgaggatgtggaggaggtcacttaccgagccctgagaaacaaagacttccaagaggtcacccttgagaagaacggagaggtggtgttacgctttgctgcagcctatggctttcgaaacatccagaacatgatcctgaagcttaagaagggcaagttcccattccactttgtggaggtcctcgcctgtgctggaggatgcttaaatggcagaggccaagcccagactccagacggacatgcggataaggccctgctgcggcagatggaaggcatttacgctgacatccctgtgcggcgtccggagtccagtgcacacgtgcaggagctgtaccaggagtggctggaggggatcaactcccccaaggcccgagaggtgctgcataccacgtaccagagccaggagcgtggcacacacagcctggacatcaagtggtgaagtcaggccagggccttccagctgctcttggggccagagccaagagcctctcagtagagggaggggctgccctgagtggagtattaaagacacttaagaaaaccgctcaaaaaaaaaaaaaaaaaaa

SEQ ID NO: 1499 - DNA, 5554 bp, Homo sapiens
tgttcagttaccacgtgaaccgccgacggagacccgtagtgggggaggcggcggcagcgttaagtgagaaaggaaaaaagacaacgaggaaaaaggaggtgtccgggtagggcaacgcggcgacacccgaggcctggtggtggcggcggatcgagatattcaaggctgaagcagctacggaacggcagcggcggcggtcggacaaactgactgaccgagccgggtggtggcgggagcagcgggagcagccggaacgatgccggccgtgagcctcccgcccaaggagaatgcgctcttcaagcggatcttgaggtgttatgaacataaacagtatagaaatggattgaaattctgtaaacaaatactttctaatcccaaatttgcagagcatggagaaaccttggctatgaaaggattaacattgaactgtttggggaaaaaggaagaagcttatgaattggttcgtagaggtttgagaaatgacttgaagagtcatgtgtgttggcacgtttatggccttcttcagaggtcagacaagaagtatgatgaagccattaagtgttacagaaatgcactaaaatgggataaagacaatcttcaaatcttaagggacctttccttactacagattcaaatgcgagatcttgagggttacagggaaacgaggtatcagttacttcagcttcgacctgcgcagagagcatcatggattggttatgctattgcttaccatttattagaagattatgaaatggcagcaaagattttagaagaatttaggaaaacacaacagacatcccctgacaaggtggattatgaatatagtgaactactcttatatcagaatcaagttcttcgggaagcaggtctctatagagaagctttggaacatctttgtacctatgaaaagcagatttgtgataaacttgctgtagaagaaaccaaaggggaacttctgttgcaactatgtcgtttggaagatgctgcagatgtttatagaggattgcaagagagaaatcctgaaaactgggcctattacaaaggcttggaaaaagcactcaagccagctaatatgttagaacggctaaaaatttatgaggaagcctggactaaatatcccaggggactggtgccaagaaggctgccgttaaactttttatctggtgagaagtttaaagaatgtttggataagttcctaaggatgaatttcagcaagggttgcccaccagtcttcaatactttaagatcattatacaaagacaaagaaaaggtggcaatcatagaagagttagtagtaggttatgaaacctctctaaaaagctgccggttatttaaccccaatgatgatggaaaggaggaaccaccaaccacattactttgggtccagtactacttggcacaacattatgacaaaattggtcagccatctattgctttggagtacataaatactgctattgaaagtacacctacattaatagaactctttctcgtgaaagctaaaatctataagcatgctggaaatattaaagaagctgcaaggtggatggatgaggcccaggccttggacacagcagacagatttatcaactccaaatgtgcaaaatacatgctaaaagccaacctgattaaagaagctgaagaaatgtgctcaaagtttacaagggaaggaacatcagcggtagagaatttgaatgaaatgcagtgcatgtggttccaaacagaatgtgcccaggcttataaagcaatgaataaatttggtgaagcacttaagaaatgtcatgagattgagagacattttatagaaatcactgatgaccagtttgactttcatacatactgtatgaggaagattacccttagatcatatgtggacttattaaaactagaagatgtacttcgacagcatccattttacttcaaggcagcaagaattgctatagagatctatttgaagcttcatgacaacccccttacagatgagaataaagaacacgaagctgatacagcaaacatgtctgacaaagagctaaagaagctacgtaataaacaaagaagagctcaaaagaaagcccagatagaagaagagaaaaaaaatgcagaaaaagaaaagcagcagagaaatcagaaaaagaagaaggatgatgatgatgaggagataggaggtccaaaagaagaacttattccagagaaactggccaaggttgaaactccattggaagaagctattaaatttttaacaccgttgaagaacttggtgaagaacaagatagagactcatctttttgcctttgagatttactttaggaaagaaaagtttcttttgatgctacaatcagtaaagagggcatttgctattgattctagtcatccctggcttcatgagtgtatgattcgtctctttaatactgcagtgtgtgaaagtaaagatttatctgatacagttagaacagtattaaaacaagaaatgaatcgtctttttggagcaacgaatccaaagaattttaatgaaacttttctgaaaaggaattctgattcattgccacacagattatcagctgccaaaatggtatattacttagatccttctagtcagaagcgagctatagagttggcaacaacacttgatgaatctctcactaacagaaacctccagacatgtatggaggtattggaagccttgtatgatggtagcctaggagactgtaaagaagctgctgaaatttatagagcaaattgtcataagcttttcccttatgctttggctttcatgcctcctggatatgaagaggatatgaagatcacagttaatggagatagttctgcagaagctgaagaactggccaatgaaatttgaacatcactaaacaagcaaatggaatgactttggaccatatctagtatataatatttttgtcacgcacctgctgcattgctctaacttacacagaatgagaggagtaaatgttcttgccttcaaatagtgttttacgttttttatcctgctgaaaaagtatatataaaatatctaacattacaggatagaggttcagtttcttaaaaaattaaagctgctaaaattgagtggttaaaaaagataccttatcctattcctccccacccacccatgtttttaaactaatttatataaaatctggaggctgttacagctaacaaagcaggtgtgtggcagaaatattactttaaatttgtcttgtgagattttactatatctcagacagcataaatgctgttttagcactggattctttcactgagcacaaagagttgttggggctttagcatctgactgattttgttacggggttgattctgaccataggaagtatgcaatgtgaatcactatttacagagaaacctacaacagatgcttgatgttgtagaaactgggacatatagataccaagcaaaattataagaaacctataaggtgttcaatacgcttgtgtttccaaaattcactgtacatgatcagtttggtgttcttgtaccacagtttttaactgaaggaaccagttgtaacagtctcaattttaactaaaacttgaagaactaaaacaacaatgcaaacctttcagcattgtttggccaaacttgttaaaactgtaatgcaagaaccaaatgcactgtgatgtggcaccaactaattagcaagcatgaatttttcacccaagagtgaaaaaaggaaaatctaccatggcttgaagttaaagagcagaactcctgactaccattctatgactgatcaaaagactaatagttaaaaacctcagcaggccttgttcacgatatgcagaaaaaaaagtgctgcagtttagatacctctggaatttttccacagtgtcacaggtttgtaatacttgaagccctacatttctaagaatatatttcttgctcagttgtttcaggcaagcccaagactttgtaatttttaaagggcccaagattttttttttttttttttttttcaaataacagaccagcttctttttcttgcagttacagatgtaatttcctttttgttgtcaaacataaggtaccaaatatgatgcaataaattgttttgaaaaacagttgtgtgaatatttcaactaatctgtgttgggcttctgtgaaatacacaggtggaaacagaggtgcaagccagaggcaatgtaatatgctgtaaggctagtgcagatgggagctttttagaaggggctaagtgctggtgtcagggaaattccataatgaagtagaatgctgctcctgcattaagatttcattgagggcaaggctggtggcaggtactatgaatgtaattcataatttaaaaggaaaactaaaaactattttgatttgggaaaatgagccttaatttgttaaacctatacactgagaactagcctcaggcttaatattctcattgcatttgcaagatctgagcaaataagattaagtaaaacaaatcaattgtatatataattgacctttttgtggaacatgtagtttatagaaagtatactctaaagggaatttgccgaagaccttttactgattgaacagttgtgctacaatcaacttttcatagtacatgacctgcattccacatctcagtctaacagtttagtagtgatgtaaagagaagtacaaaccgaactccagtgctttgttatgttttattaactggccctgtctcaggaacatcttaacagatggcaaaaaaacaaaaactttttttcaactcctatgagtggcaactgaagttcttattgttgggaaagaacactagtcctacctctgccactaatgaggtgtttggaggaggtaccagccatataatagggggtgtatgtgtgaattttgtttaaactctactgtatattgaaatgaaattcatttatttgtcttgacaatgttcaaatgatgtagattgtcttagaatgaatattcataagtactcagaactcttaagatgcagatgccacccgtgaggagctaaattcctaatgtgtattgtattccaacccaattttactggaactattgaataaatcttttattttctttcaggtttacttgatagtggatacattggtgtcagaggaccttgactgggttcattttatgtccagacatcacccctgaaacactgtactgtactatcttgctctgagtagtatcaactggatcgtctcatatttgcctcattcatcctattaatttcaaatgatactgtgggggaaaaacagggttagaaaaacaagtggaaaaaatggagtgatgttgtaatctaaacaagtgccttatgtttattgctaagaactggtgttaccaacccttttgagaagaaagggtctcttgacctgtattaacataggaaagtaaagttctttttgtttttctttatattcagctactcttgtcatttctcgttgaaaaactaaaatctgactaggttagtttactcagctttaattagatagttgagtcatatattttcaacatttttctgtatcgtatttattatgcacaaaaataaagtgtgatctct

SEQ ID NO: 1500 - DNA, 10812 bp, Homo sapiens
gcggcgtcggggcttcacaacaacagtggtggccgtagcagcggccgggccgggctgaggcgcaggcggggagcgggcccggcgccgcggcgctggtggatgctggggctccgaggcgacggccggggggcgggggccgaggcaggtataacggtaccggcggcggcagcgccgctgctcttcccttctcctcaggaggggggccaatggctagcgagaagccgggcccgggcccggggctcgagcctcagcccgtggggctcattgccgtcggggccgctggcggaggcggcgggggcagcggtggtggcggcaccgggggcagcgggatgggggagctaaggggggcgtccggctccggctcggtgatgctccccgcggggatgattaacccttcggtgccgatccgcaacatccggatgaaattcgcagtgttgattggactcatacaggtcggagaggtcagcaacagggacatcgtggagacggtgctcaacctgctggttggtggagaatttgacttggagatgaactttattatccaggatgctgagagtataacatgtatgacagagcttttggagcactgtgatgtaacatgtcaagcagaaatatggagcatgtttacagccattctacgaaaaagtgttcggaatttacagactagcacagaagttgggctaattgaacaagtattgctgaaaatgagtgctgtagatgacatgatagcagatcttctagttgatatgttgggggttcttgccagctacagcatcactgtcaaggagttgaagcttttgttcagcatgcttcgaggagaaagtggaatctggccaagacatgcagtaaaattattatcagttcttaatcagatgccacagagacacggtcctgatacttttttcaatttccctggttgtagcgctgcggcaattgccttgcctcctattgcaaagtggccttatcagaatggcttcaccttaaacacttggtttcgtatggatccattaaataatattaatgttgataaggataaaccttatctttattgttttcgtactagcaaaggagttggttactctgctcattttgttggcaactgtttaatagtcacatcattgaagtccaaaggaaaaggttttcagcattgtgtgaaatatgattttcaaccacgcaagtggtacatgatcagcattgtccacatttacaatcgatggaggaacagtgaaattcggtgttatgttaatggacaactggtatcttatggtgatatggcttggcatgttaacacaaatgatagctatgacaagtgctttcttggatcatcagaaactgctgatgcaaatagggtattctgtggtcaacttggtgccgtgtatgtgttcagtgaagcactcaacccagcacagatatttgcaattcatcagttaggacctggatataagagtaccttcaagtttaaatctgagagtgatattcatttggcagaacatcataaacaggtgttatatgatgggaaacttgcaagtagcattgcctttacatataatgctaaggccactgatgctcagctctgcctggaatcatcaccaaaagagaatgcatcaatttttgtgcattccccacatgctctaatgcttcaggatgtgaaagcgatagtaacacattcaattcatagtgcaattcattcaattggagggattcaagtgctttttccactttttgcccaattggataataggcagctcaatgacagtcaagtggaaacaactgtctgtgctactctgttggcattcctggttgaactacttaaaagttcagtagccatgcaagaacagatgctgggtggaaaaggctttttagtcattggctacttacttgaaaagtcatcaagagttcatataactagagctgtcctggagcaatttttatcttttgcaaaataccttgatggtttatctcatggagcacctttgctgaagcagctttgtgatcacattttatttaacccagccatctggatacatacacctgcaaaggttcagctttccctatacacatatttgtctgctgaatttattggaactgctaccatctacaccaccatacgcagagtaggaacagtattacagctaatgcacaccttaaaatattactactgggttattaatcctgctgacagtagtggcattacacctaaaggattagatggtccccggccatcacaaaaagaaattatatcactgagggcatttatgctactttttctgaaacagctgatactaaaggatcgaggggtcaaggaagatgaacttcagagtatattaaattacctacttacgatgcatgaggatgaaaatattcatgatgtgctacagttactggtggctttaatgtcggaacacccagcctcaatgataccagcatttgatcaaagaaatggaataagggtgatctacaaattattggcttctaaaagtgaaagtatttgggttcaagctttgaaggttctgggatactttctgaagcatttaggtcacaagagaaaagttgaaattatgcacacccatagtcttttcactcttcttggagaaaggctgatgttgcatacaaacactgtgactgtcaccacatacaacacactttatgagatcttgacagaacaagtatgtactcaggtcgtacacaaaccacatccagagccagattctacagtgaaaattcagaatccaatgattcttaaagtggtggcaactttgttaaaaaactctacaccaagtgcagagctgatggaagttcgtcgtttatttttatctgatatgataaaacttttcagtaacagccgtgaaaatagaagatgcttattgcagtgttcagtgtggcaggattggatgttttctcttggctatatcaatcctaaaaattctgaggaacagaagattaccgaaatggtctacaatatcttccggattcttttgtatcatgcaataaaatatgaatggggaggctggagagtctgggtggataccctctcaatagcccattccaaggtcacttatgaagctcataaggaatacctagccaaaatgtatgaggaatatcaaagacaagaggaggaaaacattaaaaagggaaagaaagggaatgtgagcaccatctctggtctttcatcacagacaacaggagcaaaaggtggaatggaaattcgagagatagaagatctttcacaaagccagagcccagaaagtgagaccgattaccctgtcagcacagatactcgagacttactcatgtcaacaaaagtgtcagatgatattcttggaaattcagatagaccaggaagtggtgtacatgtggaagtacatgatcttttagtagatataaaagcagagaaagtggaagcaacagaagtaaagctcgatgatatggatttatcaccggagactttagtaggtggagagaatggtgcccttgtggaggttgaatctctgttggataatgtatatagtgctgctgttgagaaactccagaacaatgtacatggaagtgttggtatcattaaaaaaaatgaagaaaaggataatggtccattgataacattagcagatgagaaagaagaccttcccaatagtagtacatcatttctctttgataaaatacccaaacaggaggaaaaactacttcctgaactttctagcaatcacattattccaaatattcaggacacacaagtacatcttggtgttagtgatgatcttggattgcttgctcacatgaccggtagcgtagacttaacttgtacatccagtataatagaagaaaaagaattcaaaatccatacaacttcagatggaatgagcagtatttctgaaagagacttagcgtcatcaactaaggggctggagtatgctgaaatgactgctacaactctggaaactgagtcttctagtagcaaaattgtaccaaatattgatgcaggaagtataatttcagatactgaaaggtctgacgatggcaaagaatcaggaaaagaaatccgaaaaatccaaacaactactacgacacaagctgtgcagggtcggtctatcacccaacaagaccgagatctccgagttgatttaggatttcgaggaatgccaatgactgaggaacagcgacgccagtttagcccaggtccacggactacaatgtttcgtattcctgagtttaaatggtctccaatgcaccagcggcttctcactgatttactatttgcattagaaactgatgtacatgtttggaggagccattctacaaagtctgtaatggattttgtcaatagcaatgaaaatattatttttgtacataacacaattcacctcatttcccaaatggtagacaacatcatcattgcttgtggaggaattttacctttgctctctgctgctacatcaccaactggttctaagacggaattggaaaatattgaagtgacacaaggcatgtcagctgagacagcagtaactttcctcagccggctgatggctatggttgatgtacttgtgtttgcaagctctctaaattttagtgagattgaagctgagaaaaacatgtcttctggaggtttaatgcgacagtgcctaagattagtttgttgtgttgctgtgagaaactgtttagaatgtcggcaaagacagagagacaggggaaataaatcttcccatggaagcagtaaacctcaggaagttcctcaaagtgtgactgctacagcagcttcgaagactccattggaaaatgttccaggtaacctttctcctattaaggatccggatagacttcttcaggatgttgatatcaatcgccttcgtgctgttgtctttcgggatgtggatgatagcaaacaagcacagttcttagctctggctgttgtttacttcatttcggttctgatggtttccaagtatcgtgacatattagaaccccagagagagactacaagaactggaagccaaccaggtagaaacatcaggcaagaaataaattcaccaacaagtacagttgtggtcataccatctatccctcatccaagtttgaaccatggattccttgccaagttaattcctgagcagagctttggccactcattttacaaagaaacacctgctgcatttccagacaccataaaagaaaaagaaacaccaactcctggtgaagatattcaggtagaaagttcaattccccatacagattcaggaattggagaggagcaagtggctagcatcctgaatggggcagaattagaaacaagtacaggccctgatgccatgagtgaactcttatccactttgtcatccgaagtgaagaaatcacaagagagcttaactgaaaatcctagtgaaacgttgaagcctgcaacatccatatctagcattagtcaaaccaaaggcatcaatgtgaaggaaatactgaaaagtcttgtggctgctccagttgaaatagcagaatgtggccctgaacctatcccatacccagatccagcattgaagagagaaacacaagctattcttcctatgcagtttcattcctttgacaggagtgttgtggtgcctgtaaagaaaccacctccaggtagtttagctgtaaccactgtgggagccactactgctggaagtgggctgccaacaggcagtacctctaatatatttgctgctactggagctacaccaaaaagtatgattaatacaacaggtgccgtggattcagggtcctcctcctcttcctcctcttctagttttgtgaatggtgctactagcaaaaaccttccagctgtacaaactgttgctccaatgccagaagattcagctgaaaatatgagcatcactgcaaaacttgaaagagcgttagaaaaagttgctcctcttcttcgtgaaatttttgtagactttgccccattcctatctcgtacacttcttggcagtcatggacaagagctattgatagaaggccttgtttgtatgaagtccagcacatctgtggttgagcttgttatgctgctttgttctcaggaatggcaaaactctattcagaagaatgcaggacttgcatttattgagctcatcaatgaaggaagattactgtgccatgctatgaaggaccatatagtccgtgttgcaaatgaagctgagtttattttgaacagacaaagagccgaggatgtacataaacatgcagagtttgagtcacagtgtgcccaatatgctgctgatagaagagaggaagaaaagatgtgtgaccatcttatcagtgctgctaaacatcgagatcatgtaacagcaaatcagctgaaacagaagattctcaatattctcacaaataaacatggtgcttggggagcagtttctcatagccaattgcatgatttctggcgtttggattactgggaagatgatcttcgtcgaaggagacgatttgttcgcaatgcatttggctccactcatgctgaagcattgctgaaagctgcaatagaatatggcacggaagaagatgtagtaaagtcaaagaaaacattcagaagtcaagcaatagtgaaccaaaatgcagagacagaacttatgctggaaggagacgatgatgcagtcagtctgctacaggagaaagaaattgacaaccttgcaggcccagtggttctcagcacccctgcccagctcatcgctcccgtggtggtggccaaggggactctctccatcaccacgacagaaatctacttcgaggtagatgaggatgattctgccttcaagaagatcgacacgaaagttcttgcatacactgagggacttcacggaaaatggatgttcagcgagatacgagctgtattttcaagacgttaccttctacaaaacactgctttggaagtatttatggcaaaccgaacctcagttatgtttaatttccctgatcaagcaacagtaaaaaaagttgtctatagcttgcctcgggttggagtagggaccagctatggtctgccacaagccaggaggatatcattggccactcctcgacagctttataaatcttccaatatgactcagcgctggcaaagaagggaaatttcaaacttcgaatatttgatgttccttaatactattgcaggacggacatataatgatctgaaccaatatccagtgtttccgtgggtgttaaccaactatgaatcagaagagttggacctgactcttccaggaaacttcagggatctatcaaagccaattggtgctttgaaccccaagagagctgtgttttatgcagagcgttatgagacatgggaagatgatcaaagcccaccctaccattataatacccattattcaacagcaacatctactttatcctggcttgttcgaattgaacctttcacaaccttcttcctcaatgcaaatgatggaaaatttgatcatccagatcgaaccttctcatccgttgcaaggtcttggagaactagtcagagagatacttctgatgtaaaggaactaattccagagttctactacctaccagagatgtttgtcaacagtaatggatataatcttggagtcagagaagatgaagtagtggtaaatgatgttgatcttcccccttgggcaaaaaaacctgaagactttgtgcggatcaacaggatggccctagaaagtgaatttgtttcttgccaacttcatcagtggatcgaccttatatttggctataagcagcgaggaccagaagcagttcgtgctctgaatgtttttcactacttgacttatgaaggctctgtgaacctggatagtatcactgatcctgtgctcagggaggccatggaggcacagatacagaactttggacagacgccatctcagttgcttattgagccacatccgcctcggagctctgccatgcacctgtgtttccttccacagagtccgctcatgtttaaagatcagatgcaacaggatgtgataatggtgctgaagtttccttcaaattctccagtaacccatgtggcagccaacactctgccccacttgaccatccccgcagtggtgacagtgacttgcagccgactctttgcagtgaatagatggcacaacacagtaggcctcagaggagctccaggatactccttggatcaagcccaccatcttcccattgaaatggatccattaatagccaataattcaggtgtaaacaaacggcagatcacagacctcgttgaccagagtatacaaatcaatgcacattgttttgtggtaacagcagataatcgctatattcttatctgtggattctgggataagagcttcagagtttattctacagaaacagggaaattgactcagattgtatttggccattgggatgtggtcacttgcttggccaggtccgagtcatacattggtggggactgctacatcgtgtccggatctcgagatgccaccctgctgctctggtactggagtgggcggcaccatatcataggagacaaccctaacagcagtgactatccggcaccaagagccgtcctcacaggccatgaccatgaagttgtctgtgtttctgtctgtgcagaacttgggcttgttatcagtggtgctaaagagggcccttgccttgtccacaccatcactggagatttgctgagagcccttgaaggaccagaaaactgcttattcccacgcttgatatctgtctccagcgaaggccactgtatcatatactatgaacgagggcgattcagtaatttcagcattaatgggaaacttttggctcaaatggagatcaatgattcaacacgggccattctcctgagcagtgacggccagaacctggtcaccggaggggacaatggggtagtagaggtctggcaggcctgtgacttcaagcaactgtacatttaccctggatgtgatgctggcattagagcaatggacttgtcccatgaccagaggactctgatcactggcatggcttctggtagcattgtagcttttaatatagattttaatcggtggcattatgagcatcagaacagatactgaagataaaggaagaaccaaaagccaagttaaagctgagagcacaagtgctgcatggaaaggcaatatctctggtggaaaaaactcgtctacatcgacctccgtttgtacattccatcacacccagcaatagctgtacattgtagtcagcaaccattttactttgtgtgttttttcacgactgaacaccagctgctatcaagcaagcttatatcatgtaaattatatgaattaggagatgttttggtaattatttcatatattgttgtttattgagaaaaggttgtaggatgtgtcacaagagacttttgacaattctgaggaaccttgtgtccagttgttacaaagtttaagctttgaacctaacctgcatcccatttccagcctcttttcaagctgagaaaaaaaaaaaaaaacacgtttgatactttgtacatcagatgcatcttatttaaaagggatacttttgtaaaagtaaaaccttgtataaagaacaaaatgtttcttaattttattgtggagttacaacttgcatgttccttactcctgttggcttgatggaacaggtgcattcacactatgaaacagaaagatctgtccaaggacacagcttgtatgaaagggttgaatttgggctccatcagtaatttttgacattttcaccaaaatatagtttgcactttttaatctaaagtcatcccttctgagtgaaatttgctcataaagcatttggatactaagccattatttgccattttgggtactttatacaaagaaaattcagccctaccctgcataatttgaagacacagcagaaagggggcttagggatgaggtcctggtttttcttgtataaataggagtcatgggcgttagttctgtagtaataacttcccagcacctggacatctcttccagagttatcccactggcttggtgtgtatacattaggggaggataatctgatgctaactttttttttctctttggttcttgaatagcttagtttctttaataacaagtcaaactttattacaacaataactgaagttattcttttaggttctcgtgaaattctcactgaaagccacattcttagcctaaggcatttcatcttttatgatataaaatgatggctatcaaatgattttccatacattgtactgatcaagttatacacccaggggtatatacactttcttcatgtttcttctttgtatatttggtgactgtatcgtcatagatgtacatattgtgtcggtagggctatgaggcatgttacaggaatgtaattttctcagaatttacactcactcgcagtcatttatttaaaaagataaaacaagataatgggttctttgtattggcactttgcaccagaaacatatcattatttattgatgtgattacttatttgttatccaccttgtactagtaagttttagcactgaattccttcttcactgttgtttgtatttatgaaattctgaaattatggggaatcagcgtaatgattaagttattcatcaccaggctgtaagcaatatcttgagtttgtagcttagaattgggaggatacttaacatctggaagacaagttcatttcatcttgagatcatggtgaaatattttggatatataaattccttaagctattgtaaccatgttttattgcaaagatgtaaaatatgccagatgtgtgtgagttggaaatcaaaaaaagaaaaataaaatatgcaaagaattcaaaaaaaaaaaaaaaaaaaaa

SEQ ID NO: 1501 - DNA, 4719 bp, Homo sapiens
tagttaggctttttttaaaagcaaaatttgaaaacggaaatactcttcataagcacagtagagctgttttaatgaaagacaatgataaaaatatgtcaactgaagataccaagaagaactctgatgaaaaaacagatgaggaaaaaatcacctcttttgcctcagctaatgtgtcttcggatcagtggagtttggaggatagacactctttagactcaaacacaccattatttccagaagatagctctgtgggagaattgtctttcaaatcagagaatcaagaggaattctggcatagtaacccttcacatttgagtttagacctcagtggaattgactcatgtgaaatgagtgatagtggaagtcaagtgccagacagtctgcctagcacaccatccccagtagagtctactaaatcgttttctgtgcactctgacagagaaagcagcatcacaaatgatatgggctttagtgatgacttctctttacttgaaagccaagagagatgtgaggaggagcttcttcaattactgacacatattttgaattatgtaatgtgtaagggactagaaaagtctgatgatgatacttggattgaacgaggacaagtgttttcagcactaagtaaaccaggaatatccagtgaactacttcgaccatcagatgaaataaaactaactttgctacaaaagatgttagaatgggcaatctcagaaaacagagaagcaaaaactaatccagtaactgctgaaaacgccttccgactagtgctgatcatacaggactttcttcagtcagagggactagttaattcaaacatgtggaccgagaagcttttagaggatatgatgctgctctttgactgtctgtcagtctgctattctgaaagtccagtatgggtaaaactctctcaaattcagatccagttgcttctaggattcattggaaggggtaatttgcaggtttgtgcaatggcatcagctaagctaaatacccttcttcagaccaaagtgattgaaaatcaggatgaagcatgttacattttagggaagctggaacatgttctaagtcaatcaatcaaggaacagactgaaatctactcatttctgattccccttgttcgtaccctggtttccaaaatttatgagcttctcttcatgaacttgcacctaccttctttaccttttaccaatggtagctcctcattttttgaagattttcaagaatattgtaattcaaatgaatggcaagtttacattgaaaaatatattgtaccttatatgaagcagtatgaagctcatacattttacgatggtcatgagaacatggcactttattggaaggattgttatgaagctttaatggtaaatatgcataaacgagaccgggaaggaggggaaagcaagctcaaatttcaggagctgtttgtggagccatttaatcgaaaagcacgccaagagaacctgaggtataataatatgcttaaacaacttagcagtcaacagttagccactcttagacgctggaaagcaatacagctctatcttacatgtgaaaggggaccttgggctaaaaggaaacagaatccaattcactggaagctagctaatgtagagaattattcccgcatgagacttaagctggtaccgaattataatttcaaaacccatgaggaagctagtgccttgagagataatctgggtatccaacactcacagccttccagtgatacattgcttttggaagtagtgaaacaagtaaaagttagtgatatggtggaggataaattagaccttcctgaagaggatataacagctagagtaaatgttgatgagaaagaagaacaggatcaaaaagaaaaattggtattgatggaagactgtgaactcattacaataattgatgtaattcctggcagattagaaatcactactcaacacatttacttctatgatggcagcattgaaaaagaagatggagtaggctttgatttcaagtggcctcattctcaaattcgagagattcatctccggcgttacaatttaagaagatcagcccttgagatttttcatgttgaccaatccaactactttctcaatttcaaaaaagaggttagaaacaaaatatatagccgactgttgtcacttcattccccaaatagttattatggaagcagatcaccacaggagttattcaaagcatcaggattgacacagaaatgggtaaacagagagatatcaaattttgactacctcattcaaataaatacaatggcaggacgaacctataatgaccttgcacagtatcctgtgtttccctggattttacaagattatacttcggaagagttggaccttaataaccctgctgtatttcgagatctttccaaaccaattggggtagttaatgaaaaaaacgccaaagctatgagagaaaaatatgaaaattttgaggatcctatgggaactattgataagtttcactatggtactcactattcaaattctgcgggggtcatgcactatctcattcgtgtagaaccgttcaccaccctccacatccaacttcagagtggaaggtttgactgtgcagatcgacagttccattctattcctgctacctggcaagctcttatggataatccatatgatgttaaagaacttattcctgaattcttctatttcccagagtttttggaaaatcaaaatcaatttaacttgggtcgtctacagatttccaaagaattagtaaatgatgtcattctcccgaaatgggctaaatcagctgaagatttcatctataaacataggaaagctttggagtctgaatatgtttcagctcatcttcatgaatggatagatctgatctttggctataaacagaggggaccagctgcagtagaggcactcaacgttttctattattgtagttatgaaggagctgtggatctggatgccttaacagatgagaaagaaagaaaagccttagaagggatgattaataattttgggcaaacaccctgtcaattattaaagataacaataagcatgaattatgttattggaacccatggatggttgccttatgacagaaacatttctaattactttacattcatcaaggatcaaactgtgacaaatccaaaaactcagcgcagtataaatggttcttttgctcccgggctagagatcacttctaagctatttgtagtatcacatgatgcaaagttgctcttcagtgctggatactgggataatagcattcaagtgatgtcacttacaaaaggcaaaattatctcacacatcatccggcatatggatattgtgacttgcttagctacagattactgtggaatacatttgatttctggttccagagatactacatgtatgatatggcaaataacacaacagggaggtgttcctgtgggcttagcatctaaaccttttcagattctttatggacacaccaacgaggtactgagtgtcggcatcagcactgagctagacatggcagtgtcaggatcaagggatggaacggtgattatacataccattcagaaaggtcagtacatgaggactttacgaccaccttgtgagagttctctgttcctgaccattcctaatttggctatatcttgggaaggacatattgttgtctactccagcactgaagaaaagaccaccctcaaggataagaatgcattacatctgttttctataaatggcaagtatctagggtctcaaatcctgaaggaacaagtatcagatatatgtataatcggagaacacattgtcacaggcagcatacaaggattcctgtctataagagatctccacagcttgaatctcagcatcaacccattagccatgcgactgcctatccattgtgtttgtgtcaccaaagaatacagccatattcttgtaggtttagaagatggcaaattgattgtagtgggtgttggcaagcctgctgagatgcgttcaggtcagctttctcgaaaattttggggatcgagcaagcggctcagccagatttcagctggagaaactgaatataatactcaagattccaagtgattgttatttccattttctgttatgattactgaaacctgatttattgctttgtcactttaaccacatctctcaactctctgcaatgttgcaaggcttttatccctgaaaatcatttacagataaccacaatttgctgtggtatataaactaattcttggtctatactaagatgtatttgagaaaatacatttgatttgattttgtggcccattcctaaaggtcattgtatccatttttaaaacaaactaaaatgagaacattaggttcaattttcttattattccaaatgataaaatttaagatttttctaataaaagagtacagataatgggacagttgagagagatggctttaaatacattcttaagtaatcattttcctatttactgaccactgtaatgaaaatatatcaatttatttatggaactcctgattggggataatattttaaaggtatctgttgcacacttggattttcaaaactcggtgaaagttacaagtttgcatggtaagaataaaataagaatattgaaactggtacattagctaattctattactacttagcgtgtttctaatgagaagttactgaaatctattactgtccttaataaaaattgagtagaaaaaagtggaactag

SEQ ID NO: 1502 - DNA, 4639 bp, Homo sapiens
gagcgcgcacgtcccggagcccatgccgaccgcaggcgccgtatccgcgctcgtctagcagccccggttacgcggttgcacgtcggccccagccctgaggagccggaccgatgtggaaactgctgcccgccgcgggcccggcaggaggagaaccatacagacttttgactggcgttgagtacgttgttggaaggaaaaactgtgccattctgattgaaaatgatcagtcgatcagccgaaatcatgctgtgttaactgctaacttttctgtaaccaacctgagtcaaacagatgaaatccctgtattgacattaaaagataattctaagtatggtacctttgttaatgaggaaaaaatgcagaatggcttttcccgaactttgaagtcgggggatggtattacttttggagtgtttggaagtaaattcagaatagagtatgagcctttggttgcatgctcttcttgtttagatgtctctgggaaaactgctttaaatcaagctatattgcaacttggaggatttactgtaaacaattggacagaagaatgcactcaccttgtcatggtatcagtgaaagttaccattaaaacaatatgtgcactcatttgtggacgtccaattgtaaagccagaatattttactgaattcctgaaagcagttgagtccaagaagcagcctccacaaattgaaagtttttacccacctcttgatgaaccatctattggaagtaaaaatgttgatctgtcaggacggcaggaaagaaaacaaatcttcaaagggaaaacatttatatttttgaatgccaaacagcataagaaattgagttccgcagttgtctttggaggtggggaagctaggttgataacagaagagaatgaagaagaacataatttctttttggctccgggaacgtgtgttgttgatacaggaataacaaactcacagaccttaattcctgactgtcagaagaaatggattcagtcaataatggatatgctccaaaggcaaggtcttagacctattcctgaagcagaaattggattggcggtgattttcatgactacaaagaattactgtgatcctcagggccatcccagtacaggattaaagacaacaactccaggaccaagcctttcacaaggcgtgtcagttgatgaaaaactaatgccaagcgccccagtgaacactacaacatacgtagctgacacagaatcagagcaagcagatacatgggatttgagtgaaaggccaaaagaaatcaaagtctccaaaatggaacaaaaattcagaatgctttcacaagatgcacccactgtaaaggagtcctgcaaaacaagctctaataataatagtatggtatcaaatactttggctaagatgagaatcccaaactatcagctttcaccaactaaattgccaagtataaataaaagtaaagatagggcttctcagcagcagcagaccaactccatcagaaactactttcagccgtctaccaaaaaaagggaaagggatgaagaaaatcaagaaatgtcttcatgcaaatcagcaagaatagaaacgtcttgttctcttttagaacaaacacaacctgctacaccctcattgtggaaaaataaggagcagcatctatctgagaatgagcctgtggacacaaactcagacaataacttatttacagatacagatttaaaatctattgtgaaaaattctgccagtaaatctcatgctgcagaaaagctaagatcaaataaaaaaagggaaatggatgatgtggccatagaagatgaagtattggaacagttattcaaggacacaaaaccagagttagaaattgatgtgaaagttcaaaaacaggaggaagatgtcaatgttagaaaaaggccaaggatggatatagaaacaaatgacactttcagtgatgaagcagtaccagaaagtagcaaaatatctcaagaaaatgaaattgggaagaaacgtgaactcaaggaagactcactatggtcagctaaagaaatatctaacaatgacaaacttcaggatgatagtgagatgcttccaaaaaagctgttattgactgaatttagatcactggtgattaaaaactctacttccagaaatccatctggcataaatgatgattatggtcaactaaaaaatttcaagaaattcaaaaaggtcacatatcctggagcaggaaaacttccacacatcattggaggatcagatctaatagctcatcatgctcgaaagaatacagaactagaagagtggctaaggcaggaaatggaggtacaaaatcaacatgcaaaagaagagtctcttgctgatgatctttttagatacaatccttatttaaaaaggagaagataactgaggattttaaaaagaagccatggaaaaacttcctagtaagcatctacttcaggccaacaaggttatatgaatatatagtgtatagaagcgatttaagttacaatgttttatggcctaaatttattaaataaaatgcacaaaactttgattcttttgtatgtaacaattgtttgttctgttttcaggctttgtcattgcatctttttttcatttttaaatgtgttttgtttattaaatagttaatatagtcacagttcaaaattctaaatgtacgtaaggtaaagactaaagtcacccttccaccattgtcctagctacttggttcccctcagaaaaaaattcatgatactcatttcttatgaatctttccagggatttttgagtcctattcaaattcctatttttaaataatttcctacacaaatgatagcataacatatgcagtgttctacaccttgcttttttacttagtagattaaaaattataggaatatcaatataatgtttttaatattttttcttttccattatgctgtagtcttacctaaactctggtgatccaaacaaaatggcttcagtggtgcagatgtcacctacatgttattctagtactagaaactgaagaccatgtggagacttcatcaaacatgggtttagttttcaccagaatggaaagacctgtacccctttttggtggtcttactgagctgggtgggtgtctgttttgagcttatttagagtcctagttttcctacttataaagtagaaatggtgagattgttttctttttctaccttaaagggagatggtaagaaacaatgaatgtcttttttcaaactttattgacaagtgattttcaagtctgtgttcaaaaatatattcatgtacctgtgatccagcaagaagggagttccagtcaagagtcactacaactgattagttgtttagagaatgagaaatggaacagtgaggaatggaggccatatttccatgacttcccttgtaaacagaagcaacagaagggacaagaggctggcctctacatcactctcaccttccaaatcttgtggaagtgcatctacttgccagaaccaaattaacttacttccaagttctggctgcttgcaggtggaactccagctgcaagggagttagggaaatgaaggtctttttttaaaagcttctcagccttcctagggaacagaaattgggtgagccaatctgcaatttctactacaggcattgagaccagttagattattgaaatattatagagagttatgaacacttaaattatgatagtggtatgacattggatagaacatgggatactttagaagtagaattgacagggcatattagttgatgaaatggagtcatttgagtctcttaatagccatgtatcataattaccaagtgaagctggtggaacatatggtctccattttacagttaaggaatataatggacagattaatattgttctctgtcatgcccacaatccctttctaaggaagactgccctactatagcagtttttatatttgtcaatttatgaatataatgaatgagagttctggtacctcctgtctttacaaatattggtgttgtcagtatttttcctttttaaccattccaatcggtgtgtagtgatgtttcattttggttttaatttgtatatccctgatagctataattgggtcatagaaattctttatacattctagatgcaagtctcttgtcggatatatgtattgagatattacacctagtctgtggcttgactgttttctttatgtcttttgatgaatagaagttttaaattttgacaaggtcaaatttatttttttcttttgtttgatattttttctctccaatttaaccccaagatttcagatattctgctctattatataaactttatatttttatatttgtgatctaccttgaattgatatgtatgttgtgaattatggatcagggttctttttttcccccatacaagtatccagtcattgtaacactgtttattgaaagaattatcctttcctcattaaattaccttgccaattagtaaaaaatcaattaaccataatggtggatctgtttctggactttctgtttggttacactgaaatgtttgtccatccttgcactcactcataccatactgccttgaattactgtagctgcatagatgctccttaagttgggattacattgtaataaacgcaatgtaagttaaaaaaaaaaaaaaaaaa

SEQ ID NO: 1503 - DNA, 4689 bp, Homo sapiens
gagcgcgcacgtcccggagcccatgccgaccgcaggcgccgtatccgcgctcgtctagcagccccggttacgcggttgcacgtcggccccagccctgaggagccggaccgatgtggaaactgctgcccgccgcgggcccggcaggaggagaaccatacagacttttgactggcgttgagtacgttgttggaaggaaaaactgtgccattctgattgaaaatgatcagtcgatcagccgaaatcatgctgtgttaactgctaacttttctgtaaccaacctggtatagaaaaacattttggaaatttctacagaaaaagtaaaattgttactagtcaaacagatgaaatccctgtattgacattaaaagataattctaagtatggtacctttgttaatgaggaaaaaatgcagaatggcttttcccgaactttgaagtcgggggatggtattacttttggagtgtttggaagtaaattcagaatagagtatgagcctttggttgcatgctcttcttgtttagatgtctctgggaaaactgctttaaatcaagctatattgcaacttggaggatttactgtaaacaattggacagaagaatgcactcaccttgtcatggtatcagtgaaagttaccattaaaacaatatgtgcactcatttgtggacgtccaattgtaaagccagaatattttactgaattcctgaaagcagttgagtccaagaagcagcctccacaaattgaaagtttttacccacctcttgatgaaccatctattggaagtaaaaatgttgatctgtcaggacggcaggaaagaaaacaaatcttcaaagggaaaacatttatatttttgaatgccaaacagcataagaaattgagttccgcagttgtctttggaggtggggaagctaggttgataacagaagagaatgaagaagaacataatttctttttggctccgggaacgtgtgttgttgatacaggaataacaaactcacagaccttaattcctgactgtcagaagaaatggattcagtcaataatggatatgctccaaaggcaaggtcttagacctattcctgaagcagaaattggattggcggtgattttcatgactacaaagaattactgtgatcctcagggccatcccagtacaggattaaagacaacaactccaggaccaagcctttcacaaggcgtgtcagttgatgaaaaactaatgccaagcgccccagtgaacactacaacatacgtagctgacacagaatcagagcaagcagatacatgggatttgagtgaaaggccaaaagaaatcaaagtctccaaaatggaacaaaaattcagaatgctttcacaagatgcacccactgtaaaggagtcctgcaaaacaagctctaataataatagtatggtatcaaatactttggctaagatgagaatcccaaactatcagctttcaccaactaaattgccaagtataaataaaagtaaagatagggcttctcagcagcagcagaccaactccatcagaaactactttcagccgtctaccaaaaaaagggaaagggatgaagaaaatcaagaaatgtcttcatgcaaatcagcaagaatagaaacgtcttgttctcttttagaacaaacacaacctgctacaccctcattgtggaaaaataaggagcagcatctatctgagaatgagcctgtggacacaaactcagacaataacttatttacagatacagatttaaaatctattgtgaaaaattctgccagtaaatctcatgctgcagaaaagctaagatcaaataaaaaaagggaaatggatgatgtggccatagaagatgaagtattggaacagttattcaaggacacaaaaccagagttagaaattgatgtgaaagttcaaaaacaggaggaagatgtcaatgttagaaaaaggccaaggatggatatagaaacaaatgacactttcagtgatgaagcagtaccagaaagtagcaaaatatctcaagaaaatgaaattgggaagaaacgtgaactcaaggaagactcactatggtcagctaaagaaatatctaacaatgacaaacttcaggatgatagtgagatgcttccaaaaaagctgttattgactgaatttagatcactggtgattaaaaactctacttccagaaatccatctggcataaatgatgattatggtcaactaaaaaatttcaagaaattcaaaaaggtcacatatcctggagcaggaaaacttccacacatcattggaggatcagatctaatagctcatcatgctcgaaagaatacagaactagaagagtggctaaggcaggaaatggaggtacaaaatcaacatgcaaaagaagagtctcttgctgatgatctttttagatacaatccttatttaaaaaggagaagataactgaggattttaaaaagaagccatggaaaaacttcctagtaagcatctacttcaggccaacaaggttatatgaatatatagtgtatagaagcgatttaagttacaatgttttatggcctaaatttattaaataaaatgcacaaaactttgattcttttgtatgtaacaattgtttgttctgttttcaggctttgtcattgcatctttttttcatttttaaatgtgttttgtttattaaatagttaatatagtcacagttcaaaattctaaatgtacgtaaggtaaagactaaagtcacccttccaccattgtcctagctacttggttcccctcagaaaaaaattcatgatactcatttcttatgaatctttccagggatttttgagtcctattcaaattcctatttttaaataatttcctacacaaatgatagcataacatatgcagtgttctacaccttgcttttttacttagtagattaaaaattataggaatatcaatataatgtttttaatattttttcttttccattatgctgtagtcttacctaaactctggtgatccaaacaaaatggcttcagtggtgcagatgtcacctacatgttattctagtactagaaactgaagaccatgtggagacttcatcaaacatgggtttagttttcaccagaatggaaagacctgtacccctttttggtggtcttactgagctgggtgggtgtctgttttgagcttatttagagtcctagttttcctacttataaagtagaaatggtgagattgttttctttttctaccttaaagggagatggtaagaaacaatgaatgtcttttttcaaactttattgacaagtgattttcaagtctgtgttcaaaaatatattcatgtacctgtgatccagcaagaagggagttccagtcaagagtcactacaactgattagttgtttagagaatgagaaatggaacagtgaggaatggaggccatatttccatgacttcccttgtaaacagaagcaacagaagggacaagaggctggcctctacatcactctcaccttccaaatcttgtggaagtgcatctacttgccagaaccaaattaacttacttccaagttctggctgcttgcaggtggaactccagctgcaagggagttagggaaatgaaggtctttttttaaaagcttctcagccttcctagggaacagaaattgggtgagccaatctgcaatttctactacaggcattgagaccagttagattattgaaatattatagagagttatgaacacttaaattatgatagtggtatgacattggatagaacatgggatactttagaagtagaattgacagggcatattagttgatgaaatggagtcatttgagtctcttaatagccatgtatcataattaccaagtgaagctggtggaacatatggtctccattttacagttaaggaatataatggacagattaatattgttctctgtcatgcccacaatccctttctaaggaagactgccctactatagcagtttttatatttgtcaatttatgaatataatgaatgagagttctggtacctcctgtctttacaaatattggtgttgtcagtatttttcctttttaaccattccaatcggtgtgtagtgatgtttcattttggttttaatttgtatatccctgatagctataattgggtcatagaaattctttatacattctagatgcaagtctcttgtcggatatatgtattgagatattacacctagtctgtggcttgactgttttctttatgtcttttgatgaatagaagttttaaattttgacaaggtcaaatttatttttttcttttgtttgatattttttctctccaatttaaccccaagatttcagatattctgctctattatataaactttatatttttatatttgtgatctaccttgaattgatatgtatgttgtgaattatggatcagggttctttttttcccccatacaagtatccagtcattgtaacactgtttattgaaagaattatcctttcctcattaaattaccttgccaattagtaaaaaatcaattaaccataatggtggatctgtttctggactttctgtttggttacactgaaatgtttgtccatccttgcactcactcataccatactgccttgaattactgtagctgcatagatgctccttaagttgggattacattgtaataaacgcaatgtaagttaaaaaaaaaaaaaaaaaa

SEQ ID NO: 1504 - DNA, 1366 bp, Homo sapiens
gcgtctcgcagcagccgcccggaccgggcatggtgttgggcgccgggcccgcctcgcctgtctcggggagcccagggtaaaggcagcagtaatgctaacgctagcaagtaaactgaagcgtgacgatggtctcaaagggtcccggacggcagccacagcgtccgactcgactcggagggtttctgtgagagacaaattgcttgttaaagaggttgcagaacttgaagctaatttaccttgtacatgtaaagtgcattttcctgatccaaacaagcttcattgttttcagctaacagtaaccccagatgagggttactaccagggtggaaaatttcagtttgaaactgaagttcccgatgcgtacaacatggtgcctcccaaagtgaaatgcctgaccaagatctggcaccccaacatcacagagacaggggaaatatgtctgagtttattgagagaacattcaattgatggcactggctgggctcccacaagaacattaaaggatgtcgtttggggattaaactctttgtttactgatcttttgaattttgatgatccactgaatattgaagctgcagaacatcatttgcgggacaaggaggacttccggaataaagtggatgactacatcaaacgttatgccagatgataaaaggggacgattgcaggcccatggactgtgttacagtttgtctctaacatgaaacagcaagaggtagccccctctcccgtcctcatgctccctctcagtcccctggattgccccagtcctgtgaccatgttgccctgaagaagaccatcttcatgactgctcattgtagatggagaattcaacataaatacagcaagaaaatgtgtttgggcttctgaagagttgtctgcttaccttaacatgtttacttttttgaacttgtactgtataggctgttggtgaaattcttaagaagttgtaatgaactcaaaattgaggccagagcttgctttcccttttcccaaacaaaattggttttctgcacaagcgatgctaatgatgtgttcagtgtaactcgcagattggcaataagatacccgctacaaactgtgattggatgcaaaatctcttagcttctttcacgaatgttggccctgcctagatgttgtgaagcctcccagaatgcatagagtcattcactgtagatctcttattgaaatgcgtattttatttaatgtaagtatattttggaacagatttgtaatttgtacaattcaatgctttaattattttttctattctcatttagtttgtattttcattgtatagagcagacagaaagatgttgggtcaagcaactattgaagagaaatacaaagaaaaaaaaaaaaaaaa

SEQ ID NO: 1505 - DNA, 2406 bp, Homo sapiens
tctctctctgcttctttccttttctctctcatggtagggttatgagtcagttgccaaaaggtggggacatttcctgatgcatttgcaacactgagaagttatcttaagggaggctgggccccattctactcatctggcccagaaagtgaacaccttgggggccactaaggcagccctgctaggggagacgctccaacctgtcttctctctgtctcctggcagctctcttggcctcctagtttctacctaatcatgtccctggtggaggccatcagcctctggaatgaaggggtgctggcagcggacaagaaggactggaagggagccctggatgccttcagtgccgtccaggacccccactcccggatttgcttcaacattggctgcatgtacactatcctgaagaacatgactgaagcagagaaggcctttaccagaagcattaaccgagacaagcacttggcagtggcttacttccaacgagggatgctctactaccagacagagaaatatgatttggctatcaaagaccttaaagaagccttgattcagcttcgagggaaccagctgatagactataagatcctggggctccagttcaagctgtttgcctgtgaggtgttatataacattgctttcatgtatgccaagaaggaggaatggaaaaaagctgaagaacagttagcattggccacgagcatgaagtctgagcccagacattccaaaatcgacaaggcgatggagtgtgtctggaagcagaagctatatgagccagtggtgatccctgtgggcaagctgtttcgaccaaatgagagacaagtggctcagctggccaagaaggattacctaggcaaggcgacggtcgtggcatctgtggtggatcaagacagtttctctgggtttgcccctctgcaaccacaggcagctgagcctccacccagaccgaaaaccccagagatcttcagggctctggaaggggaggctcaccgtgtgctatttgggtttgtgcctgagacaaaagaagagctccaggtcatgccagggaacattgtctttgtcttgaagaagggcaatgataactgggccacggtcatgttcaacgggcagaaggggcttgttccctgcaactaccttgaaccagttgagctgcggatccaccctcagcagcagccccaggaggaaagctctccgcagtccgacatcccagctcctcctagttccaaagcccctggaagaccccagctgtcaccaggccagaaacaaaaagaagagcctaaggaagtgaagctcagtgttcccatgccctacacactcaaggtgcactacaagtacacggtagtcatgaagactcagcccgggctcccctacagccaggtccgggacatggtgtctaagaaactggagctccggctggaacacactaagctgagctatcggcctcgggacagcaatgagctggtgcccctttcagaagacagcatgaaggatgcctggggccaggtgaaaaactactgcctgactctgtggtgtgagaacacagtgggtgaccaaggctttccagatgaacccaaggaaagtgaaaaagctgatgctaataaccagacaacagaacctcagcttaagaaaggcagccaagtggaggcactcttcagttatgaggctacccaaccagaggacctggagtttcaggaaggggatataatcctggtgttatcaaaggtgaatgaagaatggctggaaggggagtgcaaagggaaggtgggcattttccccaaagtttttgttgaagactgcgcaactacagatttggaaagcactcggagagaagtctaggatgtttcacaaactacaaagctgaagaaaatgaagccctattacttgtttgtaagatttagcacccttctgctgtatactgtactgagacattacagtttggaagtgttaactatttattccctgttaaaatttaacctactagacaatgatgtgagtacccaggatgatttcctggggcacagtgggtgaggagatggggacaggtgaatggaggagttaggggagaggaaaagtggatggaagtgtctggaaagggcacgagagagtcttccaggtactgatcctgtttcttgctctgagtgctagctagccagctgtgttcacactgtaaacattcatcaagctgtacatttggtgcacttttctgtgtcataccacaataaaaaaaaacctagcatcttacaaaaacaagacacccaagtccaggcccaaggagtaagtacaaatattcctgtttctgaaccattactgtaattggctcttaaggcttgaagtaaccttataggttactcataaggcatatacaaataaacttgtttgttttcttttttcaaaaaaaaaaaaaaaaaa

SEQ ID NO: 1506 - DNA, 2732 bp, Homo sapiens
ctttcgcctcagtctcgagctctcgctggccttcgggtgtacgtgctccgggatcttcagcacccgcggccgccatcgccgtcgcttggcttcttctggactcatctgcgccacttgtccgcttcacactccgccgccatcatggtgaagctcgcgaaggcaggtaaaaatcaaggtgaccccaagaaaatggctcctcctccaaaggaggtagaagaagatagtgaagatgaggaaatgtcagaagatgaagaagatgatagcagtggagaagaggtcgtcatacctcagaagaaaggcaagaaggctgctgcaacctcagcaaagaaggtggtcgtttccccaacaaaaaaggttgcagttgccacaccagccaagaaagcagctgtcactccaggcaaaaaggcagcagcaacacctgccaagaagacagttacaccagccaaagcagttaccacacctggcaagaagggagccacaccaggcaaagcattggtagcaactcctggtaagaagggtgctgccatcccagccaagggggcaaagaatggcaagaatgccaagaaggaagacagtgatgaagaggaggatgatgacagtgaggaggatgaggaggatgacgaggacgaggatgaggatgaagatgaaattgaaccagcagcgatgaaagcagcagctgctgcccctgcctcagaggatgaggacgatgaggatgacgaagatgatgaggatgacgatgacgatgaggaagatgactctgaagaagaagctatggagactacaccagccaaaggaaagaaagctgcaaaagttgttcctgtgaaagccaagaacgtggctgaggatgaagatgaagaagaggatgatgaggacgaggatgacgacgacgacgaagatgatgaagatgatgatgatgaagatgatgaggaggaggaagaagaggaggaggaagagcctgtcaaagaagcacctggaaaacgaaagaaggaaatggccaaacagaaagcagctcctgaagccaagaaacagaaagtggaaggcacagaaccgactacggctttcaatctctttgttggaaacctaaactttaacaaatctgctcctgaattaaaaactggtatcagcgatgtttttgctaaaaatgatcttgctgttgtggatgtcagaattggtatgactaggaaatttggttatgtggattttgaatctgctgaagacctggagaaagcgttggaactcactggtttgaaagtctttggcaatgaaattaaactagagaaaccaaaaggaaaagacagtaagaaagagcgagatgcgagaacacttttggctaaaaatctcccttacaaagtcactcaggatgaattgaaagaagtgtttgaagatgctgcggagatcagattagtcagcaaggatgggaaaagtaaagggattgcttatattgaatttaagacagaagctgatgcagagaaaacctttgaagaaaagcagggaacagagatcgatgggcgatctatttccctgtactatactggagagaaaggtcaaaatcaagactatagaggtggaaagaatagcacttggagtggtgaatcaaaaactctggttttaagcaacctctcctacagtgcaacagaagaaactcttcaggaagtatttgagaaagcaacttttatcaaagtaccccagaaccaaaatggcaaatctaaagggtatgcatttatagagtttgcttcattcgaagacgctaaagaagctttaaattcctgtaataaaagggaaattgagggcagagcaatcaggctggagttgcaaggacccaggggatcacctaatgccagaagccagccatccaaaactctgtttgtcaaaggcctgtctgaggataccactgaagagacattaaaggagtcatttgacggctccgttcgggcaaggatagttactgaccgggaaactgggtcctccaaagggtttggttttgtagacttcaacagtgaggaggatgccaaagctgccaaggaggccatggaagacggtgaaattgatggaaataaagttaccttggactgggccaaacctaagggtgaaggtggcttcgggggtcgtggtggaggcagaggcggctttggaggacgaggtggtggtagaggaggccgaggaggatttggtggcagaggccggggaggctttggagggcgaggaggcttccgaggaggcagaggaggaggaggtgaccacaagccacaaggaaagaagacgaagtttgaatagcttctgtccctctgctttcccttttccatttgaaagaaaggactctggggtttttactgttacctgatcaatgacagagccttctgaggacattccaagacagtatacagtcctgtggtctccttggaaatccgtctagttaacatttcaagggcaataccgtgttggttttgactggatattcatataaactttttaaagagttgagtgatagagctaacccttatctgtaagttttgaatttatattgtttcatcccatgtacaaaaccattttttcctacaaatagtttgggttttgttgttgtttcttttttttgttttgtttttgttttttttttttttgcgttcgtggggttgtaaaagaaaagaaagcagaatgttttatcatggtttttgcttcagcggctttaggacaaattaaaagtcaactctggtgccagaaaaaaaaaaaaaaaa

SEQ ID NO: 1507 - DNA, 8826 bp, Homo sapiens
gagtctttgaggacacagcctcgctggaggcagtttctggtgccagtgacggggtggcccgtgagctgatgacgaggactggcttttaatccttggtggtgattaagagaaagcttattggggcctgggagcagctccccgccgacccccaccaccatgtcgggatccacacagcctgtggcacagacgtggagggccactgagccccgctacccgccccacagcctttcctacccagtgcagatcgcccggacgcacacggacgtcgggctcctggagtaccagcaccactcccgcgactatgcctcccacctgtcgcccggctccatcatccagccccagcggcggaggccctccctgctgtctgagttccagcccgggaatgaacggtcccaggagctccacctgcggccagagtcccactcatacctgcccgagctggggaagtcagagatggagttcattgaaagcaagcgccctcggctagagctgctgcctgaccccctgctgcgaccgtcacccctgctggccacgggccagcctgcgggatctgaagacctcaccaaggaccgtagcctgacgggcaagctggaaccggtgtctccccccagccccccgcacactgaccctgagctggagctggtgccgccacggctgtccaaggaggagctgatccagaacatggaccgcgtggaccgagagatcaccatggtagagcagcagatctctaagctgaagaagaagcagcaacagctggaggaggaggctgccaagccgcccgagcctgagaagcccgtgtcaccgccgcccatcgagtcgaagcaccgcagcctggtgcagatcatctacgacgagaaccggaagaaggctgaagctgcacatcggattctggaaggcctggggccccaggtggagctgccgctgtacaaccagccctccgacacccggcagtatcatgagaacatcaaaataaaccaggcgatgcggaagaagctaatcttgtacttcaagaggaggaatcacgctcggaaacaatgggagcagaagttctgccagcgctatgaccagctcatggaggcctgggagaagaaggtggagcgcatcgagaacaacccccggcggcgggccaaggagagcaaggtgcgcgagtactacgagaagcagttccctgagatccgcaagcagcgcgagctgcaggagcgcatgcagagcagggtgggccagcggggcagtgggctgtccatgtcggccgcccgcagcgagcacgaggtgtcagagatcatcgatggcctctcagagcaggagaacctggagaagcagatgcgccagctggccgtgatcccgcccatgctgtacgacgctgaccagcagcgcatcaagttcatcaacatgaacgggcttatggccgaccccatgaaggtgtacaaagaccgccaggtcatgaacatgtggagtgagcaggagaaggagaccttccgggagaagttcatgcagcatcccaagaactttggcctgatcgcatcattcctggagaggaagacagtggctgagtgcgtcctctattactacctgactaagaagaatgagaactataagagcctggtgagacggagctatcggcgccgcggcaagagccagcagcagcaacaacagcagcagcagcagcagcagcagcagcagcagcagcccatgccccgcagcagccaggaggagaaagatgagaaggagaaggaaaaggaggcggagaaggaggaggagaagccggaggtggagaacgacaaggaagacctcctcaaggagaagacagacgacacctcaggggaggacaacgacgagaaggaggctgtggcctccaaaggccgcaaaactgccaacagccagggaagacgcaaaggccgcatcacccgctcaatggctaatgaggccaacagcgaggaggccatcaccccccagcagagcgccgagctggcctccatggagctgaatgagagttctcgctggacagaagaagaaatggaaacagccaagaaaggtctcctggaacacggccgcaactggtcggccatcgcccggatggtgggctccaagactgtgtcgcagtgtaagaacttctacttcaactacaagaagaggcagaacctcgatgagatcttgcagcagcacaagctgaagatggagaaggagaggaacgcgcggaggaagaagaagaaagcgccggcggcggccagcgaggaggctgcattcccgcccgtggtggaggatgaggagatggaggcgtcgggcgtgagcggaaatgaggaggagatggtggaggaggctgaagccttacatgcctctgggaatgaggtgcccagaggggaatgcagtggcccagccactgtcaacaacagctcagacaccgagagcatcccctctcctcacactgaggccgccaaggacacagggcagaatgggcccaagcccccagccaccctgggcgccgacgggccacccccagggccacccaccccaccaccggaggacatcccggcccccactgagcccaccccggcctctgaagccaccggagcccctacgcccccaccagcacccccatcgccctctgcacctcctcctgtggtccccaaggaggagaaggaggaggagaccgcagcagcgcccccagtggaggagggggaggagcagaagccccccgcggctgaggagctggcagtggacacagggaaggccgaggagcccgtcaagagcgagtgcacggaggaagccgaggaggggccggccaagggcaaggacgcggaggccgctgaggccacggccgagggggcgctcaaggcagagaagaaggagggcgggagcggcagggccaccacagccaagagctcgggcgccccccaggacagcgactccagtgctacctgcagtgcagacgaggtggatgaggccgagggcggcgacaagaaccggctgctgtccccaaggcccagcctcctcaccccgactggcgacccccgggccaatgcctcaccccagaagccactggacctgaagcagctgaagcagcgagcggctgccatcccccccatcgtcaccaaagtccatgagcccccccgggaggacgcagctcccaccaagccagctcccccagccccaccgccaccgcaaaacctgcagccggagagcgacgcccctcagcagcctggcagcagcccccggggcaagagcaggagcccggcaccccccgccgacaaggaggcagagaagcctgtgttcttcccagccttcgcagccgaggcccagaagctgcctggggaccccccttgctggacttccggcctgcccttccccgtgcccccccgtgaggtgatcaaggcctccccgcatgccccggacccctcagccttctcctacgctccacctggtcacccactgcccctgggcctccatgacactgcccggcccgtcctgccgcgcccacccaccatctccaacccgcctcccctcatctcctctgccaagcaccccagcgtcctcgagaggcaaataggtgccatctcccaaggaatgtcggtccagctccacgtcccgtactcagagcatgccaaggccccggtgggccctgtcaccatggggctgcccctgcccatggaccccaaaaagctggcacccttcagcggagtgaagcaggagcagctgtccccacggggccaggctgggccaccggagagcctgggggtgcccacagcccaggaggcgtccgtgctgagagggacagctctgggctcagttccgggcggaagcatcaccaaaggcattcccagcacacgggtgccctcggacagcgccatcacataccgcggctccatcacccacggcacgccagctgacgtcctgtacaagggcaccatcaccaggatcatcggcgaggacagcccgagtcgcttggaccgcggccgggaggacagcctgcccaagggccacgtcatctacgaaggcaagaagggccacgtcttgtcctatgagggtggcatgtctgtgacccagtgctccaaggaggacggcagaagcagctcaggacccccccatgagacggccgcccccaagcgcacctatgacatgatggagggccgcgtgggcagagccatctcctcagccagcatcgaaggtctcatgggccgtgccatcccgccggagcgacacagcccccaccacctcaaagagcagcaccacatccgcgggtccatcacacaagggatccctcggtcctacgtggaggcacaggaggactacctgcgtcgggaggccaagctcctaaagcgggagggcacgcctccgcccccaccgccctcacgggacctgaccgaggcctacaagacgcaggccctgggccccctgaagctgaagccggcccatgagggcctggtggccacggtgaaggaggcgggccgctccatccatgagatcccgcgcgaggagctgcggcacacgcccgagctgcccctggccccgcggccgctcaaggagggctccatcacgcagggcaccccgctcaagtacgacaccggcgcgtccaccactggctccaaaaagcacgacgtacgctccctcatcggcagccccggccggacgttcccacccgtgcacccgctggatgtgatggccgacgcccgggcactggaacgtgcctgctacgaggagagcctgaagagccggccagggaccgccagcagctcggggggctccattgcgcgcggcgccccggtcattgtgcctgagctgggtaagccgcggcagagccccctgacctatgaggaccacggggcaccctttgccggccacctcccacgaggttcgcccgtgaccacgcgggagcccacgccgcgcctgcaggagggcagcctttcgtccagcaaggcatcccaggaccgaaagctgacgtcgacgcctcgtgagatcgccaagtccccgcacagcaccgtgcccgagcaccacccacaccccatctcgccctatgagcacctgcttcggggcgtgagtggcgtggacctgtatcgcagccacatccccctggccttcgaccccacctccataccccgcggcatccctctggacgcagccgctgcctactacctgccccgacacctggcccccaaccccacctacccgcacctgtacccaccctacctcatccgcggctaccccgacacggcggcgctggagaaccggcagaccatcatcaatgactacatcacctcgcagcagatgcaccacaacgcggccaccgccatggcccagcgagctgatatgctgaggggcctctcgccccgcgagtcctcgctggcactcaactacgctgcgggtccccgaggcatcatcgacctgtcccaagtgccacacctgcctgtgctcgtgcccccgacaccaggcaccccagccaccgccatggaccgccttgcctacctccccaccgcgccccagcccttcagcagccgccacagcagctccccactctccccaggaggtccaacacacttgacaaaaccaaccaccacgtcctcgtccgagcgggagcgagaccgggatcgagagcgggaccgggatcgggagcgggaaaagtccatcctcacgtccaccacgacggtggagcacgcacccatctggagacctggtacagagcagagcagcggcagcagcggcagcagcggcgggggtgggggcagcagcagccgccccgcctcccactcccatgcccaccagcactcgcccatctcccctcggacccaggatgccctccagcagagacccagtgtgcttcacaacacaggcatgaagggtatcatcaccgctgtggagcccagcacgcccacggtcctgaggtccacctccacctcctcacccgttcgcccggctgccacattcccacctgccacccactgcccactgggcggcaccctcgatggggtctaccctaccctcatggagcccgtcttgctgcccaaggaggccccccgggtcgcccggccagagcggccccgagcagacaccggccatgccttcctcgccaagcccccagcccgctccgggctggagcccgcctcctcccccagcaagggctcggagccccggcccctagtgcctcctgtctctggccacgccaccatcgcccgcacccctgcgaagaacctcgcacctcaccacgccagcccggacccgccggcgccacctgcctcggcctcggacccgcaccgggaaaagactcaaagtaaacccttttccatccaggaactggaactccgttctctgggttaccacggcagcagctacagccccgaaggggtggagcccgtcagccctgtgagctcacccagtctgacccacgacaaggggctccccaagcacctggaagagctcgacaagagccacctggagggggagctgcggcccaagcagccaggccccgtgaagcttggcggggaggccgcccacctcccacacctgcggccgctgcctgagagccagccctcgtccagcccgctgctccagaccgccccaggggtcaaaggtcaccagcgggtggtcaccctggcccagcacatcagtgaggtcatcacacaggactacacccggcaccacccacagcagctcagcgcacccctgcccgcccccctctactccttccctggggccagctgccccgtcctggacctccgccgcccacccagtgacctctacctcccgcccccggaccatggtgccccggcccgtggctccccccacagcgaagggggcaagaggtctccagagccaaacaagacgtcggtcttgggtggtggtgaggacggtattgaacctgtgtccccaccggagggcatgacggagccagggcactcccggagtgctgtgtacccgctgctgtaccgggatggggaacagacggagcccagcaggatgggctccaagtctccaggcaacaccagccagccgccagccttcttcagcaagctgaccgagagcaactccgccatggtcaagtccaagaagcaagagatcaacaagaagctgaacacccacaaccggaatgagcctgaatacaatatcagccagcctgggacggagatcttcaatatgcccgccatcaccggaacaggccttatgacctatagaagccaggcggtgcaggaacatgccagcaccaacatggggctggaggccataattagaaaggcactcatgggtaaatatgaccagtgggaagagtccccgccgctcagcgccaatgcttttaaccctctgaatgccagtgccagcctgcccgctgctatgcccataaccgctgctgacggacggagtgaccacacactcacctcgccaggtggcggcgggaaggccaaggtctctggcagacccagcagccgaaaagccaagtccccggccccgggcctggcatctggggaccggccaccctctgtctcctcagtgcactcggagggagactgcaaccgccggacgccgctcaccaaccgcgtgtgggaggacaggccctcgtccgcaggttccacgccattcccctacaaccccctgatcatgcggctgcaggcgggtgtcatggcttccccacccccaccgggcctccccgcgggcagcgggcccctcgctggcccccaccacgcctgggacgaggagcccaagccactgctctgctcgcagtacgagacactctccgacagcgagtgactcagaacagggcgggggggggggcggtgtcaggtcccagcgagccacaggaacggccctgcaggagcagggcggctgccgactcccccaaccaaggaaggagcccctgagtccgcctgcgcctccatccatctgtccgtccagagccggcatccttgcctgcggctgccgactcccccaaccaaggaaggagcccctgagtccgcctgcgcctccatccatctgtccgtccagagccggcatccttgcctgtctaaagccttaactaagactcccgccccgggctggccctgtgcagaccttactcaggggatgtttacctggtgctcgggaagggaggggaaggggccggggagggggcacggcaggcgtgtggcagccacacgcaggcggccagggcggccagggacccaaagcaggatgaccacgcacctccacgccactgcctcccccgaatgcatttggaaccaaagtctaaactgagctcgcagcccccgcgccctccctccgcctcccatcccgcttagcgctctggacagatggacgcaggccctgtccagcccccagtgcgctcgttccggtccccacagactgccccagccaacgagattgctggaaaccaagtcaggccaggtgggcggacaaaagggccaggtgcggcctggggggaacggatgctccgaggactggactgtttttttcacacatcgttgccgcagcggtgggaaggaaaggcagatgtaaatgatgtgttggtttacagggtatatttttgataccttcaatgaattaattcagatgttttacgcaaggaaggacttacccagtattactgctgctgtgcttttgatctctgcttaccgttcaagaggcgtgtgcaggccgacagtcggtgaccccatcactcgcaggaccaagggggcggggactgctggctcacgccccgctgtgtcctccctccctcccttccttgggcagaatgaattcgatgcgtattctgtggccgccatctgcgcagggtggtggtattctgtcatttacacacgtcgttctaattaaaaagcgaattatactccaaaaaaaaaaaaaaaaaaa

SEQ ID NO: 1508 - DNA, 2150 bp, Homo sapiens; identical to SEQ ID NO: 1183

SEQ ID NO: 1509 - DNA, 1997 bp, Homo sapiens
agccgcctctgccgccgccgccgcgttggcctcgccgcccctgctcggacaccatgccacaaggagagtgatctcttcccctgttttcacaatggaggactccggaaagactttcagctccgaggaggaagaagctaactattggaaagatctggcgatgacctacaaacagagggcagaaaatacgcaagaggaactccgagaattccaggagggaagccgagaatatgaagctgaattggagacgcagctgcaacaaattgaaaccaggaacagagacctcctgtccgaaaataaccgccttcgcatggagctggaaaccatcaaggagaagtttgaagtgcagcactctgaaggctaccggcagatctcagccttggaggatgacctcgcgcagaccaaagccattaaagaccaattgcagaaatacatcagagagctggagcaagcaaatgacgacctggaaagagccaagcgcgccacgatcatgtctctcgaagactttgagcagcgcttgaatcaggccatcgaaagaaatgccttcctggaaagtgaacttgatgaaaaagagaatctcctggaatctgttcagagactgaaggatgaagccagagatttgcggcaggaactggccgtgcagcagaagcaggagaaacccaggacccccatgcccagctcagtggaagctgagaggacagacacagctgtgcaggccacgggctccgtgccgtccacgcccattgctcaccgaggacccagctcaagtttaaacacacctgggagcttcagacgtggcctggacgactccaccggggggacccccctcacacctgcggcccggatatcagccctcaacattgtgggagacctactgcggaaagtcggggcactggagtccaaactcgcttcctgccggaacctcgtgtacgatcagtccccaaaccgaacaggtggcccagcctctgggcggagcagcaagaacagagatggcggggagagacggccaagcagcaccagcgtgcctttgggtgataaggggttggacacgagttgccgctggttgtccaaatcaacaaccaggtcgtccagctcctgctgaagcctgttcttggtcttttccagtttatcatacgcggccgccttctcctcgtactgctgggtgaggttctcgatctccttctggaacctcttcttcccctcttccagagcttccacggtgctggcaaagtcctgcagcttcttcttcgagtcggagagctacaaggacagcgtccagggtagggtgagagggggaccatgaatggcccctgtccctggccccacagactctgagaagcgaagaccatgtctcctcgttggagaaacccaatagcaggggaagctggggggtcaagcaccatcgcaccaacactccaccgcgatctgcctgcgggggatctcagcgcagagaagttgagaggacccatgaaggaagcaaggacacggggcaggcacctggatgttgagagtggagatgtggcgctccaggttctgcttggcctccatctcctcgtccagctggtcttgcaggctgttccgctcctcctccagctggcgcagcttcgtagacacgttgagcttctgccgggtttcttcttgaagcagctcctgcaaaagggatgcaaagaggtcccagggacctgccccgaggaaggccaccccccaggtcccctggatgatgtggcaggacactcacctgggtgtcctggagctgggaactgagggacgccacgtccttggccagcttaatggccttcccctcggcctcgttaagcatccctgtgacgctctcaacttcattctaagggtgccaagagactggttagtcaaagcctctagaaggggatcctcgttgaaaggagccctttttactcaaaacacatgggctagtacttgaggtgttcactgattgagaaaatacccgtgaggtatgggactctgaaaaaaaaaaaaaaaaa

SEQ ID NO: 1510 - DNA, 2533 bp, Homo sapiens
gtagtccccgcctcttccccaggggccgcgtcggagcctcggcggcggcggcggtgcttacagcctgagaagagcgtctcgcccgggagcggcggcggccatcgagacccacccaaggcgcgtccccctcggcctcccagcgctcccaagccgcagcggccgcgccccttcagctagctcgctcgctcgctctgcttccctgctgccggctgcgccatggcgttggcgttggcggcgctggcggcggtcgagccggcctgcggcagccggtaccagcagttgcagaatgaagaagagtctggagaacctgaacaggctgcaggtgatgctcctccaccttacagcagcatttctgcagagagcgcagcatattttgactacaaggatgagtctgggtttccaaagcccccatcttacaatgtagctacaacactgcccagttatgatgaagcggagaggaccaaggctgaagctactatccctttggttcctgggagagatgaggattttgtgggtcgggatgattttgatgatgctgaccagctgaggataggaaatgatgggattttcatgttaacttttttcatggcattcctctttaactggattgggtttttcctgtctttttgcctgaccacttcagctgcaggaaggtatggggccatttcaggatttggtctctctctaattaaatggatcctgattgtcaggttttccacctatttccctggatattttgatggtcagtactggctctggtgggtgttccttgttttaggctttctcctgtttctcagaggatttatcaattatgcaaaagttcggaagatgccagaaactttctcaaatctccccaggaccagagttctctttatttattaaagatgttttctggcaaaggccttcctgcatttatgaattctctctcaagaagcaagagaacacctgcaggaagtgaatcaagatgcagaacacagaggaataatcacctgctttaaaaaaataaagtactgttgaaaagatcatttctctctatttgttcctaggtgtaaaattttaatagttaatgcagaattctgtaatcattgaatcattagtggttaatgtttgaaaaagctcttgcaatcaagtctgtgatgtattaataatgccttatatattgtttgtagtcattttaagtagcatgagccatgtccctgtagtcggtagggggcagtcttgctttattcatcctccatctcaaaatgaacttggaattaaatattgtaagatatgtataatgctggccattttaaaggggttttctcaaaagttaaacttttgctatgactgtgtttttgcacataatccatatttgctgttcaagttaatctagaaatttattcaattctgtatgaacacctggaagcaaaatcatagtgcaaaaatacatttaaggtgtggtcaaaaataagtctttaattggtaaataataagcattaattttttatagcctgtattcacaattctgcggtaccttattgtacctaagggattctaaaggtgttgtcactgtataaaacagaaagcactaggatacaaatgaagcttaattactaaaatgtaattcttgacactctttctataattagcgttcttcacccccacccccacccccaccccccttattttccttttgtctcctggtgattaggccaaagtctgggagtaaggagaggattaggtacttaggagcaaagaaagaagtagcttggaacttttgagatgatccctaacatactgtactacttgcttttacaatgtgttagcagaaaccagtgggttataatgtagaatgatgtgctttctgcccaagtggtaattcatcttggtttgctatgttaaaactgtaaatacaacagaacattaataaatatctcttgtgtagcaccttttactgtagattagtgcttaatttcttggcttgcatttgttgattgctaaggcaattttttctaatcttagggaatcattcagtagatgcgattaaaaaactaatgttgggtcaatttttttcttcattttcagcacaagaagtcctcttatatcctactaaatacattcctaaaaatgtatttgaacattggttctgtaaaagataatggactaaaaaagtagagaggagttgtagagatcttaaatcattctggaattcctaattatgcttcaatttttagacataattttagataatttatttccagtgttttctgcatgttctcatttgttctttttctcagttgaatgcaccaactggtttgagtcctgtgagcattcagtcagttgaaattaaagattcctcatttctcctgatttctattcttgtctcaatcttaaatttagagaccagttgtttttatgatatcagccatttgatttttttcattttctatttaagaaatatgaagaaaaaatacaccaagatggtcaaattactacacaaatcagcaccagcacagtctgatagctgcaaatgtccattcatctgctgtgt

SEQ ID NO: 1511 - DNA, 2052 bp, Homo sapiens
gggtctgcgggaagcccgagccggggcgggcccgagtcaaaggcaagtgaaggtggaagcggccgcggcggcagcaggccaccatggcggagctgcaggaggtgcagatcacagaggagaagccactgttgccaggacagacgcctgaggcggccaaggaggctgagttagctgcccgaatcctcctggaccagggacagactcactctgtggagacaccatacggctctgtcactttcactgtctatggcacccccaaacccaaacgcccagcgatccttacctaccacgatgtgggactcaactataaatcttgcttccagccactgtttcagttcgaggacatgcaggaaatcattcagaactttgtgcgggttcatgtggatgcccctggaatggaagagggagcccctgtgttccctttgggatatcagtacccatctctggaccagcttgcagacatgatcccttgcgtcctgcagtacctaaatttctctacaataattggagttggtgttggagctggagcctacatcctggcgagatatgctcttaaccacccggacactgttgaaggtcttgtcctcatcaacattgatcccaatgccaagggttggatggattgggcagcccacaagctaacaggcctcacctcttccattccggagatgatccttggacatcttttcagccaggaagagctctctggaaattctgagttgatacaaaagtacagaaatatcattacacatgcacccaacctggataacattgaattgtactggaacagctacaacaaccgccgagacctgaactttgagcgtggaggtgatatcaccctcaggtgtcctgtgatgctggtggtaggagaccaagcacctcatgaagatgcagtggtggaatgtaactcaaaactggaccccacccagacctcgttcctcaagatggctgactccggaggtcagccccagctgactcagccaggcaagctgaccgaggccttcaagtacttcctgcaaggcatgggctacatggcctcatcctgcatgactcgcctgtcccggtctcgtacagcctctctgaccagtgcagcatccgttgatggcaaccggtcccgctctcgcaccctgtcccagagcagcgagtctggaactctttcttcggggcccccggggcacaccatggaggtctcctgttgaatggcccttgttgccctagagtgggacccagccctcacctcccccagagctaacctgggaggtgctgaaggggcattgggccaccgtaagcaagggaaaaagggcagatcatgcggggagatgaccttgatctttgattgctaccctaaccttgacctttaacccgtgattccccccagctcctggaagagatgtcctaatatctcttagggacccagacccctaaattctcctcctcccccattttgatgttaaggtggagagggcatatgcatcctctgtcctgatctaggtgtctatagctgaggggtaagaggttgttgtagttgtcctggtgcctccatcagactctccctacttgtcccatatttgcaaggggaggggatttggggctggggctccattcaccaaagctgaggtggcttctcattaaccctttaggactctgaagggtatggacctacgtgaatgtgtgtcagggggagacttgctggtgggttagtggtcctcaggatgtgatagaaacatccagtgtaaaaaggaagttggaatgggagttggcgggcagtgaacgagtgtggggaaggattggtgctggggcaacaggaaggggcctggggccgtttggctgcactaactttggtagctcagtgtgcatctagagtgggactggggagggagctaagcttgggctgggctgcttggggcttggcatagggtggaaagggctaccctggggctctgaccacactgtagtatgtgtggagggtgccctcccgtctcccacaacttctgctataacaataaactgtagaggaatctgagtaccgttaaaaaaaaaaaaaaaaaaaaa

SEQ ID NO: 1512 - DNA, 2010 bp, Homo sapiens
gggtctgcgggaagcccgagccggggcgggcccgagtcaaaggcaagtgaaggtggaagcggccgcggcggcagcaggccaccatggcggagctgcaggaggtgcagatcacagaggagaagccactgttgccaggacagacgcctgaggcggccaagactcactctgtggagacaccatacggctctgtcactttcactgtctatggcacccccaaacccaaacgcccagcgatccttacctaccacgatgtgggactcaactataaatcttgcttccagccactgtttcagttcgaggacatgcaggaaatcattcagaactttgtgcgggttcatgtggatgcccctggaatggaagagggagcccctgtgttccctttgggatatcagtacccatctctggaccagcttgcagacatgatcccttgcgtcctgcagtacctaaatttctctacaataattggagttggtgttggagctggagcctacatcctggcgagatatgctcttaaccacccggacactgttgaaggtcttgtcctcatcaacattgatcccaatgccaagggttggatggattgggcagcccacaagctaacaggcctcacctcttccattccggagatgatccttggacatcttttcagccaggaagagctctctggaaattctgagttgatacaaaagtacagaaatatcattacacatgcacccaacctggataacattgaattgtactggaacagctacaacaaccgccgagacctgaactttgagcgtggaggtgatatcaccctcaggtgtcctgtgatgctggtggtaggagaccaagcacctcatgaagatgcagtggtggaatgtaactcaaaactggaccccacccagacctcgttcctcaagatggctgactccggaggtcagccccagctgactcagccaggcaagctgaccgaggccttcaagtacttcctgcaaggcatgggctacatggcctcatcctgcatgactcgcctgtcccggtctcgtacagcctctctgaccagtgcagcatccgttgatggcaaccggtcccgctctcgcaccctgtcccagagcagcgagtctggaactctttcttcggggcccccggggcacaccatggaggtctcctgttgaatggcccttgttgccctagagtgggacccagccctcacctcccccagagctaacctgggaggtgctgaaggggcattgggccaccgtaagcaagggaaaaagggcagatcatgcggggagatgaccttgatctttgattgctaccctaaccttgacctttaacccgtgattccccccagctcctggaagagatgtcctaatatctcttagggacccagacccctaaattctcctcctcccccattttgatgttaaggtggagagggcatatgcatcctctgtcctgatctaggtgtctatagctgaggggtaagaggttgttgtagttgtcctggtgcctccatcagactctccctacttgtcccatatttgcaaggggaggggatttggggctggggctccattcaccaaagctgaggtggcttctcattaaccctttaggactctgaagggtatggacctacgtgaatgtgtgtcagggggagacttgctggtgggttagtggtcctcaggatgtgatagaaacatccagtgtaaaaaggaagttggaatgggagttggcgggcagtgaacgagtgtggggaaggattggtgctggggcaacaggaaggggcctggggccgtttggctgcactaactttggtagctcagtgtgcatctagagtgggactggggagggagctaagcttgggctgggctgcttggggcttggcatagggtggaaagggctaccctggggctctgaccacactgtagtatgtgtggagggtgccctcccgtctcccacaacttctgctataacaataaactgtagaggaatctgagtaccgttaaaaaaaaaaaaaaaaaaaaa

SEQ ID NO: 1513 - DNA, 359 bp, Homo sapiens
gccgctgtcgccgccgcggagacaaagatggctgcgagagtcggcgccttcctcaagaatgcctgggacaaggagccagtgctggtcgtgtccttcgtcgtcgggggcctcgctgtaattctgcccccattgagcccctacttcaagtactccgtcatgatcaacaaggccacgccctacaactacccagtgcccgtccgtgatgatgggaacatgcccgacgtgcccagccacccccaggaccctcagggccccagcctggagtggctgaagaaactgtgagcacctccactgacagaggcggcccctcccacggctcccaataaaaatgtgaaaaccaaaaaaaaaaaaaaaaaaaa

SEQ ID NO: 1514 - DNA, 823 bp, Homo sapiens
gggtccttcaggtaggaggtcctgggtgactttggaagtccgtagtgtctcattgcagataatttttagcttagggcctggtggctaggtcggttctctcctttccagtcggagacctctgccgcaaacatgctccgccagatcatcggtcaggccaagaagcatccgagcttgatccccctctttgtatttattggaactggagctactggagcaacactgtatctcttgcgtctggcattgttcaatccagatgtttgttgggacagaaataacccagagccctggaacaaactgggtcccaatgatcaatacaagttctactcagtgaatgtggattacagcaagctgaagaaggaacgtccagatttctaaatgaaatgtttcactataacgctgctttagaatgaaggtcttccagaagccacatccgcacaattttccacttaaccaggaaatatttctcctctaaatgcatgaaatcatgttggagatctctattgtaatctctattggagattacaatgattaaatcaataaataactgaaacttgatatgtgtcacttttttatgctgaaagtatgctctgaactttagagtataggaaattaactattagaatttaaagaatttcttgaatttctgtagtttgaaaatacgactttaagctgctttagtaaaacacttccattttgtgtatagactgttggtaacttcactagagcatacataacaactggaactggaaattatacaaaagtaaattgggaaggatactccagcatctgacactggcaaaatggaaacctttgagtttctctt

SEQ ID NO: 1515 - DNA, 540 bp, Homo sapiens
gtccgcgtcgctagctagtcgttctgaagcggcggccagagaagagtcaagggcacgagcatcgggtagccatgcctttcttggacatccagaaaaggttcggccttaacatagatcgatggttgacaatccagagtggtgaacagccctacaagatggctggtcgatgccatgcttttgaaaaagaatggatagaatgtgcacatggaatcggttatactcgggcagagaaagagtgcaagatagaatatgatgatttcgtagagtgtttgcttcggcagaaaacgatgagacgtgcaggtaccatcaggaagcagcgggataagctgataaaggaaggaaagtacacccctccacctcaccacattggcaagggggagcctcggccctgaacagagcagctgctgatgtctggaggctgattttcctgttctctgttctccactggaaaggttgtttacgacaaacctccttgtcaaagtgtgtaaaaataaaggattgctccatcctaaaaaaaaaaaaaaaaaaaaaaaaaaaaaa

SEQ ID NO: 1516 - DNA, 2374 bp, Homo sapiens
gggatgtgtccggggaggcgcgggccggggtcgcgcacctcccggagccttgtggggtgtgctgcctccgaaaagtttgcctcgtctccacaagtctgtctccttttttgtcaacctcaagtacttttcttttggcaggtacttggatgcattttacaggcgcagtcatgcaggaaaacctcagatttgcttcatcaggagatgatattaaaatatgggatgcttcatctatgacattggtggataaattcaacccacacacatcaccacatggaatcagctcaatatgttggagcagcaataataactttttagtaacagcatcttccagtggcgacaaaatagttgtctcaagttgcaaatgtaaacctgttccacttttagagcttgctgaagggcaaaagcagacatgtgtcaatttaaattctacatctatgtatttggtaagcggaggcctaaataacactgttaatatttgggatttaaaatcaaaaagagttcatcgatctcttaaggatcataaagatcaagtaacttgtgtaacatacaattggaatgattgctacattgcttctggatctcttagtggtgaaattattttacacagtgtaaccactaatttatctagtactccttttggccatggtagtaaccagtctgttcggcacttgaagtactccttgtttaagaaatcactactgggcagtgtttcggataatggaatagtaactctctgggatgtaaatagtcagagtccataccataactttgacagtgtacacaaagctccagcgtcaggcatctgtttttctcctgtcaatgaattgctctttgtaaccataggcttggataaaagaatcatcctctatgacacttcaagtaagaagctagtgaaaactttagtggctgacactcctctaactgcggtagatttcatgcctgatggagccactttggctattggatcttcccgggggaaaatatatcaatatgatttaagaatgttgaaatcaccagttaagaccatcagtgctcacaagacatctgtgcagtgtatagcatttcagtactccactgttcttactaagtcaagtttaaataaaggctgttcaaataagcccacaacagtgaacaaacgaagtgttaatgtgaatgctgctagtggaggagttcagaattccggaattgtcagagaagcacctgccacgtccattgccacagttctaccacaacctatgacatcagctatggggaaaggaacagttgctgttcaagaaaaagcaggtttgcctcgaagcataaacacagacactttatctaaggaaacagacagtggaaaaaatcaggatttctccagctttgatgatactgggaaaagtagtttaggtgacatgttctcacctatcagagatgatgctgtagttaacaagggaagtgatgagtccataggcaaaggagatggctttgactttctaccgcagttgaactcagtgtttcctccaagaaaaaatccagtaacttcaagtacttcagtattgcattctagtcctcttaatgtttttatgggatctccagggaaagaggaaaatgaaaaccgtgatctaacagctgagtctaagaaaatatatatgggaaaacaggaatctaaagactccttcaaacagttagcaaagttggtcacatctggtgctgaaagtggaaatctaaatacctctccatcatctaaccaaacaagaaattctgagaaatttgaaaagccagagaatgaaattgaagcccagttgatatgtgaacccccaatcaatggatcctcaactccaaatccaaagatagcatcttctgtcactgctggagttgccagttcactctcagaaaaaatagccgacagcattggaaataaccggcaaaatgcaccattgacttccattcaaattcgttttattcagaacatgatacaggaaacgttggatgactttagagaagcatgccatagggacattgtgaatttgcaagtggagatgattaaacagtttcatatgcaactgaatgaaatgcattctttgctggaaagatactcagtgaatgaaggtttagtggctgaaattgaaagactacgagaagaaaacaaaagattacgggcccacttttgaaatttcagtgaataccttaatgttctgtaatttgggaagtttctggcaacacagaactacatagaatcagtattgttttcatggcctccagggaaaaaatgtttttcaagtaagagtaaaagggtgatgggattttataccaacaactgtttcatcttaaaaatatgtatatttttatattaaaaattgtacagtatgtcatctacccaaaaaaaaaaaaaaaa

SEQ ID NO: 1517 - DNA, 3695 bp, Homo sapiens
gccccgtcccggcctcgcgcacctgctcaggccatgatgagcttcggcggcgcggacgcgctgctgggcgccccgttcgcgccgctgcatggcggcggcagcctccactacgcgctagcccgaaagggtggcgcaggcgggacgcgctccgccgctggctcctccagcggcttccactcgtggacacggacgtccgtgagctccgtgtccgcctcgcccagccgcttccgtggcgcaggcgccgcctcaagcaccgactcgctggacacgctgagcaacgggccggagggctgcatggtggcggtggccacctcacgcagtgagaaggagcagctgcaggcgctgaacgaccgcttcgccgggtacatcgacaaggtgcggcagctggaggcgcacaaccgcagcctggagggcgaggctgcggcgctgcggcagcagcaggcgggccgctccgctatgggcgagctgtacgagcgcgaggtccgcgagatgcgcggcgcggtgctgcgcctgggcgcggcgcgcggtcagctacgcctggagcaggagcacctgctcgaggacatcgcgcacgtgcgccagcgcctagacgacgaggcccggcagcgagaggaggccgaggcggcggcccgcgcgctggcgcgcttcgcgcaggaggccgaggcggcgcgcgtggacctgcagaagaaggcgcaggcgctgcaggaggagtgcggctacctgcggcgccaccaccaggaagaggtgggcgagctgctcggccagatccagggctccggcgccgcgcaggcgcagatgcaggccgagacgcgcgacgccctgaagtgcgacgtgacgtcggcgctgcgcgagattcgcgcgcagcttgaaggccacgcggtgcagagcacgctgcagtccgaggagtggttccgagtgaggctggaccgactgtcggaggcagccaaggtgaacacagacgctatgcgctcagcgcaggaggagataactgagtaccggcgtcagctgcaggccaggaccacagagctggaggcactgaaaagcaccaaggactcactggagaggcagcgctctgagctggaggaccgtcatcaggccgacattgcctcctaccaggaagccattcagcagctggacgctgagctgaggaacaccaagtgggagatggccgcccagctgcgagaataccaggacctgctcaatgtcaagatggctctggatatagagatagccgcttacagaaaactcctggaaggtgaagagtgtcggattggctttggcccaattcctttctcgcttccagaaggactccccaaaattccctctgtgtccactcacataaaggtgaaaagcgaagagaagatcaaagtggtggagaagtctgagaaagaaactgtgattgtggaggaacagacagaggagacccaagtgactgaagaagtgactgaagaagaggagaaagaggccaaagaggaggagggcaaggaggaagaagggggtgaagaagaggaggcagaagggggagaagaagaaacaaagtctcccccagcagaagaggctgcatccccagagaaggaagccaagtcaccagtaaaggaagaggcaaagtcaccggctgaggccaagtccccagagaaggaggaagcaaaatccccagccgaagtcaagtcccctgagaaggccaagtctccagcaaaggaagaggcaaagtcaccgcctgaggccaagtccccagagaaggaggaagcaaaatctccagctgaggtcaagtcccccgagaaggccaagtccccagcaaaggaagaggcaaagtcaccggctgaggccaagtctccagagaaggccaagtccccagtgaaggaagaagcaaagtcaccggctgaggccaagtccccagtgaaggaagaagcaaaatctccagctgaggtcaagtccccggaaaaggccaagtctccaacgaaggaggaagcaaagtcccctgagaaggccaagtccccagagaaggaagaggccaagtcccctgagaaggccaagtccccagtgaaggcagaagcaaagtcccctgagaaggccaagtccccagtgaaggcagaagcaaagtcccctgagaaggccaagtccccagtgaaggaagaagcaaagtcccctgagaaggccaagtccccagtgaaggaagaagcaaagtcccctgagaaggccaagtccccagtgaaggaagaagcaaagacccccgagaaggccaagtccccagtgaaggaagaagccaagtccccagagaaggccaagtccccagagaaggccaagactcttgatgtgaagtctccagaagccaagactccagcgaaggaggaagcaaggtcccctgcagacaaattccctgaaaaggccaaaagccctgtcaaggaggaggtcaagtccccagagaaggcgaaatctcccctgaaggaggatgccaaggcccctgagaaggagatcccaaaaaaggaagaggtgaagtccccagtgaaggaggaggagaagccccaggaggtgaaagtcaaagagcccccaaagaaggcagaggaagagaaagcccctgccacaccaaaaacagaggagaagaaggacagcaagaaagaggaggcacccaagaaggaggctccaaagcccaaggtggaggagaagaaggaacctgctgtcgaaaagcccaaagaatccaaagttgaagccaagaaggaagaggctgaagataagaaaaaagtccccaccccagagaaggaggctcctgccaaggtggaggtgaaggaagacgctaaacccaaagaaaagacagaggtagccaagaaggaaccagatgatgccaaggccaaggaacccagcaaaccagcagagaagaaggaggcagcaccggagaaaaaagacaccaaggaggagaaggccaagaagcctgaggagaaacccaagacagaggccaaagccaaggaagatgacaagaccctctcaaaagagcctagcaagcctaaggcagaaaaggctgaaaaatcctccagcacagaccaaaaagacagcaagcctccagagaaggccacagaagacaaggccgccaaggggaagtaaggcagggagaaaggaacatccggaacagccaaagaaactcagaagagtcccggagctcaaggatcagagtaacacaattttcactttttctgtctttatgtaagaagaaactgcttagatgacggggcctccttcttcaaacaggaatttctgttagcaatatgttagcaagagagggcactcccaggcccctgcccccaggccctccccaggcgatggacaattatgatagcttatgtagctgaatgtgatacatgccgaatgccacacgtaaacacttgactataaaaactgcccccctcctttccaaataagtgcatttattgcctctatgtgcaactgacagatgaccgcaataatgaatgagcagttagaaatacattatgcttgagatgtcttaacctattcccaaatgccttctgttttccaaaggagtggtcaagcccttgcccagagctctctattctggaagagcggtccaggtggggccggggactggccactgaattatgccagggcgcactttccactggagttcactttcaattgcttctgtgcaataaaaccaagtgcttataaaatgaaaaaaaaaaaaaaaa

SEQ ID NO: 1518 - DNA, 2130 bp, Homo sapiens
ggttaaacggggcccaaggcaggggtggcgggtcagtgctgctcgggggcttctccatccaggtccctggagttcctggtccctggagctccgcacttggcggcgcaacctgcgtgaggcagcgcgactctggcgactggccggccatgccttcccgggctgaggactatgaagtgttgtacaccattggcacaggctcctacggccgctgccagaagatccggaggaagagtgatggcaagatattagtttggaaagaacttgactatggctccatgacagaagctgagaaacagatgcttgtttctgaagtgaatttgcttcgtgaactgaaacatccaaacatcgttcgttactatgatcggattattgaccggaccaatacaacactgtacattgtaatggaatattgtgaaggaggggatctggctagtgtaattacaaagggaaccaaggaaaggcaatacttagatgaagagtttgttcttcgagtgatgactcagttgactctggccctgaaggaatgccacagacgaagtgatggtggtcataccgtattgcatcgggatctgaaaccagccaatgttttcctggatggcaagcaaaacgtcaagcttggagactttgggctagctagaatattaaaccatgacacgagttttgcaaaaacatttgttggcacaccttattacatgtctcctgaacaaatgaatcgcatgtcctacaatgagaaatcagatatctggtcattgggctgcttgctgtatgagttatgtgcattaatgcctccatttacagcttttagccagaaagaactcgctgggaaaatcagagaaggcaaattcaggcgaattccataccgttactctgatgaattgaatgaaattattacgaggatgttaaacttaaaggattaccatcgaccttctgttgaagaaattcttgagaaccctttaatagcagatttggttgcagacgagcaaagaagaaatcttgagagaagagggcgacaattaggagagccagaaaaatcgcaggattccagccctgtattgagtgagctgaaactgaaggaaattcagttacaggagcgagagcgagctctcaaagcaagagaagaaagattggagcagaaagaacaggagctttgtgttcgtgagagactagcagaggacaaactggctagagcagaaaatctgttgaagaactacagcttgctaaaggaacggaagttcctgtctctggcaagtaatccagaacttcttaatcttccatcctcagtaattaagaagaaagttcatttcagtggggaaagtaaagagaacatcatgaggagtgagaattctgagagtcagctcacatctaagtccaagtgcaaggacctgaagaaaaggcttcacgctgcccagctgcgggctcaagccctgtcagatattgagaaaaattaccaactgaaaagcagacagatcctgggcatgcgctagccaggtagagagacacagagctgtgtacaggatgtaatattaccaacctttaaagactgatattcaaatgctgtagtgttgaatacttggttccatgagccatgcctttctgtatagtacacatgatatttcggaattggttttactgttcttcagcaactattgtacaaaatgttcacatttaatttttctttcttcttttaagaacatattataaaaagaatactttcttggttgggcttttaatcctgtgtgtgattactagtaggaacatgagatgtgacattctaaatcttgggagaaaaaataatgttaggaaaaaaatatttatgcaggaagagtagcactcactgaatagttttaaatgactgagtggtatgcttacaattgtcatgtctagatttaaattttaagtctgagattttaaatgtttttgagcttagaaaacccagttagatgcaatttggtcattaataccatgacatcttgcttataaatattccattgctctgtagttcaaatctgttagctttgtgaaaattcatcactgtgatgtttgtattctttttttttttctgtttaacagaatatgagctgtctgtcatttacctacttctttcccactaaataaaagaattcttcagtt

SEQ ID NO: 1519 - DNA, 1072 bp, Homo sapiens
aggattcggcacgagctgagttctaaagttcctgttgcttcagacaatggatgagcaatcacaaggaatgcaagggccacctgttcctcagttccaaccacagaaggccttacgaccggatatgggctataatacattagccaactttcgaatagaaaagaaaattggtcgcggacaatttagtgaagtttatagagcagcctgtctcttggatggagtaccagtagctttaaaaaaagtgcagatatttgatttaatggatgccaaagcacgtgctgattgcatcaaagaaatagatcttcttaagcaactcaaccatccaaatgtaataaaatattatgcatcattcattgaagataatgaactaaacatagttttggaactagcagatgctggcgacctatccagaatgatcaagcattttaagaagcaaaagaggctaattcctgaaagaactgtttggaagtattttgttcagctttgcagtgcattggaacacatgcattctcgaagagtcatgcatagagatataaaaccagctaatgtgttcattacagccactggggtggtaaaacttggagatcttgggcttggccggtttttcagctcaaaaaccacagctgcacattctttagttggtacgccttattacatgtctccagagagaatacatgaaaatggatacaacttcaaatctgacatctggtctcttggctgtctactatatgagatggctgcattacaaagtcctttctatggtgacaaaatgaatttatactcactgtgtaagaagatagaacagtgtgactacccacctcttccttcagatcactattcagaagaactccgacagttagttaatatgtgcatcaacccagatccagagaagcgaccagacgtcacctatgtttatgacgtagcaaagaggatgcatgcatgcactgcaagcagctaaacatgcaagatcatgaagagtgtaaccaaagtaattgaaagtattttgtgcaagtcatacctccccatttatgtctggtgttaagattaatatttcagagctagtgtgctttgaatc

SEQ ID NO: 1520 - DNA, 1943 bp, Homo sapiens
cgggaagcgcggcggggcctccagaccggggcgggcttaagggtgacatctgcgctttaaagggtccgggtcagctgactcccgactctgtggagtctagctgccagggtcgcggcagctgcggggagagatgactggggagcgacccagcacggcgctcccggacagacgctgggggccgcggattctgggcttctggggaggctgtagggtttgggtgtttgccgcgatcttcctgctgctgtctctggcagcctcctggtccaaggctgagaacgacttcggtctggtgcagccgctggtgaccatggagcaactgctgtgggtgagcgggagacagatcggctcagtggacaccttccgcatcccgctcatcacagccactccgcggggcactcttctcgcctttgctgaggcgaggaaaatgtcctcatccgatgagggggccaagttcatcgccctgcggaggtccatggaccagggcagcacatggtctcctacagcgttcattgtcaatgatggggatgtccccgatgggctgaaccttggggcagtagtgagcgatgttgagacaggagtagtatttcttttctactccctttgtgctcacaaggccggctgccaggtggcctctaccatgttggtatggagcaaggatgatggtgtttcctggagcacaccccggaatctctccctggatattggcactgaagtgtttgcccctggaccgggctctggtattcagaaacagcgggagccacggaagggccgcctcatcgtgtgtggccatgggacgctggagcgggacggagtcttctgtctcctcagcgatgatcatggtgcctcctggcgctacggaagtggggtcagcggcatcccctacggtcagcccaagcaggaaaatgatttcaatcctgatgaatgccagccctatgagctcccagatggctcagtcgtcatcaatgcccgaaaccagaacaactaccactgccactgccgaattgtcctccgcagctatgatgcctgtgatacactaaggccccgtgatgtgaccttcgaccctgagctcgtggaccctgtggtagctgcaggagctgtagtcaccagctccggcattgtcttcttctccaacccagcacatccagagttccgagtgaacctgaccctgcgatggagcttcagcaatggtacctcatggcggaaagagacagtccagctatggccaggccccagtggctattcatccctggcaaccctggagggcagcatggatggagaggagcaggccccccagctctacgtcctgtatgagaaaggccggaaccactacacagagagcatctccgtggccaaaatcagtgtctatgggacactctgagctgtgccactgccacaggggtattctgccttcaggactctgccttcaggaacacgggtctgtagagggtctgctggagacgcctgaaagacagttccatcttcctttagactccagccttggcaaaatcaccttccctttaccagggaaatcacttcctttaggactgaaagctaggcgtcctctcccacaaaaaagtcctgccctcatctgagaatactgtctttccatatggctaagtgtggccccaccaccctctctgccctcccgggacattgattggtcctgtcttgggcaggtctagtgagctgtagaattgaatcaatgtgaactcagggaactggggaaggctgagcctcctctttggtgttgcggtaagataaccgacagggctggtgaaagtccccagatggcaggatatttggtttcagagtaaggactaggtgcaccaccatgactgactatcaatcaaaatgtttgtaacttaaaatttttaatgaaggataatgaatatttgtagagtctctatggttctgtcaatgcaaaaaaaaaaaaaaaaaaaaaa

SEQ ID NO: 1521 - DNA, 6046 bp, Homo sapiens
tgcgcttcccgcgggcgcgcggagtgaggacggtgacagccacgcgcgcgcgtacgcgcccgatgcagcgcggccccgtgaccctagtcggccgctgagaggcgcgcggagtctgggccgctgccgtctaggggtcccgtcccgaggcgtccccggcatctccggcccgaatcccggagtgccgggtcgcgcctgcaccgaaggtcccggctcctgtgccctccctgcagccgtcagggcccgtcccccaactcccctttccgctcaggcagggtcctcgcggcccatgctggccgctggggacccgcgcagcccagaccgttcccgggccgggcagccggccaccatggtggccctgaggcctgtgcagcaactccaggggggctaaagggctcagagtgcaggccgtggggcgcgagggtcccgggcctgagccccgcgccatggccggggccatcgcttcccgcatgagcttcagctctctcaagaggaagcaacccaagacgttcaccgtgaggatcgtcaccatggacgccgagatggagttcaattgcgagatgaagtggaaagggaaggacctctttgatttggtgtgccggactctggggctccgagaaacctggttctttggactgcagtacacaatcaaggacacagtggcctggctcaaaatggacaagaaggtactggatcatgatgtttcaaaggaagaaccagtcacctttcacttcttggccaaattttatcctgagaatgctgaagaggagctggttcaggagatcacacaacatttattcttcttacaggtaaagaagcagattttagatgaaaagatctactgccctcctgaggcttctgtgctcctggcttcttacgccgtccaggccaagtatggtgactacgaccccagtgttcacaagcggggatttttggcccaagaggaattgcttccaaaaagggtaataaatctgtatcagatgactccggaaatgtgggaggagagaattactgcttggtacgcagagcaccgaggccgagccagggatgaagctgaaatggaatatctgaagatagctcaggacctggagatgtacggtgtgaactactttgcaatccggaataaaaagggcacagagctgctgcttggagtggatgccctggggcttcacatttatgaccctgagaacagactgacccccaagatctccttcccgtggaatgaaatccgaaacatctcgtacagtgacaaggagtttactattaaaccactggataagaaaattgatgtcttcaagtttaactcctcaaagcttcgtgttaataagctgattctccagctatgtatcgggaaccatgatctatttatgaggagaaggaaagccgattctttggaagttcagcagatgaaagcccaggccagggaggagaaggctagaaagcagatggagcggcagcgcctcgctcgagagaagcagatgagggaggaggctgaacgcacgagggatgagttggagaggaggctgctgcagatgaaagaagaagcaacaatggccaacgaagcactgatgcggtctgaggagacagctgacctgttggctgaaaaggcccagatcaccgaggaggaggcaaaacttctggcccagaaggccgcagaggctgagcaggaaatgcagcgcatcaaggccacagcgattcgcacggaggaggagaagcgcctgatggagcagaaggtgctggaagccgaggtgctggcactgaagatggctgaggagtcagagaggagggccaaagaggcagatcagctgaagcaggacctgcaggaagcacgcgaggcggagcgaagagccaagcagaagctcctggagattgccaccaagcccacgtacccgcccatgaacccaattccagcaccgttgcctcctgacataccaagcttcaacctcattggtgacagcctgtctttcgacttcaaagatactgacatgaagcggctttccatggagatagagaaagaaaaagtggaatacatggaaaagagcaagcatctgcaggagcagctcaatgaactcaagacagaaatcgaggccttgaaactgaaagagagggagacagctctggatattctgcacaatgagaactccgacaggggtggcagcagcaagcacaataccattaaaaagctcaccttgcagagcgccaagtcccgagtggccttctttgaagagctctagcaggtgacccagccaccccaggacctgccacttctcctgctaccgggaccgcgggatggaccagatatcaagagagccatccatagggagctggctgggggtttccgtgggagctccagaactttccccagctgagtgaagagcccagcccctcttatgtgcaattgccttgaactacgaccctgtagagatttctctcatggcgttctagttctctgacctgagtctttgttttaagaagtatttgtcttcctttgtctaatgtgggattcctgactcccttcgtccaaggcaccggtgtgtgtgtgtcttgcactccagagctgacctccaccgcccagcctgggaagtcattgtagggagtgagacactgaagccctgagaagccagtgccatcatccccaccccgcccagggttccggaacattcattcccccaccggtgaggacctggcatgcagcgaagcagcccagcccggcggatcccaggccagcacgcctgccggcttctcatcgtcagggagcccgcccagagctcgtgacgagcaagtgctgggtccccgccaggcaccccgaggcggcgctctggctggcagctggtggggaataggcagggcagctgtggctggggagagactttaggcagaagctgtgatgcaggctgactgccagccgaggggctgggtagtgccgtgcgggagctgatggtacagggcactcgctgtccccctccggccaccctagaccagggtccgagaggcaggcaggagccactcatgtcttccccattgcccgacgcccatagacgctccttcctgtgtggggctggggtactccctggtcgtactgcagtcagcacccgtaacccggctatgaccagggatctgtaagccctgtggctccacaggtgctgcttctcactggcccagactctgagctccaccggcccagtctgcacggcccatctgcttcaccttccctcccagccacgtgccagtggccacagcccacttcccaacccactgttgtacccaggcctcactttgctgttgcccttgtccctcttcgggccctgaattttctgttccctgggggccagccagggccctttgtgcccctcccagcacaggcctgatgcaggtgtccactcacaggtggcgctcacctaggctgtcacaggacccacctccatgccaggcaacagagggccacagaaccacccccacggctcactccttggtctggggccaccttcttgccctttctttttttttttttttttttttttccgagatggagtctctctctgtcacccaggtgggagtgtggtggcacaatctcggctcactgcaacctccacctcctgagttcaagcaattctcctgcctcagcctcccaagtagctgggactacaggcatgcaccaccacacttggccaatgttctgtatttttaatagggacggggttttgccatgttagctaggctggtctcaaactcacacctgggattacaggcatgagccactgcacccagccccttcttgccctttcttttctccatggctgatgctgctgtggccagccagggcccttgagatccttccagtttggctgttatgcaaagcaggtgatttgtcttaatcagataaaagatagaggctatgggggcctcaagatttttggagagcagaggtggtctctggcaattccatctggttttgagaaacttagcagctcacagagcacagagatcctgccttcttcctactatcaggctgacctaatggggttgggctgctcggcaactgcttgggtcaccttgccccaaggaaaccagccctgggtgccacccagccacttagggtctacagggtgggactccagacctagagcgtaagtatggatgttgtggccctgtgtcttcctagtgtgacccagccaggagcggaagcttcaggcgtttgtaaagtgaggtctggctctgcctcctccgttttttttttttttctgtttctgtttctgttttttttttgagatggagtctcgctctgtcgcccaggctggagtgcagtgtcacgatctcagctcactgcaacctccgcctcccaggtacaagagattctcctgcctcagcctcccgagtagctgggactacaggcgtgtgccaccatgcctggctaatttttgtatttttagtagagatggggtttcgccatgttagccagactggtctcgaactcctgacctcaggtgatcctcccaccccggcttcccaaagttctgggattataggcgtgagccaccatgcccggtctcttctcagtcttgaagcccatccctggatttccaccaggagttactttcctcctgacctgtaaatttgttctttaacaatggctgcaggtgggagcatatggtggtttataaaaacgctgtcgggctttgtttccttctttagctgccgtgtctacttctgaagtctgggaagtgccaagccacgcggcctcaagggagctggctggtgtttgagctgtggcagaagcacctggggctccagggagcaggctgggaactgcaggaccttgctcagccaggagcacttccccctccttgaggcaggaatactgaggtgcctccccacagatggagaaggtggagaggaggatgggcctcaggagcatctcaagccccagtagcaggagaaagaaagaaagagatgcctggttttcacagactggttcctgtggctgggatgactgcatccttttttttttttttttgagacggagtttttgcctttgtcgcccaggctggagtgcaatggcgtgatctcggctcaccgcaacctccgcctcccggattcaagcaattctcctgcctcagcctcccgagtagctgggattacaggcacgcacctccacgtccggctaattttgtatttttagtggagacggggtttctccatgtcggtcaggctggtctcgaactcccgacctcaggtgatctgcccacctcggcctcccaaagtgctgggattacaggcatgagccaccgcgcttggccagactgcgtcctttttaagcgaacattttagggcctgggagtttgtcaagtaaggaagtctcaagcccaaagagcagcgtcctgaccatggtggtttcattacgagcccttctgctggctctcaggcagaagccccacagcaccgggaccattcatgaggtcactgcccagctcatgatgtccgtgaggctgtccttttggccagtagccgtgtgcagctgtgtggcacagatggcttcgttcatcctgatcaaggccccacctcagccacagcagtccccccaacctgtgttgtccaccctattattcatgtacctgccaggccctgctagatagcaccccgtggcattacataacacttcatgagtggctgtgtcttgtaattttggggacaggtttctctctttccctctcttttttttgtcaaaagcccagagactgacaaccagctgcagtgtctaagtgttcctcactgacagggtggggcctcaccacccctggagggagcagcgttggcagggagacagcctggcccagtgaccctgggcccaagccagcccctccagggctttcagggaagcgccatccattttcaaagatgtcaaacgtcacttcttcctgtagggcccgagtcctgcctcctatcagggccagatcatagaaggctattttctattctggggaacgattataacttaaatgattgttttaataaaaattctaagctggaaaataaaaaaaaaaaaaaaaaa

SEQ ID NO: 1522 - DNA, 6091 bp, Homo sapiens
tgcgcttcccgcgggcgcgcggagtgaggacggtgacagccacgcgcgcgcgtacgcgcccgatgcagcgcggccccgtgaccctagtcggccgctgagaggcgcgcggagtctgggccgctgccgtctaggggtcccgtcccgaggcgtccccggcatctccggcccgaatcccggagtgccgggtcgcgcctgcaccgaaggtcccggctcctgtgccctccctgcagccgtcagggcccgtcccccaactcccctttccgctcaggcagggtcctcgcggcccatgctggccgctggggacccgcgcagcccagaccgttcccgggccgggcagccggccaccatggtggccctgaggcctgtgcagcaactccaggggggctaaagggctcagagtgcaggccgtggggcgcgagggtcccgggcctgagccccgcgccatggccggggccatcgcttcccgcatgagcttcagctctctcaagaggaagcaacccaagacgttcaccgtgaggatcgtcaccatggacgccgagatggagttcaattgcgagatgaagtggaaagggaaggacctctttgatttggtgtgccggactctggggctccgagaaacctggttctttggactgcagtacacaatcaaggacacagtggcctggctcaaaatggacaagaaggtactggatcatgatgtttcaaaggaagaaccagtcacctttcacttcttggccaaattttatcctgagaatgctgaagaggagctggttcaggagatcacacaacatttattcttcttacaggtaaagaagcagattttagatgaaaagatctactgccctcctgaggcttctgtgctcctggcttcttacgccgtccaggccaagtatggtgactacgaccccagtgttcacaagcggggatttttggcccaagaggaattgcttccaaaaagggtaataaatctgtatcagatgactccggaaatgtgggaggagagaattactgcttggtacgcagagcaccgaggccgagccagggatgaagctgaaatggaatatctgaagatagctcaggacctggagatgtacggtgtgaactactttgcaatccggaataaaaagggcacagagctgctgcttggagtggatgccctggggcttcacatttatgaccctgagaacagactgacccccaagatctccttcccgtggaatgaaatccgaaacatctcgtacagtgacaaggagtttactattaaaccactggataagaaaattgatgtcttcaagtttaactcctcaaagcttcgtgttaataagctgattctccagctatgtatcgggaaccatgatctatttatgaggagaaggaaagccgattctttggaagttcagcagatgaaagcccaggccagggaggagaaggctagaaagcagatggagcggcagcgcctcgctcgagagaagcagatgagggaggaggctgaacgcacgagggatgagttggagaggaggctgctgcagatgaaagaagaagcaacaatggccaacgaagcactgatgcggtctgaggagacagctgacctgttggctgaaaaggcccagatcaccgaggaggaggcaaaacttctggcccagaaggccgcagaggctgagcaggaaatgcagcgcatcaaggccacagcgattcgcacggaggaggagaagcgcctgatggagcagaaggtgctggaagccgaggtgctggcactgaagatggctgaggagtcagagaggagggccaaagaggcagatcagctgaagcaggacctgcaggaagcacgcgaggcggagcgaagagccaagcagaagctcctggagattgccaccaagcccacgtacccgcccatgaacccaattccagcaccgttgcctcctgacataccaagcttcaacctcattggtgacagcctgtctttcgacttcaaagatactgacatgaagcggctttccatggagatagagaaagaaaaagtggaatacatggaaaagagcaagcatctgcaggagcagctcaatgaactcaagacagaaatcgaggccttgaaactgaaagagagggagacagctctggatattctgcacaatgagaactccgacaggggtggcagcagcaagcacaataccattaaaaagcctcaagcccaaggcagaagacctatctgcatttgagccctcaaactcaccttgcagagcgccaagtcccgagtggccttctttgaagagctctagcaggtgacccagccaccccaggacctgccacttctcctgctaccgggaccgcgggatggaccagatatcaagagagccatccatagggagctggctgggggtttccgtgggagctccagaactttccccagctgagtgaagagcccagcccctcttatgtgcaattgccttgaactacgaccctgtagagatttctctcatggcgttctagttctctgacctgagtctttgttttaagaagtatttgtcttcctttgtctaatgtgggattcctgactcccttcgtccaaggcaccggtgtgtgtgtgtcttgcactccagagctgacctccaccgcccagcctgggaagtcattgtagggagtgagacactgaagccctgagaagccagtgccatcatccccaccccgcccagggttccggaacattcattcccccaccggtgaggacctggcatgcagcgaagcagcccagcccggcggatcccaggccagcacgcctgccggcttctcatcgtcagggagcccgcccagagctcgtgacgagcaagtgctgggtccccgccaggcaccccgaggcggcgctctggctggcagctggtggggaataggcagggcagctgtggctggggagagactttaggcagaagctgtgatgcaggctgactgccagccgaggggctgggtagtgccgtgcgggagctgatggtacagggcactcgctgtccccctccggccaccctagaccagggtccgagaggcaggcaggagccactcatgtcttccccattgcccgacgcccatagacgctccttcctgtgtggggctggggtactccctggtcgtactgcagtcagcacccgtaacccggctatgaccagggatctgtaagccctgtggctccacaggtgctgcttctcactggcccagactctgagctccaccggcccagtctgcacggcccatctgcttcaccttccctcccagccacgtgccagtggccacagcccacttcccaacccactgttgtacccaggcctcactttgctgttgcccttgtccctcttcgggccctgaattttctgttccctgggggccagccagggccctttgtgcccctcccagcacaggcctgatgcaggtgtccactcacaggtggcgctcacctaggctgtcacaggacccacctccatgccaggcaacagagggccacagaaccacccccacggctcactccttggtctggggccaccttcttgccctttctttttttttttttttttttttttccgagatggagtctctctctgtcacccaggtgggagtgtggtggcacaatctcggctcactgcaacctccacctcctgagttcaagcaattctcctgcctcagcctcccaagtagctgggactacaggcatgcaccaccacacttggccaatgttctgtatttttaatagggacggggttttgccatgttagctaggctggtctcaaactcacacctgggattacaggcatgagccactgcacccagccccttcttgccctttcttttctccatggctgatgctgctgtggccagccagggcccttgagatccttccagtttggctgttatgcaaagcaggtgatttgtcttaatcagataaaagatagaggctatgggggcctcaagatttttggagagcagaggtggtctctggcaattccatctggttttgagaaacttagcagctcacagagcacagagatcctgccttcttcctactatcaggctgacctaatggggttgggctgctcggcaactgcttgggtcaccttgccccaaggaaaccagccctgggtgccacccagccacttagggtctacagggtgggactccagacctagagcgtaagtatggatgttgtggccctgtgtcttcctagtgtgacccagccaggagcggaagcttcaggcgtttgtaaagtgaggtctggctctgcctcctccgttttttttttttttctgtttctgtttctgttttttttttgagatggagtctcgctctgtcgcccaggctggagtgcagtgtcacgatctcagctcactgcaacctccgcctcccaggtacaagagattctcctgcctcagcctcccgagtagctgggactacaggcgtgtgccaccatgcctggctaatttttgtatttttagtagagatggggtttcgccatgttagccagactggtctcgaactcctgacctcaggtgatcctcccaccccggcttcccaaagttctgggattataggcgtgagccaccatgcccggtctcttctcagtcttgaagcccatccctggatttccaccaggagttactttcctcctgacctgtaaatttgttctttaacaatggctgcaggtgggagcatatggtggtttataaaaacgctgtcgggctttgtttccttctttagctgccgtgtctacttctgaagtctgggaagtgccaagccacgcggcctcaagggagctggctggtgtttgagctgtggcagaagcacctggggctccagggagcaggctgggaactgcaggaccttgctcagccaggagcacttccccctccttgaggcaggaatactgaggtgcctccccacagatggagaaggtggagaggaggatgggcctcaggagcatctcaagccccagtagcaggagaaagaaagaaagagatgcctggttttcacagactggttcctgtggctgggatgactgcatccttttttttttttttttgagacggagtttttgcctttgtcgcccaggctggagtgcaatggcgtgatctcggctcaccgcaacctccgcctcccggattcaagcaattctcctgcctcagcctcccgagtagctgggattacaggcacgcacctccacgtccggctaattttgtatttttagtggagacggggtttctccatgtcggtcaggctggtctcgaactcccgacctcaggtgatctgcccacctcggcctcccaaagtgctgggattacaggcatgagccaccgcgcttggccagactgcgtcctttttaagcgaacattttagggcctgggagtttgtcaagtaaggaagtctcaagcccaaagagcagcgtcctgaccatggtggtttcattacgagcccttctgctggctctcaggcagaagccccacagcaccgggaccattcatgaggtcactgcccagctcatgatgtccgtgaggctgtccttttggccagtagccgtgtgcagctgtgtggcacagatggcttcgttcatcctgatcaaggccccacctcagccacagcagtccccccaacctgtgttgtccaccctattattcatgtacctgccaggccctgctagatagcaccccgtggcattacataacacttcatgagtggctgtgtcttgtaattttggggacaggtttctctctttccctctcttttttttgtcaaaagcccagagactgacaaccagctgcagtgtctaagtgttcctcactgacagggtggggcctcaccacccctggagggagcagcgttggcagggagacagcctggcccagtgaccctgggcccaagccagcccctccagggctttcagggaagcgccatccattttcaaagatgtcaaacgtcacttcttcctgtagggcccgagtcctgcctcctatcagggccagatcatagaaggctattttctattctggggaacgattataacttaaatgattgttttaataaaaattctaagctggaaaataaaaaaaaaaaaaaaaaa

SEQ ID NO: 1523 - DNA, 5965 bp, Homo sapiens
tgcgcttcccgcgggcgcgcggagtgaggacggtgacagccacgcgcgcgcgtacgcgcccgatgcagcgcggccccgtgaccctagtcggccgctgagaggcgcgcggagtctgggccgctgccgtctaggggtcccgtcccgaggcgtccccggcatctccggcccgaatcccggagtgccgggtcgcgcctgcaccgaaggtcccggctcctgtgccctccctgcagccgtcagggcccgtcccccaactcccctttccgctcaggcagggtcctcgcggcccatgctggccgctggggacccgcgcagcccagaccgttcccgggccgggcagccggccaccatggtggccctgaggcctgtgcagcaactccaggggggctaaagggctcagagtgcaggccgtggggcgcgagggtcccgggcctgagccccgcgccatggccggggccatcgcttcccgcatgagcttcagctctctcaagaggaagcaacccaagacgttcaccgtgaggatcgtcaccatggacgccgagatggagttcaattgcgaggtactggatcatgatgtttcaaaggaagaaccagtcacctttcacttcttggccaaattttatcctgagaatgctgaagaggagctggttcaggagatcacacaacatttattcttcttacaggtaaagaagcagattttagatgaaaagatctactgccctcctgaggcttctgtgctcctggcttcttacgccgtccaggccaagtatggtgactacgaccccagtgttcacaagcggggatttttggcccaagaggaattgcttccaaaaagggtaataaatctgtatcagatgactccggaaatgtgggaggagagaattactgcttggtacgcagagcaccgaggccgagccagggatgaagctgaaatggaatatctgaagatagctcaggacctggagatgtacggtgtgaactactttgcaatccggaataaaaagggcacagagctgctgcttggagtggatgccctggggcttcacatttatgaccctgagaacagactgacccccaagatctccttcccgtggaatgaaatccgaaacatctcgtacagtgacaaggagtttactattaaaccactggataagaaaattgatgtcttcaagtttaactcctcaaagcttcgtgttaataagctgattctccagctatgtatcgggaaccatgatctatttatgaggagaaggaaagccgattctttggaagttcagcagatgaaagcccaggccagggaggagaaggctagaaagcagatggagcggcagcgcctcgctcgagagaagcagatgagggaggaggctgaacgcacgagggatgagttggagaggaggctgctgcagatgaaagaagaagcaacaatggccaacgaagcactgatgcggtctgaggagacagctgacctgttggctgaaaaggcccagatcaccgaggaggaggcaaaacttctggcccagaaggccgcagaggctgagcaggaaatgcagcgcatcaaggccacagcgattcgcacggaggaggagaagcgcctgatggagcagaaggtgctggaagccgaggtgctggcactgaagatggctgaggagtcagagaggagggccaaagaggcagatcagctgaagcaggacctgcaggaagcacgcgaggcggagcgaagagccaagcagaagctcctggagattgccaccaagcccacgtacccgcccatgaacccaattccagcaccgttgcctcctgacataccaagcttcaacctcattggtgacagcctgtctttcgacttcaaagatactgacatgaagcggctttccatggagatagagaaagaaaaagtggaatacatggaaaagagcaagcatctgcaggagcagctcaatgaactcaagacagaaatcgaggccttgaaactgaaagagagggagacagctctggatattctgcacaatgagaactccgacaggggtggcagcagcaagcacaataccattaaaaagcctcaagcccaaggcagaagacctatctgcatttgagccctcaaactcaccttgcagagcgccaagtcccgagtggccttctttgaagagctctagcaggtgacccagccaccccaggacctgccacttctcctgctaccgggaccgcgggatggaccagatatcaagagagccatccatagggagctggctgggggtttccgtgggagctccagaactttccccagctgagtgaagagcccagcccctcttatgtgcaattgccttgaactacgaccctgtagagatttctctcatggcgttctagttctctgacctgagtctttgttttaagaagtatttgtcttcctttgtctaatgtgggattcctgactcccttcgtccaaggcaccggtgtgtgtgtgtcttgcactccagagctgacctccaccgcccagcctgggaagtcattgtagggagtgagacactgaagccctgagaagccagtgccatcatccccaccccgcccagggttccggaacattcattcccccaccggtgaggacctggcatgcagcgaagcagcccagcccggcggatcccaggccagcacgcctgccggcttctcatcgtcagggagcccgcccagagctcgtgacgagcaagtgctgggtccccgccaggcaccccgaggcggcgctctggctggcagctggtggggaataggcagggcagctgtggctggggagagactttaggcagaagctgtgatgcaggctgactgccagccgaggggctgggtagtgccgtgcgggagctgatggtacagggcactcgctgtccccctccggccaccctagaccagggtccgagaggcaggcaggagccactcatgtcttccccattgcccgacgcccatagacgctccttcctgtgtggggctggggtactccctggtcgtactgcagtcagcacccgtaacccggctatgaccagggatctgtaagccctgtggctccacaggtgctgcttctcactggcccagactctgagctccaccggcccagtctgcacggcccatctgcttcaccttccctcccagccacgtgccagtggccacagcccacttcccaacccactgttgtacccaggcctcactttgctgttgcccttgtccctcttcgggccctgaattttctgttccctgggggccagccagggccctttgtgcccctcccagcacaggcctgatgcaggtgtccactcacaggtggcgctcacctaggctgtcacaggacccacctccatgccaggcaacagagggccacagaaccacccccacggctcactccttggtctggggccaccttcttgccctttctttttttttttttttttttttttccgagatggagtctctctctgtcacccaggtgggagtgtggtggcacaatctcggctcactgcaacctccacctcctgagttcaagcaattctcctgcctcagcctcccaagtagctgggactacaggcatgcaccaccacacttggccaatgttctgtatttttaatagggacggggttttgccatgttagctaggctggtctcaaactcacacctgggattacaggcatgagccactgcacccagccccttcttgccctttcttttctccatggctgatgctgctgtggccagccagggcccttgagatccttccagtttggctgttatgcaaagcaggtgatttgtcttaatcagataaaagatagaggctatgggggcctcaagatttttggagagcagaggtggtctctggcaattccatctggttttgagaaacttagcagctcacagagcacagagatcctgccttcttcctactatcaggctgacctaatggggttgggctgctcggcaactgcttgggtcaccttgccccaaggaaaccagccctgggtgccacccagccacttagggtctacagggtgggactccagacctagagcgtaagtatggatgttgtggccctgtgtcttcctagtgtgacccagccaggagcggaagcttcaggcgtttgtaaagtgaggtctggctctgcctcctccgttttttttttttttctgtttctgtttctgttttttttttgagatggagtctcgctctgtcgcccaggctggagtgcagtgtcacgatctcagctcactgcaacctccgcctcccaggtacaagagattctcctgcctcagcctcccgagtagctgggactacaggcgtgtgccaccatgcctggctaatttttgtatttttagtagagatggggtttcgccatgttagccagactggtctcgaactcctgacctcaggtgatcctcccaccccggcttcccaaagttctgggattataggcgtgagccaccatgcccggtctcttctcagtcttgaagcccatccctggatttccaccaggagttactttcctcctgacctgtaaatttgttctttaacaatggctgcaggtgggagcatatggtggtttataaaaacgctgtcgggctttgtttccttctttagctgccgtgtctacttctgaagtctgggaagtgccaagccacgcggcctcaagggagctggctggtgtttgagctgtggcagaagcacctggggctccagggagcaggctgggaactgcaggaccttgctcagccaggagcacttccccctccttgaggcaggaatactgaggtgcctccccacagatggagaaggtggagaggaggatgggcctcaggagcatctcaagccccagtagcaggagaaagaaagaaagagatgcctggttttcacagactggttcctgtggctgggatgactgcatccttttttttttttttttgagacggagtttttgcctttgtcgcccaggctggagtgcaatggcgtgatctcggctcaccgcaacctccgcctcccggattcaagcaattctcctgcctcagcctcccgagtagctgggattacaggcacgcacctccacgtccggctaattttgtatttttagtggagacggggtttctccatgtcggtcaggctggtctcgaactcccgacctcaggtgatctgcccacctcggcctcccaaagtgctgggattacaggcatgagccaccgcgcttggccagactgcgtcctttttaagcgaacattttagggcctgggagtttgtcaagtaaggaagtctcaagcccaaagagcagcgtcctgaccatggtggtttcattacgagcccttctgctggctctcaggcagaagccccacagcaccgggaccattcatgaggtcactgcccagctcatgatgtccgtgaggctgtccttttggccagtagccgtgtgcagctgtgtggcacagatggcttcgttcatcctgatcaaggccccacctcagccacagcagtccccccaacctgtgttgtccaccctattattcatgtacctgccaggccctgctagatagcaccccgtggcattacataacacttcatgagtggctgtgtcttgtaattttggggacaggtttctctctttccctctcttttttttgtcaaaagcccagagactgacaaccagctgcagtgtctaagtgttcctcactgacagggtggggcctcaccacccctggagggagcagcgttggcagggagacagcctggcccagtgaccctgggcccaagccagcccctccagggctttcagggaagcgccatccattttcaaagatgtcaaacgtcacttcttcctgtagggcccgagtcctgcctcctatcagggccagatcatagaaggctattttctattctggggaacgattataacttaaatgattgttttaataaaaattctaagctggaaaataaaaaaaaaaaaaaaaaa

SEQ ID NO: 1524 - DNA, 3901 bp, Homo sapiens
cggctgcggttcctggtgctgctcggcgcgcggccagctttcggaacggaacgctcggcgtcgcgggccccgcccggaaagtttgccgtggagtcgcgacctcttggcccgcgcggcccggcatgaagcggcgttgaggagctgctgccgccgcttgccgctgccgccgccgccgcctgaggaggagctgcagcaccctgggccacgccgatgactactgcaaactgtggcgcccacgacgagctcgacttcaaactcgtctttggcgaggacggggcgccggcgccgccgcccccgggctcgcggcctgcagatcttgagccagatgattgtgcatccatttacatctttaatgtagatccacctccatctactttaaccacaccactttgcttaccacatcatggattaccgtctcactcttctgttttgtcaccatcgtttcagctccaaagtcacaaaaactatgaaggaacttgtgagattcctgaatctaaatatagcccattaggtggtcccaaaccctttgagtgcccaagtattcaaattacatctatctctcctaactgtcatcaagaattagatgcacatgaagatgacctacagataaatgacccagaacgggaatttttggaaaggccttctagagatcatctctatcttcctcttgagccatcctaccgggagtcttctcttagtcctagtcctgccagcagcatctcttctaggagttggttctctgatgcatcttcttgtgaatcgctttcacatatttatgatgatgtggactcagagttgaatgaagctgcagcccgatttacccttggatcccctctgacttctcctggtggctctccagggggctgccctggagaagaaacttggcatcaacagtatggacttggacactcattatcacccaggcaatctccttgccactctcctagatccagtgtcactgatgagaattggctgagccccaggccagcctcaggaccctcatcaaggcccacatccccctgtgggaaacggaggcactccagtgctgaagtttgttatgctgggtccctttcaccccatcactcacctgttccttcacctggtcactcccccaggggaagtgtgacagaagatacgtggctcaatgcttctgtccatggtgggtcaggccttggccctgcagtttttccatttcagtactgtgtagagactgacatccctctcaaaacaaggaaaacttctgaagatcaagctgccatactaccaggaaaattagagctgtgttcagatgaccaagggagtttatcaccagcccgggagacttcaatagatgatggccttggatctcagtatcctttaaagaaagattcatgtggtgatcagtttctttcagttccttcaccctttacctggagcaaaccaaagcctggccacacccctatatttcgcacatcttcattacctccactagactggcctttaccagctcattttggacaatgtgaactgaaaatagaagtgcaacctaaaactcatcatcgagcccattatgaaactgaaggtagccgaggggcagtaaaagcatctactgggggacatcctgttgtgaagctcctgggctataacgaaaagccaataaatctacaaatgtttattgggacagcagatgatcgatatttacgacctcatgcattttaccaggtgcatcgaatcactgggaagacagtcgctactgcaagccaagagataataattgccagtacaaaagttctggaaattccacttcttcctgaaaataatatgtcagccagtattgattgtgcaggtattttgaaactccgcaattcagatatagaacttcgaaaaggagaaactgatattggcagaaagaatactagagtacgacttgtgtttcgtgtacacatcccacagcccagtggaaaagtcctttctctgcagatagcctctatacccgttgagtgctcccagcggtctgctcaagaacttcctcatattgagaagtacagtatcaacagttgttctgtaaatggaggtcatgaaatggttgtgactggatctaattttcttccagaatccaaaatcatttttcttgaaaaaggacaagatggacgacctcagtgggaggtagaagggaagataatcagggaaaaatgtcaaggggctcacattgtccttgaagttcctccatatcataacccagcagttacagctgcagtgcaggtgcacttttatctttgcaatggcaagaggaaaaaaagccagtctcaacgttttacttatacaccagttttgatgaagcaagaacacagagaagagattgatttgtcttcagttccatctttgcctgtgcctcatcctgctcagacccagaggccttcctctgattcagggtgttcacatgacagtgtactgtcaggacagagaagtttgatttgctccatcccacaaacatatgcatccatggtgacctcatcccatctgccacagttgcagtgtagagatgagagtgttagtaaagaacagcatatgattccttctccaattgtacaccagccttttcaagtcacaccaacacctcctgtggggtcttcctatcagcctatgcaaactaatgttgtgtacaatggaccaacttgtcttcctattaatgctgcctctagtcaagaatttgattcagttttgtttcagcaggatgcaactctttctggtttagtgaatcttggctgtcaaccactgtcatccataccatttcattcttcaaattcaggctcaacaggacatctcttagcccatacacctcattctgtgcataccctgcctcatctgcaatcaatgggatatcattgttcaaatacaggacaaagatctctttcttctccagtggctgaccagattacaggtcagccttcgtctcagttacaacctattacatatggtccttcacattcagggtctgctacaacagcttccccagcagcttctcatcccttggctagttcaccgctttctgggccaccatctcctcagcttcagcctatgccttaccaatctcctagctcaggaactgcctcatcaccgtctccagccaccagaatgcattctggacagcactcaactcaagcacaaagtacgggccaggggggtctttctgcaccttcatccttaatatgtcacagtttgtgtgatccagcgtcatttccacctgatggggcaactgtgagcattaaacctgaaccagaagatcgagagcctaactttgcaaccattggtctgcaggacatcactttagatgatgtgaacgagataattgggagagacatgtcccagatttctgtttcccaaggagcaggggtgagcaggcaggctcccctcccgagtcctgagtccctggatttaggaagatctgatgggctctaacagtgcttactgcagccttgtgtccaccaccaacttctcagcatgtttctctccttggaccttgggtttccaactctgcagccttcaggtctggggccaggagtgggacccaccatttgtggggaaagtagcattcctccacctcaggccttgggtagatttggcaaaagaacaggagcagcataggctgtttgagctttggggaaatgaactttgctttttatatttaactaggatacttttatatgatgggtgctttgagtgtgaatgcagcaggctctcttgtttccgaggtgctgcttttgcaggtgacctggttacttagctaggattggtgatttgtactgctttatggtcatttgaagggccctttagtttttatgataatttttaaaataggaacttttgataagaccttctagaagcaaaaaaaaaaaaaaaaaaaaaaaaaagaaaaaaaaag

SEQ ID NO: 1525 - DNA, 4005 bp, Homo sapiens
cggctgcggttcctggtgctgctcggcgcgcggccagctttcggaacggaacgctcggcgtcgcgggccccgcccggaaagtttgccgtggagtcgcgacctcttggcccgcgcggcccggcatgaagcggcgttgaggagctgctgccgccgcttgccgctgccgccgccgccgcctgaggaggagctgcagcaccctgggccacgccgatgactactgcaaactgtggcgcccacgacgagctcgacttcaaactcgtctttggcgaggacggggcgccggcgccgccgcccccgggctcgcggcctgcagatcttgagccagatgattgtgcatccatttacatctttaatgtagatccacctccatctactttaaccacaccactttgcttaccacatcatggattaccgtctcactcttctgttttgtcaccatcgtttcagctccaaagtcacaaaaactatgaaggaacttgtgagattcctgaatctaaatatagcccattaggtggtcccaaaccctttgagtgcccaagtattcaaattacatctatctctcctaactgtcatcaagaattagatgcacatgaagatgacctacagataaatgacccagaacgggaatttttggaaaggccttctagagatcatctctatcttcctcttgagccatcctaccgggagtcttctcttagtcctagtcctgccagcagcatctcttctaggagttggttctctgatgcatcttcttgtgaatcgctttcacatatttatgatgatgtggactcagagttgaatgaagctgcagcccgatttacccttggatcccctctgacttctcctggtggctctccagggggctgccctggagaagaaacttggcatcaacagtatggacttggacactcattatcacccaggcaatctccttgccactctcctagatccagtgtcactgatgagaattggctgagccccaggccagcctcaggaccctcatcaaggcccacatccccctgtgggaaacggaggcactccagtgctgaagtttgttatgctgggtccctttcaccccatcactcacctgttccttcacctggtcactcccccaggggaagtgtgacagaagatacgtggctcaatgcttctgtccatggtgggtcaggccttggccctgcagtttttccatttcagtactgtgtagagactgacatccctctcaaaacaaggaaaacttctgaagatcaagctgccatactaccaggaaaattagagctgtgttcagatgaccaagggagtttatcaccagcccgggagacttcaatagatgatggccttggatctcagtatcctttaaagaaagattcatgtggtgatcagtttctttcagttccttcaccctttacctggagcaaaccaaagcctggccacacccctatatttcgcacatcttcattacctccactagactggcctttaccagctcattttggacaatgtgaactgaaaatagaagtgcaacctaaaactcatcatcgagcccattatgaaactgaaggtagccgaggggcagtaaaagcatctactgggggacatcctgttgtgaagctcctgggctataacgaaaagccaataaatctacaaatgtttattgggacagcagatgatcgatatttacgacctcatgcattttaccaggtgcatcgaatcactgggaagacagtcgctactgcaagccaagagataataattgccagtacaaaagttctggaaattccacttcttcctgaaaataatatgtcagccagtattgattgtgcaggtattttgaaactccgcaattcagatatagaacttcgaaaaggagaaactgatattggcagaaagaatactagagtacgacttgtgtttcgtgtacacatcccacagcccagtggaaaagtcctttctctgcagatagcctctatacccgttgagtgctcccagcggtctgctcaagaacttcctcatattgagaagtacagtatcaacagttgttctgtaaatggaggtcatgaaatggttgtgactggatctaattttcttccagaatccaaaatcatttttcttgaaaaaggacaagatggacgacctcagtgggaggtagaagggaagataatcagggaaaaatgtcaaggggctcacattgtccttgaagttcctccatatcataacccagcagttacagctgcagtgcaggtgcacttttatctttgcaatggcaagaggaaaaaaagccagtctcaacgttttacttatacaccagttttgatgaagcaagaacacagagaagagattgatttgtcttcagttccatctttgcctgtgcctcatcctgctcagacccagaggccttcctctgattcagggtgttcacatgacagtgtactgtcaggacagagaagtttgatttgctccatcccacaaacatatgcatccatggtgacctcatcccatctgccacagttgcagtgtagagatgagagtgttagtaaagaacagcatatgattccttctccaattgtacaccagccttttcaagtcacaccaacacctcctgtggggtcttcctatcagcctatgcaaactaatgttgtgtacaatggaccaacttgtcttcctattaatgctgcctctagtcaagaatttgattcagttttgtttcagcaggatgcaactctttctggtttagtgaatcttggctgtcaaccactgtcatccataccatttcattcttcaaattcaggctcaacaggacatctcttagcccatacacctcattctgtgcataccctgcctcatctgcaatcaatgggatatcattgttcaaatacaggacaaagatctctttcttctccagtggctgaccagattacaggtcagccttcgtctcagttacaacctattacatatggtccttcacattcagggtctgctacaacagcttccccagcagcttctcatcccttggctagttcaccgctttctgggccaccatctcctcagcttcagcctatgccttaccaatctcctagctcaggaactgcctcatcaccgtctccagccaccagaatgcattctggacagcactcaactcaagcacaaagtacgggccaggggggtctttctgcaccttcatccttaatatgtcacagtttgtgtgatccagcgtcatttccacctgatggggcaactgtgagcattaaacctgaaccagaagatcgagagcctaactttgcaaccattggtctgcaggacatcactttagatgatgaccaatttatatctgacttggaacaccagccatcaggttcagcagagaaatggcctaaccacagtgtgctctcatgtccagctcctttctggagaatctagaggtgaacgagataattgggagagacatgtcccagatttctgtttcccaaggagcaggggtgagcaggcaggctcccctcccgagtcctgagtccctggatttaggaagatctgatgggctctaacagtgcttactgcagccttgtgtccaccaccaacttctcagcatgtttctctccttggaccttgggtttccaactctgcagccttcaggtctggggccaggagtgggacccaccatttgtggggaaagtagcattcctccacctcaggccttgggtagatttggcaaaagaacaggagcagcataggctgtttgagctttggggaaatgaactttgctttttatatttaactaggatacttttatatgatgggtgctttgagtgtgaatgcagcaggctctcttgtttccgaggtgctgcttttgcaggtgacctggttacttagctaggattggtgatttgtactgctttatggtcatttgaagggccctttagtttttatgataatttttaaaataggaacttttgataagaccttctagaagcaaaaaaaaaaaaaaaaaaaaaaaaaagaaaaaaaaag

SEQ ID NO: 1526 - DNA, 3990 bp, Homo sapiens
cggctgcggttcctggtgctgctcggcgcgcggccagctttcggaacggaacgctcggcgtcgcgggccccgcccggaaagtttgccgtggagtcgcgacctcttggcccgcgcggcccggcatgaagcggcgttgaggagctgctgccgccgcttgccgctgccgccgccgccgcctgaggaggagctgcagcaccctgggccacgccgatgactactgcaaactgtggcgcccacgacgagctcgacttcaaactcgtctttggcgaggacggggcgccggcgccgccgcccccgggctcgcggcctgcagatcttgagccagatgattgtgcatccatttacatctttaatgtagatccacctccatctactttaaccacaccactttgcttaccacatcatggattaccgtctcactcttctgttttgtcaccatcgtttcagctccaaagtcacaaaaactatgaaggaacttgtgagattcctgaatctaaatatagcccattaggtggtcccaaaccctttgagtgcccaagtattcaaattacatctatctctcctaactgtcatcaagaattagatgcacatgaagatgacctacagataaatgacccagaacgggaatttttggaaaggccttctagagatcatctctatcttcctcttgagccatcctaccgggagtcttctcttagtcctagtcctgccagcagcatctcttctaggagttggttctctgatgcatcttcttgtgaatcgctttcacatatttatgatgatgtggactcagagttgaatgaagctgcagcccgatttacccttggatcccctctgacttctcctggtggctctccagggggctgccctggagaagaaacttggcatcaacagtatggacttggacactcattatcacccaggcaatctccttgccactctcctagatccagtgtcactgatgagaattggctgagccccaggccagcctcaggaccctcatcaaggcccacatccccctgtgggaaacggaggcactccagtgctgaagtttgttatgctgggtccctttcaccccatcactcacctgttccttcacctggtcactcccccaggggaagtgtgacagaagatacgtggctcaatgcttctgtccatggtgggtcaggccttggccctgcagtttttccatttcagtactgtgtagagactgacatccctctcaaaacaaggaaaacttctgaagatcaagctgccatactaccaggaaaattagagctgtgttcagatgaccaagggagtttatcaccagcccgggagacttcaatagatgatggccttggatctcagtatcctttaaagaaagattcatgtggtgatcagtttctttcagttccttcaccctttacctggagcaaaccaaagcctggccacacccctatatttcgcacatcttcattacctccactagactggcctttaccagctcattttggacaatgtgaactgaaaatagaagtgcaacctaaaactcatcatcgagcccattatgaaactgaaggtagccgaggggcagtaaaagcatctactgggggacatcctgttgtgaagctcctgggctataacgaaaagccaataaatctacaaatgtttattgggacagcagatgatcgatatttacgacctcatgcattttaccaggtgcatcgaatcactgggaagacagtcgctactgcaagccaagagataataattgccagtacaaaagttctggaaattccacttcttcctgaaaataatatgtcagccagtattgattgtgcaggtattttgaaactccgcaattcagatatagaacttcgaaaaggagaaactgatattggcagaaagaatactagagtacgacttgtgtttcgtgtacacatcccacagcccagtggaaaagtcctttctctgcagatagcctctatacccgttgagtgctcccagcggtctgctcaagaacttcctcatattgagaagtacagtatcaacagttgttctgtaaatggaggtcatgaaatggttgtgactggatctaattttcttccagaatccaaaatcatttttcttgaaaaaggacaagatggacgacctcagtgggaggtagaagggaagataatcagggaaaaatgtcaaggggctcacattgtccttgaagttcctccatatcataacccagcagttacagctgcagtgcaggtgcacttttatctttgcaatggcaagaggaaaaaaagccagtctcaacgttttacttatacaccagttttgatgaagcaagaacacagagaagagattgatttgtcttcagttccatctttgcctgtgcctcatcctgctcagacccagaggccttcctctgattcagggtgttcacatgacagtgtactgtcaggacagagaagtttgatttgctccatcccacaaacatatgcatccatggtgacctcatcccatctgccacagttgcagtgtagagatgagagtgttagtaaagaacagcatatgattccttctccaattgtacaccagccttttcaagtcacaccaacacctcctgtggggtcttcctatcagcctatgcaaactaatgttgtgtacaatggaccaacttgtcttcctattaatgctgcctctagtcaagaatttgattcagttttgtttcagcaggatgcaactctttctggtttagtgaatcttggctgtcaaccactgtcatccataccatttcattcttcaaattcaggctcaacaggacatctcttagcccatacacctcattctgtgcataccctgcctcatctgcaatcaatgggatatcattgttcaaatacaggacaaagatctctttcttctccagtggctgaccagattacaggtcagccttcgtctcagttacaacctattacatatggtccttcacattcagggtctgctacaacagcttccccagcagcttctcatcccttggctagttcaccgctttctgggccaccatctcctcagcttcagcctatgccttaccaatctcctagctcaggaactgcctcatcaccgtctccagccaccagaatgcattctggacagcactcaactcaagcacaaagtacgggccaggggggtctttctgcaccttcatccttaatatgtcacagtttgtgtgatccagcgtcatttccacctgatggggcaactgtgagcattaaacctgaaccagaagatcgagagcctaactttgcaaccattggtctgcaggacatcactttagatgatgatttgtttaccagtaataattttgacttgcttcagttgagacctacgttttggccagtcccagcaggaagatatctgaggaatctagagtgaacgagataattgggagagacatgtcccagatttctgtttcccaaggagcaggggtgagcaggcaggctcccctcccgagtcctgagtccctggatttaggaagatctgatgggctctaacagtgcttactgcagccttgtgtccaccaccaacttctcagcatgtttctctccttggaccttgggtttccaactctgcagccttcaggtctggggccaggagtgggacccaccatttgtggggaaagtagcattcctccacctcaggccttgggtagatttggcaaaagaacaggagcagcataggctgtttgagctttggggaaatgaactttgctttttatatttaactaggatacttttatatgatgggtgctttgagtgtgaatgcagcaggctctcttgtttccgaggtgctgcttttgcaggtgacctggttacttagctaggattggtgatttgtactgctttatggtcatttgaagggccctttagtttttatgataatttttaaaataggaacttttgataagaccttctagaagcaaaaaaaaaaaaaaaaaaaaaaaaaagaaaaaaaaag

SEQ ID NO: 1527 - DNA, 3769 bp, Homo sapiens
cggctgcggttcctggtgctgctcggcgcgcggccagctttcggaacggaacgctcggcgtcgcgggccccgcccggaaagtttgccgtggagtcgcgacctcttggcccgcgcggcccggcatgaagcggcgttgaggagctgctgccgccgcttgccgctgccgccgccgccgcctgaggaggagctgcagcaccctgggccacgccgatgactactgcaaactgtggcgcccacgacgagctcgacttcaaactcgtctttggcgaggacggggcgccggcgccgccgcccccgggctcgcggcctgcagatcttgagccagatgattgtgcatccatttacatctttaatgtagatccacctccatctactttaaccacaccactttgcttaccacatcatggattaccgtctcactcttctgttttgtcaccatcgtttcagctccaaagtcacaaaaactatgaaggaacttgtgagattcctgaatctaaatatagcccattaggtggtcccaaaccctttgagtgcccaagtattcaaattacatctatctctcctaactgtcatcaagaattagatgcacatgaagatgacctacagataaatgacccagaacgggaatttttggaaaggccttctagagatcatctctatcttcctcttgagccatcctaccgggagtcttctcttagtcctagtcctgccagcagcatctcttctaggagttggttctctgatgcatcttcttgtgaatcgctttcacatatttatgatgatgtggactcagagttgaatgaagctgcagcccgatttacccttggatcccctctgacttctcctggtggctctccagggggctgccctggagaagaaacttggcatcaacagtatggacttggacactcattatcacccaggcaatctccttgccactctcctagatccagtgtcactgatgagaattggctgagccccaggccagcctcaggaccctcatcaaggcccacatccccctgtgggaaacggaggcactccagtgctgaagtttgttatgctgggtccctttcaccccatcactcacctgttccttcacctggtcactcccccaggggaagtgtgacagaagatacgtggctcaatgcttctgtccatggtgggtcaggccttggccctgcagtttttccatttcagtactgtgtagagactgacatccctctcaaaacaaggaaaacttctgaagatcaagctgccatactaccaggaaaattagagctgtgttcagatgaccaagggagtttatcaccagcccgggagacttcaatagatgatggccttggatctcagtatcctttaaagaaagattcatgtggtgatcagtttctttcagttccttcaccctttacctggagcaaaccaaagcctggccacacccctatatttcgcacatcttcattacctccactagactggcctttaccagctcattttggacaatgtgaactgaaaatagaagtgcaacctaaaactcatcatcgagcccattatgaaactgaaggtagccgaggggcagtaaaagcatctactgggggacatcctgttgtgaagctcctgggctataacgaaaagccaataaatctacaaatgtttattgggacagcagatgatcgatatttacgacctcatgcattttaccaggtgcatcgaatcactgggaagacagtcgctactgcaagccaagagataataattgccagtacaaaagttctggaaattccacttcttcctgaaaataatatgtcagccagtattgattgtgcaggtattttgaaactccgcaattcagatatagaacttcgaaaaggagaaactgatattggcagaaagaatactagagtacgacttgtgtttcgtgtacacatcccacagcccagtggaaaagtcctttctctgcagatagcctctatacccgttgagtgctcccagcggtctgctcaagaacttcctcatattgagaagtacagtatcaacagttgttctgtaaatggaggtcatgaaatggttgtgactggatctaattttcttccagaatccaaaatcatttttcttgaaaaaggacaagatggacgacctcagtgggaggtagaagggaagataatcagggaaaaatgtcaaggggctcacattgtccttgaagttcctccatatcataacccagcagttacagctgcagtgcaggtgcacttttatctttgcaatggcaagaggaaaaaaagccagtctcaacgttttacttatacaccagttttgatgaagcaagaacacagagaagagattgatttgtcttcagttccatctttgcctgtgcctcatcctgctcagacccagaggccttcctctgattcagggtgttcacatgacagtgtactgtcaggacagagaagtttgatttgctccatcccacaaacatatgcatccatggtgacctcatcccatctgccacagttgcagtgtagagatgagagtgttagtaaagaacagcatatgattccttctccaattgtacaccagccttttcaagtcacaccaacacctcctgtggggtcttcctatcagcctatgcaaactaatgttgtgtacaatggaccaacttgtcttcctattaatgctgcctctagtcaagaatttgattcagttttgtttcagcaggatgcaactctttctggtttagtgaatcttggctgtcaaccactgtcatccataccatttcattcttcaaattcaggctcaacaggacatctcttagcccatacacctcattctgtgcataccctgcctcatctgcaatcaatgggatatcattgttcaaatacaggacaaagatctctttcttctccagtggctgaccagattacaggtcagccttcgtctcagttacaacctattacatatggtccttcacattcagggtctgctacaacagcttccccagcagcttctcatcccttggctagttcaccgctttctgggccaccatctcctcagcttcagcctatgccttaccaatctcctagctcaggaactgcctcatcaccgtctccagccaccagaatgcattctggacagcactcaactcaagcacaaagtacgggccaggggggtctttctgcaccttcatccttaatatgtcacagtttgtgtgatccagcgtcatttccacctgatggggcaactgtgagcattaaacctgaaccagaagatcgagagcctaactttgcaaccattggtctgcaggacatcactttagatgatggtaagttcatctctgatatgttcttgaagtagtgaagattcagggactttattctcccaagtgtcatgaaaaagtttctatggattgcttattggcatatggttgggcttttaaataagttgttattagaaatatatgttaatatataactttgccaggtaccacggctcacgcctgtatcccagcactttggaaggctgaggcgggtggatcacaaggtcaggagttcaagaccagcctggccaacatggtgtaacgctgtctctactaaaaatacaaaaaattagccaggcatggtggtgtgtgactataatcccagctactcgggaggctgagacaggagaatcacttgaacccgggaggtggcagttgcagggagctaagatcgcgccattgcactccagcctgggcggcagagcaagactccgtctcgggaaaaaaaaaaaaaaaaaa

SEQ ID NO: 1528 - DNA, 8159 bp, Homo sapiens
cgccttttttgaaaaagcattttaccaccaaccaccaccccaatccaacccacaccgaaccttcgcgcaccccctacaccccaacaacaacaacaactgcaaaatagaaaacaaatccccaaacccaggcgaaaagcagccaacaccggcggcggcggcggcctcggcaagcacggccagcgcgctcggactgcaagagggttaaaagtgtagattggatttcacccctggaaatctagcacgccgagtgaacttgaatctttggctatttaaggaggactgggtttgttgtgaagttgcggtgatccagcgcagagccccgtcctgattgatcgcatcgcggggctcagatgactgtaaaatgaatagatgaaattcttgcttctcgaagattttcttgggcatctcccggaaagtgcgttttaaggcgaagtcatgatgtattctcccatctgtctcactcaggatgaatttcacccattcatcgaggcacttcttccacatgtccgtgcaattgcctatacttggttcaacctgcaggctcgaaaacgcaagtactttaaaaagcatgagaagcgaatgtcaaaggatgaagaaagagcagtcaaagatgagcttctcagtgaaaagcctgaaatcaaacagaagtgggcatccaggctccttgccaaactgcgcaaagatattcgccaggagtatcgagaggactttgtgctcaccgtgactggcaagaagcacccgtgctgtgtcttatccaatcccgaccagaagggtaagattaggagaatcgactgcctgcgacaggcagacaaagtctggcgtctggatctagtcatggtgatcctgttcaaaggcatccccttggaaagtaccgatggagagcggctcatgaaatccccacattgcacaaacccagcactttgtgtccagccacatcatatcacagtatcagttaaggagcttgatttgtttttggcatactacgtgcaggagcaagattctggacaatcaggaagtccaagccacaatgatcctgccaagaatcctccaggttaccttgaggatagttttgtaaaatctggagtcttcaatgtatcagaacttgtaagagtatccagaacgcccataacccagggaactggagtcaacttcccaattggagaaatcccaagccaaccatactatcatgacatgaactcgggggtcaatcttcagaggtctctgtcttctccaccaagcagcaaaagacccaaaactatatccatagatgaaaatatggaaccaagtcctacaggagacttttacccctctccaagttcaccagctgctggaagtcgaacatggcacgaaagagatcaagatatgtcttctccgactactatgaagaagcctgaaaagccattgttcagctctgcatctccacaggattcttccccaagactgagcactttcccccagcaccaccatcccggaatacctggagttgcacacagtgtcatctcaactcgaactccacctccaccttcaccgttgccatttccaacacaagctatccttcctccagccccatcgagctacttttctcatccaacaatcagatatcctccccacctgaatcctcaggatactctgaagaactatgtaccttcttatgacccatccagtccacaaaccagccagtcctggtacctgggctagcttggttcctttccaagtgtcaaataggacacccatcttaccggccaatgtccaaaattacggtttgaacataattggagaacctttccttcaagcagaaacaagcaactgagggaaaaagaaacacaacaatagtttaagaaattttttttttaaataaaaaaaaaggaaaagaggaagactggacaaaacaacacaaaggcagaaaggaaagaaactgaagaaagaagataatagaccagcaattgcagcacttacaatcactaattcccttaaggttgaaactgtaatgacataaaaagggtcgatgatatttcactgatggtagatcgcagcccctgcaacgtagcctttgttacatgaagtccgctgggaaatagatgttctgtctctatgacaatatattttaactgactttctagatgccttaatatttgcatgataagctagttttattggtttagtattcttgttgtttacgcatggaatcactattcctggttatctcaccaacgaaggctaggaggcggcgtcagaggtgctgggtgacagagccatgagccagccattttataagcactctgatttctaaaagttaaaaaaaatatatgaaatctctgtagcctttagttatcagtacagatttattaaatttcggcccttaacccagccttttccagtgtgtaacccagtttgaaatcttaaaaaaagaaaaaatgaaaaaaaaaggaaaaaaagaaaaaaggaaaaaaacagtttgaacacaaaggctctatggaagaaatgcctctatgtaggtgaagtgttctctctgcatgcaacagtaaaaattaatataatattttccccacaaaagaaacacttaacagaggcaagtgcaatttataaatttatatctaaaggggaatcatgattataagtccttcagcccttggactctaaattgaggggattaaaaagaatttaaaataattttgaacgaatttattttcccctcagtttttgagggcattaaaaaggcattaaatcaagacaaatcatgtgcttgagaaaaataaaattaatgaaaacacagcacttatgttggtttagctgcagcctccttggaggtagaatttatttatttaaaattactggttgcatcaagaacccatagggtgtacaaaaggttctataaaatctgcattatagagacaaagaggcaggcaaatccatgtcacaagggtaaagcttacagtttacaaactgggaacgccagggtgtaggatataaaaacgcactcttgagaaaacaaatgtaatcagggtgctgaaaacttgcatggtgctttcagacattagccttgttcaacaaatttcttgtattgacagatccatagtgtgcatgggcagacacattttgcctctatgtctcttaaaattttaattaaaaatactctttccagtaatcctaatttgcacgaagatataatgtccacattacgtgccttgccttgaaatctaaaaaacaaaaaacaaaaaaaaaaaaacaaaaaaatacaacaaagtgacatcactacacttgttttgctgcatttattatcattttaaatctttaccatttttatgacaaaatattttgtactccagacgaagaaaaatgtgtgacatcatggattttttagacagttatacctttatctcacatttataaagcatatcatggctgtgtatagttgccgcttaaaaattgtaatcgaccagcaatattttcagtattttggtgtttttttctattaacctttcatgtttttcatcttccaattaatatttgggggggaggggtttcaaatttatacgaattatgcaataccaagttttgcctatgtaggtagtgcttttagctgtattggttattataggtaagtacacagatttaaaaaaaaaataatgtatgcttttttgtttgtttgtttgttttaattgaccaaagtgggtactgctatttttgcagtgtgatgaggtccttttgtgtactgagagatggacaggggattttttttaatatacatatatatatattctggggtgggtgggaggatttttaacactttgcagtgtagctgtgaagcagtgcaccctgagatgggcctgggctgcaaagcgactgttctgcctactgtgacaaacttcaacttacacaggttcccctctctaacttcccacctgggttgcaagctgaactcattactggttttcataacaacacaatagtaagaacaagcaaacacaacaaattctcctggaggcagacttggcttaaaaaggcagacttggcttggtgatagtttttcttgaaagttccagatccacagtggagagtgagcctgtctcatatttggcaaaaatatttgttgaaatgtccacataggggatgttggatgtttaacacttttgagagtttaacacatgaatattctttctcctagaaaacacattagacctgttggagggagtctcccgtattccttttctgccacttttcgtccccatttcatttcattaatgataggatatgatttacctgtgacttactacttcaaatggatggcagtgcacttggatttttttttaatatccagaagattgaacagagggttgctattgttgaatgtatttggactgatagattaaaatcaaagttcaatttttaaggaacaaaaaagtaaatcctgttttcattttatctccccttttaaaactgagaaccagagcagaagggaaatatagaattttaagcaattaatcttcctgtggatgaattaaacccattagatgctgatgggatttttttaaggaatggtaccttaactatatatttgatttcgtttcccctgagggctagaggctgaatggaggctggttttattttgcctttccctcaccgcccagtcccattgagtgtattcattactagaaggaaaatctttcagaattggtgacacatggtaggctgtcttaaggagtcccctggcccccttcccctaggccatggcctaataaaataaactgtcaattgttctcacagcatatcatttaataatgaatactttagaacaatgcttatgggctggagaattgtatttgattagcccattcagtttgatagcccaaatgctgaacagcacagcgggatcctagcagtgcaagttcaaaagtaagtccaatcatttctgtgatactcgccctggtagcaaacagatcatctcagccaagctcttcatgtatctttgacctattaggtgaacaaatgaacctcacaggacacacagtattttttaaaggcagactcgctctcttttttgccagtgagcagttctagctaaccaagttacacactgtgggtattcctgcctgcctcttgaatacaaaggcctagttcaagtgttgctttttttatttcaaatcaattttttcttctttcctttttgagataaaactattaaaagtactactatatatataaaatctcaaatcaacttttcggcctcctcctcgtgtaccaggaagtatattctgacgaagggccccacttttgcaggtcttgcacgcccctcccttacccagaactgcagagcttcaggatggcgaaggtcacccaagggcatgagtagggagtggtgtctccaaccatcagttccgtggcactgttcagcctttgtgtgctgccctgccacccaccactcacagtgcctctgaagcgtgttacccctggagtgacgtgagcatttgaggcttgtctaaggaaaaaaataaaaggcagtgaaggagactgtacataaagacatggcaaaaatcttaattatagcaatatagttatcgggtaatgttcgggtgggcagctccattaaaaaatatgtgaatgaatctgtgaagctgcaagtagcgagaagagcgaaaggtcttcttaatgaaccgcctaccttgtagacagtaatttgtacactgtatagttttgttaagaattttttttaaattaaaattcccatgtttgtaaagctaactttttaacaattataatggaactatatgttgtttccatttttaaagtaaacaagaatattccttgtttagagactggacttgagttaaaactctccagtctcttaagttatgtattaaaaagaaaatctgtccatgttaggagttatttcacagattcctgtgcttgaaaagcataggatactaatcctttaaaaaagtgtaaatggagaaaagttatattttatgaaggttattttgttgtatttagtattggaaaagttggtttccagagcatttcagaatgtcgaagcaccactgtctttttattagtatatacggcctttagcaaaagtttttgtgattgttacgtgatggtatttaaggttaagtttcacagagcattcaggataggcagaaaactaaaacagtgctatgtctcacataacgtgtcctcagggagcagaatcttggatttgtgacttgtagcttcataaggactcaacgaaagagattgcacagggacatcttcagcggtgtgacagcaggacatgttctttacctagattcaaattctatgtactgtgtgaaatgatgaaggctgcagaaagttatcccatattcagtgtacagtattcatttttaatgaaacaactctacaatattgctggcagataggccccaagcatgacattcaatatagtttacatgttcctgtcaaggtcttttgttaacattaaccagctgcatgctttctggactttaagaaattgggtttctatagaaaactttttttttttttttttttttaatgtgcaggctattcaagttcaatagtaaaagctcaaaaatgaatgttctactccatgctgaaggagctgaaagctgccttcttcatattttgcactttctggtagttcccctgttttttctaattccctaaaattgtgtgggtggagtggagccctgcagttggggggtaacatggaccactgattttgccctttgaccctgcacaatgacctttgcatcagccaaactcattgccatgacaactctttgtactgtgtccgtgccacagatctgttggtcacattgttaatagtaaaggggacaagttggagacggtcaatttttacattttttgttgcaattttttcttcaatggttgtaagtagtttttttttttttttaataataaaagggttcactagttaatactctagaaatatctgtgtgttgcaattcaaatgtatgttgagattgtgaaaagcgcttcagtgccactagcttaccggtacactagactaagcccttgatgacttattgcatgatacagtaccaggaacaacaggtggcctaaatacatgaaaagcagtgtaagctagtgacactaaagccagtcttgtattactgtatttttgacagaatggttttgaaaactgtgctacagggactgatgtggcaaatatatctctttatgcagaaggaagtctttttttttcttttttttttttttaagaagtatggctttttatgcatccttcatcgagggcattgaagttgcatggactgataaaagttgatgcaaaacaagaaagaaacaaacaaaaaaaaaaaaccagcaaaatgtttaccaaaaaactcaaacaaatgagcagtgcctgttcaatttcacagtctctgttgagttcagttgtaaatatgtttcaaatgacattttcttgggaaaaaaaatctctacaacattgtagaatgtgaggggtaactacatcccaggcataggtttctcaaagctgcagtagattatgtcttcatcaagctgttaatttgtgcttatatcatatagaacttttagcatcctgggaagagctgcccccacctcaatgatatttctctgagaacaacttttgtaggactgtgtgtttctttagatacatttagtacaactgtaggtgacgagtagtcagttattgcttgctagctacacaccagggttgatccattttaaaacttttggcattttgtcctcatgggccataaatacagaaccttgtattttaattaaatttttttacaaaaggaggcacatgcacaatctccatgtaacaaacctttagcagtaggatgtattatacgacagttacttaatttctagagttcaggcctctgggatcaaccccagactgggccagaatgttagtgaaggttttattgtgcccggttggaggataacgttctttgggtactttttgtgggttgcaaatgaactcaattgccacaagttttaaactggtgtaaatcaagcttgacttaatgtgattgttactgttatatccagcctatactgctagcagctgctcatactgcagtcaattactggaagcggatatatttcctatgcaaaaactgtttaaacaataaaatgagctatgctacaga

SEQ ID NO: 1529 - DNA, 1579 bp, Homo sapiens
agcccacagcagtccgtgccgccgtcccgcccgccagcgccccagcgaggaagcagcgcgcagcccgcggcccagcgcacccgcagcagcgcccgcagctcgtccgcgccatgttccaggcggccgagcgcccccaggagtgggccatggagggcccccgcgacgggctgaagaaggagcggctactggacgaccgccacgacagcggcctggactccatgaaagacgaggagtacgagcagatggtcaaggagctgcaggagatccgcctcgagccgcaggaggtgccgcgcggctcggagccctggaagcagcagctcaccgaggacggggactcgttcctgcacttggccatcatccatgaagaaaaggcactgaccatggaagtgatccgccaggtgaagggagacctggccttcctcaacttccagaacaacctgcagcagactccactccacttggctgtgatcaccaaccagccagaaattgctgaggcacttctgggagctggctgtgatcctgagctccgagactttcgaggaaatacccccctacaccttgcctgtgagcagggctgcctggccagcgtgggagtcctgactcagtcctgcaccaccccgcacctccactccatcctgaaggctaccaactacaatggccacacgtgtctacacttagcctctatccatggctacctgggcatcgtggagcttttggtgtccttgggtgctgatgtcaatgctcaggagccctgtaatggccggactgcccttcacctcgcagtggacctgcaaaatcctgacctggtgtcactcctgttgaagtgtggggctgatgtcaacagagttacctaccagggctattctccctaccagctcacctggggccgcccaagcacccggatacagcagcagctgggccagctgacactagaaaaccttcagatgctgccagagagtgaggatgaggagagctatgacacagagtcagagttcacggagttcacagaggacgagctgccctatgatgactgtgtgtttggaggccagcgtctgacgttatgagcgcaaaggggctgaaagaacatggacttgtatatttgtacaaaaaaaaagttttatttttctaaaaaaagaaaaaagaagaaaaaatttaaagggtgtacttatatccacactgcacactgcctggcccaaaacgtcttattgtggtaggatcagccctcattttgttgcttttgtgaactttttgtaggggacgagaaagatcattgaaattctgagaaaacttcttttaaacctcacctttgtggggtttttggagaaggttatcaaaaatttcatggaaggaccacattttatatttattgtgcttcgagtgactgaccccagtggtatcctgtgacatgtaacagccaggagtgttaagcgttcagtgatgtggggtgaaaagttactacctgtcaaggtttgtgttaccctcctgtaaatggtgtacataatgtattgttggtaattattttggtacttttatgatgtatatttattaaacagatttttacaaatgaaaaaaaaaaaaa

SEQ ID NO: 1530 - DNA, 1184 bp, Homo sapiens
gcgactgcggggggcccctgaggcggcgggggccatggctggggtcgcgtgcttgggaaaagctgccgacgcagatgaatggtgcgacagcggcctgggctccctgggtccggacgcagcggcccccggaggacctgggttgggcgcggagttgggcccggggctgtcgtgggctcccctcgtcttcggctacgtcactgaggatggggacacggcactgcacttggctgtgattcatcagcatgaacccttcctggattttcttctaggcttctcggccggcactgagtacatggacctgcagaatgacctaggccagacagccctgcacctggcagccatcctgggggagacatccacggtggagaagctgtacgcagcaggcgccgggctgtgtgtggcggagcgtaggggccacacggcgctgcacctggcctgccgtgtgggggcacacgcctgtgcccgtgccctgcttcagccccgcccccggcgccccagggaagcccccgacacctacctcgctcagggccctgaccgtactcccgacaccaaccatacccctgtcgccttgtaccccgattccgacttggagaaggaagaagaggagagtgaggaggactggaagctgcagctggaggctgaaaactacgagggccacaccccactccacgtggccgttatccacaaagatgtggagatggtccggctgctccgagatgctggagctgaccttgacaaaccggagcccacgtgcggccggagcccccttcatttggcagtggaggcccaggcagccgatgtgctggagcttctcctgagggcaggcgcgaaccctgctgcccgcatgtacggtggccgcaccccactcggcagtgccatgctccggcccaaccccatcctcgcccgcctcctccgtgcacacggagcccctgagcccgagggcgaggacgagaaatccggcccctgcagcagcagtagcgacagcgacagcggagacgagggcgatgaatacgacgacattgtggttcacagcagccgcagccaaacccggctgcctcccaccccagcctcaaaacctcttcctgacgacccccgccccgtgtgatttgtttcattgttaatataatttccagtttaataaacaaaaccctagttctgaaaaaaaaaaaaaaaaaaaaaaaaaa

SEQ ID NO: 1531 - DNA, 3482 bp, Homo sapiens
ggagggaggggaggccgagtcctggaagcggagctccgcgctgggactggttccttcgcagccattttctgtccaaccaaacagccgattggagacgggagccaaccagggctgcattggaggttgaaatcacaaagattagacacctttttagataggtgttcttcagcaccactgacaacacggttctgacagtatttcatgacaatggatggtgacagttctacaacagatgcttctcaactaggaatctctgcagactatattggaggaagtcattatgttatacagcctcatgatgatactgaggacagcatgaatgatcatgaagacacaaatggttcaaaagaaagtttcagagaacaagatatatatcttccaatagcaaacgtggctaggataatgaaaaatgccatacctcaaacgggaaagattgcaaaagatgccaaagaatgtgttcaagaatgtgtaagtgagttcatcagttttataacatctgaagcaagtgaaaggtgccatcaagagaaacggaaaacaatcaatggagaagatattctctttgctatgtctactttaggctttgacagttatgtggaacctctgaaattataccttcagaaattcagagaggctatgaaaggagaaaagggaattggtggagcagtcacagctacagatggactaagtgaagagcttacagaggaggcatttactaaccagttaccagctggcttaataaccacagacggtcaacaacaaaatgttatggtttacacaacatcatatcaacagatttctggtgttcagcaaattcagttttcatgatctgaagaaatgatggaatggggagtgtagagaaatgagagtctgtatgattctggaacagagacatcagaaggaaagactggtgaaaagatgtatctttgtatattaatagctgtaatgtagcttcctgatgcttgactaattgaggtgttaattctgacttgagaatctttttcatgaatgattttaaagaaaaatttggattttaaaggtattaaaatatttttgttttgtacgagagtttgttgctctgtatgactcctgtatgcattgtatattgcaatttattactgtcagagatttgtagacagtttcttattttcatattgaatcatgttacttttgtaattcaagtaagcggctgggttaattcatgatgtttgcccttttaataaaatataagggtagagttcattttgaatgcaagttgcctttattataaatttgagtttgtcttggttataccttgcatgataacctagctagatttctagcatttgctgtatttattaaaattattatttttttggtaaaacattaatagtttaagcagcatcatttttttaaaaaatgtaattgaataagtgtgaatgcagaagcaaatattgtctgccctgttaaacttggtgcccattaacagtgtttacactgttcatcgtgcctgttaatgtagttttagttactggagcttttttaagactagatttggttttgagttacatttttaagaatgtgggaatatatttaagtttaatgtagtcctagtgctcttgaaatggtgcccctttcatttggtacatgattttttttcaaatcatatcttcaagtactatagtattctcttacagaagaggagttttatagtctgatggtaaatgtcttcattttacctttttaattgaaatgtcaagtttcctgttacactatggaaaccaagaaacatcagacatcattgcgtgtacagaccttttgcatgggtgagtggatgaaatggagaacagagtgagtgctgtgaacggtgtgaaatagaagccaacttctagtatgctgtcttcatctctgcaataaactaaacgtaaataatgtaactttgtataatttagtagtatgtacttggattgtttctttttgaaaagtgaggatttgtattttctcatctattctttttggtgttaattaacttgagggatttcttttttaagtttttaatatcaaaaattgctattgtatagtttgcctaaaaggaagttggagtgaatatcatctttgaaggacactcaaatttataaggtagaagcaatttcccagatataggctgaacagaaacatttactttgccagaaggagcctttaggagtatatgtgggctaatcagaggttaataatgtcctcatctcctactctccatttaaaaaacaaacttcattgtagtaaattcaaataggaaaaaatgggggagtagttaagcaaaatcaacagtcatcctactatgttgaaagaaccaatgttaatattttgataaatatcatttgtccttttactttgctaaatatgtatatttttataaaaatgggctcatattgtgcataccattttgtaacctgcttttttcacttaacaatatattgggaacatcttttccaggtcatgcatagtcttctgcatcatttttattggtttattattctgctgtatgactcaatcataattcatttaatcttctattggatattttgactatttacatcttttcacagttataaacagcacttcactgaatcccatgtacatccatgactgttttcttaaattctttgaattgctgggttaccaaatatgcaaaattttaaggcttttgatacttcgttatgagtgtatttttgagatattttccacttgatccaagcagtgtgtcactatataactgataaaagcacttggtctttgattatcagatactgtctctaaaattattttaaagattaatatttgttcaagtagagaatgaagataaaaaaggaatttgaggccaggtatggggtgtctcatgcctataattccagcactttgggaggccaaggcaggcagatcactttgaggtcaggagtttgagaccagcctggccaacatggagaaccccccgtctctacaaaaaatacaaaattagcagggtgtggtggtgcacacctgtagtcccttactccctggtggctgaggcattatcccttgaacctgggaggcagagcctaaagtgagccgagatcgcgccactgcactccagcctgggtgacacagcaagactcttgtctcaaacaaacaggaatttgagtaaattttaaattagtatatactacaacaaatttccaaacttcataatttgctagtagtgctaactaaaattttacaccaggtaaaatcaggtcaccttttttatgtattgacttcattgttggacttcatactctgatgggaaagaaaatggacattctgaatgtgtcaggtgcataatatcctaatttatgcttgtcagagctggggtctctgtcttccttggcccatgttgcatttaactgaatgtcatgttttctcctctggaacttcttatgtatgcaagctcccatgttaacctatcataaaaatgttttttataattttgt

SEQ ID NO: 1532 - DNA, 3421 bp, Homo sapiens
agagcgagccgagccgcggccagctccggcgggcagggggggcgctggagcgcagcgcagcgcagccccatcagtccgcaaagcggaccgagctggaagtcgagcgctgccgcgggaggcgggcgatgggggcaggtgccaccggccgcgccatggacgggccgcgcctgctgctgttgctgcttctgggggtgtcccttggaggtgccaaggaggcatgccccacaggcctgtacacacacagcggtgagtgctgcaaagcctgcaacctgggcgagggtgtggcccagccttgtggagccaaccagaccgtgtgtgagccctgcctggacagcgtgacgttctccgacgtggtgagcgcgaccgagccgtgcaagccgtgcaccgagtgcgtggggctccagagcatgtcggcgccgtgcgtggaggccgacgacgccgtgtgccgctgcgcctacggctactaccaggatgagacgactgggcgctgcgaggcgtgccgcgtgtgcgaggcgggctcgggcctcgtgttctcctgccaggacaagcagaacaccgtgtgcgaggagtgccccgacggcacgtattccgacgaggccaaccacgtggacccgtgcctgccctgcaccgtgtgcgaggacaccgagcgccagctccgcgagtgcacacgctgggccgacgccgagtgcgaggagatccctggccgttggattacacggtccacacccccagagggctcggacagcacagcccccagcacccaggagcctgaggcacctccagaacaagacctcatagccagcacggtggcaggtgtggtgaccacagtgatgggcagctcccagcccgtggtgacccgaggcaccaccgacaacctcatccctgtctattgctccatcctggctgctgtggttgtgggccttgtggcctacatagccttcaagaggtggaacagctgcaagcagaacaagcaaggagccaacagccggccagtgaaccagacgcccccaccagagggagaaaaactccacagcgacagtggcatctccgtggacagccagagcctgcatgaccagcagccccacacgcagacagcctcgggccaggccctcaagggtgacggaggcctctacagcagcctgcccccagccaagcgggaggaggtggagaagcttctcaacggctctgcgggggacacctggcggcacctggcgggcgagctgggctaccagcccgagcacatagactcctttacccatgaggcctgccccgttcgcgccctgcttgcaagctgggccacccaggacagcgccacactggacgccctcctggccgccctgcgccgcatccagcgagccgacctcgtggagagtctgtgcagtgagtccactgccacatccccggtgtgagcccaaccggggagcccccgccccgccccacattccgacaaccgatgctccagccaacccctgtggagcccgcacccccaccctttggggggggcccgcctggcagaactgagctcctctgggcaggacctcagagtccaggccccaaaaccacagccctgtcagtgcagcccgtgtggccccttcacttctgaccacacttcctgtccagagagagaagtgcccctgctgcctccccaaccctgcccctgccccgtcaccatctcaggccacctgcccccttctcccacactgctaggtgggccagcccctcccaccacagcaggtgtcatatatggggggccaacaccagggatggtactagggggaagtgacaaggccccagagactcagagggaggaatcgaggaaccagagccatggactctacactgtgaacttggggaacaagggtggcatcccagtggcctcaaccctccctcagcccctcttgccccccaccccagcctaagatgaagaggatcggaggcttgtcagagctgggaggggttttcgaagctcagcccacccccctcattttggatataggtcagtgaggcccagggagaggccatgattcgcccaaagccagacagcaacggggaggccaagtgcaggctggcaccgccttctctaaatgaggggcctcaggtttgcctgagggcgaggggagggtggcaggtgaccttctgggaaatggcttgaagccaagtcagctttgccttccacgctgtctccagacccccaccccttccccactgcctgcccacccgtggagatgggatgcttgcctagggcctggtccatgatggagtcaggtttggggttcgtggaaagggtgctgcttccctctgcctgtccctctcaggcatgcctgtgtgacatcagtggcatggctccagtctgctgccctccatcccgacatggacccggagctaacactggcccctagaatcagcctaggggtcagggaccaaggacccctcaccttgcaacacacagacacacgcacacacacacacaggaggagaaatctcacttttctccatgagttttttctcttgggctgagactggatactgcccggggcagctgccagagaagcatcggagggaattgaggtctgctcggccgtcttcactcgcccccgggtttggcgggccaaggactgccgaccgaggctggagctggcgtctgtcttcaagggcttacacgtggaggaatgctcccccatcctccccttccctgcaaacatggggttggctgggcccagaaggttgtgatgaagaaaagtgggccagtgtgggaatgcggcaagaaggaattgacttcgactgtgacctgtggggatttctcccagctctagacaaccctgcaaaggactgttttttcctgagcttggccagaagggggccatgaggcctcagtggactttccaccccctccctggcctgttctgttttgcctgaagttggagtgagtgtggctcccctctatttagcatgacaagccccaggcaggctgtgcgctgacaaccaccgctccccagcccagggttcccccagccctgtggaagggactaggagcactgtagtaaatggcaattctttgacctcaacctgtgatgaggggaggaaactcacctgctggcccctcacctgggcacctggggagtgggacagagtctgggtgtatttattttcctccccagcaggtggggagggggtttgggggcttgcaagtatgttttagcatgtgtttggttctggggcccctttttactccccttgagctgagatggaacccttttggcccccgagctgggggccatgagctccagacccccagcaaccctcctatcacctcccctccttgcctcctgtgtaatcatttcttgggccctcctgaaacttacacacaaaacgttaagtgatgaacattaaatagcaaagaaagaaaaataaaaaaaaaaaa

SEQ ID NO: 1533 - DNA, 1601 bp, Homo sapiens
ggagttacgtagaagacagggcgtcctggtgtacgggctggccctggacgtcacttccgctggcggcagtggcgtcacttcctgctcttgggggcggggcatccgtgtccttgcggtgctgggcagcagaccgtccaaaccgacacgcgtggtatcctcgcggtgtccggcaagagactaccaagacagacgctatgactgaggctgatgtgaatccaaaggcctatccccttgccgatgcccacctcaccaagaagctactggacctcgttcagcagtcatgtaactataagcagcttcggaaaggagccaatgaggccaccaaaaccctcaacaggggcatctctgagttcatcgtgatggctgcagacgccgagccactggagatcattctgcacctgccgctgctgtgtgaagacaagaatgtgccctacgtgtttgtgcgctccaagcaggccctggggagagcctgtggggtctccaggcctgtcatcgcctgttctgtcaccatcaaagaaggctcgcagctgaaacagcagatccaatccattcagcagtccattgaaaggctcttagtctaaacctgtggcctctgccacgtgctccctgccagcttcccccctgaggttgtgtatcatattatctgtgttagcatgtagtattttcagctactctctattgttataaaatgtagtactaaatctggtttctggatttttgtgttgtttttgttctgttttacagggttgctatcccccttcctttcctccctccctctgccatccttcatccttttatcctccctttttggaacaagtgttcagagcagacagaagcagggtggtggcaccgttgaaaggcagaaagagccaggagaaagctgatggagccaggacagagatctggttccagctttcagccactagcttcctgttgtgtgcggggtgtggtggaattaaacagcattcattgtgtgtccctgtgcctggcacacagaatcattcatacgtgttcaagtgatcaaggggtttcatttgctcttgggggattaggtatcatttggggaggaagcatgtgttctgtgaggttgttcggctatgtccaagtgtcgtttactaatgtacccctgctgtttgcttttggtaatgtgatgttgatgttctccccctacccacaaccatgcccttgagggtagcagggcagcagcataccaaagagatgtgctgcaggactccggaggcagcctgggtgggtgagccatggggcagttgacctgggtcttgaaagagtcgggagtgacaagctcagagagcatgaactgatgctggcatgaaggattccaggaagatcatggagacctggctggtagctgtaacagagatggtggagtccaaggaaacagcctgtctctggtgaatgggactttctttggtggacacttggcaccagctctgagagcccttcccctgtgtcctgccaccatgtgggtcagatgtactctctgtcacatgaggagagtgctagttcatgtgttctccattcttgtgagcatcctaataaatctgttccattttgatgacaaaaaaaaaaaaaaaaaaaaa

SEQ ID NO: 1534 - DNA, 1520 bp, Homo sapiens
gccgcgcggggccatttccgctgctgcttctgtgagtttttccggtgcacgcgagtgcttctgaaacgtcagctgcgctcccctaggagtgctgagcccgcggaaccgcagccatgactgaggctgatgtgaatccaaaggcctatccccttgccgatgcccacctcaccaagaagctactggacctcgttcagcagtcatgtaactataagcagcttcggaaaggagccaatgaggccaccaaaaccctcaacaggggcatctctgagttcatcgtgatggctgcagacgccgagccactggagatcattctgcacctgccgctgctgtgtgaagacaagaatgtgccctacgtgtttgtgcgctccaagcaggccctggggagagcctgtggggtctccaggcctgtcatcgcctgttctgtcaccatcaaagaaggctcgcagctgaaacagcagatccaatccattcagcagtccattgaaaggctcttagtctaaacctgtggcctctgccacgtgctccctgccagcttcccccctgaggttgtgtatcatattatctgtgttagcatgtagtattttcagctactctctattgttataaaatgtagtactaaatctggtttctggatttttgtgttgtttttgttctgttttacagggttgctatcccccttcctttcctccctccctctgccatccttcatccttttatcctccctttttggaacaagtgttcagagcagacagaagcagggtggtggcaccgttgaaaggcagaaagagccaggagaaagctgatggagccaggacagagatctggttccagctttcagccactagcttcctgttgtgtgcggggtgtggtggaattaaacagcattcattgtgtgtccctgtgcctggcacacagaatcattcatacgtgttcaagtgatcaaggggtttcatttgctcttgggggattaggtatcatttggggaggaagcatgtgttctgtgaggttgttcggctatgtccaagtgtcgtttactaatgtacccctgctgtttgcttttggtaatgtgatgttgatgttctccccctacccacaaccatgcccttgagggtagcagggcagcagcataccaaagagatgtgctgcaggactccggaggcagcctgggtgggtgagccatggggcagttgacctgggtcttgaaagagtcgggagtgacaagctcagagagcatgaactgatgctggcatgaaggattccaggaagatcatggagacctggctggtagctgtaacagagatggtggagtccaaggaaacagcctgtctctggtgaatgggactttctttggtggacacttggcaccagctctgagagcccttcccctgtgtcctgccaccatgtgggtcagatgtactctctgtcacatgaggagagtgctagttcatgtgttctccattcttgtgagcatcctaataaatctgttccattttgatgacaaaaaaaaaaaaaaaaaaaaa

SEQ ID NO: 1535 - DNA, 9074 bp, Homo sapiens
aggttcaaggactgttaatggtttgtaactgcctgacaataaactcaacctcagttacatcagcctgggcagatgtctaaggatatgagaccgggggaagaaaaagttagaatctgtagcagaaggacgaagcttgccacctgcctactgggctgagcttttaatgtgatttacatttctaagctctatgtaggtgccctggaaatggtggtcttcattaatgcaaagattaagtctttaattaaactttttaagaagaaaacggtttccaacctagatgaggaaagccgatggacagtccactacactgccccgtggcaccagcaggagaatgtgttccttcccaccacaagacccccctgtgttgaggacctgcaccgccaagccaagctcaacctcaaatcagtactgagggaatgcgataagttgcggcatgatggctaccgcagttctcagtactactctcagggacccacctttgcggccaacgccagcccattctgtgatgattaccaagatgaagatgaagaaacagatcaaaagtgttctctgtcttcatcagaagaagaaagatttatttccatcaggagacctaaaacaccagcctcaagtgacttctccgaccttaatactcagacgaactggaccaagtcgcttccactgccaacaccagaagagaagatgcgacagcaagcccaaacagtccaggctgacgtggtgcctattaacataactgcatcaggcactggccaagatgatgctgatggccactcagtgtacacccctgatcactactctacactaggaaggttcaatagctgtcggtctgctgggcagcgctcagaaaccagggactccagctgtcagacggaggatgtgaaggtcgtaccaccttccatgaggagaatcagggcacagaaggggcaaggcattgctgcccagatgggccacttctcaggttcctctggcaacatgtctgtgctgagcgattctgcagggatcgtattcccttcccgccttgacagtgatgctggcttccatagtcttccgcgttctggagcaagggcaaacattcagtcccttgagccgaggctgggtgccctcggccctgcaggagacatgaatggcactttcctctaccagagaggtcacccacaagcagatgaaaacttaggccatttaggaggtgcctcagggactggaacacttttgagacccaaatcccaggagttgagacacttcgagagtgaaaatataatgagcccagcgtgtgtggtttctcctcatgcaacctactccaccagcatcatcccaaatgccacactgtcttcctcttccgaggtcatcgctattcccactgctcagagtgcgggacagcgggaaagtaaaagttctggctcatcacatgcaaggataaaatccagagaccacctcatctccaggcatgctgtgaaaggtgatcctcagtctcccggtcgccactggaatgagggccatgccaccattctttcacaggacttagaccctcattcccctggtgaacccgcactgttgtccctctgtgactcagccgtccctctaaatgctccagcaaatagggagaatgggtcccaagctatgccgtataattgtagaaacaacctggccttcccagcccacccccaagatgtggatggcaagagtgaatctagttattcagggggcggagggcacagcagctcggagccctgggaatacaaatcctcaggtaatggaagggcatcccccctgaagccgcatttagcaactcctggctattccactcccacaagtaacatgagcagctgcagtttggaccaaacgtccaacaaagaggatgctgggtcgctgtattctgaggaccacgatggctactgtgcatctgtgcacactgactctggacatggatctgggaatctgtgcaatagcagtgatggctttgggaaccccaggcacagcgtgatcaatgtttttgttggaagagctcagaaaaaccaaggggaccggtccaattaccaggataaatccctatcaagaaacatctctttgaagaaagcaaagaagcctcccctgccaccctcccggacagactccctccgcaggattcccaagaagagcagccagtgcaacgggcaggtgctcaacgagagcctgatcgccacactccagcactcgctgcagctgagcctcccaggcaagagtggcagctcgccctcccagagcccctgcagtgacttggaagagccctggctgccccgctcccggagccagagcacagttagtgctggcagcagcatgacttccgccaccacccccaatgtctactccctgtgcggggccacgccatcgcagagtgacacaagcagcgtcaagtcagagtacacggacccctggggttattacattgactacacgggcatgcaggaagatccggggaacccggcagggggctgttcaaccagcagtggggtgcccactgggaacgggccagtccgccatgtccaagaagggtccagagccacaatgccccaagtgcccggtggttcagtcaaaccaaagatcatgtcaccagagaagtcacacagagtcatttctccatccagtgggtattccagccagtcgaatacacccacagcactcacccctgtgcctgtgtttttaaaatcagtgtcaccagcaaacgggaaggggaagcccaagcccaaggtaccagaaaggaagtcctctctgatatcttcagtatccatttcctcatcgtccacttctctttcttctagtacttctactgaaggaagtggcactatgaagaagctggatccagccgtgggctctcccccggctcctcctcctcctcctgttccctctcctccattcccttgtcctgcagacaggtctcctttccttcctcccccacctcctgtcacagattgctcccagggctctcctctgcctcactctcctgtgttcccccctccgccgccagaagctctcattcctttctgctccccacctgattggtgcctttctcctccccgccctgcactgagccccattcttccagattcacctgtgtccttgccattgcccccacctctcttaccttcctcggaacccccacctgccccacctcttgaccccaaattcatgaaagacaccaggccgcctttcacaaattctggccagccagaatcctcccggggatccttgaggccgccttctaccaaggaggagaccagcaggccccccatgcccctgataaccacggaagcattgcagatggtgcagttgaggcccgtgagaaagaactcaggcgctgaggcggcacagttgtctgaacgaacagctcaggaacaacgaactccagttgctccacagtaccacttaaagccatctgctttcctgaaatcccgaaatagcacaaatgaaatggagagtgaaagccagcctgcctctgtgacaagctcgcttccgacgcctgccaagagctcgagtcagggtgaccatggcagtgcggctgagcgtggtggccctgtgagccgcagccctggagctccaagcgctggggaggcagaggctcggcccagccccagcaccaccccactcccagactcttcacccagcaggaagccaccccccatttccaagaagcccaaactgttcctggtggtaccacctccgcagaaagattttgcagtggagcccgcagagaacgtgagcgaagccctccgagctgtgcccagccccacgacgggagaggagggctctgtgcacagcagggaggcaaaagagagttctgcagcccaagctggctctcatgccacgcaccctggcacctcggttcttgagggaggagctgcaggatccatgtctcccagcagagtggaagccaatgtccccatggttcagcctgatgtctcaccagcccccaagcaggaggagccagccgagaacagtgcggatactgggggcgatggggagagctgcctatctcaacaggacggagcagctggggtgccggagaccaacgcagccggttcatcctcagaggcctgtgacttcctcaaggaagacgggaatgatgaggtaatgacccccagtcgacccaggaccacagaagacctttttgcagctattcacagatccaaaaggaaagtcctcggccgtagagattcagatgatgaccactcccgaaaccattctccctccccgcccgtgacacccaccggcgctgccccaagcctggcctctccaaagcaagtggggtcgattcagagaagcatccgaaagagcagcaccagcagtgacaacttcaaagctctgctgctgaaaaagggcagtcgttcagacaccagcgcccgcatgtctgcagcagagatgctcaagaacacagaccctagattccagaggtcgaggtcagagccttccccagatgcccccgagagcccgtcaagctgctccccaagcaagaacagaagggcgcaggaggagtgggccaagaacgaaggcttgatgcctcggagtctgtccttttccggccccaggtacggccgcagccgaacgccgccttctgccgccagcagcaggtacagcatgcggaaccggatccagagcagccccatgaccgtcatctcggagggagaaggggaagccgtggagcctgtggacagcatagcccgcggggctctgggcgctgcggagggatgttccctggacggactggcgagggaggagatggacgagggcggcctgctctgtggggaggggcctgccgcctccctgcagccccaggcccccggccctgtggatgggacagccagtgcagagggcagagagccctccccacagtgtggcggttctctgagcgaggagagttagggccaagaacgtaactctcccaggtgacacggggggagacgagcaatgcagcactctaggaagcctgctaggcgcccttccctggctcacccggggagcccactctgcttctgtgctgtgggccccggggttgccagccctgcagtgtgagtgaacggttatttaggactcacctggcacttgccctgtggcttaagaacaagtagaagcttaaacttctgaaagtgcttcccggggaagattttttttttttttttttttttttgctaaatgctgggtgtgtatgtgtgcattttccacactttttaatttttaaaaaatacacatatacacaaacaacatgtacagaaatagaagaaagcaagccagacttaagcttggtagagtaacggagtcctctggtctaggcggtaattgctttcagagaattacgtttatagaaatcagcgagttttgtaagaaaggagaagatgttacttcaagaaagaggcagtagagttgctggttcttaatgcacagaacacacagatatatgcacacgtgtgctgctgaggtgaggcaggtctggtgagcacggagaggctgggaaggggctaagtgactaattggttcaggtacttttttctgggggaggtagactttgcttcttttttgtaaaaatgacaaacgtagaagtggcaatgctgtaacctggtgcctgctgctgtgcagccacatacacacaattgtagcctgatttttagaagtgtgggtaattttttaatgaatttcctccttgagtagcagctgaggtcattgacaactgaagtgatggtgtggacatagagagaggggaagggttggaaaggagtaagtgatacactgctggaatttgtttcctgcctatgaaataaaattatttttcagaattaaatttgaaaacttgcactacagaactatgggtggagcttttccttttacaacagtttttttttttttttttttttaaccagagtttaaacttccattaggcaatttcctgtcacttgaaatgtcaacatttgctaacttttggatatccttttggttacaccaaagaaaaagttatggctatttttttttccttgaactgcctacagtatcatgtcctaattcagaaagatttatcaaaatctattatatattatcttactttgaagaaaatgctgaatagctcttgttagtcaaataaactgataaaaattggtagggcctggctatcaattagccctgggaaatgaatttttagattaaaaaggtttttttgcatcatttggtttgtgcatttttatatttgtttataaataattgagttgctaattacttctaatcttctccaatcagattttcaacaattttagacatgggacacacgtgtgtgaagtctttattttaatgtaataatctcattacccccacccttactcccttaacttccatgtacttagactcctttatttgttaaataaactagagtattgtcttcttcattagaaggacctaggatgacaatgcggagagtcttggtctgaatctagtgcgactaccacctgccagcttttggggggtatggaaatactatctaaaagttggactgcatgggtcaaatcattatgagacttataaactaaaactttagatacccatatagaaatgtctttgaggcaaaaacaaacctaaagaatgaaggctctttcccttctctgaaaaaaacaaaacactgctcttcacacaaccggaagtcaagaccagagatttggagcaattgtctactaatttggcacaaagatcgtttctttagaaaagtggcattggcttttgaatatgaaatcttctcatagctgcctaaaaaagactagaatgtatatggatatcagaaacctttaataatacataatttatgcaaagataagataaagcaacataacactaattataaaactatttttaaatccccatttttaatgaaaaatatacatttgtatttaatttcctttgaataaaacaattgtaaagtaaatatttgaaatatttctttttgtttatacatgcattttttttgaataatgagataggtgttcttatacagaattgttgagtgttttgctggatacaaacagaaaagcagtgagaccagaaggtctctgggggaggtgacaacccaacagaggaggtggaacatcacagacactggatggcaccatctacaagggcacgtggaaaaacaagtccacatcgtgtcctatggactttggaataaaatacgaataacctatcgcctggcggttcagatgacgtggcatgtggagagacgtgagaacttcttacaggcatggatgaaatacagggagagaagaatcgagactcatccctgaaacatggcaccttccatgtggctactctactccttggggcccgcttctgttatggaccgcatcttaaaaagctccacaggggtagatctgatggctctcataccctcatactttaagttccagataatcacagaagccccagccctaaattatttccactttatttttactatcagtggggagagaaacaaattactgcttggtctgtcagttggaaacaacctcaatgcgatctgctttctgccatcctactatttctgaagaatcttgattgaactcttgcttttcctgtgggggtgactgtatattccttaggagaatcacagtgaaaaggagacgtttctgtgtctccgtctttctccccacccaccactggcaccctgctctgtggtggcatcttaggaggagaggggaaagagtggctttcttggttctgccgtagtaggggttcagcctgcatgcgatgctgattccatcatcaaatgagcacagcagcataatttgctttggcagatgtgaggatgttgttgggggaatggagggtcatttgaatgaaacatggacctgattgttgcgccactttccttaataagccactcggtaactgtaatacagtttctctcagttgcctgctctgacctaccttccacagcggccagcctttattcacagaacaagaggtagagcaatctgtagtcatttgttcagcaatgggggaaaaaaagtcctaataaatgcttctcatgtgctaggtaaagacaaggaggcccaaagatagaaaacgtggttgagctatcagtgaggggcatgatcctactgccagtttagattcttcaagaagtagacagttagaataccaaaggatttattattggagtaagcacctttgaaaggaaaagaggaagcaggacgaggcagggagagcaggcgagctgccatcccaggggaactctgggaaaaaggtcactcattggaggagtcctgtgttggactgaaacagttaggtccttgtaccatggccttgcttggtctttggcaagagggccccctcagaaaagcatgctctcaatttccataatttagtgaaatcattggccaccaacccctcctgtcttgagaatagcgtgacctcagcttgaaagctaaggtggatcctggtgaagtagcagctggtggctgccagctacccacactccttgcagctggatggcatatcttgtcttgaagggggatctaagtggcaccgctctatgcctgccatggtccaccccttgcctatgtggatccattttcccaaaaacacgcagagagtgactgtttcagggcgccaatggacctctcttcctgaggataaatgttgaaagaggagtttggtaggaccaactatagcaccttcctgcaaatggttttggaaccacaactggtcctcattactccctgcttcattctaaattcccctcacccacaactgtcatctttgctggtcttggtggcttttttgatagtataaaccaagctctcattcctgagggtcctgagctcctgggagccaaacccttctcagaccagggttgctgcactagtccattcagttacaactgggcaaggagtacagagggtgcctccagtgggtccgctaagttccacacacattgctctcgccactatcctctgacagcaggcttgcctcctcctgcagttcagggtcaattacccttgactagatggtgacttcttgcctactggtccctgaacacagagtccaaagtgcccacatagtagcagcag

SEQ ID NO: 1536 - DNA, 1073 bp, Homo sapiens
atgtgcacacacatacactcacacgtgtgtgcaggtgcacacctcccccagaggctgcagccaagacgggcatcccacatcagagggatgaatggcaggtctgtcccgccagctgtgtgctctctcccacccgaagaaagcagcagagactcagacggcggagcctggaggagcccacgcagtctgttcccggcacccggtgcgtgtgaagggacttgagggcagcgagatggaatcagcaagagaaaacatcgaccttcaacctggaagctccgaccccaggagccagcccatcaacctgaaccattacgccaccaagaagagcgtggcggagagcatgctggacgtggccctgttcatgtccaacgccatgcggctgaaggcggtgctggagcagggaccatcctctcactactacaccaccctggtcaccctcatcagcctctctctgctcctgcaggtggtcatcggtgtcctgctcgtggtcattgcacggctgaacctgaatgaggtagaaaagcagtggcgactcaaccagctcaacaacgcagccaccatcttggtcttcttcactgtggtcatcaatgttttcattacagccttcggggcacataaaacagggttcctggctgccagggcctcaaggaatcctctctgaatgcagcctgggacccaggttctgggcctggaacttctgcctccttcctccgtgatctgccaggctcgtgggcactttccacagcccaggagagcttctgaaaggacagtatagctgcccttgctccctacccacagcacctgagttaaaaagtgatttttatgttattggtctaagggacttccatcttggtctgaagtcctgagctcagacgcaggtactgccagccataccttcctggtagcatctgctggacctaagtaaggcatgtctgtctaaggccaagtctgcccggcttaaggatgctggttctgactctaccccactgcttccttctgctccaggcctcaattttcccttcttgtaaaatggaatctatatctataaaggtttcttcaaatccaaaaaaaaaaaa

SEQ ID NO: 1537 - DNA, 1631 bp, Homo sapiens
ggagacacagggccgctcagaggccgccgcaatgctcccctctttgcaggagtcgatggatggagatgaaaaggaactagagagcagcgaagagggaggctcagccgaggagcggagactcgagccgccgtccagcagccactactgtctttacagctatcgcggaagcagattggcacagcaacgaggggacagtgaggacggaagcccaagtggcacaaatgcagaaactccctctggtgatgatttcagcctctccttggcagatactaatctaccatccgaagtggagccagagctgcgcagtttcattgctaagcgtctttcaagaggtgcagtctttgaagggctgggtaatgttgcatctgtggagctaaaaattccaggttaccgagttggttgttattactgccttttccaaaatgaaaaactgcttcctgaaacagtaacgatagactctgaacgtaacccttcagaatatgtggtctgttttttaggagggtctgaaaaaggacttgagcttttcaggcttgaattggacaagtacattcaagggctgaaaaataacatgaattgtgaggcaaggggcctggagagtcacataaaatcctatctgagcagctggtttgaggatgttgtatgcccaatccaaagggttgttcttctctttcaggaaaagcttacctttctgctacatgctgctttgagttacactcctgttgaagttaaagaatcagatgaaaaaacaaagagagacattaacaggtttctgagtgtggccagtcttcaaggacttattcatgaaggcaccatgacttctttgtgcatggccatgacagaggagcagcataagtctgtggtcatcgattgcagcagctcccagcctcagttctgcaatgcaggaagtaaccggttttgtgaggattggatgcaagcttttttaaatggtgccaaaggaggtaacccttttcttttccgacaagtactggagaactttaaactaaaggccatacaagacacaaacaatttgaagagatttatccgacaggcagaaatgaatcattatgctttgtttaaatgttacatgttcctaaagaactgtggtagtggagatatacttttgaagattgttaaagtggaacatgaagaaatgcctgaagccaaaaatgtgatagctgtccttgaagaattcatgaaagaagctcttgaccaaagtttttgatcatatgttttgagataattgtatgatcaagttgtatatttaagtcttagtgtttgaaattgcagttataattgttcataggattgctatttaagatgatttgaaactcaatccagattttctttttgtattttaccaatttaacttaaataaaaatctgaagaacatcttcactgagtcctagatagataatgtatgtgagagttgtgaaattttagtgtctcactggccccataaattccacgcttcaggaagttgttgcttaaaaaatttcagagatgattttgtttgtggcttttctcaggaaaagcctgagtttgctgcagtatttagcaacttttcttctcagaaaaaccataatacttccttttcagtggactgtagcttcttaaaaaaaaaaaaaaaaaaa

SEQ ID NO: 1538 - DNA, 1608 bp, Homo sapiens
ctagatccggggaagggttttgcagaagtacccagaactgtgtccaaggtttcctcagatttgggctgttccgcagcggcaggtcccgggaaccaaggcaacagacatcttcctaggctcgcgagagcgcccccttgtcccacggctgctggggccccccagtagccatggctccggtgtccggctcacgcagcccggatagggaggcctcgggctcggggggaagacgtcgcagttcgtcgaagagtccgaagcccagcaaatctgcccgctccccgcggggccgccgctctcgctcgcactcttgctctcggtccggggaccggaatggactcacccatcagctgggtggcctcagccaaggctcccgaaaccagtcctaccgctcacgctcgcggtcgcgttctagagagcggccctctgcgccccggggcatccccttcgcttctgcctcctcgtcagtctattacggcagctactcgcgcccctacgggagcgacaagccttggcctagcctcctcgacaaggagagggaggagagcctgcggcagaagagattaagtgagagagagagaattggagaattgggagctcctgaagtatggggactttctccaaagaatcctgaaccagattctgatgaacatacaccagtggaggatgaagagccaaagaaaagcactacttcagcttctacttcagaagaagaaaaaaagaagaagtctagccgttcaaaagaaaggtccaagaaaaggagaaagaaaaaatcatcgaaaagaaaacataagaagtattctgaagatagcgacagtgactctgattctgaaacagactccagtgatgaagataacaaaaggagagcaaagaaagccaagaaaaaggaaaagaagaagaaacacagatcgaagaaatataagaaaaagaggtctaagaagagcagaaaagagtccagtgattcaagctctaaagaatcccaagaagagtttctggaaaatccctggaaggatcgaacaaaggctgaagaaccatcagatttaattggcccagaggctccaaaaacacttacctctcaagatgataaacctttgaactatggccatgctctgttacctggtgaaggtgcagctatggctgaatatgtaaaagctggaaaacgtatcccacgaagaggtgaaattggcttgacaagtgaagaaattgcatcatttgaatgctcaggttatgtaatgagtggtagcaggcatcgccgaatggaggctgtgcgactgcgaaaagagaaccagatctacagtgctgatgagaagagagcccttgcatcctttaaccaagaagagagacgaaagagagagaacaagattctggccagttttcgagaaatggtttacagaaagaccaaagggaaggatgacaaataaagattttctgattgtccagaagacatttttaacaacaaaaaagaaagtctgggttccacacatacatagaaaaagattattatgttctgagaaagctttacagtgctactgtgccttctatttaattctttcagtccttcaataaaaagctgcttattgaaaaaaaaaaaaaaaaaaaaaaaaaaaaaaaaaa

SEQ ID NO: 1539 - DNA, 1798 bp, Homo sapiens
cggcgatggggaaactgcagtcgaagcacgccgccgccgcccgcaagcggagagagagcccggaaggggacagcttcgtggcgtccgcgtacgcgagcggccgcaaaggcgcggaggaagcggagcggcgcgcgcgggacaagcaggagctgcccaatggggaccccaaggaggggcctttccgggaggaccagtgtcccctacaggtggcactccccgctgagaaagctgagggccgcgagcacccgggacaactcctcagcgcagatgacggagagagggcagcaaaccgcgagggcccgcgaggaccgggcgggcagcgcctcaacattgacgcactccagtgcgatgtctcggtggaggaggacgaccgccaggagtggacgttcacgctctatgactttgacaactgcgggaaggtcaccagggaggacatgtccagcctcatgcacaccatctatgaggtcgtggatgcctcggtcaaccactcctcgggcagcagcaagaccctccgtgtgaagctaaccgtcagccctgagccctccagcaagaggaaggagggtcctcctgctggccaggaccgggagcccacccgttgcaggatggagggtgaactggcagaggagccaagggtggctgacaggaggttgtctgcacacgtcaggaggcccagtactgacccccagccctgctcggagcgggggccctactgcgtggacgagaacacggagcgcagaaaccactacctggacctcgccgggattgagaactacacgtccagattcggccctgggtcccctcctgtgcaagcaaagcaggagccccagggcagggcctcgcacctccaggcccggtcccgctcccaggagccagatacacatgccgtacaccaccgcaggtcacaggtgctggtggaacacgtcgtgccagcctcggagcctgctgcccgggccctggacacgcagccccggccgaaggggccggagaagcagttcctcaagtcccccaagggctccgggaagccgcctggggtgccagccagcagcaagtccgggaaagccttcagctactacctgccggccgtcctgccgccccaggcccctcaggacggccaccacctcccgcagcccccaccgccaccctacggccacaagcggtaccgccaaaagggcagggagggccactcgccactcaaggccccacacgctcagcctgccacagtggagcacgaggtggtgcgggacctgccgcccacgccagcaggagagggctacgcggtgccagtgatccagcggcacgagcaccaccaccaccacgagcaccaccaccaccaccaccaccaccacttccacccgtcctagcgccactgccaagcacacctcgctcccagcacaccacggcccgcgacctcagggcagggagcagagcagctgccggctgtgtgcccatggggagcccagcccccaccccccacctccgacagcaaacagcaactgactgcaggtgctggcatgatggaggtggtgcaccttggacacgtggacaaggcccaggcgccctctgctcttctgccctcgatgccacatggcggtgaacacatctgaagccactatgtttcctggctctaaggctcgtctgtgtaacccataaaacctgctttgattccaaaatgaggccctggagtgcgcaaggagtgcccggatgcttggggtgggtgttcctcccggggcttcaaggggtgactgctgtaggctgtcccagtgcgaggccgggagcgaatggaaaagctgaggctttg

SEQ ID NO: 1540 - DNA, 2092 bp, Homo sapiens
gcggccgccggagcccgagctgacgccgccttggcacccctcctggagttagaaactaaggccggggcccgcggcgctcggcgcgcaggccgcccggcttcctgcgtccatttccgcgtgctttcaaagaagacagagagaggcactgggttgggcttcatttttttcctccccatccccagtttctttctctttttaaaaataataattatcccaataattaaagccaattcccccctcccctcccccagtccctccccccaactcccccctcccccgcccgccggggcaggggagcgccacgaattgaccaagtgaagctacaactttgcgacataaattttggggtctcgaaccatgtcgctgaccaacacaaagacggggttttcggtcaaggacatcttagacctgccggacaccaacgatgaggagggctctgtggccgaaggtccggaggaagagaacgaggggcccgagccagccaagagggccgggccgctggggcagggcgccctggacgcggtgcagagcctgcccctgaagaaccccttctacgacagcagcgacaacccgtacacgcgctggctggccagcaccgagggccttcagtactccctgcacggtctggctgccggggcgccccctcaggactcaagctccaagtccccggagccctcggccgacgagtcaccggacaatgacaaggagaccccgggcggcgggggggacgccggcaagaagcgaaagcggcgagtgcttttctccaaggcgcagacctacgagctggagcggcgctttcggcagcagcggtacctgtcggcgcccgagcgcgaacacctggccagcctcatccgcctcacgcccacgcaggtcaagatctggttccagaaccaccgctacaagatgaagcgcgcccgggccgagaaaggtatggaggtgacgcccctgccctcgccgcgccgggtggccgtgcccgtcttggtcagggacggcaaaccatgtcacgcgctcaaagcccaggacctggcagccgccaccttccaggcgggcattcccttttctgcctacagcgcgcagtcgctgcagcacatgcagtacaacgcccagtacagctcggccagcaccccccagtacccgacagcacaccccctggtccaggcccagcagtggacttggtgagcgccgccccaacgagactcgcggccccaggcccaggccccaccccggcggcggtggcggcgaggaggcctcggtccttatggtggttattattattattataattattattatggagtcgagttgactctcggctccactagggaggcgccgggaggttgcctgcgtctccttggagtggcagattccacccacccagctctgcccatgcctctccttctgaaccttgggagagggctgaactctacgccgtgtttacagaatgtttgcgcagcttcgcttctttgcctctccccggggggaccaaaccgtcccagcgttaatgtcgtcacttgaaaacgagaaaaagaccgaccccccacccctgctttcgtgcattttgtaaaatatgtttgtgtgagtagcgatattgtcagccgtcttctaaagcaagtggagaacactttaaaaatacagagaatttcttcctttttttaaaaaaaaataagaaaatgctaaatatttatggccatgtaaacgttctgacaactggtggcagatttcgcttttcgttgtaaatatcggtggtgattgttgccaaaatgaccttcaggaccggcctgtttcccgtctgggtccaactcctttctttgtggcttgtttgggtttgttttttgttttgtttttgtttttgcgttttcccctgctttcttcctttctctttttattttattgtgcaaacatttctcaaatatggaaaagaaaaccctgtaggcagggagccctctgccctgtcctccgggccttcagccccgaacttggagctcagctattcggcgcggttccccaacagcgccgggcgcagaaagctttcgattttttaaataagaattttaataaaaatcctgtgtttaaaaaagaaaaaaagaaaaaa

SEQ ID NO: 1541 - DNA, 3266 bp, Homo sapiens
gcggtgcgggccgggcgggtgcattcaggccaaggcggggccgccgggatgctcagggttccggagccgcggcccggggaggcgaaagcggagggggccgcgccgccgaccccgtccaagccgctcacgtccttcctcatccaggacatcctgcgggacggcgcgcagcggcaaggcggccgcacgagcagccagagacagcgcgacccggagccggagccagagccagagccagagggaggacgcagccgcgccggggcgcagaacgaccagctgagcaccgggccccgcgccgcgccggaggaggccgagacgctggcagagaccgagccagaaaggcacttggggtcttatctgttggactctgaaaacacttcaggcgcccttccaaggcttccccaaacccctaagcagccgcagaagcgctcccgagctgccttctcccacactcaggtgatcgagttggagaggaagttcagccatcagaagtacctgtcagcccctgaacgggcccacctggccaagaacctcaagctcacggagacccaagtgaagatatggttccagaacagacgctataagactaagcgaaagcagctctcctcggagctgggagacttggagaagcactcctctttgccggccctgaaagaggaggccttctcccgggcctccctggtctccgtgtataacagctatccttactacccatacctgtactgcgtgggcagctggagcccagctttttggtaatgccagctcaggtgacaaccattatgatcaaaaactgccttccccagggtgtctcatatgaaaagcacaaggggccaaggtcagggagcaagaggtgtgcacaccaaaactattggagaattgcgtggaaatcttcagattcttcactggtgagacaatgaaacaacagagacagtgaaagttttaatacctaagtcattcccccagtgcatactgtagcgtcaagtttttgcttctggctacctgtttgaaggggagagagggaaaatcaagtggtattttccagcactttgtatgattttggatgagctgtacacccaaggattctgttctgcaactccatcctcctgtgtcactgaatatcaactctgaaagagcaaacctaacaggagaaaggacaaccaggatgaggatgtcaccaactgaattaaacttaagtccagaagcctcctgttggccttggaatatggccaaggctctctctgtccctgtaaaagagaggggcaaatagtctccaaagagaacgccctcatgctcagcacatatttgcatggaagggggagatgggtgggaggagatgaaaatatcagcttttcttattcctttttattccttttaaaatggtatgccaacttaagtatttacagggtggcccaaatagaacaagatgcactcgctgtgattttaagacaagctgtataaacagaactccactgcaagagggagggccgggccaggagaatctccgcttgtccaagacaggggcctaaggagggtctccacactgctgctaggggctgttgcatttttttattagtagaaagtggaaaggcctcttctcaacttttttcccttgggctggagaatttagaatcagaagtttcctggagttttcaggctatcatatatactgtatcctgaaaggcaacataattcttccttccctccttttaaaattttgtgttcctttttgcagcaattactcactaaagggcttcattttagtccagatttttagtctggctgcacctaacttatgcctcgcttatttagcccgagatccggtctttttttttttttttttttccgtctccccaaagctttatctgtcttgactttttaaaaaagtttgggggcagattctgaattggctaaaagacatgcatttttaaaactagcaactcttatttctttcctttaaaaatacatagcattaaatcccaaatcctatttaaagacctgacagcttgagaagggtcactactgcatttataggaccttctggtggttctgctgttacgtttgaagtctgacaatccttgagaatctttgcatgcagaggaggtaagaggtattggattttcacagagggaagaacacagcgcagaatgaaggcgcaggcttactgagctgtccagtggagggctcatgggtgggacatggaaaagaaggcagcctaggccctggggagcccagtccactgagcaagcaagggactgagtgagccttttgcaggaaaaggctaagaaaaaggaaaaccattctaaaacacaacaagaaactgtccaaatgctttgggaactgtgtttattgcctataatggggtccccaaaatgggtaacctagacttcagagagaatgagcagagagcaaaggagaaatctgggctgtccttccattttcattctgttatctcaggtgagctggtagaggggagacattagaaaaaaatgaaacaacaaaacaattactaatgaggtacgctgaggcctgggagtctcttgagctccacgacttcaaaattaaaatgagccatgagtcaaaccactgcaatccagcctgggcaacgagcaagacccagtctctactgttggtggcaaaattgccaacataagttaatagaaagttggccaatttcaccccattttctgtggtttgggctccacattgcaatgttcaatgccacgtgctgctgacaccgaccggagtactagccagcacaaaaggcagggtagcctgaattgctttctgctctttacatttcttttaaaataagcatttagtgctcagtccctactgagtactctttctctcccctcctctgaatttaattctttcaacttgcaatttgcaagggttacacatttcactgtgatgtatattgtgttgcaaaaaaaaaaaagtgtctttgtttaaaattacttggtttgtgaatccatcttgctttccccattggaactagtcattaacccatctctgaactggtagaaaaacatctgaagagctagtctatcagcatctgacaggtgaattggatggttctcagaaccatttcacccagacagcctgtttctatcctgtttaataaattagtttgggttctctacatgcataacaaaccctgctccaatctgtcacataaaagtctgtgacttgaagtttagtcagcacccccaccaaactttatttttctatgtgttttttgcaacatatgagtgttttgaaaataaagt

SEQ ID NO: 1542 - DNA, 2881 bp, Homo sapiens
gtggcctctgcggctaggccggctcgagactcccgggcgccgaggcgctgccgcccgcctcgccgccccacgccgaaggaccacgcgcccgccgccgccagcctctcagcgctcccatgatcgcccggtgccttttggctgtgcgaagcctccgcagagttggtggttccaggattttactcagaatgacgttaggaagagaagtgatgtctcctcttcaggcaatgtcttcctatactgtggctggcagaaatgttttaagatgggatctttcaccagagcaaattaaaacaagaactgaggagctcattgtgcagaccaaacaggtgtacgatgctgttggaatgctcggtattgaggaagtaacttacgagaactgtctgcaggcactggcagatgtagaagtaaagtatatagtggaaaggaccatgctagactttccccagcatgtatcctctgacaaagaagtacgagcagcaagtacagaagcagacaaaagactttctcgttttgatattgagatgagcatgagaggagatatatttgagagaattgttcatttacaggaaacctgtgatctggggaagataaaacctgaggccagacgatacttggaaaagtcaattaaaatggggaaaagaaatgggctccatcttcctgaacaagtacagaatgaaatcaaatcaatgaagaaaagaatgagtgagctatgtattgattttaacaaaaacctcaatgaggatgataccttccttgtattttccaaggctgaacttggtgctcttcctgatgatttcattgacagtttagaaaagacagatgatgacaagtataaaattaccttaaaatatccacactatttccctgtcatgaagaaatgttgtatccctgaaaccagaagaaggatggaaatggcttttaatacaaggtgcaaagaggaaaacaccataattttgcagcagctactcccactgcgaaccaaggtggccaaactactcggttatagcacacatgctgacttcgtccttgaaatgaacactgcaaagagcacaagccgcgtaacagcctttctagatgatttaagccagaagttaaaacccttgggtgaagcagaacgagagtttattttgaatttgaagaaaaaggaatgcaaagacaggggttttgaatatgatgggaaaatcaatgcctgggatctatattactacatgactcagacagaggaactcaagtattccatagaccaagagttcctcaaggaatacttcccaattgaggtggtcactgaaggcttgctgaacacctaccaggagttgttgggactttcatttgaacaaatgacagatgctcatgtttggaacaagagtgttacactttatactgtgaaggataaagctacaggagaagtattgggacagttctatttggacctctatccaagggaaggaaaatacaatcatgcggcctgcttcggtctccagcctggctgccttctgcctgatggaagccggatgatggcagtggctgccctcgtggtgaacttctcacagccagtggcaggtcgtccctctctcctgagacacgacgaggtgaggacttactttcatgagtttggtcacgtgatgcatcagatttgtgcacagactgattttgcacgatttagcggaacaaatgtggaaactgactttgtagaggtgccatcgcaaatgcttgaaaattgggtgtgggacgtcgattccctccgaagattgtcaaaacattataaagatggaagccctattgcagacgatctgcttgaaaaacttgttgcttctaggctggtcaacacaggtcttctgaccctgcgccagattgttttgagcaaagttgatcagtctcttcataccaacacatcgctggatgctgcaagtgaatatgccaaatactgctcagaaatattaggagttgcagctactccaggcacaaatatgccagctacctttggacatttggcagggggatacgatggccaatattatggatatctttggagtgaagtattttccatggatatgttttacagctgttttaaaaaagaagggataatgaatccagaggttggaatgaaatacagaaacctaatcctgaaacctgggggatctctggacggcatggacatgctccacaatttcttgaaacgtgagccaaaccaaaaagcgttcctaatgagtagaggcctgcatgctccgtgaactggggatctttggtagccgtccatgtctggaggacaagtcgacatcaccatgtgttactggcctggaaactgaagggagttttgcaagtgaaaatttagatttctattgacatccttttgttttctaattttaaaaattataaagatgtaaatggaattataaatactgtgacctaagaaaagacccactagaaagtaattgtactataaaatttcataaaactggatttgatttctttttatgaaagtttcatatgaatgtaacttgattttttactattataatctagataatatgatataagagggctaagaatttttaaattgaatcatatatatgatataatttgatccttcttgtatcttgaagttttgtacttgggatttctggactgataaatgaatcatcacattcttctggtaaatattttcttggagctctgtgtcaactttgatcctttgtctcccaggaaggtgtgacctctcctttgcctgcatacctcaaggccaggggaatatgcctcagtgatgcatttatctttgtatatcaggccgcatgattcccaactttctgccacacttaaattacgttcctccatttcagttttgtcttttctgtctaaagttcagtcaaagagtatcaaaaaa

SEQ ID NO: 1543 - DNA, 1031 bp, Homo sapiens
gcagaagcgttccgtgcgtgcaagtgctgcgaaccacgtgggtcccgggcgcgtttcgggtgctggcggctgcagccggagttcaaacctaagcagctggaagggccctgtggctaggtaccatagagtctctacacaggactaagtcagcctggtgtgcaggggaggcagacacacaaacagaaaattggactacagtgctaagatgctgtaagaagaggttaactaaaggacaggaagatggggccaagagatggtgctactgtctactttagggatcgtctttcaaggcgaggggcctcctatctcaagctgtgatacaggaaccatggccaactgtgagcgtaccttcattgcgatcaaaccagatggggtccagcggggtcttgtgggagagattatcaagcgttttgagcagaaaggattccgccttgttggtctgaaattcatgcaagcttccgaagatcttctcaaggaacactacgttgacctgaaggaccgtccattctttgccggcctggtgaaatacatgcactcagggccggtagttgccatggtctgggaggggctgaatgtggtgaagacgggccgagtcatgctcggggagaccaaccctgcagactccaagcctgggaccatccgtggagacttctgcatacaagttggcaggaacattatacatggcagtgattctgtggagagtgcagagaaggagatcggcttgtggtttcaccctgaggaactggtagattacacgagctgtgctcagaactggatctatgaatgacaggagggcagaccacattgcttttcacatccatttcccctccttcccatgggcagaggaccaggctgtaggaaatctagttatttacaggaacttcatcataatttggagggaagctcttggagctgtgagttctccctgtacagtgttaccatccccgaccatctgattaaaatgcttcctcccagcataggattcattgagttggttacttcatattgttgcattgcttttttttccttct

SEQ ID NO: 1544 - DNA, 1426 bp, Homo sapiens
ggatccgcgtgctaaagaaaaatcgccgttaaagcagttttctttttcactgtctttttcttttcgcggggaacccagctgttcctgcgagggccacctcctcaggaagaccccgcagctctcccgcggcgcttctgcaggaggcagcgacagtttcgagaacccgggccttcccctcccagtgcctccgggggttcgcgtttcaggcgctcgtgttttccgggaagggcaggcgcgctgggccttggggagctgcgctcggcgggcggaccgggggatcatggaagctgataaagatgacacacaacaaattcttaaggagcattcgccagatgaatttataaaagatgaacaaaataagggactaattgatgaaattacaaagaaaaatattcagctaaagaaggagatccaaaagcttgaaacggagttacaagaggctaccaaagaattccagattaaagaggatattcctgaaacaaagatgaaattcttatcagttgaaactcctgagaatgacagccagttgtcaaatatctcctgttcgtttcaagtgagctcgaaagttccttatgagatacaaaaaggacaagcacttatcacctttgaaaaagaagaagttgctcaaaatgtggtaagcatgagtaaacatcatgtacagataaaagatgtaaatctggaggttacggccaagccagttccattaaattcaggagtcagattccaggtttatgtagaagtttctaaaatgaaaatcaatgttactgaaattcctgacacactgcgtgaagatcaaatgagagacaaactagagctgagcttttcaaagttccgaaatggaggcggagaggtggaccgcgtggactatgacagacagtccgggagtgcagtcatcacgtttgtggagattggagtggctgacaagattttgaaaaagaaagaataccctctttatataaatcaaacctgccatagagttactgtttctccatacacagaaatacacttgaaaaagtatcagatattttcaggaacatctaagaggacagtgcttctgacaggaatggaaggcattcaaatggatgaagaaattgtggaggatttaattaacattcactttcaacgggcaaagaatggaggtggagaagtagatgtggtcaagtgttctctaggtcaacctcacatagcatactttgaagaatagacttaacagaatcatgaaaactatagctttttaacccggattactgtaaatgtttgacaagaatgaatatgcttttccttaaaaaatgaaaactttaatttttaccatccatttatgtttagatacaaaacttatttccatgtttctgaatcttctttgtttcaaatggtgctgcatgttttcaactacaataagtgcactgtaataaaaagttttgtttat

SEQ ID NO: 1545 - DNA, 1031 bp, Homo sapiens; identical to SEQ ID NO: 1543

SEQ ID NO: 1546 - DNA, 811 bp, Homo sapiens
gcagaagcgttccgtgcgtgcaagtgctgcgaaccacgtgggtcccgggcgcgtttcgggtgctggcggctgcagccggagttcaaacctaagcagctggaaggaaccatggccaactgtgagcgtaccttcattgcgatcaaaccagatggggtccagcggggtcttgtgggagagattatcaagcgttttgagcagaaaggattccgccttgttggtctgaaattcatgcaagcttccgaagatcttctcaaggaacactacgttgacctgaaggaccgtccattctttgccggcctggtgaaatacatgcactcagggccggtagttgccatggtctgggaggggctgaatgtggtgaagacgggccgagtcatgctcggggagaccaaccctgcagactccaagcctgggaccatccgtggagacttctgcatacaagttggcaggaacattatacatggcagtgattctgtggagagtgcagagaaggagatcggcttgtggtttcaccctgaggaactggtagattacacgagctgtgctcagaactggatctatgaatgacaggagggcagaccacattgcttttcacatccatttcccctccttcccatgggcagaggaccaggctgtaggaaatctagttatttacaggaacttcatcataatttggagggaagctcttggagctgtgagttctccctgtacagtgttaccatccccgaccatctgattaaaatgcttcctcccagcataggattcattgagttggttacttcatattgttgcattgcttttttttccttct

SEQ ID NO: 1547 - DNA, 6822 bp, Homo sapiens
gcagcagccgccagttccatgcactggcggagcagctctaggcggcggcttctactttcagtttcgtgcagagcgcggaggagccgcgagcgctgagggagtctgcactatggaaacaacctgtcaatccagctcaaggcacacatagcccagacacccatgagaccctctccgtggggaccctagagcacctatcatgaacgaggagaccaaggctggctcctcatggaccccgttggcctccagctcggcaacaagaacctgtggagctgtcttgtgaggctgctcaccaaagacccagaatggctgaacgccaagatgaagttcttcctccccaacacggacctggattccaggaacgagaccttggaccctgaacagagagtcatcctgcaactcaacaagctgcatgtccagggttcggacacctggcagtctttcattcattgtgtgtgcatgcagctggaggtgcctctggacctggaggtgctgctgctgagtacttttggctatgatgatgggttcaccagccagctgggagctgaggggaaaagccaacctgaatctcagctccaccatggcctgaagcgcccacatcagagctgtgggtcctcaccccgccggaagcagtgcaagaagcagcagctagagttggccaagaagtacctgcagctcctgcggacctctgcccagcagcgctacaggagccaaatccctgggtcagggcagccccacgccttccaccaggtctatgtccctccaatcctgcgccgggccacagcatccttagacactccggagggggccattatgggggacgtcaaggtggaagatggtgctgacgtgagcatctcggacctcttcaacaccagggttaacaagggcccgagggtgaccgtgcttttggggaaggctggcatgggcaagaccacgctggcccaccggctctgccagaagtgggcagagggccatctgaactgtttccaggccctgttcctttttgaattccgccagctcaacttgatcacgaggttcctgacaccgtccgagctcctttttgatctgtacctgagccctgaatcggaccacgacactgtcttccagtacctggagaagaacgctgaccaagtcctgctgatctttgatgggctagatgaggccctccagcctatgggtcctgatggcccaggcccagtcctcacccttttctcccatctctgcaatgggaccctcctgcctggctgccgggtgatggctacctcccgtccagggaagctgcctgcctgcctgcctgcagaggcagccatggtccacatgttgggctttgatgggccacgggtggaagaatatgtgaatcacttcttcagcgcccagccatcgcgggagggggccctggtggagttacagacaaatggacgtctccgaagcctgtgtgcggtgcccgcactgtgccaagtcgcctgtctctgcctccaccatctgcttcctgaccacgccccaggccagtctgtggccctcctgcccaacatgactcagctctatatgcagatggtgctcgccctcagcccccctgggcacttgcccacctcgtccctactggacctgggggaggtggccctgaggggcctggagacagggaaggttatcttctatgcaaaagatattgctccacccttgatagcttttggggccactcacagcctgctgacttccttctgcgtctgcacaggccctgggcaccagcagacaggctatgctttcacccacctcagcctgcaggagtttcttgctgccctgcacctgatggccagccccaaggtgaacaaagacacacttacccagtatgttaccctccattcccgctgggtacagcggaccaaagctagactgggcctctcagaccacctccccaccttcctggcgggcctggcatcctgcacctgccgccccttccttagccacctggcgcagggcaatgaggactgtgtgggtgccaagcaggctgctgtagtgcaggtgttgaagaagttggccacccgcaagctcacagggccaaaggttgtagagctgtgtcactgtgtggatgagacacaggagcctgagctggccagtctcaccgcacaaagcctcccctatcaactgcccttccacaatttcccactgacctgcaccgacctggccaccctgaccaacatcctagagcacagggaggcccccatccacctggattttgatggctgtcccctggagccccactgccctgaggctctggtaggctgtgggcagatagagaatctcagctttaagagcaggaagtgtggggatgcctttgcagaagccctctccaggagcttgccgacaatggggaggctgcagatgctggggttagcaggaagtaaaatcactgcccgaggcatcagccacctggtgaaagctttgcctctctgtccacagctgaaagaagtcagttttcgggacaaccagctcagtgaccaggtggtgctgaacattgtggaggttctccctcacctaccacggctccggaagcttgacctgagcagcaacagcatctgcgtgtcaaccctactctgcttggcaagggtggcagtcacgtgtcctaccgtcaggatgcttcaggccagggaggcggacctcatcttccttctttccccgcccacagagacaactgcagagctacaaagagctccagacctgcaggaaagtgacggccagaggaaaggggctcagagcagaagcttgacgctcaggctgcagaagtgtcagctccaggtccacgatgcggaggccctcatagccctgctccaggaaggccctcacctggaggaagtggacctctcagggaaccagctggaagatgaaggctgtcggctgatggcagaggctgcatcccagctgcacatcgccaggaagctggacctcagtgacaacgggctttctgtggccggggtgcattgtgtgctgagggccgtgagtgcgtgctggaccctggcagagctgcacatcagcctgcagcacaaaactgtgatcttcatgtttgcccaggagccagaggagcagaaggggccccaggagagggctgcatttcttgacagcctcatgctccagatgccctctgagctgcctctgagctcccgaaggatgaggctgacacattgtggcctccaagaaaagcacctagagcagctctgcaaggctctgggaggaagctgccacctcggtcacctccacctcgacttctcaggcaatgctctgggggatgaaggtgcagcccggctggctcagctgctcccagggctgggagctctgcagtccttgaacctcagtgagaacggtttgtccctggatgccgtgttgggtttggttcggtgcttctccactctgcagtggctcttccgcttggacatcagctttgaaagccaacacatcctcctgagaggggacaagacaagcagggatatgtgggccactggatctttgccagacttcccagctgcagccaagttcttagggttccgtcagcgctgcatccccaggagcctctgcctcagtgagtgtcctctggagcccccaagcctcacccgcctctgtgccactctgaaggactgcccgggacccctggaactgcaattgtcctgtgagttcctgagtgaccagagcctggagactctactggactgcttacctcaactccctcagctgagcctgctgcagctgagccagacgggactgtccccgaaaagccccttcctgctggccaacaccttaagcctgtgtccacgggttaaaaaggtggatctcaggtccctgcaccatgcaactttgcacttcagatccaacgaggaggaggaaggcgtgtgctgtggcaggttcacaggctgcagcctcagccaggagcacgtagagtcactctgctggttgctgagcaagtgtaaagacctcagccaggtggatctctcagcaaacctgctgggcgacagcggactcagatgccttctggaatgtctgccgcaggtgcccatctccggtttgcttgatctgagtcacaacagcatttctcaggaaagtgccctgtacctgctggagacactgccctcctgcccacgtgtccgggaggcctcagtgaacctgggctctgagcagagcttccggattcacttctccagagaggaccaggctgggaagacactcaggctaagtgagtgcagcttccggccagagcacgtgtccaggctggccaccggcttgagcaagtccctgcagctgacggagctcacgctgacccagtgctgcctgggccagaagcagctggccatcctcctgagcttggtggggcgacccgcagggctgttcagcctcagggtgcaggagccgtgggcggacagagccagggttctctccctgttagaagtctgcgcccaggcctcaggcagtgtcactgaaatcagcatctccgagacccagcagcagctctgtgtccagctggaatttcctcgccaggaagagaatccagaagctgtggcactcaggttggctcactgtgaccttggagcccaccacagccttcttgtcgggcagctgatggagacatgtgccaggctgcagcagctcagcttgtctcaggttaacctctgtgaggacgatgatgccagttccctgctgctgcagagcctcctgctgtccctctctgagctgaagacatttcggctgacctccagctgtgtgagcaccgagggcctcgcccacctggcatctggtctgggccactgccaccacttggaggagctggacttgtctaacaatcaatttgatgaggagggcaccaaggcgctgatgagggcccttgaggggaaatggatgctaaagaggctggacctcagtcaccttctgctgaacagctccaccttggccttgcttactcacagactaagccagatgacctgcctgcagagcctcagactgaacaggaacagtatcggtgatgtcggttgctgccacctttctgaggctctcagggctgccaccagcctagaggagctggacttgagccacaaccagattggagacgctggtgtccagcacttagctaccatcctgcctgggctgccagagctcaggaagatagacctctcagggaatagcatcagctcagccgggggagtgcagttggcagagtctctcgttctttgcaggcgcctggaggagttgatgcttggctgcaatgccctgggggatcccacagccctggggctggctcaggagctgccccagcacctgagggtcctacacctaccattcagccatctgggcccaggtggggccctgagcctggcccaggccctggatggatccccccatttggaagagatcagcttggcggaaaacaacctggctggaggggtcctgcgtttctgtatggagctcccgctgctcagacagatagacctggtttcctgtaagattgacaaccagactgccaagctcctcacctccagcttcacgagctgccctgccctggaagtaatcttgctgtcctggaatctcctcggggatgaggcagctgccgagctggcccaggtgctgccgcagatgggccggctgaagagagtggacctggagaagaatcagatcacagctttgggggcctggctcctggctgaaggactggcccaggggtctagcatccaagtcatccgcctctggaataaccccattccctgcgacatggcccagcacctgaagagccaggagcccaggctggactttgccttctttgacaaccagccccaggccccttggggtacttgatggccccctcaagacctttggaatccagccaagtgatgcacccaaatgatccacctttcgcccactgggataattgactcaggaaagaagagcctcggcagggcgctctgcactccacccaggaggaaggatacgtgtgtcctgctgcagtcctcagggagaacttttttgggaaccaggagctgggtctggacaaaggagtaccctgcattacgtgggatatgtgtgatcaattggggacatgcgacacacaatgagggtgtcatgacaatgcatgacacgtacggttatatgtggcagtgtgaccccttgacatgtggcgttacatgaaagtcagtgtggcacgtgttctgtggcatgggtgctggcatcccaagtagcaggatacatgattgttggtctatatatgacacatgacaaatgtccatgtcacaggactcatggctggccagatgacctcaggctggcccaagatctaatttattaatttttaaagcaaatacatatttatagattgtgtgtatggagcagctaagtcaggaaaagtcttccgcccgagctgggaggggagagtgtccatgcactgaccagtccaggggctcaagggccagggctctggaacaagccagggactcagccattaagtcccctcctgcctcaatcctcagcctacccatctataaacttgatgactcctcccttacttacatactagcttccaaggacaggtggaggtagggccagcctggcgggagtggagaagcccagtctgtcctatgtaagggacaaagccaggtctaatggtactgggtagggggcactgccaagacaataagctaggctactgggtccagctactactttggtgggattcaggtgagtctccatgcacttcacatgttacccagtgttcttgttacttccaaggagaaccaagaatggctctgtcacactcgaagccaggcttgatcaataaacacaatggtattccacgtc

SEQ ID NO: 1548 - DNA, 2661 bp, Homo sapiens
gtgcgcctgcgtggaacgattctgtggcgagtgccggccgaaagctaggtccggattgcacgtggagggccgcccgaagggcactctcggacattaacccgcattctgtaccatggggcgcaagttggaccctacgaaggagaagcgggggccaggccgaaaggcccggaagcagaagggtgccgagacagaactcgtcagattcttgcctgcagtaagtgacgaaaattccaagaggctgtctagtcgtgctcgaaagagggcagccaagaggagattgggctctgttgaagcccctaagacaaataagtctcctgaggccaaaccattgcctggaaagctaccaaaaggagctgtccagacagctggtaagaagggaccccagtccctatttaatgctcctcgaggcaagaagcgcccagcacctggcagtgatgaggaagaggaggaggaagactctgaagaagatggtatggtgaaccacggggacctctggggctccgaggacgatgctgatacggtagatgactatggagctgactccaactctgaggatgaggaggaaggtgaagcgttgctgcccattgaaagagctgctcggaagcagaaggcccgggaagctgctgctgggatccagtggagtgaagaggagaccgaggacgaggaggaagagaaagaagtgacccctgagtcaggccccccaaaggtggaagaggcagatgggggcctgcagatcaatgtggatgaggaaccatttgtgctgccccctgctggggagatggagcaggatgcccaggctccagacctgcaacgagttcacaagcggatccaggatattgtgggaattctgcgtgattttggggctcagcgggaggaagggcggtctcgttctgaatacctgaaccggctcaagaaggatctggccatttactactcctatggagacttcctgcttggcaagctcatggacctcttccctctgtctgagctggtggagttcttagaagctaatgaggtgcctcggcccgtcaccctccggaccaataccttgaaaacccgacgccgagaccttgcacaggctctaatcaatcgtggggttaacctggatcccctgggcaagtggtcaaagactggactagtggtgtatgattcttctgtgcccattggtgctacccccgagtacctggctgggcactacatgctgcagggagcctccagcatgttgcccgtcatggccttggcaccccaggaacatgagcggatcctggacatgtgttgtgcccctggaggaaagaccagctacatggcccagctgatgaagaacacgggtgtgatccttgccaatgacgccaatgctgagcggctcaagagtgttgtgggcaacttgcatcggctgggagtcaccaacaccattatcagccactatgatgggcgccagttccccaaggtggtggggggctttgaccgagtactgctggatgctccctgcagtggcactggggtcatctccaaggatccagccgtgaagactaacaaggatgagaaggacatcctgcgctgtgctcacctccagaaggagttgctcctgagtgctattgactctgtcaatgcgacctccaagacaggaggctacctggtttactgcacctgttctatcacagtagaagagaatgagtgggtggtagactatgctctgaaaaagaggaatgtgcgactggtgcccacgggcctagactttggccaggaaggttttacccgctttcgagaaaggcgcttccaccccagtctgcgttctacccgacgcttctaccctcatacccacaatatggatgggttcttcattgccaagttcaagaaattttccaattctatccctcagtcccagacaggaaattctgaaacagccacacctacaaatgtagacttgcctcaggtcatccccaagtctgagaacagcagccagccagccaagaaagccaagggggctgcaaagacaaagcagcagctgcagaaacagcaacatcccaagaaggcctccttccagaagctgaatggcatctccaaaggggcagactcagaattgtccactgtaccttctgtcacaaagacccaagcttcctccagcttccaggatagcagtcagccagctggaaaagccgaagggatcagggagccaaaggtgactgggaagctaaagcaacgatcacctaaattacagtcctccaagaaagttgctttcctcaggcagaatgcccctcccaagggcacagacacacaaacaccggctgtgttatccccatccaagactcaggccaccctgaaacctaaggaccatcatcagccccttggaagggccaagggggttgagaagcagcagttgccagagcagccttttgagaaagctgccttccagaaacagaatgatacccccaaggggcctcagcctcccactgtgtctcccatccgttccagccgccccccaccagcaaagaggaagaaatctcagtccaggggcaacagccagctgctgctatcttagatggttgaaaactagacgggtggctcactgccattgtcaccaggttggaactcttgcctctgtgaggatgccttctctactgtgcatacccatgaaatttaatacacattttaaaacctctg

SEQ ID NO: 1549 - DNA, 867 bp, Homo sapiens
attgggctgagtcggagacttcctttcctgattggccgtgttgtacggcggcttctcgcgcagctgatgacctggaagtgatgcctaaagctgtggaccgcgtgggctcgcctccctgggactaggtttcagcggccgctgcgatgaccaaaataaaggcagatcccgacgggcccgaggctcaggcggaggcgtgttccggggagcgcacctaccaggagctgctggtcaaccagaaccccatcgcgcagcccctggcttctcgccgcctcacgcggaagctctacaaatgcatcaagaaagcggtgaagcagaagcagattcggcgcggggtgaaagaggttcagaaatttgtcaacaaaggagaaaaagggatcatggttttggcaggagacacactgcccattgaggtatactgccatctcccagtcatgtgtgaggaccgaaatttgccctatgtctatatcccctctaagacggacctgggtgcagccgcaggctccaagcgccccacctgtgtgataatggtcaagccccatgaggagtaccaggaggcttacgatgagtgcctggaggaggtgcagtccctgcccctacccctatgaggggctccggtagcacctgggcacctgccgctggaagctattgggctggcagcaggacgactggctgtcctcctgcccacccacactgacggcatcttcccagttccccaaggcacgccttcttcccaggcagctctaacagccctttcatgaaggtaatgctagtcttctgtccatcagtgccatttcctgtagaactaaaggctgttccaagaatgtggggtggggaaagtaaatgctaagactaaaaaaaaaaaaaaaa

SEQ ID NO: 1550 - DNA, 1857 bp, Homo sapiens
ccgccgcagccgccgcagcagcagcagccgccgccccaggccccccccatggagcccgaggccccggattcccgcaagaggcccctcgaaacgccccccgaggtggtctgcaccaagcgcagcaacacgggagaggaaggcgaatacttcctgaaggtgctgatccccagctacgcggcgggctccatcattggcaagggcgggcagaccatcgtgcagctgcagaaggagaccggagccaccatcaagctctccaagtccaaagacttctaccccggaaccacagagcgggtatgcctagtacagggcacggcagaggccttgaatgctgtgcacagctttattgccgagaaggtccgagaaatcccacaagcgatgaccaagcctgaggtggtcaacatccttcaaccccaaaccacgatgaaccccgacagagccaagcaggccaagctgatcgtccccaacagcacggcgggcctgatcatcggcaagggaggcgccacggtgaaagccgtgatggaacagtcaggagcatgggtgcagctgtcccagaagccggagggcatcaacctgcaggagcgcgtggtgacggtcagcggcgagcccgagcaggtgcacaaggccgtgagcgccatcgtgcagaaggtacaagaagacccccagagcagcagctgcctcaacatcagctacgccaacgtggcaggccccgtggccaactccaaccccaccggctctccgtacgccagccccgcggatgtgcttccagccgcggccgcagcgtcggccgccgccgcctccggcctgctgggccccgccgggctggctggcgtgggggcctttcccgccgcgctgcccgccttctcaggcaccgacctgctggccatcagcacggcgcttaacacgctggccagttacggctacaacaccaactccctgggcctgggcctcaactcggccgcagcttccggcgtcctggccgccgtggccgccggggccaacccagcggccgccgccgccgccaacctcctggcatcctacgcgggcgaggccggggccgggccagccggaggggccgccccgccgccgcccccgcctcccggagccctggggtcctttgcgttggccgcagccgccaacggctacctcggggccggggcgggcggcggggcgggcggagggggcggcccgctggtggccgctgcagccgcggccggggcggccgggggcttcctgacggcggagaagctggcggctgagagtgccaaggagctggtggagattgcggtgcctgagaacctggtgggagccatcctggggaaggggggcaagacgttggtggagtaccaggagctgacgggcgctcgcatccagatctccaagaagggcgagttcctgccaggcacgcggaaccggcgggtcaccatcacgggcagccccgcggccacgcaagccgctcaatacctcatcagtcagcgggtcacctacgagcagggagtgagggcctcaaacccccagaaagtgggatgaggcctgtggtgtgtgctcccacccttttctctcctcccatctcctcctcttccctctcctcctcccccccaactcctgacctcagcttggtgtagtcctgctcctcttgggatggggctggggtaggcccgactgcaccctccccttctggtagtcataggcaggattgagtgacggttgggaagggggctcagaagccccctccccagcccggaactgacccctccttcctccctccctgtgcttggctgggcctgacccttcctgtcccagggcccaggtctgtgtgatatctgtatatattgcattttgttgattttaatagaaaac

SEQ ID NO: 1551 - DNA, 1433 bp, Homo sapiens
ttgctgggtgtcccagggcctgaggcaggacggtactccgctgacaccttccctttcggccttgaggttcccagcctggtggccccaggacgttccggtcgcatggcagagtgctacggacgacgcctatgaagcccttagtccttctagttgcgcttttgctatggccttcgtctgtgccggcttatccgagcataactgtgacacctgatgaagagcaaaacttgaatcattatatacaagttttagagaacctagtacgaagtgttccctctggggagccaggtcgtgagaaaaaatctaactctccaaaacatgtttattctatagcatcaaagggatcaaaatttaaggagctagttacacatggagacgcttcaactgagaatgatgttttaaccaatcctatcagtgaagaaactacaactttccctacaggaggcttcacaccggaaataggaaagaaaaaacacacggaaagtaccccattctggtcgatcaaaccaaacaatgtttccattgttttgcatgcagaggaaccttatattgaaaatgaagagccagagccagagccggagccagctgcaaaacaaactgaggcaccaagaatgttgccagttgttactgaatcatctacaagtccatatgttacctcatacaagtcacctgtcaccactttagataagagcactggcattgggatctctacagaatcagaagatgttcctcagctctcaggtgaaactgcgatagaaaaacccgaagagtttggaaagcacccagagagttggaataatgatgacattttgaaaaaaattttagatattaattcacaagtgcaacaggcacttcttagtgacaccagcaacccagcatatagagaagatattgaagcctctaaagatcacctaaaacgaagccttgctctagcagcagcagcagaacataaattaaaaacaatgtataagtcccagttattgccagtaggacgaacaagtaataaaattgatgacatcgaaactgttattaacatgctgtgtaattctagatctaaactctatgaatatttagatattaaatgtgttccaccagagatgagagaaaaagctgctacagtattcaatacattaaaaaatatgtgtagatcaaggagagtcacagccttattaaaagtttattaaacaataatataaaaattttaaacctacttgatattccataacaaagctgatttaagcaaactgcattttttcacaggagaaataatcatattcgtaatttcaaaagttgtataaaaatattttctattgtagttcaaatgtgccaacatctttatgtgtcatgtgttatgaacaattttcatatgcactaaaaacctaatttaaaataaaattttggttcagtaaaaaaaaaaaaaaaaaaaaaaaaaaaaa

SEQ ID NO: 1552 - DNA, 4716 bp, Homo sapiens
gaagaactggaactggtctggccatagggggaagcggcgcgttaaatccgccccctctccataccctactttcaaggggtgggcggtagaggggaggttggggttggagcagcggcgagggggcccctcccttgcacctccccccaccggacttggtcgcgcccgaagtgtaacactttctctttgtcggaggagctcctctgtttcctgtgcagtagctcccgttgcggcggcacccgtggcagccctggcggacgcaggagcgatggcagcgaccgatatagctcgccaggtgggtgaaggttgccgaactgtccccctggctggacatgtggggtttgacagcttgcctgaccagctggtgaataagtccgtcagccagggcttctgcttcaacatcctgtgcgtgggagagacaggtttgggcaagtccaccctcatggacaccctgttcaacaccaaattcgaaggggagccagccacccacacacagccgggtgtccagctccagtctaatacctatgacctccaagagagcaacgtgaggctaaagctcacgatcgttagcacagttggctttggggaccagatcaacaaagaggacagctacaagcctatcgtggaattcatcgatgcacaattcgaggcctacctgcaggaagagctaaagatccgaagagtgctacacacctaccatgactcccgaatccatgtctgcttgtatttcattgcccccacgggtcattccctgaagtctctggacctagtgactatgaagaagctggacagtaaggtgaacatcatccccatcattgccaaagcagatgccatttcgaagagtgagctaacaaagttcaaaatcaaaatcaccagcgagcttgtcagcaacggagtccagatctatcagtttcctacagatgatgagtcggtggcagagatcaatggaaccatgaacgcccacctgccgtttgctgtcattggcagcacagaagaactgaagataggcaacaagatgatgagggcgcggcagtatccttggggcactgtgcaggttgaaaacgaggcccactgcgactttgtgaagctgcgggagatgctgattcgggtcaacatggaggatctgcgggagcagacccacacccggcactatgagctgtatcgccgctgtaagctggaggagatgggcttcaaggacaccgaccctgacagcaaacccttcagtttacaggagacatatgaggccaaaaggaacgagttcctaggggaactccagaaaaaagaagaggagatgagacagatgttcgtccagcgagtcaaagagaaagaagcggagctcaaagaggcagagaaagagctgcacgagaagtttgaccgtctgaagaaactgcaccaggacgagaagaagaaactggaggataagaagaaatccctggatgatgaagtgaatgctttcaagcaaagaaagacggcggctgagctgctccagtcccagggctcccaggctggaggctcacagactctgaagagagacaaagagaagaaaaattaactctgctgtttgctgcatgctgcatgagacccagggtcctgtttgggcttcctgtagacacccttttcctgcgcaacagagctgggcctccctttctctaatttcccccttaacatgcctggggggcatacaatccaacccgcgccctctcctctcttcctgccaaggtttatagaaacctgagaatctgagggtgatgtctggccgctggtcaagaagccaacagtcatgtggctcgcagatgcatcctgcatcccagtccccctcccagcacccccagccatcccccctgtcttcccccacatctttgccagaggtgtgacatggtcagggggcccatctgctactctttcccaccagctcccctgttccagttctggttgctgttagtttccctgaggtatttgcaaccaccatggctgggtaaccaccgatcagcacagctgtccccttggtctcctgtatcccagtcactagtcctccctggtccaccccaccctcatcctcaggagccacagccatttcttagagggtttcaaaaggacagcctttggcgccttttccttctaacctttgagtccagccctttccagttttcattcactcgaagtaactgcactcaagctgtgctcaaaatcggcaacgcatttatttacaccaagcccttcccataaaacacaactgctgaagaaaatagcagacgtttcccctctctctaactctgggtatcccacagatgcaaaagggagaataaacctgaatattattaccagcctagagtcttgaatgatagccttaccgaattcttcttgtgaggtatttcagcatctcggggggtaatttccggaagggctccatactgtcccaataaggtgaggccagtagcaggaataataaatcccactttgtaggctggaaaactgagctgtcaaaagaatcaagtgtttgggggtttgctctgatgagtcttctagttcatttggtgaatgtcatgatgatttttaacatgcattttgcatgcatcccccaataagaagagatgagactcggctggagagaagaaaaggcccttaactttctttccaatttaaggagttgagagtttaaaaatattccagccctaagtttttatcatgggtcccatctgatagtggctttgggaacctctgtgaagtagagagccctcccttgtcagggttatgaggcacagtggcctttggtgtttggccagtgacagtgtgagagatggagttgacctggcaatgatctgtggctaacatgccgtctctctgcccttcctttgcagtaatccatggctgtgtactgaatagtattccccgctacagctggactggactccatttagccttttaagccgaggttcctattttaactgacagctttcctttggggtgccaggcagcgaggccccccacccctatcctgccatgtacttcaagctcacttcttctttttgagttccgcaacttgctcctgcctcccagccccactggcactgaccatgaccacctacttctattttttttttagagtttctttttttgatcacttactttcaaagcacacagtcaaacaaggttatgccaaatttccaggcctttttgaagtattgagaaggggaaggggatttctcacttcaattatagatcataataggaagcaaaaagaaaaaaatgaaaagcaaacatatgcacgcacttttcttgttgacaaagcaagaatataggtttgctgtgtaggtttggtgctctattgattggtgagtgaccagagcaagtatgaaggtgatgctgccaaagcacaagccagtttcttgggaaaattcaagttacagtggagtatttttttgaagaccatatgcttggaggtagaaacaaaccaacgaccaaaaaaaaaaaaaaaaaaatctgctcagatactcagccagtagctcagagagatgctgagttaggcctgtcaggtctccttgggaaaggcttcatatttgcaactttgatgattctatgtccagcttcagagctgctttcccagaaattcacgcttaaacaaccaaccggtaaccaccacttccccacaccgccgcccggtaattatttgcattacaaaccggaggcgccctcatttgcatttgtgtacagattaactagttaaggcttgagaagctctgaataattcaaaagtattagacccacacagccttggagagaccttcagaaactaaggaggagttttatattaagggagacattttagtcagtaagacgatataacctacttactccgtaaggggaaatgaaggcccagagaagggaagggacttgaccgaggtcccacttctgtttcgaggcagaagccagactaattttcatgcctcctgactcccaatcagtttcacaaagggattcaatctgtttatatacgttacattcctggatacgaggtcttttgatgttcagagtaactgactagttagtattagaagaccctcgaggtttttttccacagaaaaacatctgaagatggattgggtgagggctggcaaaacgaaggcatgccgggccagctccttaacccaatgacccagtgatgctgcaaggctggaacggggtccaggagactgtgtgtaacaggtgccctaggtgacccttataatcagggaagtttggtgaacaaaaatcgaacccatgagtgaacataaattaaaaagttgatcaacctattaaaatgtgtatttcattgggtagcttttctcactgtagacagattttttccttcttcaatgaaaaggcttttaaattagtacaactgttactatttaaaaaaaaaataccctaagtactctgtttacttctggtgaaacaaaaccagtcattagaaatggtctgtgcttttattttcccagactggagtggcttttctgaaacacacacacacacacacacacacacacacacacacacacacacacacacgtacacacatccctcacttctcttaagccaagaagtttgctttccctagctgcagtgtagatggctcttgtttttgtttttttgttttaatcatttggcattcacatgtggctgttaatatgtgcttgtttttaattaaaacaagaagctttaaaaaaaaaaaaaaaaaaaaaa

SEQ ID NO: 1553 - DNA, 2620 bp, Homo sapiens
gaagaactggaactggtctggccatagggggaagcggcgcgttaaatccgccccctctccataccctactttcaaggggtgggcggtagaggggaggttggggttggagcagcggcgagggggcccctcccttgcacctccccccaccggacttggtcgcgcccgaagtgtaacactttctctttgtcggaggagctcctctgtttcctgtgcagtagctcccgttgcggcggcacccgtggcagccctggcggacgcaggagcgatggcagcgaccgatatagctcgccaggtgggtgaaggttgccgaactgtccccctggctggacatgtggggtttgacagcttgcctgaccagctggtgaataagtccgtcagccagggcttctgcttcaacatcctgtgcgtgggagagacaggtttgggcaagtccaccctcatggacaccctgttcaacaccaaattcgaaggggagccagccacccacacacagccgggtgtccagctccagtctaatacctatgacctccaagagagcaacgtgaggctaaagctcacgatcgttagcacagttggctttggggaccagatcaacaaagaggacagctacaagcctatcgtggaattcatcgatgcacaattcgaggcctacctgcaggaagagctaaagatccgaagagtgctacacacctaccatgactcccgaatccatgtctgcttgtatttcattgcccccacgggtcattccctgaagtctctggacctagtgactatgaagaagctggacagtaaggtgaacatcatccccatcattgccaaagcagatgccatttcgaagagtgagctaacaaagttcaaaatcaaaatcaccagcgagcttgtcagcaacggagtccagatctatcagtttcctacagatgatgagtcggtggcagagatcaatggaaccatgaacgcccacctgccgtttgctgtcattggcagcacagaagaactgaagataggcaacaagatgatgagggcgcggcagtatccttggggcactgtgcaggttgaaaacgaggcccactgcgactttgtgaagctgcgggagatgctgattcgggtcaacatggaggatctgcgggagcagacccacacccggcactatgagctgtatcgccgctgtaagctggaggagatgggcttcaaggacaccgaccctgacagcaaacccttcagtttacaggagacatatgaggccaaaaggaacgagttcctaggggaactccagaaaaaagaagaggagatgagacagatgttcgtccagcgagtcaaagagaaagaagcggagctcaaagaggcagagaaagagctgcacgagaagtttgaccgtctgaagaaactgcaccaggacgagaagaagaaactggaggataagaagaaatccctggatgatgaagtgaatgctttcaagcaaagaaagacggcggctgagctgctccagtcccagggctcccaggctggaggctcacagactctgaagagagacaaagagaagaaaaattaactctgctgtttgctgcatgctgcatgagacccagggtcctgctttttttaatcttgtcttcagcagctgcactaagtctaaaggagaagactgccattatagaagagttagggttccatattgtctcaaatcagaaatcaaccaatttcctctcccctcaaactgcaagcacacacacatacaccacaccactcaacaagtgttcatgtgtccctgtgtccaggcaagaagctctcttcctgactcacatggtattttaaatggaagtgtcttgtcctaactaacaaggcaggaaaagaaccatcagagctggaaaatggacgaaatgtaacctcagagaaacaactacaggaccactcacccaagtgtaagtgactggggcaggacacctcagctgtgggtatgaaagtactgttctgttcacaaggttttgtttgagttttatgtttttcttttaaacatttctctggttcgatgggttgactgtctacagccactgttaaacatttctgaatatgcaagagaaagtcaagtgacatttgtatcttcttcagcattcgcagaccttctatagattccagcaaagggggaaaatgtatccactatctaacacttaggtagagaagggagggggtttaagcttagtgagggcaaaattactccattccaccttccgagaccagttagggttttgagagaggtttctgctcaacctgggatctggagggagagctttgatgttggtaaatctgccttgaattcattggtttaacttgcatcaaaataccatgtgagtgtgctcattctcatatatcccctaccaccatcaccaccattctgctgttcagtgtctcttgagagagcctctttgcatgttttccagaatctgtgtgtgtttttcctttcttctcctttgttctttttgctcaaaggtgtgaccagtcattgcccctctggggctttcattctccaggagaaacatcccagaaccagcactgtttagcctgatacctttctaatgtccatgtcaattttcaataaaattcaaagaaatgctaaaaaaaaaaaaaa

SEQ ID NO: 1554 - DNA, 2575 bp, Homo sapiens
gaagaactggaactggtctggccatagggggaagcggcgcgttaaatccgccccctctccataccctactttcaaggggtgggcggtagaggggaggttggggttggagcagcggcgagggggcccctcccttgcacctccccccaccggacttggtcgcgcccgaagtgtaacactttctctttgtcggaggagctcctctgtttcctgtgcagtagctcccgttgcggcggcacccgtggcagccctggcggacgcaggagcgatggcagcgaccgatatagctcgccaggtgggtgaaggttgccgaactgtccccctggctggacatgtggggtttgacagcttgcctgaccagctggtgaataagtccgtcagccagggcttctgcttcaacatcctgtgcgtgggagagacaggtttgggcaagtccaccctcatggacaccctgttcaacaccaaattcgaaggggagccagccacccacacacagccgggtgtccagctccagtctaatacctatgacctccaagagagcaacgtgaggctaaagctcacgatcgttagcacagttggctttggggaccagatcaacaaagaggacagctacaagcctatcgtggaattcatcgatgcacaattcgaggcctacctgcaggaagagctaaagatccgaagagtgctacacacctaccatgactcccgaatccatgtctgcttgtatttcattgcccccacgggtcattccctgaagtctctggacctagtgactatgaagaagctggacagtaaggtgaacatcatccccatcattgccaaagcagatgccatttcgaagagtgagctaacaaagttcaaaatcaaaatcaccagcgagcttgtcagcaacggagtccagatctatcagtttcctacagatgatgagtcggtggcagagatcaatggaaccatgaacgcccacctgccgtttgctgtcattggcagcacagaagaactgaagataggcaacaagatgatgagggcgcggcagtatccttggggcactgtgcaggttgaaaacgaggcccactgcgactttgtgaagctgcgggagatgctgattcgggtcaacatggaggatctgcgggagcagacccacacccggcactatgagctgtatcgccgctgtaagctggaggagatgggcttcaaggacaccgaccctgacagcaaacccttcagtttacaggagacatatgaggccaaaaggaacgagttcctaggggaactccagaaaaaagaagaggagatgagacagatgttcgtccagcgagtcaaagagaaagaagcggagctcaaagaggcagagaaagagctgcacgagaagtttgaccgtctgaagaaactgcaccaggacgagaagaagaaactggaggataagaagaaatccctggatgatgaagtgaatgctttcaagcaaagaaagacggcggctgagctgctccagtcccagggctcccaggctggaggctcacagactctgaagagagacaaagagaagaaaaactttttttaatcttgtcttcagcagctgcactaagtctaaaggagaagactgccattatagaagagttagggttccatattgtctcaaatcagaaatcaaccaatttcctctcccctcaaactgcaagcacacacacatacaccacaccactcaacaagtgttcatgtgtccctgtgtccaggcaagaagctctcttcctgactcacatggtattttaaatggaagtgtcttgtcctaactaacaaggcaggaaaagaaccatcagagctggaaaatggacgaaatgtaacctcagagaaacaactacaggaccactcacccaagtgtaagtgactggggcaggacacctcagctgtgggtatgaaagtactgttctgttcacaaggttttgtttgagttttatgtttttcttttaaacatttctctggttcgatgggttgactgtctacagccactgttaaacatttctgaatatgcaagagaaagtcaagtgacatttgtatcttcttcagcattcgcagaccttctatagattccagcaaagggggaaaatgtatccactatctaacacttaggtagagaagggagggggtttaagcttagtgagggcaaaattactccattccaccttccgagaccagttagggttttgagagaggtttctgctcaacctgggatctggagggagagctttgatgttggtaaatctgccttgaattcattggtttaacttgcatcaaaataccatgtgagtgtgctcattctcatatatcccctaccaccatcaccaccattctgctgttcagtgtctcttgagagagcctctttgcatgttttccagaatctgtgtgtgtttttcctttcttctcctttgttctttttgctcaaaggtgtgaccagtcattgcccctctggggctttcattctccaggagaaacatcccagaaccagcactgtttagcctgatacctttctaatgtccatgtcaattttcaataaaattcaaagaaatgctaaaaaaaaaaaaaa

SEQ ID NO: 1555 - DNA, 3407 bp, Homo sapiens
gaagaactggaactggtctggccatagggggaagcggcgcgttaaatccgccccctctccataccctactttcaaggggtgggcggtagaggggaggttggggttggagcagcggcgagggggcccctcccttgcacctccccccaccggacttggtcgcgcccgaagtgtaacactttctctttgtcggaggagctcctctgtttcctgtgcagtagctcccgttgcggcggcacccgtggcagccctggcggacgcaggagcgatggcagcgaccgatatagctcgccaggtgggtgaaggttgccgaactgtccccctggctggacatgtggggtttgacagcttgcctgaccagctggtgaataagtccgtcagccagggcttctgcttcaacatcctgtgcgtgggagagacaggtttgggcaagtccaccctcatggacaccctgttcaacaccaaattcgaaggggagccagccacccacacacagccgggtgtccagctccagtctaatacctatgacctccaagagagcaacgtgaggctaaagctcacgatcgttagcacagttggctttggggaccagatcaacaaagaggacagctacaagcctatcgtggaattcatcgatgcacaattcgaggcctacctgcaggaagagctaaagatccgaagagtgctacacacctaccatgactcccgaatccatgtctgcttgtatttcattgcccccacgggtcattccctgaagtctctggacctagtgactatgaagaagctggacagtaaggtgaacatcatccccatcattgccaaagcagatgccatttcgaagagtgagctaacaaagttcaaaatcaaaatcaccagcgagcttgtcagcaacggagtccagatctatcagtttcctacagatgatgagtcggtggcagagatcaatggaaccatgaacgcccacctgccgtttgctgtcattggcagcacagaagaactgaagataggcaacaagatgatgagggcgcggcagtatccttggggcactgtgcaggttgaaaacgaggcccactgcgactttgtgaagctgcgggagatgctgattcgggtcaacatggaggatctgcgggagcagacccacacccggcactatgagctgtatcgccgctgtaagctggaggagatgggcttcaaggacaccgaccctgacagcaaacccttcagtttacaggagacatatgaggccaaaaggaacgagttcctaggggaactccagaaaaaagaagaggagatgagacagatgttcgtccagcgagtcaaagagaaagaagcggagctcaaagaggcagagaaagagctgcacgagaagtttgaccgtctgaagaaactgcaccaggacgagaagaagaaactggaggataagaagaaatccctggatgatgaagtgaatgctttcaagcaaagaaagacggcggctgagctgctccagtcccagggctcccaggctggaggctcacagactctgaagagagacaaagagaagaaaaataatccatggctgtgtactgaatagtattccccgctacagctggactggactccatttagccttttaagccgaggttcctattttaactgacagctttcctttggggtgccaggcagcgaggccccccacccctatcctgccatgtacttcaagctcacttcttctttttgagttccgcaacttgctcctgcctcccagccccactggcactgaccatgaccacctacttctattttttttttagagtttctttttttgatcacttactttcaaagcacacagtcaaacaaggttatgccaaatttccaggcctttttgaagtattgagaaggggaaggggatttctcacttcaattatagatcataataggaagcaaaaagaaaaaaatgaaaagcaaacatatgcacgcacttttcttgttgacaaagcaagaatataggtttgctgtgtaggtttggtgctctattgattggtgagtgaccagagcaagtatgaaggtgatgctgccaaagcacaagccagtttcttgggaaaattcaagttacagtggagtatttttttgaagaccatatgcttggaggtagaaacaaaccaacgaccaaaaaaaaaaaaaaaaaaatctgctcagatactcagccagtagctcagagagatgctgagttaggcctgtcaggtctccttgggaaaggcttcatatttgcaactttgatgattctatgtccagcttcagagctgctttcccagaaattcacgcttaaacaaccaaccggtaaccaccacttccccacaccgccgccctggtaattatttgcattacaaaccggaggcgccctcatttgcatttgtgtacagattaactagttaaggcttgagaagctctgaataattcaaaagtattagacccacacagccttggagagaccttcagaaactaaggaggagttttatattaagggagacattttagtcagtaagacgatataacctacttactccgtaaggggaaatgaaggcccagagaagggaagggacttgaccgaggtcccacttctgtttcgaggcagaagccagactaattttcatgcctcctgactcccaatcagtttcacaaagggattcaatctgtttatatacgttacattcctggatacgaggtcttttgatgttcagagtaactgactagttagtattagaagaccctcgaggtttttttccacagaaaaacatctgaagatggattgggtgagggctggcaaaacgaaggcatgccgggccagctccttaacccaatgacccagtgatgctgcaaggctggaacggggtccaggagactgtgtgtaacaggtgccctaggtgacccttataatcagggaagtttggtgaacaaaaatcgaacccatgagtgaacataaattaaaaagttgatcaacctattaaaatgtgtatttcattgggtagcttttctcactgtagacagattttttccttcttcaatgaaaaggcttttaaattagtacaactgttactatttaaaaaaaaaataccctaagtactctgtttacttctggtgaaacaaaaccagtcattagaaatggtctgtgcttttattttcccagactggagtggcttttctgaaacacacacacacacacacacacacacacacacacacacacacacacacacgtacacacatccctcacttctcttaagccaagaagtttgctttccctagctgcagtgtagatggctcttgtttttgtttttttgttttaatcatttggcattcacatgtggctgttaatatgtgcttgtttttaattaaaacaagaagctttaaaaaaaaaaaaaaaaaaaaaa

SEQ ID NO: 1556 - DNA, 5962 bp, Homo sapiens
agtgccgccactggaaccaggagatgcggcgcaggagctgtcgctgtgtttgctttaacctgagtcttgttccttattgtggttcctgctgtggttttgatcatgttgttaccctcggacgtagcccggcttgtattgggttacttacagcaagaaaacctcatttctacctgccagacttttattttggaaagttcagatttaaaagaatatgcagaacattgtacagatgaagggtttattccagcctgcttactgtccttatttggaaaaaacttgacaacaattttaaatgagtatgtagctatgaaaacaaaagaaacatcaaataatgtcccagcaataatgtcatctctatggaagaaattggaccatacactttctcagatcaggagcatgcaaagttccccaaggtttgctggcagtcagagagcccgaacgagaactggaattgcagaaatcaaacggcagagaaagcttgcatctcaaacagctccagccagtgcagagttgctcactttaccttacctttcaggacagtttaccactcctccttccacaggtacacaggttactcgaccaagtggccaaatttcagatccatcgaggtcatattttgtagtggtcaaccactcacagtcacaagatactgtaaccactggagaagctttaaatgtcattcctggtgctcaggaaaagaaagcacatgccagtttaatgtctcccggtagacgcaaaagtgaatctcagagaaaaagtaccactttgtctggccctcattcaacaatacggaatttccaagatccaaacgcttttgcagtagaaaaacaaatggttattgaaaatgcacgagaaaaaatactaagcaacaaatctcttcaagaaaagctagcagaaaacataaataaatttttaactagtgataacaatattgcccaagtacctaagcaaacagataacaaccctacggagccagagacttcaattgatgaattcctaggacttccgagtgaaattcacatgtctgaagaagctatacaggacatattggaacagacagaatcagacccagcatttcaggcactctttgatctctttgactatggcaaaacaaagaataataaaaatatatcacaaagtatttccagtcaacctatggaatccaatcccagtatagtcttagcagatgaaactaatctagcagttaaaggttcttttgaaacagaagaatctgatggtcagtctggtcagcccgctttttgtacatcctatcagaatgatgacccattaaatgctttgaagaatagcaacaaccatgatgtgcttagacaagaagaccaggaaaatttttcccaaataagtaccagcatacagaaaaaggcctttaaaacagctgtacccactgaacagaagtgtgacattgacattacctttgagtccgtgcctaatttgaatgactttaaccaaagagggaattctaatgctgaatgtaatccacattgtgctgaattatacaccaatcagatgtccactgaaactgaaatggctatagggattgaaaagaactctttgtcttcaaatgtaccgagtgaatctcagttacagcctgatcagcctgatataccaataacttcatttgtttcacttggttgtgaagctaacaatgaaaacttaattctctctgggaagagttctcaacttttatcccaagatacttcattaactggaaagccatctaaaaaaagtcaattttgtgaaaattctaatgatacagtaaaacttaaaattaattttcatggttccaagtcatcagattctagtgaagttcacaagagtaaaatagaaattaatgtgttagaaccagttatgtcacagctatcaaattgccaagataattcttgtcttcaaagtgaaatactacctgtgtctgttgaaagttcacatttaaatgtatctggacaagtagaaattcatcttggagattcgctgtcttctactaaacaaccatctaatgattcagcatctgttgagttaaatcatacagaaaatgaagctcaggcatccaagtctgagaattcacaggagccttcatcttctgtaaaagaagagaatactatttttctctctttaggtggaaatgctaactgtgagaaagttgcactgacgcctccagaaggcactcctgtagaaaacagtcactctcttcctccagaatctgtgtgttcttcagtgggagattctcaccctgagtcccaaaatactgatgataaaccttctagcaacaactcagcagagatagatgcatcaaatatcgtctctctcaaagttatcattagtgatgatccatttgtttcctcagatactgaacttaccagtgctgtttctagtattaatggagaaaacctgccaactataatcttgtcttctcctactaaatcacctactaaaaatgcagaactagttaaatgcctatcttcagaagaaactgtaggtgctgttgtatatgccgaagtaggggattcagcctcaatggaacagagtcttttaacattcaaatctgaagactctgcagtaaacaatactcagaatgaagatggcattgctttttcagctaatgttacaccatgtgtttccaaggatggaggatatatacagttgatgccagccacaagcacagcttttggcaattcaaataacattctgatagctacctgtgtgactgatccaacagcgttaggaacatctgtaagtcagtctaatgtagtggtgttgcctggaaattctgcacctatgactgctcaacctctaccacctcagttacagacaccaccaaggtcaaacagtgtatttgctgtcaaccaagctgtgtcaccaaacttttcacaaggatctgccataataattgcctctccagtccagcctgtactccaaggaatggtagggatgatcccagtatctgtggttggacagaatggaaataacttttctactcctcctcggcaggttcttcatatgcctttgacagcacctgtatgcaatagaagtatccctcaattccccgtccctccaaaatctcagaaggctcagggactaagaaacaagccttgtataggaaaacaagtaaataatttggtggattcgtcaggtcattcagttggatgtcatgcacaaaaaactgaagtttctgacaaaagtattgccacagatcttgggaaaaaatcagaagaaaccacagttcccttcccagaagagagtatagttccagctgctaaaccatgccacagacgtgtactctgtttcgacagcactactgctcctgtggcaaatacgcaggggccaaaccataagatggtgtcccaaaacaaagaaaggaatgcagtctcttttcctaatcttgactcacccaatgtgtcctccaccttaaaacccccttctaataatgctatcaaaagagagaaagagaagcctcctctgcctaagattttatctaaatcggaaagtgccattagccggcataccaccataagagaaactcaatcagaaaagaaagtttcaccaacagaaattgtgcttgaatctttccataaagcaacagctaataaggagaatgaattatgcagcgatgtagaaagacagaaaaatccagaaaattcaaaactatctattgggcagcaaaatgggggtttgcgaagtgagaaatctatagcttcactgcaagaaatgaccaaaaaacaaggcacatcttcaaacaataaaaatgtactttcagtaggtacagctgtgaaggatctaaaacaagaacaaactaaatccgccagttctttgattaccacagaaatgttacaggatatacagaggcacagctcagtaagtaggcttgctgatagtagtgatttacctgtgccccggacacctggctcaggggcaggggaaaaacataaagaagaacctatagatattatcaaggccccctctagtaggcgtttcagtgaagacagtagtacatcaaaagtaatggtccctcctgtcaccccagacttgcctgcctgcagccctgccagtgaaacaggaagtgaaaacagtgtaaatatggctgcccacacattaatgattctctccagggcagccatttctaggactacttcagcaactcctctgaaagataacacacaacagtttagagcatcttcaaggagcaccacaaaaaagcggaaaattgaggaattagatgaacgtgagcgaaactctcgtccttctagtaaaaatcttacaaattcatcaataccaatgaaaaagaagaaaattaagaaaaagaagcttcccagttcatttccagcaggaatggatgtagacaaatttttgttatcattgcattatgatgagtaaacattctggacacataagaacagtaggtgttaaaaactcatatcccttaaactgagtgtagggaatgggatattgacagaatctgaaagcatgacctgcactttcattgtactgaaacttcactttatatctaaatcatgctgtttctgaaacagcttcctagtttgtaaatagacttacttggtatatttttattttgggaaaaacgtttgcagaaatgtaagtaaagccaatctgcaaaactgtatagctttgacaattccatattgtaaatactgtgtaaatcttgttgaaatagaggttaaatcaacctaatgttcttacactgtgttttttgacttcttatgatccctaattctgagacttactcatctggaatagtttctcacttgttttggaggaaaatgatgcttattcttataaattaccttcagtaactattcaataagacatttaaatacacaatcactaagtactacaaaataataaccacctcaactgatagcaaaatatctaattagaaatcaacagtttgatgagtttttttcctagagtgaatactacccctttcttataattgctgtaagtattatatttctggaatttcacactttacctactctgatcactctgttctctttgttttaaagagagaattttgtaaaccatttattgaatgttctgatctttcatttataacttaagattttttacagaactttaagtggttagactattgagccataaaattttggtttgtagtagagatttctcggtatgtacttttcccctaaatgctggggatttaaagaattgcactaattcatagaactctttacattgtagtgaccaatgcacatataatttaaatcttgtgttctatgtgagagtttatgtggaggattatcttctggtgttgtgtccatcataagatgtaaaaagagaaatcatagttttatattttagtttctcctacaatgggtatgttaaataactatatctatacttagatatagtgcattgtctgtgtcccttaaagtgttacaaagagtttctctcaaaaggtccttaaggagagtgagagatgagagaggtgccttctctgtattagactcacacacatcagtccagttgaagaattggtttaaacttttaaatgagaacagaaattataattagtacctgaccaattgtgcctagatattaaagtatgttctctttagtactttccgttcaattaaatatcagtatattagggatttttttctacaggtgtatattttgttgaagagtcactttcctcaaccatttttttgtactgggcctttaaaaaaataaatccatccaactttaacacaacatttctcagtgtagaaatcatgtcttcttaattgctgaaccttactgcaaaaacttgtgatgtaagaaatttgtatggtgtggcagtggtctattcctaaggaactaaatatcatatagttaatgtttatttaactcagcttgagactgtactacagttaggtttgaataaatattttcattaacttcaaaaaaaaaaaaaaaaaaaaaaaaaaaa

SEQ ID NO: 1557 - DNA, 2485 bp, Homo sapiens
agtaacgtcatcagacgtgtgtgtccctgcggcgctaagaaggggagactgaggctgaggctggggaacatcgggcagcatgagcggctgcgggctcttcctgcgcaccacggctgcggctcgtgcctgccggggtctggtggtctctaccgcgaaccggcggctactgcgcaccagcccgcctgtacgagctttcgccaaagagcttttcctaggcaaaatcaagaagaaagaagttttcccatttccagaagttagccaagatgaacttaatgaaatcaatcagttcttgggacccgtggaaaaattcttcactgaagaggtggactcccgaaaaattgaccaggaagggaaaatcccagatgaaactttggagaaattgaagagcctagggctttttgggctgcaagtcccagaagaatatggtggcctgggcttctccaacaccatgtactcacgactaggggagatcatcagcatggatgggtccatcactgtgaccctggcagcgcaccaggctattggcctcaaggggatcatcttggctggcactgaggagcagaaagccaaatacttgcctaaactggcgtccggggagcacattgcagccttctgcctcacggagccagccagtgggagcgatgcagcctcaatccggagcagagccacactaagtgaagacaagaagcactacatcctcaatggctccaaggtctggattactaatggaggactggccaatatttttactgtgtttgcaaagactgaggtcgttgattctgatggatcagtgaaagacaaaatcacagcattcatagtagaaagagactttggtggagtcactaatgggaaacccgaagataaattaggcattcggggctccaacacttgtgaagtccattttgaaaacaccaagatacctgtggaaaacatccttggagaggtcggagatgggtttaaggtggccatgaacatcctcaacagcggccggttcagcatgggcagcgtcgtggctgggctgctcaagagattgattgaaatgactgctgagtacgcctgcacaaggaaacagtttaacaagaggctcagtgaatttggattgattcaggagaaatttgcactgatggctcagaaggcttacgtcatggagagtatgacctacctcacagcagggatgctggaccaacctggctttcccgactgctccatcgaggcagccatggtgaaggtgttcagctccgaggccgcctggcagtgtgtgagtgaggcgctgcagatcctcgggggcttgggctacacaagggactatccgtacgagcgcatactgcgtgacacccgcatcctcctcatcttcgagggaaccaatgagattctccggatgtacatcgccctgacgggtctgcagcatgccggccgcatcctgactaccaggatccatgagcttaaacaggccaaagtgagcacagtcatggataccgttggccggaggcttcgggactccctgggccgaactgtggacctggggctgacaggcaaccatggagttgtgcaccctagtcttgcggacagtgccaacaagtttgaggagaacacctactgcttcggccggaccgtggagacactgctgctccgctttggcaagaccatcatggaggagcagctggtactgaagcgggtggccaacatcctcatcaacctgtatggcatgacggccgtgctgtcgcgggccagccgctccatccgcattgggctccgcaaccacgaccacgaggttctcttggccaacaccttctgcgtggaagcttacttgcagaatctcttcagcctctctcagctggacaagtatgctccagaaaacctagatgagcagattaagaaagtgtcccagcagatccttgagaagcgagcctatatctgtgcccaccctctggacaggacatgctgaggcaggggacagtgtcccctgctaccgcccgcccctacccatggcccgttgctggatgactgttactcttttttcagaaggtgttgggattatcacaggttaagccttttgttccccgtctgcacctgaagggttgtcgcctggcctgggagagcctcttccaggttttgacctgcaggcagtgctctctaacaggaccatcacagcttctgaactgagccggagagagagaatggaattgctgacccctggaactggcgggtattctggtcattgaggagacaccatagtggaaactggggcttatgctgctgcctccagggtgtgaggtgggtggggacctgtgtcaggtgtggatagccatttctgctcaaccacacattctctaagaaacagcttgaaagctctgtctgggtcattcatttaaactagaagcagaggcacttaaaacatgtaccaggaaccatttaacaaagaatataaaatgtcacaatctgtgtactgttaaaaaaaaaaaaaaaaaaaaaaaaaaaaaaaaaa

SEQ ID NO: 1558 - DNA, 1457 bp, Homo sapiens
gagtcaaggctgggacctcatggcatcattttccatggattgctctccaagtttttgtgttcctggcctttggaaccccttcatcatattccgcaggtgaggcaggcgactaatcagattgtgatgaattgtgctgatattgatattattacagcttcatatgcaccagaaggagatgaagaaatacatgctacaggatttaactatcagaatgaagatgaaaaagtcaccttgtctttccctagtactctgcaaacaggtacgggaaccttaaagatagattttgttggagagctgaatgacaaaatgaaaggtttctatagaagtaagtatactaccccttctggagaggtgcgctatgctgctgtaacacagtttgaggctactgatgcccgaagggcttttccttgctgggatgagcgtgctatcaaagcaacttttgatatctcattggttgttcctaaagacagagtagctttatcaaacatgaatgtaattgaccggaaaccataccctgatgatgaaaatttagtggaagtgaagtttgcccgcacacctgttacatctacatatctggtggcatttgttgtgggtgaatatgactttgtagaaacaaggtcaaaagatggtgtgtgtgtctgtgtttacactcctgttggcaaagcagaacaaggaaaatttgcattagaggttgctgctaaaaccttgcctttttataaggactacttcaatgttccttatcctctacctaaaattgatctcattgctattgcagactttgcagctggtgccatggagaactgggaccttgttacttatagggagactgcattgcttattgatccaaaaaattcctgttcttcatcccgccagtgggttgctctggttgtgggacatgaacttgcccatcaatggtttggaaatcttgttactatggaatggtggactcatcttcggttaaatgaaggttttgcatcctggattgaatatctgtgtgtagaccactgcttcccagagtatgatatttggactcagtttgtttctgctgattacacccgtgcccaggagcttgacgccttagataacagccatcctattgaagtcagtgtgggccatccatctgaggttgatgagatatttgatgctatatcatatagcaaaggtgcatctgtcatccgaatgctgcatgactacattggggataaggactttaagaaaggaatgaacatgtatttaaccaagttccaacaaaagaatgctgccgcaggtaatctttaatagcttgagatagaaatggagagaaagtattgtcactctatccaggctgggacattttatttttgttctgaatacttaactcaaggtcaggatccatgtaataaataaattagccttatttgaagctgtgttcaggttgaatatctctaatctgaaatttgaaatgctccagaatctga

SEQ ID NO: 1559 - DNA, 4364 bp, Homo sapiens
ggcggggccgcgcacgcagccgccgccaccacttccccctctccctccctccttgcgggccctcctccccttccctcccctccgcccccttccccgtaggcagcccgcccgccagtccgcccgcaccgcctccttcccagcccctagcgctccggctgggtctctcccccgccccccaggctcccccggtcgctctcctccggcggtcgcccgcgctcggtggatgtggctggcagctgccgccccctccctcgctcgccgcctgctcttcctcggccctccgcctcctcccctcctccttctcgtcttcagccgctcctctcgccgccgcctccacagcctgggcctcgccgcgatgccggagaagaggcccttcgagcggctgcctgccgatgtctcccccatcaactacagcctttgcctcaagcccgacttgctggacttcaccttcgagggcaagctggaggccgccgcccaggtgaggcaggcgactaatcagattgtgatgaattgtgctgatattgatattattacagcttcatatgcaccagaaggagatgaagaaatacatgctacaggatttaactatcagaatgaagatgaaaaagtcaccttgtctttccctagtactctgcaaacaggtacgggaaccttaaagatagattttgttggagagctgaatgacaaaatgaaaggtttctatagaagtaaatatactaccccttctggagaggtgcgctatgctgctgtaacacagtttgaggctactgatgcccgaagggcttttccttgctgggatgagcctgctatcaaagcaacttttgatatctcattggttgttcctaaagacagagtagctttatcaaacatgaatgtaattgaccggaaaccataccctgatgatgaaaatttagtggaagtgaagtttgcccgcacacctgttatgtctacatatctggtggcatttgttgtgggtgaatatgactttgtagaaacaaggtcaaaagatggtgtgtgtgtccgtgtttacactcctgttggcaaagcagagcaaggaaaatttgcgttagaggttgctgctaaaaccttgcctttttataaggactacttcaatgttccttatcctctacctaaaattgatctcattgctattgcagactttgcagctggtgccatggagaactggggccttgttacttatagggagactgcattgcttattgatccaaaaaattcctgttcttcatcccgccagtgggttgctctggttgtgggacatgaactcgcccatcaatggtttggaaatcttgttactatggaatggtggactcatctttggttaaatgaaggttttgcatcctggattgaatatctgtgtgtagaccactgcttcccagagtatgatatttggactcagtttgtttctgctgattacacccgtgcccaggagcttgacgccttagataacagccatcctattgaagtcagtgtgggccatccatctgaggttgatgagatatttgatgctatatcatatagcaaaggtgcatctgtcatccgaatgctgcatgactacattggggataaggactttaagaaaggaatgaacatgtatttaaccaagttccaacaaaagaatgctgccacagaggatctctgggaaagtttagaaaatgctagtggtaaacctatagcagctgtgatgaatacctggaccaaacaaatgggatttcccctcatttatgtggaagctgaacaggtagaagatgacagattattgaggttgtcccaaaagaagttctgtgctggtgggtcatatgttggtgaagattgtccccagtggatggtccctatcacaatctctactagtgaagaccccaaccaggccaaactaaaaattctaatggacaagccagagatgaatgtggttttgaaaaatgtcaaaccagaccaatgggtgaagttaaacttaggaacagttgggttttatcggacccagtacagctctgccatgctggaaagtttattaccaggcattcgtgacctttctctgccccctgtggatcgacttggattacagaatgacctcttctccttggctcgagctggaatcattagcactgtagaggttctaaaagtcatggaggcttttgtgaatgagcccaattatactgtatggagcgacctgagctgtaacctggggattctctcaactctcttgtcccacacagacttctatgaggaaatccaggagtttgtgaaagatgtcttttcacctataggggagagactgggctgggaccccaaacctggagaaggtcatctcgatgcactcctgaggggcttggttctgggaaaactaggaaaagcaggacataaggcaacgttagaagaagcccgtcgtcggtttaaggaccacgtggaaggaaaacagattctctccgctgatctgaggagtcctgtctatctgactgttttgaagcatggtgatggcactactttagatattatgttaaaacttcataaacaagcagatatgcaagaagagaaaaaccgaatcgaaagagtccttggcgctactcttttgcctgacctgattcaaaaagtcctcacgtttgcactttcagaagaggtacgtccacaggacactgtatcggtaattggtggagtagctggaggcagcaagcatggtaggaaagctgcttggaaattcataaaggacaactgggaagaactttataaccgataccagggaggattcttaatatccagactaataaagctatcagttgagggatttgcagttgataaaatggctggagaggttaaggctttcttcgagagtcacccagctccttcagctgagcgtaccatccagcagtgttgtgaaaatattctgctgaatgctgcctggctaaagcgagatgctgagagcatccaccagtacctccttcagcggaaggcctcaccacccacagtgtgaatcctgaggtgccgccattggcggttctgctgcttcgctgcagggataaggtggagctaccgaacagctgattcatatgccaagaatttggagtcttctttcaaaccagtgggggttggacaatgaatgtagttaactggttcctgctcacactccagaattaaattctattgaaaaaggaaaatcagcaattcagcaaaaaataaataaaaaataaaaatgtaaatatgatagtaataaaatagagcataacgaaactgtgaaactttctgaagccttgtcagtggttaaaagtatttaacactctactgttaatgacagatgttctgtttttataacctaccaaaaggaaactagaggcttcttggtgaagagcatttttgtgaagtgggttctgcaaggagcctataaagccaagggtggtgtccatttctgggaatggttaaacacaaaaggctgatagctggtatcacatagttggagtcagtgcataattccaagtggctttttttttttttggcacggggactgatcaggaagatatattcctgcataactcaatctgaaccaaggattgtagtttagttttcctccttgccttcccttctgtgtgaccgaccccttggccaaaaaaaaacaaaaagcaaaaaacaaaaacctaccctgttctggtttttttcctccctttagttccacccccaacccccattccctggtgtccttcttagagatgaagaaataataaggaaacatctttcatagccacattaaataagagaaactgatatacattatttttttctttttaaagatgacttataagaaccctgaaatttatataggtgagacaatagaaataaaaagatcttcagccaggcctttctgaaggagttattctgctaaaaatggtcttagttgtctgaaaagccagctcttgaacctcttcacaacagtatcaacactggcttctcccggttcattttatgcgtgcgagaagtcagtggtaactgctgcagggcttaatacattagtggtaactggtttaaaaaacaaagactgtaagcctgtgtgtgccactgtttgcttcaacagtatatcctaataagcctcacctatttaatccaatgagttttaaatctaaatctcattcccttcttctttccctaccttttttttctttttttcttaaaaaaatattttgtgttattaacagaaattcatatttggtgtggcttaacggtatttcagaaggtcatcagattgtgagactgcttccttgaaacatttttgtgctattgttttaaaaaaataattaaaaaacagttggcgttaataaaaatgtcaatgtgaaactgaaaaaaaaaaaaaaaaaaaaaaaaaa

SEQ ID NO: 1560 - DNA, 3447 bp, Homo sapiens
atggcgctgccatcacttctgctgttggtggcagccctggcaggtggggtgcgtcctcccggggcgcggaacctgacgctggcggtggtgctgccagaacacaacctgagctatgcctgggcctggccacgggtgggacccgctgtggcactagctgtggaggctctgggccgggcactgcccgtggacctgcggtttgtcagctccgaactggaaggcgcctgctctgagtacctggcaccgctgagcgctgtggacctcaagctgtaccatgaccccgacctgctgttaggtcccggttgcgtgtaccctgctgcctctgtggcccgctttgcctcccactggcgccttcccctgctgactgcgggtgctgtggcctctggtttttcggctaagaatgaccattatcgtaccctggttcgcactggcccctctgctcccaagctgggtgagtttgtggtgacactacacgggcacttcaattggactgcccgtgctgccttgctgtacctggatgctcgcacagatgaccggcctcactacttcaccatcgagggcgtctttgaggccctgcagggcagcaacctcagtgtgcagcaccaggtgtatgcccgagagccagggggccccgagcaggccacccacttcatccgggccaacgggcgcattgtgtatatctgcggccctctggagatgctgcatgagatcctgcttcaggcccagagggagaatctgaccaatggggattatgtcttcttttacctggatgtctttggggagagtctccgtgcaggccccacacgtgctacaggccggccctggcaggacaatcgcacccgggaacaggcccaggccctcagagaggcctttcagactgtattggtgatcacgtaccgagaacccccaaatcctgagtatcaggaattccagaatcgtctgctgataagagcccgggaagactttggtgtggagctgggcccttccctgatgaacctcatcgctggctgcttctatgatgggatcctgctatatgctgaagtcctgaatgagacaatacaggaaggaggcacccgggaggatggacttcgaattgtggaaaagatgcagggacgaagatatcacggtgtaactgggctggttgtcatggacaagaacaatgaccgagagactgactttgtcctctgggccatgggagacctggattctggggactttcagcctgcagcccactactcgggagctgagaagcagatttggtggacgggacggcctattccctgggtgaagggggctcctccctcggacaatcccccctgtgcctttgacttggacgacccatcctgtgataaaactccactttcaaccctggcaattgtggctctgggcacaggaatcaccttcatcatgtttggtgtttccagcttcctaattttccgaaagctgatgctggagaaggagctggctagcatgttgtggcgtattcgctgggaagaactgcagtttggcaactcagagcgttatcacaaaggtgcaggcagtcgcctcacactgtcgctgcggggatccagttacggctcgctcatgacagcccatgggaaataccagatctttgccaacaccggtcacttcaagggaaatgttgtcgccatcaaacatgtgaataagaagcgcattgagctgacccggcaggttctgtttgaactcaaacatatgagagatgttcagttcaaccatctcactcgcttcattggcgcctgcatagaccctcccaacatttgcattgtcactgaatactgtcctcgtgggagtttacaggatattctagaaaatgacagcatcaacttggactggatgtttcgttattcactcattaatgaccttgttaagggcatggcctttctccacaacagcattatttcatcgcatgggagtctcaagtcctccaactgtgtggtggatagtcgttttgtgctcaaaatcacagactatggcctggccagcttccgatcaactgctgaacctgatgacagccatgccctctatgccaagaagctgtggactgccccagaactgctcagtgggaaccccttgccaaccacaggcatgcagaaggctgacgtctatagctttgggatcatcctgcaggagatagcacttcgcagtggtcctttctacttggagggcctggacctcagccccaaagagattgtccagaaggtacgaaatggtcagcggccatatttccggccaagcattgaccggacccaactgaatgaagagctagttttgctgatggagcgatgttgggctcaggacccagctgagcggccagactttggacagattaagggcttcattcggcgctttaacaaggagggtggcaccagcatattggacaacctcctgctgcgcatggaacagtatgccaataacttggagaagctggtggaggaacgcacacaggcctatctggaggaaaaacgcaaggctgaagctctgctctaccaaatcctaccccattcagtggcagagcagttaaaacggggagagactgtacaggctgaggcctttgacagtgttaccatctacttcagtgacattgttggcttcacagcattgtcagcagagagcacccccatgcaggtagtgacacttcttaatgacctgtatacctgctttgatgccataattgacaactttgatgtctacaaggtggagacgattggggatgcttacatggtggtatctggcctcccaggccgaaatggtcaacgccatgcaccagaaattgctcgtatggccctagcattactagatgcagtttcttcctttcgcatccgccaccgaccccatgaccagctgaggctacgcataggggtccatactgggccagtctgtgctggggttgttggcctgaagatgccccgttattgtctttttggagacacagtgaacactgcttctcgaatggagtctaatggtcaagcgctgaagatccatgtctcctctaccaccaaggatgccctagatgagctaggatgcttccagctagagcttcggggggatgtggaaatgaagggaaaaggaaagatgcgaacatactggctcttaggagagcggaaaggacctcctggactcctgtaaacccccattctttccaagtcagatagtcttctgctgctggtacctgggtgggcaatggccaccatgtctgcacacaccagaaatggacattttcatatgcaatggaaaacagccacaaaaaaacctaccttatatggaagttgtagccctctgcagctcagccctgtacatatacctgtccctctctggcttggtccccttcctccctactttctgtaaatatctgtatctaaaccagaatattttggtcaaatataaaacaataataaaaaaagttctgatgtcaaaaaaaaaaaaaaaaaa

SEQ ID NO: 1561 - DNA, 3225 bp, Homo sapiens
ggagatattacaggggacccagcccgcagcgacaggcacaaagtcacggggtaatgaacttcggggacccttcgccgctgcgtgcgcggctctccccggaaacccggacctggccgcctcttccctcggaagatttcccagcaatctagttttcccactctgcgcttgggttccggcagcgcggagcccgtctgcctctgagactgcggtagtgttttccttctttccttgggagaccagcggtcggcagagattgcccacactctgcatgcctatgtagagggagagatcgaagactgagtgacaggaatggggaaaaagagggatttcgctccgtaggaaggccattttcgtgtctccatctctgtctttcaacatccctctcttgctgttcttccttcttcctcagtcttcctgtccatctctccatctgtctgtccatgtgtgtgtccatatcaagcagcattcccagcagctgcggttttgcaagagccgggaagaaacttaaggatgcttaaatttccactgttggacgaattctgagcgcccagggagcagcgcagcgcgcgactgacacccacctgtcccgcccaggagccttgcaggctggagggcggctggagagcggcggcgccggcggcgaggcgggcgctgccggccgggactcgggcagcgcccaccaaccgctccgccccgggacagccagcatgagcaagccagccggatcaacaagccgcattttagatatcccctgcaaagtgtgtggcgaccgcagctcggggaagcactacggggtctacgcctgcgacggctgctcaggttttttcaaacggagcatccgaaggaataggacctatgtctgcaaatctggaaaccagggaggctgtccggtggacaagacgcacagaaaccagtgcagggcgtgtcggctgaagaagtgtttggaagtcaacatgaacaaagacgccgtgcagcacgagcgggggcctcggacgtccaccatccgcaagcaagtggccctctacttccgtggacacaaggaggagaacggggccgccgcgcactttccctcggcggcgctccctgcgccggccttcttcaccgcggtcacgcagctggagccgcacggcctggagctggccgcggtgtccaccactccagagcggcagaccctcgtgagcctggctcagcccacgcccaagtacccccatgaagtgaatgggaccccaatgtatctctatgaagtggccacggagtcggtgtgtgaatcagctgccagacttctcttcatgagcatcaagtgggctaagagtgtgccagccttctccacgctgtctttgcaagaccagctgatgcttttggaagatgcttggagagaactgtttgttctaggaatagcacaatgggccattccggttgatgctaacactctactggctgtatctggcatgaacggtgacaacacagattcccagaagctgaacaagatcatatctgaaatacaggctttacaagaggtggtggctcgatttagacaactccggttagatgctactgaatttgcctgtctaaaatgcatcgtcactttcaaagccgttcctacacatagtggttctgaactgagaagtttccggaatgctgccgccattgcagcccttcaagatgaggctcagctaacgctcaacagctacatccataccagatatcccactcaaccctgtcgctttggaaaactcctgttgcttttgccagctttacgttctattagcccatcaactatagaagaagtgtttttcaaaaaaaccatcggcaatgtgccaattacaagactgctttcagatatgtacaaatccagtgatatctaagctcacaagatacccacttttcaggatgggacagtatcagatgaacttcaacccatggagaacaagcctcaactaacaaacccttcaggaagcatataccggggaatgtgtagccttcaggaaaaaaatgccaattgacacaaagcattccagtagctatgacctgccgccctgaccaggatagggcgggtgggaaggagaggggtgcaacaggaccgcctgcactgaaaactcactgctgccatgccctgggagggggcaaactgggggttgccacaggccgtgccattctgcctcttacctggaagatcaggctgaacgatcaaaagctgaaacataagtagtgctttctcttcctttttagcatacaaagtttggtaaccaaatatagctctgtgtataacatcgtactgcggccttcaaaactacgttatgttggagcatttattttaaaaataatggtaggttttaaattaaaagtgttatcaaaagtttcccctctattgtaatacattattaagtggccttcagaactgagttaataagtgaaaagtagcttatgccatgtgatttgctttttctctatcttcttttttcttttctttctctttcttttgttctttcttcttcttttttaataccataggccaggcaaccttgtcaaaggaattgatggacaaaatgagattctcaccaggacttcaggttggataacatgtcaaaaagagaagagctttactaaaagaacataagtcaagggaggatgaataaaaacagcaaaaccaaataaagtggagatgagtgattgagtgaggtagattgctgtcccgttaacatagtgctgaaaccaaaggcagtgggggtccaaactcgtggtgcagcaagtcacaccagacaggaaacgaatatggacgtaattgcagaaggaacttcaaggagatgaatgaatgctaaaagggttcttgactgatccattgctaacagcctgagactcttcaatgcctttccgaaaactggtttctagtaaagccttgaatgaacacacacacacacacacacacacacacacacacacacacacacacacacaccgtcctacactttaagctgctcctttggtatgactctatacttatggaaatgtagaaacaaacatttttaaatagctgctgtacttttcacattttgatttattaggtactagcactgaggaaaaaaaattcagcacttggactatcataggatgagtaaaacttttcttgtacaaagtgaattaactgatttgtgaagttaaaaggttgtactcattgtatttacaaagaataaaaatatattgaatttaaatgaaaaaaaaaaaaaa

SEQ ID NO: 1562 - DNA, 3447 bp, Homo sapiens
ggccagtccgcccggcggctcgcgcacggctccgcggtcccttttgcctgtccagccggccgcctgtccctgctccctccctccgtgaggtgtccgggttcccttcgcccagctctcccacccctacccgaccccggcgcccgggctcccagagggaactgcacttcggcagagttgaatgaatgaagagagacgcggagaactcctaaggaggagattggacaggctggactccccattgcttttctaaaaatcttggaaactttgtccttcattgaattacgacactgtccacctttaatttcctcgaaaacgcctgtaactcggctgaagccatgccttgtgttcaggcgcagtatgggtcctcgcctcaaggagccagccccgcttctcagagctacagttaccactcttcgggagaatacagctccgatttcttaactccagagtttgtcaagtttagcatggacctcaccaacactgaaatcactgccaccacttctctccccagcttcagtacctttatggacaactacagcacaggctacgacgtcaagccaccttgcttgtaccaaatgcccctgtccggacagcagtcctccattaaggtagaagacattcagatgcacaactaccagcaacacagccacctgcccccccagtctgaggagatgatgccgcactccgggtcggtttactacaagccctcctcgcccccgacgcccaccaccccgggcttccaggtgcagcacagccccatgtgggacgacccgggatctctccacaacttccaccagaactacgtggccactacgcacatgatcgagcagaggaaaacgccagtctcccgcctctccctcttctcctttaagcaatcgccccctggcaccccggtgtctagttgccagatgcgcttcgacgggcccctgcacgtccccatgaacccggagcccgccggcagccaccacgtggtggacgggcagaccttcgctgtgcccaaccccattcgcaagcccgcgtccatgggcttcccgggcctgcagatcggccacgcgtctcagctgctcgacacgcaggtgccctcaccgccgtcgcggggctccccctccaacgaggggctgtgcgctgtgtgtggggacaacgcggcctgccaacactacggcgtgcgcacctgtgagggctgcaaaggcttctttaagcgcacagtgcaaaaaaatgcaaaatacgtgtgtttagcaaataaaaactgcccagtggacaagcgtcgccggaatcgctgtcagtactgccgatttcagaagtgcctggctgttgggatggtcaaagaagtggttcgcacagacagtttaaaaggccggagaggtcgtttgccctcgaaaccgaagagcccacaggagccctctcccccttcgcccccggtgagtctgatcagtgccctcgtcagggcccatgtcgactccaacccggctatgaccagcctggactattccaggttccaggcgaaccctgactatcaaatgagtggagatgacacccagcatatccagcaattctatgatctcctgactggctccatggagatcatccggggctgggcagagaagatccctggcttcgcagacctgcccaaagccgaccaagacctgctttttgaatcagctttcttagaactgtttgtccttcgattagcatacaggtccaacccagtggagggtaaactcatcttttgcaatggggtggtcttgcacaggttgcaatgcgttcgtggctttggggaatggattgattccattgttgaattctcctccaacttgcagaatatgaacatcgacatttctgccttctcctgcattgctgccctggctatggtcacagagagacacgggctcaaggaacccaagagagtggaagaactgcaaaacaagattgtaaattgtctcaaagaccacgtgactttcaacaatggggggttgaaccgccccaattatttgtccaaactgttggggaagctcccagaacttcgtaccctttgcacacaggggctacagcgcattttctacctgaaattggaagacttggtgccaccgccagcaataattgacaaacttttcctggacactttacctttctaagacctcctcccaagcacttcaaaggaactggaatgataatggaaactgtcaagagggggcaagtcacatgggcagagatagccgtgtgagcagtctcagctcaagctgccccccatttctgtaaccctcctagcccccttgatccctaaagaaaacaaacaaacaaacaaaaactgttgctatttcctaacctgcaggcagaacctgaaagggcattttggctccggggcatcctggatttagaacatggactacacacaatacagtggtataaactttttattctcagtttaaaaatcagtttgttgttcagaagaaagattgctataatgtataatgggaaatgtttggccatgcttggttgttgcagttcagacaaatgtaacacacacacacatacacacacacacacacacacagagacacatcttaaggggacccacaagtattgccctttaacaagacttcaaagttttctgctgtaaagaaagctgtaatatatagtaaaactaaatgttgcgtgggtggcatgagttgaagaaggcaaaggcttgtaaatttacccaatgcagtttggctttttaaattattttgtgcctatttatgaataaatattacaaattctaaaagataagtgtgtttgcaaaaaaaaagaaaataaatacataaaaaagggacaagcatgttgattctaggttgaaaatgttataggcacttgctacttcagtaatgtctatattatataaatagtatttcagacactatgtagtctgttagattttataaagattggtagttatctgagcttaaacattttctcaattgtaaaataggtgggcacaagtattacacatcagaaaatcctgacaaaagggacacatagtgtttgtaacaccgtccaacattccttgtttgtaagtgttgtatgtaccgttgatgttgataaaaagaaagtttatatcttgattattttgttgtctaaagctaaacaaaacttgcatgcagcagcttttgactgtttccagagtgcttataatatacataactccctggaaataactgagcactttgaattttttttatgtctaaaattgtcagttaatttattattttgtttgagtaagaattttaatattgccatattctgtagtatttttctttgtatatttctagtatggcacatgatatgagtcactgcctttttttctatggtgtatgacagttagagatgctgattttttttctgataaattctttctttgagaaagacaattttaatgtttacaacaataaaccatgtaaatgaaaaaaaaaa

SEQ ID NO: 1563 - DNA, 2754 bp, Homo sapiens
gcaatctcgggaaattggagactgacgcggctgctcctgcatgttatttatttttcctctttccctcccgtggagaccctcctgttggaaagagagctgcagcacgggacagagacaggcaggaagaagcagagaggactcggtgacgcccccaccgagcagcccctggcccactcctccagcaggggccatgagcaccaagcaggaggccaggagagatgagggagaagccaggacgagggggcaggaggcacagcttcgagaccgagcccacctgagccagcagcgccggctcaaacaggccacccagttcctgcacaaggactcggccgacctgctcccgctggacagcctcaagaggctcggcacctccaaggacttgcagccgcgcagtgtgatccaaagacgcctggtggagggaaacccgaattggcttcagggggagcctccccggatgcaggacctgattcatggccaggagagcaggaggaagaccagcaggacagagattccagctcttctggtcaactgcaagtgccaggaccagctgcttagagtggccgttgacacaggcacccaatacaatcggatctctgctggatgtctcagccgcctggggttagagaaaagggtcctaaaagcctcagctggggacctggcccctgggcccccaacccaggtggagcagttggagctacagctggggcaggagactgtggtgtgctcggcacaggtggtggatgctgagagtcctgaattctgcctgggcctgcagactctgctttctctcaagtgctgcatcgacctggagcacggagtgctgcggctgaaagccccgttctcagagctacccttcctgcctttgtaccaagagcctggccagtgactgctgtctcagtcagtccccagagggaaagaccttgccttagaagaagaggcgtgtggggaacgggggctcttgaagccaggtagctggggactatggtgtctgcccttccaatcacctccctgacccctgctgtcccattttccccagctggccgcattcctctctgcttctcagcagctgtcctactccccaggacgagttttcactagagggcccacgatgccaggattctgattcatcttcctcccaagaaaagcaaagccaaatcaagaccacagataggaacctaagcacaatggggtgcctgcttgggctgggtcgaaggctctgctgactgctgtccttgtccatcacccaataccaccccaaacacaactcaacttcccacaccaccatgtctctcaccacaccttctgggcctcattatctcccacaactagaccgccatgcctcaccaacctatgtccctggacctcctggtgtctgcctctcggagtctgtgcacatctgctcacagttgagtgggggaagaaacagccagaattcaatacaacaaagagcgggagttagtataggaatgtccatctcataaggctgagagctattttttcctgtggctgcaaatgtctgaagccagttagtttgattaccctgtgcaaaaccttggacatacttctgctattaacgctataggtatttatccgtttccactggctttttgtacccaccgagcccctgagccttgcgtgtgtgtgtgtggaagagccttgtagagaactgctcctgtgaggcagacaggacagtgaggttgtcaccactcagacttcacctattcagcattctttctgatttctagaactatccacctcattaggccttcttcctatccccatctctggcctcttgagcttaagcttgtattgtcctggaatcagtggctttctaaccccctgccaggctttgccaaagcaaaaagacagaggctttttttttttttttaaagtttggggtctgtcaggagacagaggcttttttgaattcactgtgaagagaagaacccgaaccttaagacgccagatccctgagagtctttctggctggtttgagtctctcaaatcatggattaggagtaaagaaagaggcaggcgcaatggctcatgcctgtaatcccagcactttgggaggctgaggtgggtggatcacttgaggtcaggagtttgagaccagcctgggtaatatggcaaaaccccatctctactaaaaaatacaaaaattagccaggtatggtggtgaacacctgtaatcccagctacttggaaggctgaggcataggagttgcttgaacctgggagatgggggttgtagtgagccaagttcgtgccatcggactccagcctgggtgaaggagtgagaccctgtctccaaaaacaaacaaaaaaggagcagagaaagacagtggtacagctaacctgaacaagggaactgggaccgttgggctgaaacagtcttgagcctggggttgactgggttagagaagaaccgggatgcaaggagctgcctgtgacacctggcctgccctttctcagctgcctcccctgccctttctcagctgcctcccctgccctcagaaggaaaggagagggctcacttatcacttgtgccatagcacctggtctcaaaatcctaaaagctttcctcgccctcactgccttgctccacaaggtccactttcctgggtcttgtgctgtgcctttccttgtctgcctcctgctgcttctgtaactgcagaccccaggcccaattgcaagccctcggctcagctgcttctccattggaataaactcttgtttctctaaaaaaaaaaa

SEQ ID NO: 1564 - DNA, 1508 bp, Homo sapiens
gctggaggagcctcgaggctgaggctgccggggggctgtgggctaccgggccgccggcgcctcagcgatgttttactcagggctcctcactgagggcggccgcaaggagaccgacatgcgggaggcggcgtcactgcgacagcagcgccggatgaagcaggcggtgcagttcatccacaaggactccgccgacctgctgcccctggacggcctcaagaagctgggctcgtccaaggacatgcaacctcataatattctgcagaggcgcctcatggaaaccaacctgtctaagctccgaagcggtccccgtgtcccttgggcctctaagacgaacaaactcaatcaggctaagtctgaggggctaaagaagtctgaggaggatgacatgattttggtttcttgccagtgtgctggaaaggatgtgaaagccttggttgacacaggctgcctatataatctcatctctttggcctgtgtggacagattgggactcaaggagcatgtcaaatcccacaagcatgaaggagaaaagctttctctaccccggcatctcaaagtagtgggccagattgagcacctagtgatcacactgggctccctccgcctggactgcccagcagctgtggttgatgacaatgagaaaaacttgtcccttggtctacagactctccgatctctgaagtgcatcataaacttggataagcaccggctgatcatggggaagacagacaaggaagaaatcccttttgtggagacagtctctttgaatgaagacaacacttcagaagcataactacagcctgcagcatgtctgcacgtgtgcatgcatacacaccgggttgacagattgagaaaactgggtttgaaccaaatgccgtagtgacttgctgtggaccaagtccttccatctaatagaagctccaggggctccttcccattcagacctctctagactatagtctatgcttagagatcttgtctggttatggccattgttttttactactttgatcacttaacttatagaccttttttgacactgccagtctcacttgtggcctatttctctgcttcttccaggaatttgcttttattagtcaagtataggggctgccaggttctgtgtctccatagatatatgtgcttcttttcctatagctaaatgtataataaacaggaacctgacctttacctcctttcagctgtttcaaacaggtgccaggatacctatgtcttagaattagagtttcttcaaattgattcattgatttctcaagtatggattatgtgaaagagcccagggacattatccattacagtctaactctttcatttaaaggtccagagaggcaagtgaattgtctaagttcatatattaggtcagtgactgaagggaccaagaacgcagacctgatttccaagccaagactcccatgctgcctcatttgtattcaagcctttaacaggagggcaaagaggtgagaatgtgttaaaaaaaaaaaaaaaaa

SEQ ID NO: 1565 - DNA, 1433 bp, Homo sapiens
acccctccatttctcgccatggcccctgcactgctcctgatccctgctgccctcgcctctttcatcctggcctttggcaccggagtggagttcgtgcgctttacctcccttcggccacttcttggagggatcccggagtctggtggtccggatgcccgccagggatggctggctgccctgcaggaccgcagcatccttgcccccctggcatgggatctggggctcctgcttctatttgttgggcagcacagcctcatggcagctgaaagagtgaaggcatggacatcccggtactttggggtccttcagaggtcactgtatgtggcctgcactgccctggccttgcagctggtgatgcggtactgggagcccatacccaaaggccctgtgttgtgggaggctcgggctgagccatgggccacctgggtgccgctcctctgctttgtgctccatgtcatctcctggctcctcatctttagcatccttctcgtctttgactatgctgagctcatgggcctcaaacaggtatactaccatgtgctggggctgggcgagcctctggccctgaagtctccccgggctctcagactcttctcccacctgcgccacccagtgtgtgtggagctgctgacagtgctgtgggtggtgcctaccctgggcacggaccgtctcctccttgctttcctccttaccctctacctgggcctggctcacgggcttgatcagcaagacctccgctacctccgggcccagctacaaagaaaactccacctgctctctcggccccaggatggggaggcagagtgaggagctcactctggttacaagccctgttcttcctctcccactgaattctaaatccttaacatccaggccctggctgcttcatgccagaggcccaaatccatggactgaaggagatgccccttctactacttgagactttattctctgggtccagctccataccctaaattctgagtttcagccactgaactccaaggtccacttctcaccagcaaggaagagtggggtatggaagtcatctgtcccttcactgtttagagcatgacactctccccctcaacagcctcctgagaaggaaaggatctgccctgaccactcccctggcactgttacttgcctctgcgcctcaggggtccccttctgcaccgctggcttccactccaagaaggtggaccagggtctgcaagttcaacggtcatagctgtccctccaggccccaaccttgcctcaccactcccggccctagtctctgcacctccttaggccctgcctctgggctcagaccccaacctagtcaaggggattctcctgctcttaactcgatgacttggggctccctgctctcccgaggaagatgctctgcaggaaaataaaagtcagcctttttctacaaaaaaaaaaaaaaa

SEQ ID NO: 1566 - DNA, 2912 bp, Homo sapiens
aatcgcgcccgctccgacgtgtccaggtccgcggccccgggagcttggcgcggcccggcctggatgcgctgggcggagggtgcaggggagggcacggcgccgcttgcttggcctgcgcacccggacctagaagccgggacgagccggggcagagccaggcgcgcggaagtctgaaggtgccctccagacacggccccgatgactgaactacagcaagatgtggaagacacaaagcctgcgaaagtgctcgggaagagggagagcaaacttggctcagcccactcagaggctgagaatggtgtggaggagaaaaagaaagcctgcaggtcgccaacagcccaatcccctaccccatctgtggaggcggactccccagaccagaagaaaatcattagcctatggtcaaaatccagttttgatggtgcctctttagcaagtgataagaacgactgtaaaacagaaagcaaaaatgaccctaagactgaaagaaaaaagtcttcatcttccagccagtacaaggccaatatgcactttcacaagttgtttcttagtgtcccaacggaggaaccactgaagcaaagctttacctgtgctctacagaaagaaatactataccaaggaaagctctttgtatcagaaaactggatttgttttcattccaaagtctttggaaaagacacaaagatctctattccagctttctcggtaaccctaataaagaaaaccaaaactgctcttctagtgccaaacgccctgatcatagcaacagtcacagacaggtacatatttgtctccttactctccagagattcaacttacaaactactaaaatctgtgtgtggacacttagaaaatacaagtgttggtaacagtcccaatccatcttctgctgaaaacagtttccgagcagaccgcccttcatctctgcctctggatttcaatgatgaattctcagatctggatggagtggttcaacgaagaaggcaagacatggaaggatatagtagttctggttctcaaactcctgaatctgagaactctcgagatttccatgcgacagaatcccaaacagttctgaatgtctccaagggagaagcaaagccaactcgggcagatgcccatgtgaacagagtacctgaaggaaaagccaagagtctccctgtacagggtctgtcagaaactgttggaatcttacataaagtcaagtctcagaaatgtccgatgcttcaccatattcttatattctatgcaattgttgtctgtgcactaatcatctcgaccttctacatgagatacagaattaatactctggaggagcagctggggttactaacctccattgtggacacccataatactgaacaggcagcaccatctggcctgaggtcacaagtacaattcaatgtggaggttctctgtcaagagcttacagctaacatagtgaaattagaaaagatacaaaataacttacagaagttgcttgagaatggtgactgatcgaccagattgcttgggccatcggaatacctcatgtttccctttgaagaaggtgcttcccgaggcgttttgtttgagtgcaccctgctggtcagaggtgcaagcagatgagaatccagacattgcatgtggaggtctccagctcaggaaagtggggagggaaataattttggttcttgtgcaataaaagttgaccttgactctctgaggaagattttgctgcttttgcctgaagaaaacagacccatctctggaggtctcaggaagggcccagcgaacacactctcttggataattaccacgatggcgtcagcaaacactccaccctgtgcctttttagtccttcccgccctcctgcctctcccttacacccctcttaacgactttcaaactaaaggatacatcatatactgacaaactcaatgtggtcctttcaagaattagccatgagtctcaaaaaggcaataaatggctctaagtggacaggtttgcttcaaacaagtaacatctacattttgtcttttttttttcagttctcctgttatgttctggttgaaatcacctgtgtgtcttaatttctcaattcctttttggcaagaatatcaagcaaggtgaatttaacattatgtttatgttttgttttgttgctgtaactaatagttaattggactgattcttacccagccctggtcaagaatctgtgaggcatgtgactgaagtactaaattaaacttattttgaaaccaaacctaatttttaagccaaaaggtgtaatagtgatttaatacaggatgaaaaacactgaatttttaagactgtaggtggactatgttagtagttttcaagcaggatgtctgtattcagcattcaataatgctaaaatccctttcagcatgaaatttgtatgtttttatcctttgctgactaaaataaaataactggtggtttgctaactatttaccatatgggttggctggtttttattaataattgtttagggtatcataagatctgtaagtacaaaggatattctgtttctatctgcaatgcatttgataatcatttctatgaaatgtattttatttaatcagataagctaataagcgaattggttacatcgtttgtatctgttggcctagtggacagctgtgcctggtgcacctctggcttttaataaatactcattggttgaaacaccctgctaacactgtgttttgtcagttcgtaaattcctttaaccaagacttaactatgctttttaactctttttccacctgccatctactactaccaactcacttatacttccttcctcccaagtaatcatttcaaaactaaaaaaggatttaagttcttgggttacaacggtttaaaggaaagaaaatgaactttgaagtcaaaaaaaaaaaaaaaaa

SEQ ID NO: 1567 - DNA, 1957 bp, Homo sapiens
cccggggccgcggagccgggccggggcagcgccgtctccgcctcggggccgccgggggcgccctgctgagcgctacccacgtgcgtccgcgccacctcgcgggcgaccccgcggccaaggcccccggcggagcggctcccgggcgccccgaactagcccccaactttgggcgaagtttgcctgcgcctctccccgcccccacgcggcgcgccggggccgcggacggcagcggcccccggggatgcgccttcccggggtacccctggcgcgccctgcgctgctgctgctgctgccgctgctcgcgccgctgctgggaacgggtgcgccggccgagctgcgggtccgcgtgcggctgccggacggccaggtgaccgaggagagcctgcaggcggacagcgacgcggacagcatcagcctcgagctgcgcaagcccgacggcaccctcgtctccttcaccgccgacttcaagaaggatgtgaaggtcttccgggccctgatcctgggggagctggagaaggggcagagtcagttccaggccctctgctttgtcacccagctgcagcacaatgagatcatccccagtgaggccatggccaagctccggcagaaaaatccccgggcagtgcggcaggcggaggaggttcggggtctggagcatctgcacatggatgtcgctgtcaacttcagccagggggccctgctgagcccccatctccacaacgtgtgtgccgaggccgtggatgccatctacacccgccaggaggatgtccggttctggctggagcaaggtgtggacagttctgtgttcgaggctctgcccaaggcctcagagcaggcggagctgcctcgctgcaggcaggtgggggaccacgggaagccctgcgtctgccgctatggcctgagcctggcctggtacccctgcatgctcaagtactgccacagccgcgaccggcccacgccctacaagtgtggcatccgcagctgccagaagagctacagcttcgacttctacgtgccccagaggcagctgtgtctctgggatgaggatccctacccaggctagggtgggagcaacctggcgggtggctgctctgggcccactgctcttcaccagccactagagggggtggcaacccccacctgaggccttatttccctccctccccactcccctggccctagagcctgggcccctctggccccatctcacatgactgtgaagggggtgtggcatggcagggggtctcatgaaggcacccccattcccaccctgtgccttccttgcgggcagagagggagagaagggctccccagatctacacccctccctcctgcatctcccctggagtgttcacttgcaagctgccaaaacatgatggcctctggttgttctgttgaactccttgaacgtttagaccctaaaaggagtctatacctggacacccacctccccagacacaactcccttccccatgcacacatctggaaggagctggcccctcagtcccttcctactccccaacaaggggctcactatccccaaagaaggagctgttggggacccacgacgcagcccctgtactggattacagcatattctcatctctggccccgaggctgcctgtggggcgagtggagacctcccatcactgagacagatcacagaccacgagtgcctttcccggacctggacgttgcctccagagcaggcaccagctctttccctctctacacagaaatatttttgtaaggttctggggcagggagggagcatgaagtacgaggaaaacttgaattccagatttttagtgcaaagtatttatcatttctaccagaaataaacgttttaagtttttacttgaaaaaaaaaaaaaaaaaaaaaaaaaaaaaaaaaaaaaaaaaaaaaaaaaaaaaaaaaaaaaaaaaaaaaaaaaaaaaaaaaaaaaaaaaaaaaaaa

SEQ ID NO: 1568 - DNA, 3547 bp, Homo sapiens
gcactcgcccggctcgcccgctttcgcacccagttcacgcgccacagctatgtgtccccgagccgcgcgggcgcccgcgacgctactcctcgccctgggcgcggtgctgtggcctgcggctggcgcctgggagcttacgattttgcacaccaacgacgtgcacagccggctggagcagaccagcgaggactccagcaagtgcgtcaacgccagccgctgcatgggtggcgtggctcggctcttcaccaaggttcagcagatccgccgcgccgaacccaacgtgctgctgctggacgccggcgaccagtaccagggcactatctggttcaccgtgtacaagggcgccgaggtggcgcacttcatgaacgccctgcgctacgatgccatggcactgggaaatcatgaatttgataatggtgtggaaggactgatcgagccactcctcaaagaggccaaatttccaattctgagtgcaaacattaaagcaaaggggccactagcatctcaaatatcaggactttatttgccatataaagttcttcctgttggtgatgaagttgtgggaatcgttggatacacttccaaagaaaccccttttctctcaaatccagggacaaatttagtgtttgaagatgaaatcactgcattacaacctgaagtagataagttaaaaactctaaatgtgaacaaaattattgcactgggacattcgggttttgaaatggataaactcatcgctcagaaagtgaggggtgtggacgtcgtggtgggaggacactccaacacatttctttacacaggcaatccaccttccaaagaggtgcctgctgggaagtacccattcatagtcacttctgatgatgggcggaaggttcctgtagtccaggcctatgcttttggcaaatacctaggctatctgaagatcgagtttgatgaaagaggaaacgtcatctcttcccatggaaatcccattcttctaaacagcagcattcctgaagatccaagcataaaagcagacattaacaaatggaggataaaattggataattattctacccaggaattagggaaaacaattgtctatctggatggctcctctcaatcatgccgctttagagaatgcaacatgggcaacctgatttgtgatgcaatgattaacaacaacctgagacacacggatgaaatgttctggaaccacgtatccatgtgcattttaaatggaggtggtatccggtcgcccattgatgaacgcaacaatggcacaattacctgggagaacctggctgctgtattgccctttggaggcacatttgacctagtccagttaaaaggttccaccctgaagaaggcctttgagcatagcgtgcaccgctacggccagtccactggagagttcctgcaggtgggcggaatccatgtggtgtatgatctttcccgaaaacctggagacagagtagtcaaattagatgttctttgcaccaagtgtcgagtgcccagttatgaccctctcaaaatggacgaggtatataaggtgatcctcccaaacttcctggccaatggtggagatgggttccagatgataaaagatgaattattaagacatgactctggtgaccaagatatcaacgtggtttctacatatatctccaaaatgaaagtaatttatccagcagttgaaggtcggatcaagttttccacaggaagtcactgccatggaagcttttctttaatatttctttcactttgggcagtgatctttgttttataccaatagccaaaaattctccttgcctttaatgtgtgaaactgcattttttcaagtgagattcaaatctgccttttaggacctggctttgtgacagcaaaaaccatctttacaggctcctagaagctgaaggttagagcattataaaatgaagagacagacatgattactcagggtcagcaacctagtgagttagaaaaaaaattaacatagggccctataaggagaaagccaactatgttaagtttacgtgtccaaattttaatgaaattttactaacaattttaaaccatatttttcttcttcatatccatttctaatccatcaaacagcttatgtttacataaaattttatcattcacaaggaagttttaagcacactgtctcatttgatatccacaacttatttttggtaggaaagagagatgtttttcccacctgtcagatgaaaaaactgaagctcaaaaagggttgacttgaccatacagctaatgctgacagatccaagacctagacctaggtcttttgaactcaagtccagcattctcaactatatcaagttactgttcagaatacttaatatctcctctcttcataattatcaatagccccaagctcatggatgacaaatctctgctttatttcttgtctctattttttcactttatagctcctgttataatagcaagtttaatggtataaacacaggataccatcctctcttgcaacacccatgtgcctttgatgagtcaggtagcaagctgtagtagataatgagaaaggccagaggctgcaaagacagtcaaaggacacgagagaaaggaaggggaagaacaggactccaggactgttttatattatagaaaagcaagagctaaagagcatttacacatgttaaacagatacttgttaagcatagtgcctgacacacggcattagctgttattttatgagattccatcagctctgcctctgtcctctttcttctaacatgaaggtatcatgagaagagaaccttctaacataagctgtaattctaaacctgcacttgtccctctccagcaagaggctagcactgaattcattctactcatactacacacccagttatggaatgtccagagttctcgaagaaaataaatgactttaggaagaggtatacattttttaagtcgctctgcctccaaatctgaacagtcactgtaaatcattcttaagcccagatatgagaacttctgctggaaagtgggaccctctgagtgggtggtcagaaaatacccatgctgatgaaatgacctatgcccaaagaacaaatacttaacgtgggagtggaaccacatgagcctgctcagctctgcataagtaattcaagaaatgggaggcttcaccttaaaaacagtgtgcaaatggcagctagaggttttgataggaagtatgtttgtttcttagtgtttacaaatattaagtactcttgatacaaaatatacttttaaacttcataacctttttataaaagttgttgcagcaaaataatagcctcggttctatgcatatatggattgctataaaaaatgtcaataagattgtacaaggaaaattagagaaagtcacatttagggtttattttttacacttggccagtaaaatagggtaaatcctattagaaattttttaaagaactttttttaagtttcctaaatctgtgtgtgtattgtgaagtggtataagaaatgactttgaaccactttgcaattgtagattcccaacaataaaattgaagat

SEQ ID NO: 1569 - DNA, 5608 bp, Homo sapiens
aagacggattctcagacaaggcttgcaaatgccccgcagccatcatttaactgcacccgcagaatagttacggtttgtcacccgaccctcccggatcgcctaatttgtccctagtgagaccccgaggctctgcccgcgcctggcttcttcgtagctggatgcatatcgtgctccgggcagcgcgggcgcagggcacgcgttcgcgcacaccctagcacacatgaacacgcgcaagagctgaaccaagcacggtttccatttcaaaaagggagacagcctctaccgcgattgtagaagagactgtggtgtgaattagggaccgggaggcgtcgaacggaggaacggttcatcttagagactaattttctggagtttctgcccctgctctgcgtcagccctcacgtcacttcgccagcagtagcagaggcggcggcggcggctcccggaattgggttggagcaggagcctcgctggctgcttcgctcgcgctctacgcgctcagtccccggcggtagcaggagcctggacccaggcgccgccggcgggcgtgaggcgccggagcccggcctcgaggtgcataccggacccccattcgcatctaacaaggaatctgcgccccagagagtcccgggagcgccgccggtcggtgcccggcgcgccgggccatgcagcgacggccgccgcggagctccgagcagcggtagcgcccccctgtaaagcggttcgctatgccggggccactgtgaaccctgccgcctgccggaacactcttcgctccggaccagctcagcctctgataagctggactcggcacgcccgcaacaagcaccgaggagttaagagagccgcaagcgcagggaaggcctccccgcacgggtgggggaaagcggccggtgcagcgcggggacaggcactcgggctggcactggctgctagggatgtcgtcctggataaggtggcatggacccgccatggcgcggctctggggcttctgctggctggttgtgggcttctggagggccgctttcgcctgtcccacgtcctgcaaatgcagtgcctctcggatctggtgcagcgacccttctcctggcatcgtggcatttccgagattggagcctaacagtgtagatcctgagaacatcaccgaaattttcatcgcaaaccagaaaaggttagaaatcatcaacgaagatgatgttgaagcttatgtgggactgagaaatctgacaattgtggattctggattaaaatttgtggctcataaagcatttctgaaaaacagcaacctgcagcacatcaattttacccgaaacaaactgacgagtttgtctaggaaacatttccgtcaccttgacttgtctgaactgatcctggtgggcaatccatttacatgctcctgtgacattatgtggatcaagactctccaagaggctaaatccagtccagacactcaggatttgtactgcctgaatgaaagcagcaagaatattcccctggcaaacctgcagatacccaattgtggtttgccatctgcaaatctggccgcacctaacctcactgtggaggaaggaaagtctatcacattatcctgtagtgtggcaggtgatccggttcctaatatgtattgggatgttggtaacctggtttccaaacatatgaatgaaacaagccacacacagggctccttaaggataactaacatttcatccgatgacagtgggaagcagatctcttgtgtggcggaaaatcttgtaggagaagatcaagattctgtcaacctcactgtgcattttgcaccaactatcacatttctcgaatctccaacctcagaccaccactggtgcattccattcactgtgaaaggcaaccccaaaccagcgcttcagtggttctataacggggcaatattgaatgagtccaaatacatctgtactaaaatacatgttaccaatcacacggagtaccacggctgcctccagctggataatcccactcacatgaacaatggggactacactctaatagccaagaatgagtatgggaaggatgagaaacagatttctgctcacttcatgggctggcctggaattgacgatggtgcaaacccaaattatcctgatgtaatttatgaagattatggaactgcagcgaatgacatcggggacaccacgaacagaagtaatgaaatcccttccacagacgtcactgataaaaccggtcgggaacatctctcggtctatgctgtggtggtgattgcgtctgtggtgggattttgccttttggtaatgctgtttctgcttaagttggcaagacactccaagtttggcatgaaagatttctcatggtttggatttgggaaagtaaaatcaagacaaggtgttggcccagcctccgttatcagcaatgatgatgactctgccagcccactccatcacatctccaatgggagtaacactccatcttcttcggaaggtggcccagatgctgtcattattggaatgaccaagatccctgtcattgaaaatccccagtactttggcatcaccaacagtcagctcaagccagacacatttgttcagcacatcaagcgacataacattgttctgaaaagggagctaggcgaaggagcctttggaaaagtgttcctagctgaatgctataacctctgtcctgagcaggacaagatcttggtggcagtgaagaccctgaaggatgccagtgacaatgcacgcaaggacttccaccgtgaggccgagctcctgaccaacctccagcatgagcacatcgtcaagttctatggcgtctgcgtggagggcgaccccctcatcatggtctttgagtacatgaagcatggggacctcaacaagttcctcagggcacacggccctgatgccgtgctgatggctgagggcaacccgcccacggaactgacgcagtcgcagatgctgcatatagcccagcagatcgccgcgggcatggtctacctggcgtcccagcacttcgtgcaccgcgatttggccaccaggaactgcctggtcggggagaacttgctggtgaaaatcggggactttgggatgtcccgggacgtgtacagcactgactactacagggtcggtggccacacaatgctgcccattcgctggatgcctccagagagcatcatgtacaggaaattcacgacggaaagcgacgtctggagcctgggggtcgtgttgtgggagattttcacctatggcaaacagccctggtaccagctgtcaaacaatgaggtgatagagtgtatcactcagggccgagtcctgcagcgaccccgcacgtgcccccaggaggtgtatgagctgatgctggggtgctggcagcgagagccccacatgaggaagaacatcaagggcatccataccctccttcagaacttggccaaggcatctccggtctacctggacattctaggctagggcccttttccccagaccgatccttcccaacgtactcctcagacgggctgagaggatgaacatcttttaactgccgctggaggccaccaagctgctctccttcactctgacagtattaacatcaaagactccgagaagctctcgagggaagcagtgtgtacttcttcatccatagacacagtattgacttctttttggcattatctctttctctctttccatctcccttggttgttcctttttctttttttaaattttctttttcttttttttttcgtcttccctgcttcacgattcttaccctttcttttgaatcaatctggcttctgcattactattaactctgcatagacaaaggccttaacaaacgtaatttgttatatcagcagacactccagtttgcccaccacaactaacaatgccttgttgtattcctgcctttgatgtggatgaaaaaaagggaaaacaaatatttcacttaaactttgtcacttctgctgtacagatatcgagagtttctatggattcacttctatttatttattattattactgttcttattgtttttggatggcttaagcctgtgtataaaaaagaaaacttgtgttcaatctgtgaagcctttatctatgggagattaaaaccagagagaaagaagatttattatgaaccgcaatatgggaggaacaaagacaaccactgggatcagctggtgtcagtccctacttaggaaatactcagcaactgttagctgggaagaatgtattcggcaccttcccctgaggacctttctgaggagtaaaaagactactggcctctgtgccatggatgattcttttcccatcaccagaaatgatagcgtgcagtagagagcaaagatggcttccgtgagacacaagatggcgcatagtgtgctcggacacagttttgtcttcgtaggttgtgatgatagcactggtttgtttctcaagcgctatccacagaacctttgtcaacttcagttgaaaagaggtggattcatgtccagagctcatttcggggtcaggtgggaaagccaagaacttggaaaagataagacaagctataaattcggaggcaagtttcttttacaatgaacttttcagatctcacttccctccgacccctaacttccatgcccacccgtccttttaactgtgcaagcaaaattgtgcatggtcttcgtcgattaataccttgtgtgcagacactactgctccagacgtcgtttccctgataggtagagcagatccataaaaaggtatgacttatacaattaggggaagctaatggagtttattagctgagtatcaatgtctctgcgttgtacggtggtgatgggttttaatgaatatggaccctgaagcctggaaatcctcatccacgtcgaacccacaggactgtgggaagggcagaatcaatccctaagggaaaggaaacctcaccctgagggcatcacatgcactcatgttcagtgtacacaggtcaagtcccttgctctgggctctagttgggagagtggtttcattccaagtgtactccattgtcagtatgctgtttttgtttccttcactccattcaaaaagtcaaaatacaaaatttggcacagcatgccaacgggaggctgtgcccagaccaagcactggaagtgtgcttctaggcatagtcattggttttgcaaaaagagggctcaaatttaaatagaaatttacagctatttgaatggtcagatataccaagaaagaaaaatatttctgttcctcaagaaaacttgctaccctctgtgaggggaattttgctaaacttgacatctttataacatgagccagattgaaagggagtgattttcattcatcttaggtcatgttatttcatatttgtttctgaaggtgcgatagctctgttttaggttttgcttgcgcctgttaattactggaacaccttatttttcattaaaggctttgaaagccaattctcaaaaattcaaaagtgcaaattaacagaacaaaaggaaatccagtagcaactgcagtcaagcgagggagttgacaagataaaccttacgtccattcaagttatatgctggcctatgagagatgagagttgggtcgtttgttctctttgttgatgattt

SEQ ID NO: 1570 - DNA, 4005 bp, Homo sapiens; identical to SEQ ID NO: 1525

SEQ ID NO: 1571 - DNA, 5560 bp, Homo sapiens
aagacggattctcagacaaggcttgcaaatgccccgcagccatcatttaactgcacccgcagaatagttacggtttgtcacccgaccctcccggatcgcctaatttgtccctagtgagaccccgaggctctgcccgcgcctggcttcttcgtagctggatgcatatcgtgctccgggcagcgcgggcgcagggcacgcgttcgcgcacaccctagcacacatgaacacgcgcaagagctgaaccaagcacggtttccatttcaaaaagggagacagcctctaccgcgattgtagaagagactgtggtgtgaattagggaccgggaggcgtcgaacggaggaacggttcatcttagagactaattttctggagtttctgcccctgctctgcgtcagccctcacgtcacttcgccagcagtagcagaggcggcggcggcggctcccggaattgggttggagcaggagcctcgctggctgcttcgctcgcgctctacgcgctcagtccccggcggtagcaggagcctggacccaggcgccgccggcgggcgtgaggcgccggagcccggcctcgaggtgcataccggacccccattcgcatctaacaaggaatctgcgccccagagagtcccgggagcgccgccggtcggtgcccggcgcgccgggccatgcagcgacggccgccgcggagctccgagcagcggtagcgcccccctgtaaagcggttcgctatgccggggccactgtgaaccctgccgcctgccggaacactcttcgctccggaccagctcagcctctgataagctggactcggcacgcccgcaacaagcaccgaggagttaagagagccgcaagcgcagggaaggcctccccgcacgggtgggggaaagcggccggtgcagcgcggggacaggcactcgggctggcactggctgctagggatgtcgtcctggataaggtggcatggacccgccatggcgcggctctggggcttctgctggctggttgtgggcttctggagggccgctttcgcctgtcccacgtcctgcaaatgcagtgcctctcggatctggtgcagcgacccttctcctggcatcgtggcatttccgagattggagcctaacagtgtagatcctgagaacatcaccgaaattttcatcgcaaaccagaaaaggttagaaatcatcaacgaagatgatgttgaagcttatgtgggactgagaaatctgacaattgtggattctggattaaaatttgtggctcataaagcatttctgaaaaacagcaacctgcagcacatcaattttacccgaaacaaactgacgagtttgtctaggaaacatttccgtcaccttgacttgtctgaactgatcctggtgggcaatccatttacatgctcctgtgacattatgtggatcaagactctccaagaggctaaatccagtccagacactcaggatttgtactgcctgaatgaaagcagcaagaatattcccctggcaaacctgcagatacccaattgtggtttgccatctgcaaatctggccgcacctaacctcactgtggaggaaggaaagtctatcacattatcctgtagtgtggcaggtgatccggttcctaatatgtattgggatgttggtaacctggtttccaaacatatgaatgaaacaagccacacacagggctccttaaggataactaacatttcatccgatgacagtgggaagcagatctcttgtgtggcggaaaatcttgtaggagaagatcaagattctgtcaacctcactgtgcattttgcaccaactatcacatttctcgaatctccaacctcagaccaccactggtgcattccattcactgtgaaaggcaaccccaaaccagcgcttcagtggttctataacggggcaatattgaatgagtccaaatacatctgtactaaaatacatgttaccaatcacacggagtaccacggctgcctccagctggataatcccactcacatgaacaatggggactacactctaatagccaagaatgagtatgggaaggatgagaaacagatttctgctcacttcatgggctggcctggaattgacgatggtgcaaacccaaattatcctgatgtaatttatgaagattatggaactgcagcgaatgacatcggggacaccacgaacagaagtaatgaaatcccttccacagacgtcactgataaaaccggtcgggaacatctctcggtctatgctgtggtggtgattgcgtctgtggtgggattttgccttttggtaatgctgtttctgcttaagttggcaagacactccaagtttggcatgaaaggcccagcctccgttatcagcaatgatgatgactctgccagcccactccatcacatctccaatgggagtaacactccatcttcttcggaaggtggcccagatgctgtcattattggaatgaccaagatccctgtcattgaaaatccccagtactttggcatcaccaacagtcagctcaagccagacacatttgttcagcacatcaagcgacataacattgttctgaaaagggagctaggcgaaggagcctttggaaaagtgttcctagctgaatgctataacctctgtcctgagcaggacaagatcttggtggcagtgaagaccctgaaggatgccagtgacaatgcacgcaaggacttccaccgtgaggccgagctcctgaccaacctccagcatgagcacatcgtcaagttctatggcgtctgcgtggagggcgaccccctcatcatggtctttgagtacatgaagcatggggacctcaacaagttcctcagggcacacggccctgatgccgtgctgatggctgagggcaacccgcccacggaactgacgcagtcgcagatgctgcatatagcccagcagatcgccgcgggcatggtctacctggcgtcccagcacttcgtgcaccgcgatttggccaccaggaactgcctggtcggggagaacttgctggtgaaaatcggggactttgggatgtcccgggacgtgtacagcactgactactacagggtcggtggccacacaatgctgcccattcgctggatgcctccagagagcatcatgtacaggaaattcacgacggaaagcgacgtctggagcctgggggtcgtgttgtgggagattttcacctatggcaaacagccctggtaccagctgtcaaacaatgaggtgatagagtgtatcactcagggccgagtcctgcagcgaccccgcacgtgcccccaggaggtgtatgagctgatgctggggtgctggcagcgagagccccacatgaggaagaacatcaagggcatccataccctccttcagaacttggccaaggcatctccggtctacctggacattctaggctagggcccttttccccagaccgatccttcccaacgtactcctcagacgggctgagaggatgaacatcttttaactgccgctggaggccaccaagctgctctccttcactctgacagtattaacatcaaagactccgagaagctctcgagggaagcagtgtgtacttcttcatccatagacacagtattgacttctttttggcattatctctttctctctttccatctcccttggttgttcctttttctttttttaaattttctttttcttttttttttcgtcttccctgcttcacgattcttaccctttcttttgaatcaatctggcttctgcattactattaactctgcatagacaaaggccttaacaaacgtaatttgttatatcagcagacactccagtttgcccaccacaactaacaatgccttgttgtattcctgcctttgatgtggatgaaaaaaagggaaaacaaatatttcacttaaactttgtcacttctgctgtacagatatcgagagtttctatggattcacttctatttatttattattattactgttcttattgtttttggatggcttaagcctgtgtataaaaaagaaaacttgtgttcaatctgtgaagcctttatctatgggagattaaaaccagagagaaagaagatttattatgaaccgcaatatgggaggaacaaagacaaccactgggatcagctggtgtcagtccctacttaggaaatactcagcaactgttagctgggaagaatgtattcggcaccttcccctgaggacctttctgaggagtaaaaagactactggcctctgtgccatggatgattcttttcccatcaccagaaatgatagcgtgcagtagagagcaaagatggcttccgtgagacacaagatggcgcatagtgtgctcggacacagttttgtcttcgtaggttgtgatgatagcactggtttgtttctcaagcgctatccacagaacctttgtcaacttcagttgaaaagaggtggattcatgtccagagctcatttcggggtcaggtgggaaagccaagaacttggaaaagataagacaagctataaattcggaggcaagtttcttttacaatgaacttttcagatctcacttccctccgacccctaacttccatgcccacccgtccttttaactgtgcaagcaaaattgtgcatggtcttcgtcgattaataccttgtgtgcagacactactgctccagacgtcgtttccctgataggtagagcagatccataaaaaggtatgacttatacaattaggggaagctaatggagtttattagctgagtatcaatgtctctgcgttgtacggtggtgatgggttttaatgaatatggaccctgaagcctggaaatcctcatccacgtcgaacccacaggactgtgggaagggcagaatcaatccctaagggaaaggaaacctcaccctgagggcatcacatgcactcatgttcagtgtacacaggtcaagtcccttgctctgggctctagttgggagagtggtttcattccaagtgtactccattgtcagtatgctgtttttgtttccttcactccattcaaaaagtcaaaatacaaaatttggcacagcatgccaacgggaggctgtgcccagaccaagcactggaagtgtgcttctaggcatagtcattggttttgcaaaaagagggctcaaatttaaatagaaatttacagctatttgaatggtcagatataccaagaaagaaaaatatttctgttcctcaagaaaacttgctaccctctgtgaggggaattttgctaaacttgacatctttataacatgagccagattgaaagggagtgattttcattcatcttaggtcatgttatttcatatttgtttctgaaggtgcgatagctctgttttaggttttgcttgcgcctgttaattactggaacaccttatttttcattaaaggctttgaaagccaattctcaaaaattcaaaagtgcaaattaacagaacaaaaggaaatccagtagcaactgcagtcaagcgagggagttgacaagataaaccttacgtccattcaagttatatgctggcctatgagagatgagagttgggtcgtttgttctctttgttgatgattt

SEQ ID NO: 1572 - DNA, 8696 bp, Homo sapiens
aagacggattctcagacaaggcttgcaaatgccccgcagccatcatttaactgcacccgcagaatagttacggtttgtcacccgaccctcccggatcgcctaatttgtccctagtgagaccccgaggctctgcccgcgcctggcttcttcgtagctggatgcatatcgtgctccgggcagcgcgggcgcagggcacgcgttcgcgcacaccctagcacacatgaacacgcgcaagagctgaaccaagcacggtttccatttcaaaaagggagacagcctctaccgcgattgtagaagagactgtggtgtgaattagggaccgggaggcgtcgaacggaggaacggttcatcttagagactaattttctggagtttctgcccctgctctgcgtcagccctcacgtcacttcgccagcagtagcagaggcggcggcggcggctcccggaattgggttggagcaggagcctcgctggctgcttcgctcgcgctctacgcgctcagtccccggcggtagcaggagcctggacccaggcgccgccggcgggcgtgaggcgccggagcccggcctcgaggtgcataccggacccccattcgcatctaacaaggaatctgcgccccagagagtcccgggagcgccgccggtcggtgcccggcgcgccgggccatgcagcgacggccgccgcggagctccgagcagcggtagcgcccccctgtaaagcggttcgctatgccggggccactgtgaaccctgccgcctgccggaacactcttcgctccggaccagctcagcctctgataagctggactcggcacgcccgcaacaagcaccgaggagttaagagagccgcaagcgcagggaaggcctccccgcacgggtgggggaaagcggccggtgcagcgcggggacaggcactcgggctggcactggctgctagggatgtcgtcctggataaggtggcatggacccgccatggcgcggctctggggcttctgctggctggttgtgggcttctggagggccgctttcgcctgtcccacgtcctgcaaatgcagtgcctctcggatctggtgcagcgacccttctcctggcatcgtggcatttccgagattggagcctaacagtgtagatcctgagaacatcaccgaaattttcatcgcaaaccagaaaaggttagaaatcatcaacgaagatgatgttgaagcttatgtgggactgagaaatctgacaattgtggattctggattaaaatttgtggctcataaagcatttctgaaaaacagcaacctgcagcacatcaattttacccgaaacaaactgacgagtttgtctaggaaacatttccgtcaccttgacttgtctgaactgatcctggtgggcaatccatttacatgctcctgtgacattatgtggatcaagactctccaagaggctaaatccagtccagacactcaggatttgtactgcctgaatgaaagcagcaagaatattcccctggcaaacctgcagatacccaattgtggtttgccatctgcaaatctggccgcacctaacctcactgtggaggaaggaaagtctatcacattatcctgtagtgtggcaggtgatccggttcctaatatgtattgggatgttggtaacctggtttccaaacatatgaatgaaacaagccacacacagggctccttaaggataactaacatttcatccgatgacagtgggaagcagatctcttgtgtggcggaaaatcttgtaggagaagatcaagattctgtcaacctcactgtgcattttgcaccaactatcacatttctcgaatctccaacctcagaccaccactggtgcattccattcactgtgaaaggcaaccccaaaccagcgcttcagtggttctataacggggcaatattgaatgagtccaaatacatctgtactaaaatacatgttaccaatcacacggagtaccacggctgcctccagctggataatcccactcacatgaacaatggggactacactctaatagccaagaatgagtatgggaaggatgagaaacagatttctgctcacttcatgggctggcctggaattgacgatggtgcaaacccaaattatcctgatgtaatttatgaagattatggaactgcagcgaatgacatcggggacaccacgaacagaagtaatgaaatcccttccacagacgtcactgataaaaccggtcgggaacatctctcggtctatgctgtggtggtgattgcgtctgtggtgggattttgccttttggtaatgctgtttctgcttaagttggcaagacactccaagtttggcatgaaagatttctcatggtttggatttgggaaagtaaaatcaagacaaggtgttggcccagcctccgttatcagcaatgatgatgactctgccagcccactccatcacatctccaatgggagtaacactccatcttcttcggaaggtggcccagatgctgtcattattggaatgaccaagatccctgtcattgaaaatccccagtactttggcatcaccaacagtcagctcaagccagacacatggcccagaggttcccccaagaccgcctgataataatttggtatttggaggctcctgtgtcactgcaggaactaaaggaggctaaatccatgcctgatggaggagaagagttctatggttatctgcaaattctggccagacaacatcttgacgtcactccttagcttccataacctagccaagcaagaagttgcctttccaagacaaagcagtgtgctctaatgactaacccctcaaagtactatgccactttaactatagacccatctcctcgatcaatcaggatggcaagatggagctgaggagctcagcaacatcaagtctggagttggtctttaactcaactagctcgtttagacgtgtctgaacaccacatcacctgacagcacggggtggtttcccagtaaaatttacaaactcagctcaagggcagctgtgttgctttcctttccttgactgctgagaaactttttgacagggaacaatggaaacacaccttctgagctgaaacaaacaaacagaaacaaaacatactaaccagcaaaatccccaaatcatcaatcttgggttctcttgaagggcaggagtgtgttttatcttctcccgtcggagcaaacactatagatgtcctccctaaaattctgtcttccctagagcagccttgtaaattagctagggtcctagggttgaggcctaaatcaacttaaaattgtctctaaatatgtacctggatgtgtttgtacttgcagagcatgccctcttcatgtgcctagggctagtaactccctgtggcagaggcatgtaaagtattctgactttttttttttcaacttaattccatttccaatgaaatggatttttaaaaattttctccagagtgtgccatacttctccagctattatagttaatgtgtgtgtatccttgtgtatatgtgtgtttgtgtgtgcatatgtgttttcctagtggttacatgcttactaggcaattatgtaaataagcacagattcataggccagctaggcctgaggaaagaagacattataaagggagggagtattttaacattagctaaagctatcacacaaggcacccattctgctcccctcaacagccacagcccacttcgtccttgtcttaccaataaggggaaaggctggaggtgatatttttcacagaaccgcagaggttttgaacatatttgcaacattactttgagtacacatgagcaaaaattctgaattacatccaggaccccagaagctcattagatcaaagagtgcggggcccctcagagttaccagagattatctgcagacttcagtgcaatcgaatgaccatggtccattttgatggtcagaggtaggactgaaaaacgggtagaaacaattgctttagcgcttccttctgtactttgcctattaatgttttgtctttcaaaaatatattttctcctaattgtttaattggccaaataatggctgctttgggagttgtttgtatgccttggaaggccatggcctgcactttaaaaataagctaagtccattctgcccagcacgagcattaggacagagaatgcacttattttaggatccttaaaaattgcttcttttatggcacactgggttgacgactcatctcgtgggagccttcatggcacattgctgctgttctgcaggtcccaatacaattccttccccctctcagtgccacggcccccccattgctagctacacaatttgatatcatattcccttttcaactccaaaggagatgataagaagctatcaaataatgctttaaaaaagcaacttgagtttcttaaaagaaaggaaatgaatacatgctgcataattacatttaaaatgtaagccatgttattataagccgcactgagatgaagatttgttagcaaaccagtttcaagcacactcacagtgaagtaaaatcatgtttttagcatctgaccattgggtaatattattctttgttatcaaaagagaaatatcacccaagtatagtatacttagacctcctagaggaaacactccagtcctaagcttggtgtctgaaaagaaaaacaaaaataaagattatggatttaggtcagggagacagagtgatattctgaagactgtgtttactccctcatcatcggccaaccaagatggagttctgcatcctgcacatatcagacatttcagtccaatttcaccaaagcatcagtgatgttctagaagcatcccagcagatggaggatcctaatgtatttgttctgggtatttcccaaggcccagcctgactggagtgtgtgtaccaacaggatgaatccaatcaagctacgcccccattttggtttcggattggccactcttgcatgtgctagtagattgtggaccaggaccagctgagcaaacacagttgcagagtagcctcctatgttgctaagaagctcctgctacccaggtgctttgaacaattgagtgctccctctggttaagtagagatggcaccaccggagtttttcttggatgtgaggctcaatcctttacggcagctattataacaaagtgaaggttttctccctgggaaatgcagcttttctctgtctttactaattctgccagcctgtgagagtaaccaccgtagctgggcttcttctcagattaattgtcatgccaggtctccttcctggggagctgtgatgctgctctgaggttgattgctgaggttgtagtgggtttttgtttgtttttgtttagtttttcttgattgttcttctttctcttgaatggcaagagaagaaacactttctctaacccacggccaggaaggaaatggggagagagctacttcttagttcaacctggttgccacataaaggaatctctctccttggactcagcccctaactggaagcaagagccactgccctctgagactgagagagcagcccgaggaggagatgaatccattctgccctttgtttgggtttgcttcctgtcagtgagagaatgctgaggcagttcctgttatgtgaaactttcatttttaaaaccaggacagtcctaaacagactggaatgagttggtcaatcccagttggtataggcccaatgatttttgctagtaagataggattgtcttcctcacccaaaatgccttcaagtgccctaaaatgggtattttaaaataagaataaataatgtagatttagtagaaaacctggaaaacataagaaacaaagatgaaacgaaaagtcccatgtaattccaccagttagagttaaccactgatatcgtttggatatatggctttctagtcttgtggatatccttttaatctcttgtaatataaagtctgaccatatgtgtccttgcatttgtttgtactggactctgttaatatttctatagtaatggctcactttggggagattgtgctgcacagtgtgtaggaagcacattgggtgtattattcccagttttgtattttgtatttccttggagatgtgcaggggttaagagcgggggtctggccatagctggccacgtcagactctcatatggtaagtatcacagagcacatgaggcctgtgttatgcgctggaaagactcaggaaatgagaggctctcttgttctgacaaggcaggctgagagctctcatttagggtcatcactccagataactccaaatgcagtttattgctcaactgaagcagatgatcactttttgcctccaagttcttcaccctagctagctcctttcaaagagccgagtatgctggatcttaaagggccaaactagttacatctcatacatttcctgatgtttagggatgccttcacttccatcaaggataccttggctgtgcaaggacctctgatagctggagtctccttttggtcactcccagctttgcttaaacttgatggagtttgctgtccagtgatccccggatctttcatcatgaaagccttccttcctctcctgatgtctcaggcctctagacctagactggggttctggcaaggaggcctctatcaatagtatgacatccaataatatgttagtgttgatattttgcacagtaatattaagtttaagagattataaaaatgagttcaaatgaataagttcctgtgatgtaagagattagatatgtgtgatttcagaaccaaagccaggggggaatcccagaaagaaaacaataatataatcctagtttctatatattatttttattcattactgtatatgggtagagatcaatattctttcttatgctgttactattaattaacacattttttaaccatgccattgaacttttgggtgcattaaagtggaacccaagctcctcattagataataatggcatttggactgagtgccatattcctaaatttccaataaagtggttgatatagagaggacaggataaagccctatagtgtgcagttatatcaaaacagctagtctccactttagggaatgcctttactagagattacatgaaatgtctgcttataaaataagcagagatggcaccactaagcagccacctgaattgttttcctacaggaatgattacttttcagatccatttatgttttcatgctcaatacttactccccttccctgcaacacccaaagagtttacttttgcaagtcatttggtcttcagtctactactgaggaatagagaggcactaactgctttacccaggatcagaactcatgttcttaccttctattaatagagtacttgagccagatggactaactggtctcacattttctctatcttggttttacttccataaacatcaatatctttacccacatgatttttccatcctcccatttttttccatatgtattagggttcaggaactatgatgctaatgatcacatttcttcctagttcctaatttcattagtgccatttcctgatatctacagaaacaattatcaatacatgtagctgcttgagccttatttagaaggctagcctttcttttccaagtgctgtcagaatgtatacatttagtctgtctttttcccttttaggagtctttgttctgggttgatggcaaaattcctctttttacatgtgagatttttgatttcactgaattctacctagatttttatggacattggattttaaagaggaaaacactcattttcttagtaagatattggtgatacatagctatgccattgatttccatactcctgagctttggggagggagacagtggccaagtagcaggcagaataagatcatcactcatgtcctgaatcaatcacactttccttctcggattgtgtatatgctctgccacttcctacatattacatcctgagtttttaagtaaagtggatcttagccagatttgagtctaatggctgattcatcggcatagttcttggcgttaacatctcagtgtcctctttagttctctttgaggattcatgtcattgagggcctttgtgcctccacttgtctcagtatgaggaagaactttggtgtgagggcggagctatgtgaagggttgctgggttgggggattagttcatatggtccccatgccatctatttacttttggagagaggggactttgagtgggtgggtatggatagatgttcctcaaggaaaccctgctggctaatgggcactacatctgtgtattactgtgattctctctgtaagctccccatgtggccaaggacccccctcctaccagggcacttcctgccacctcattgcactggtctcaaccattcagcctgctgctgctgcaccatgttgggctgcggtaggatagggaaggggttctgttgattgctaaatgttgcctaactttatttccctctcccacatttcatgcaagggagcggacctaacacatgacttgcattctcttcctatgttcagaaactccagggcttgcccacgtgtatgtatgagtgaccaatggagcttggaattctttatctatatgatctgtccgaaaatgagatcttttgtactggaatttgtgatgtagttgatcattcagagccaaacgcatataccaataaagacaagactgtcatataaaaaaaaaaaaaaaaa

SEQ ID NO: 1573 - DNA, 2860 bp, Homo sapiens
gatcgccgagccggccaccatgcccggcagaccgcgccactaggcgctcctcgcggctcccacccggcggcggcggcggcggcggcggcgtccgcgatggtttcagacgctgaaggattttgcatctgatcgctcggcgtttcaaagaagcagcgatcggagatggatgtctctctttgcccagccaagtgtagtttctggcggattttcttgctgggaagcgtctggctggactatgtgggctccgtgctggcttgccctgcaaattgtgtctgcagcaagactgagatcaattgccggcggccggacgatgggaacctcttccccctcctggaagggcaggattcagggaacagcaatgggaacgccagtatcaacatcacggacatctcaaggaatatcacttccatacacatagagaactggcgcagtcttcacacgctcaacgccgtggacatggagctctacaccggacttcaaaagctgaccatcaagaactcaggacttcggagcattcagcccagagcctttgccaagaacccccatttgcgttatataaacctgtcaagtaaccggctcaccacactctcgtggcagctcttccagacgctgagtcttcgggaattgcagttggagcagaactttttcaactgcagctgtgacatccgctggatgcagctctggcaggagcagggggaggccaagctcaacagccagaacctctactgcatcaacgctgatggctcccagcttcctctcttccgcatgaacatcagtcagtgtgaccttcctgagatcagcgtgagccacgtcaacctgaccgtacgagagggtgacaatgctgttatcacttgcaatggctctggatcaccccttcctgatgtggactggatagtcactgggctgcagtccatcaacactcaccagaccaatctgaactggaccaatgttcatgccatcaacttgacgctggtgaatgtgacgagtgaggacaatggcttcaccctgacgtgcattgcagagaacgtggtgggcatgagcaatgccagtgttgccctcactgtctactatcccccacgtgtggtgagcctggaggagcctgagctgcgcctggagcactgcatcgagtttgtggtgcgtggcaaccccccaccaacgctgcactggctgcacaatgggcagcctctgcgggagtccaagatcatccatgtggaatactaccaagagggagagatttccgagggctgcctgctcttcaacaagcccacccactacaacaatggcaactataccctcattgccaaaaacccactgggcacagccaaccagaccatcaatggccacttcctcaaggagccctttccagagagcacggataactttatcttgtttgacgaagtgagtcccacacctcctatcactgtgacccacaaaccagaagaagacacttttggggtatccatagcagttggacttgctgcttttgcctgtgtcctgttggtggttctcttcgtcatgatcaacaaatatggtcgacggtccaaatttggaatgaagggtcccgtggctgtcatcagtggtgaggaggactcagccagcccactgcaccacatcaaccacggcatcaccacgccctcgtcactggatgccgggcccgacactgtggtcattggcatgactcgcatccctgtcattgagaacccccagtacttccgtcagggacacaactgccacaagccggacacgtatgtgcagcacattaagaggagagacatcgtgctgaagcgagaactgggtgagggagcctttggaaaggtcttcctggccgagtgctacaacctcagcccgaccaaggacaagatgcttgtggctgtgaaggccctgaaggatcccaccctggctgcccggaaggatttccagagggaggccgagctgctcaccaacctgcagcatgagcacattgtcaagttctatggagtgtgcggcgatggggaccccctcatcatggtctttgaatacatgaagcatggagacctgaataagttcctcagggcccatgggccagatgcaatgatccttgtggatggacagccacgccaggccaagggtgagctggggctctcccaaatgctccacattgccagtcagatcgcctcgggtatggtgtacctggcctcccagcactttgtgcaccgagacctggccaccaggaactgcctggttggagcgaatctgctagtgaagattggggacttcggcatgtccagagatgtctacagcacggattattacaggctctttaatccatctggaaatgatttttgtatatggtgtgaggtgggaggacacaccatgctccccattcgctggatgcctcctgaaagcatcatgtaccggaagttcactacagagagtgatgtatggagcttcggggtgatcctctgggagatcttcacctatggaaagcagccatggttccaactctcaaacacggaggtcattgagtgcattacccaaggtcgtgttttggagcggccccgagtctgccccaaagaggtgtacgatgtcatgctggggtgctggcagagggaaccacagcagcggttgaacatcaaggagatctacaaaatcctccatgctttggggaaggccaccccaatctacctggacattcttggctagtggtggctggtggtcatgaattcatactctgttgcctcctctctccctgcctcacatctcccttccacctcacaactccttccatccttgactgaagcgaacatcttcatataaactcaagtgcctgctacacatacaacactgaaaaaaggaaaaaaaaagaaagaaaaaaaaaccc

SEQ ID NO: 1574 - DNA, 2818 bp, Homo sapiens
gatcgccgagccggccaccatgcccggcagaccgcgccactaggcgctcctcgcggctcccacccggcggcggcggcggcggcggcggcgtccgcgatggtttcagacgctgaaggattttgcatctgatcgctcggcgtttcaaagaagcagcgatcggagatggatgtctctctttgcccagccaagtgtagtttctggcggattttcttgctgggaagcgtctggctggactatgtgggctccgtgctggcttgccctgcaaattgtgtctgcagcaagactgagatcaattgccggcggccggacgatgggaacctcttccccctcctggaagggcaggattcagggaacagcaatgggaacgccagtatcaacatcacggacatctcaaggaatatcacttccatacacatagagaactggcgcagtcttcacacgctcaacgccgtggacatggagctctacaccggacttcaaaagctgaccatcaagaactcaggacttcggagcattcagcccagagcctttgccaagaacccccatttgcgttatataaacctgtcaagtaaccggctcaccacactctcgtggcagctcttccagacgctgagtcttcgggaattgcagttggagcagaactttttcaactgcagctgtgacatccgctggatgcagctctggcaggagcagggggaggccaagctcaacagccagaacctctactgcatcaacgctgatggctcccagcttcctctcttccgcatgaacatcagtcagtgtgaccttcctgagatcagcgtgagccacgtcaacctgaccgtacgagagggtgacaatgctgttatcacttgcaatggctctggatcaccccttcctgatgtggactggatagtcactgggctgcagtccatcaacactcaccagaccaatctgaactggaccaatgttcatgccatcaacttgacgctggtgaatgtgacgagtgaggacaatggcttcaccctgacgtgcattgcagagaacgtggtgggcatgagcaatgccagtgttgccctcactgtctactatcccccacgtgtggtgagcctggaggagcctgagctgcgcctggagcactgcatcgagtttgtggtgcgtggcaaccccccaccaacgctgcactggctgcacaatgggcagcctctgcgggagtccaagatcatccatgtggaatactaccaagagggagagatttccgagggctgcctgctcttcaacaagcccacccactacaacaatggcaactataccctcattgccaaaaacccactgggcacagccaaccagaccatcaatggccacttcctcaaggagccctttccagagagcacggataactttatcttgtttgacgaagtgagtcccacacctcctatcactgtgacccacaaaccagaagaagacacttttggggtatccatagcagttggacttgctgcttttgcctgtgtcctgttggtggttctcttcgtcatgatcaacaaatatggtcgacggtccaaatttggaatgaagggtcccgtggctgtcatcagtggtgaggaggactcagccagcccactgcaccacatcaaccacggcatcaccacgccctcgtcactggatgccgggcccgacactgtggtcattggcatgactcgcatccctgtcattgagaacccccagtacttccgtcagggacacaactgccacaagccggacacgtatgtgcagcacattaagaggagagacatcgtgctgaagcgagaactgggtgagggagcctttggaaaggtcttcctggccgagtgctacaacctcagcccgaccaaggacaagatgcttgtggctgtgaaggccctgaaggatcccaccctggctgcccggaaggatttccagagggaggccgagctgctcaccaacctgcagcatgagcacattgtcaagttctatggagtgtgcggcgatggggaccccctcatcatggtctttgaatacatgaagcatggagacctgaataagttcctcagggcccatgggccagatgcaatgatccttgtggatggacagccacgccaggccaagggtgagctggggctctcccaaatgctccacattgccagtcagatcgcctcgggtatggtgtacctggcctcccagcactttgtgcaccgagacctggccaccaggaactgcctggttggagcgaatctgctagtgaagattggggacttcggcatgtccagagatgtctacagcacggattattacagggtgggaggacacaccatgctccccattcgctggatgcctcctgaaagcatcatgtaccggaagttcactacagagagtgatgtatggagcttcggggtgatcctctgggagatcttcacctatggaaagcagccatggttccaactctcaaacacggaggtcattgagtgcattacccaaggtcgtgttttggagcggccccgagtctgccccaaagaggtgtacgatgtcatgctggggtgctggcagagggaaccacagcagcggttgaacatcaaggagatctacaaaatcctccatgctttggggaaggccaccccaatctacctggacattcttggctagtggtggctggtggtcatgaattcatactctgttgcctcctctctccctgcctcacatctcccttccacctcacaactccttccatccttgactgaagcgaacatcttcatataaactcaagtgcctgctacacatacaacactgaaaaaaggaaaaaaaaagaaagaaaaaaaaaccc

SEQ ID NO: 1575 - DNA, 3997 bp, Homo sapiens
gatcgccgagccggccaccatgcccggcagaccgcgccactaggcgctcctcgcggctcccacccggcggcggcggcggcggcggcggcgtccgcgatggtttcagacgctgaaggattttgcatctgatcgctcggcgtttcaaagaagcagcgatcggagatggatgtctctctttgcccagccaagtgtagtttctggcggattttcttgctgggaagcgtctggctggactatgtgggctccgtgctggcttgccctgcaaattgtgtctgcagcaagactgagatcaattgccggcggccggacgatgggaacctcttccccctcctggaagggcaggattcagggaacagcaatgggaacgccagtatcaacatcacggacatctcaaggaatatcacttccatacacatagagaactggcgcagtcttcacacgctcaacgccgtggacatggagctctacaccggacttcaaaagctgaccatcaagaactcaggacttcggagcattcagcccagagcctttgccaagaacccccatttgcgttatataaacctgtcaagtaaccggctcaccacactctcgtggcagctcttccagacgctgagtcttcgggaattgcagttggagcagaactttttcaactgcagctgtgacatccgctggatgcagctctggcaggagcagggggaggccaagctcaacagccagaacctctactgcatcaacgctgatggctcccagcttcctctcttccgcatgaacatcagtcagtgtgaccttcctgagatcagcgtgagccacgtcaacctgaccgtacgagagggtgacaatgctgttatcacttgcaatggctctggatcaccccttcctgatgtggactggatagtcactgggctgcagtccatcaacactcaccagaccaatctgaactggaccaatgttcatgccatcaacttgacgctggtgaatgtgacgagtgaggacaatggcttcaccctgacgtgcattgcagagaacgtggtgggcatgagcaatgccagtgttgccctcactgtctactatcccccacgtgtggtgagcctggaggagcctgagctgcgcctggagcactgcatcgagtttgtggtgcgtggcaaccccccaccaacgctgcactggctgcacaatgggcagcctctgcgggagtccaagatcatccatgtggaatactaccaagagggagagatttccgagggctgcctgctcttcaacaagcccacccactacaacaatggcaactataccctcattgccaaaaacccactgggcacagccaaccagaccatcaatggccacttcctcaaggagccctttccagagagcacggataactttatcttgtttgacgaagtgagtcccacacctcctatcactgtgacccacaaaccagaagaagacacttttggggtatccatagcagttggacttgctgcttttgcctgtgtcctgttggtggttctcttcgtcatgatcaacaaatatggtcgacggtccaaatttggaatgaagggtcccgtggctgtcatcagtggtgaggaggactcagccagcccactgcaccacatcaaccacggcatcaccacgccctcgtcactggatgccgggcccgacactgtggtcattggcatgactcgcatccctgtcattgagaacccccagtacttccgtcagggacacaactgccacaagccggacacgtgggtcttttcaaacatagacaatcatgggatattaaacttgaaggacaatagagatcatctagtcccatcaactcactatatatatgaggaacctgaggtccagagtggggaagtgtcttacccaaggtcacatggtttcagagaaattatgttgaatccaataagccttcccggacattccaagcctcttaaccatggcatctatgttgaggatgtcaatgtttatttcagcaaaggacgtcatggcttttaaaaactccttttaagcctccttgttttgatgtcaccttggtaggctgggccctctgagaggttggaagctctaggcattgttctctttggatccagggatgctaagtagaaactgcatgagccaccagtgccccggcaccctttaacaccaccagatgggtgttttcccccatccaccactggcagggttgccccttccctccaatcatcactgtgctccttttttcccggcctacgaggcagctcctgccactatctttagagccaataaagagaattaaaaacctgtgcaccaggagcatcttttaaatacactagccattctcttgctttacaaaaacaacctaaccatcacaagaaagcctgatgaagtccagccgtgctccagcctcactttccctgcttggaagcgtggggtctccctggctctcccaggataccatgctgtcctcttagtgacctcgtcgccctgcaacctccagtggggaagagtcacagagagcacctaagcagaggtggagacggcgcggtaagaggagggggagccaggctcaagtattggcaccaagttaggtctcagaggaaagaatggaaaccaatcactttacatttttatttttattttcggtggaaaaatcatccttttttgggacatacttgccccctacttcctcttctctctggaacggctcacaatgagtgtgacattagaaaactccttgcagaggagagtttctccaggctcttcctgggcccttagatctgcagttccgacaagctttggctgcaggaggttttacccatgaactggccatcctactaggaccacaagggaccaagggaatcagggacaaaggcccttcctgccagcccatgatcccgggattggctctcttcccctacttccacttattcttgactctgagaacttttggaacccaatggaatcagcatttcaaggtcaagatgaactgaaggggaagagaagtaaaacttggcctcctccagcccctctcatggcaccaatggaagtgtcctcctgttctctggtcaatatgtgtgtttactttgcttgctttgactcatgccttactccatggccaccctctcccaaagagggggctcgcttcccccattttcaacttgatccactgaggagagggaagggggtgactttcccttcttcagtaggaaaggcacatttgtagggcctgaaactctcccgtatttgctgactcattggtggagtagacttctggctcccagctccactggcccatggggcctccattgtatgaagtcagcataggctgcccacctaatggtggagagcatgaaactgggagcatcctgtggggggcttgtgggggaaaaaggtggttgttttaacccaccgttgttttggggtggtgttgcacactagtagagaatagagtctatgcctttggcaaatttaactgggagtttggattcccacttaagggttttacttcttgggtcctgtggatggtggttcttcgtgtcaggatcccagcccgattctgcaaatgcctccatggggtttaaaaacatgaggctttccaagttcttgcccagtatctggggcagcctccagagtatcacctgggagttcaggttctctccagggctccaggtgtgtgtttatctcgccccctccagctctcctcatcctgctccccattgctccatgtcaggctgttccccattgtgccctgctgatgctttgggtccagggcctcctcccaagtgtggctttaaggagtaagcttgaggatgatgttttttaattattgtaaatcattacctcatttccagcctcccaggctccatccatcccagcatcttttattctgccattttcctcaccttgtgctatgacaatggggcgttgtgtttccacagagacttataggagtgttcagtgtatagtttcttaataaacactttattttctaatgaaaaaaaaaaaaaaaaaa

SEQ ID NO: 1576 - DNA, 834 bp, Homo sapiens
cggccgcgcaggacttgacatgctgcccgactgcctgtcggccgagggcgagctgcgctgccgccggctgctggcaggggccacggcccggctccgcgcgcggcccgcgtcggccgcggtgctcgtgccgctctgctcagtgcgtggggtgccggcgctgctgtacacgctgcggtccagccgcctgaccgggaggcacaagggcgacgtcagtttcccaggcggcaagtgcgacccggctgaccaagatgtggtgcacacggccctgcgggaaacccgggaggagctgggcctggcagtgcccgaggagcacgtgtggggcctgctgcggcctgtgtatgatccgcaaaaggccaccgtggtgccagtgcttgctggtgtaggcccactggatccccagagcctcaggcccaactcggaggaggtgagctgggggatatgagggggttgggctgttccagtcctctgtctaccctctctgcctcctgcctgcaggtagatgaggtgtttgcactgccgctggcccacctgctgcagacgcagaatcagggctatacccacttctgccggggtggccacttccgctacacactacccgtcttcctgcatggaccacaccgggtctggggcctcacagctgtcatcactgagtttgccctgcagctgctggcacctggtacctaccagccccgcctggccggcctgacctgctcaggggctgagggtctggcccgccctaagcagcccctggcttcaccctgtcaggccagctccactccaggactgaataaaggtctttgacagctctaaaaaaaaaaaaaaaaaaaaaaaaaa

SEQ ID NO: 1577 - DNA, 3158 bp, Homo sapiens
gttttagggacagactgcttccgggtcgaagggcttgcttccggagagcgggaaggctaaaacgcggtagctaaactgcagccaactttggttgtgtgtggaaaaggctttagccatggacaggagtggctttggagagatatcatcccctgtaatccgggaggcagaggtgacacggactgcacggaaacagagtgctcagaaaagagttttacttcaggcatctcaagatgaaaattttggtaatactacaccaagaaaccaggttatccctcgaactcctagctcatttcgacagccttttaccccaacaagccgaagcttactaaggcagccagatatttcctgcattcttggaacaggagggaagtcgccccgacttacgcagtcttcagggttctttggaaatctctccatggttactaatctggatgacagtaactgggcagctgcattttcatcacagcgttccgggctgttcacaaacacagagccccacagtataacagaagatgtaactatcagtgctgttatgttacgtgaggatgatcctggagaagctgcatccatgagtatgttttctgatttcctgcagtcttttctgaagcactcttcgagtacagtttttgatcttgtggaagagtatgaaaacatctgtggtagtcaggtgaatatactgagtaaaatagtgagtcgagcaacacctggacttcaaaaattttcaaaaacagccagtatgctctggcttcttcaacaggagatggtcacatggaggctgctggcttctttgtatagagacagaatacagtctgcattagaagaggaaagtgtattcgcagttactgctgttaatgccagtgaaaaaacagttgtggaagcgttatttcagagggattcacttgttcgacaaagtcagctggtggtagattggttagagagtattgccaaagatgaaattggagaattttctgataatattgagttttatgcaaaatcagtatattgggaaaatactctgcataccttaaaacaacggcagctgacttcttacgttggaagtgttcgtccgcttgtcactgaattggaccctgatgctcccataagacagaaaatgccccttgatgatctggatagagaagatgaagttagattactcaaatatctctttactctaatccgtgctggaatgacagaagaggcacaacgactctgtaaacgctgtggtcaagcatggagagctgcaacacttgaaggctggaaactgtaccatgaccctaatgttaatggaggaacagaattagaacctgttgaagggaatccatatagacgcatttggaaaataagttgctggagaatggcagaagatgagctttttaatagatacgagagagcaatttatgcagctttaagtgggaatcttaagcagctgcttcctgtctgtgacacctgggaagacacagtttgggcctacttccgggtgatggtggacagtctggtagaacaggagatccagacatcagtagcaactctggatgaaactgaagaactccctagagaatatctgggagcaaactggacgttagaaaaggtttttgaggaacttcaagctactgacaaaaagagagttctggaagagaatcaagaacattatcatatagttcaaaagtttcttatcctgggagacattgatggtttgatggatgagtttagcaaatggctttccaaaagcagaaacaatctacctggacacctgcttcgctttatgactcaccttattttgtttttccgtactctgggactacagaccaaggaggaagtttctattgaagttttaaagacatacatacagcttttaataagagagaaacatacaaatcttatagcattttatacctgtcatttgcctcaagacctagctgttgcccagtatgcattatttttggaaagtgttacagaatttgaacagcgccaccattgcctggagttggctaaagaagcagatttggatgttgcaacaataacaaaaactgtagttgagaatattcgaaagaaagataatggtgaatttagtcatcatgacctggccccagccctagatactggcactactgaggaggatcgtttaaaaattgatgtaattgactggttggtatttgacccagcgcagagggcagaagcactgaaacaaggcaatgcaattatgagaaaattcttggcatcaaaaaagcacgaagctgcaaaagaagtatttgtgaaaattcctcaggattctatagcagaaatctataatcagtgcgaggaacaaggaatggaaagtccacttcctgctgaagatgataatgctatccgagaacatttgtgcatcagagcttatttggaagcccatgaaacctttaatgagtggtttaagcatatgaattcagttccacaaaaacctgctttgatacctcaaccaacttttactgagaaagtggctcatgaacacaaagaaaagaaatatgaaatggattttggtatttggaaagggcatttggatgccctaactgctgatgtgaaggagaaaatgtataacgtcttgttgtttgttgatggagggtggatggtggatgttagagaggatgccaaagaagaccatgaaagaacacatcaaatggtcttactgagaaagctttgtctgccaatgttgtgttttctgcttcatacgatattgcacagtactggtcagtatcaggaatgcctacagttagcagatatggtatcctctgagcgccacaaactgtacctggtattttctaaggaagagctaaggaagttgctgcagaagctcagagagtcctctctaatgctcctagaccagggacttgacccattagggtatgaaattcagttatagtttaatctttgtaatctcactaattttcatgataaatgaagtttttaataaaatatacttgttattagtaattttttcttttgcattaccatgtaaaatttagacatttgaattttgtacttttcagaatattatcgtgacactttcaacatgtagggatatcagcgtttctctgtgtgcttgttaataaaactatataaaaattaaaattttctgtttttacaaattccaaaaaaaaaaaaaaaaaaaaaaaaaaaaaaaaaaa

SEQ ID NO: 1578 - DNA, 4170 bp, Homo sapiens
ctcttcccttaggtgtttaagttccgcgcgcaggccaggctgcaacctgacggccagatccctcgctgtcctagtcgctgctccttggagtcatgttcccagccgccccttctccgcggaccccgggtaccgggtcccgaaggggcccgctggccggactcgggcccggctccacgccccggacggctagcaggaagggtctgcccctggggtctgcagtcagctccccagtgctcttctcgccggtcggccggcgtagctcgctaagctcgcggggaacaccaacacgaatgttcccacaccactccataactgagtctgtgaactatgatgtgaaaacgtttggatcttctcttcctgttaaagtcatggaagccctaacattggctgaagtcgatgaccagctgaccattaacatagatgaaggtggatgggcttgtctggtgtgcaaagagaagctcattatttggaagattgctctgtcacctattactaagttatccgtttgcaaagaacttcagctgccacctagtgatttccactggagtgccgacttagtggctctttcttactcttctccctcaggtgaagcacattctactcaggctgttgctgtcatggttgccaccagagaaggatctatccgctattggccaagccttgctggtgaagatacctacacagaggcttttgtagattcgggaggtgataagacttacagtttcctaacagcagtgcagggaggaagttttattttgtcttcatcaggaagccaactaattcggttgatacctgagagctcaggaaagattcatcagcatatcctgcctcaggggcaaggcatgctttcaggaattggtcgaaaagtttcttctctttttggaattttatctcctagtagtgatctcacactttcaagtgttctctgggatagagagagatcaagcttttatagcctgacgagttcaaacatcagtaaatgggaattagatgattcttcagaaaagcatgcatacagttgggatataaatagagccctgaaggaaaacattaccgatgctatttggggatctgaaagtaactatgaagctattaaagaaggagtcaacattcgatatttggacttgaagcaaaactgtgatgggctggtgattttggcagcagcatggcactcagcagacaatccatgtctcatctattactctctgataacaatagaagataatggttgccaaatgtcagatgcagttactgtagaagtcactcaatataatccaccttttcagtctgaagacctgattttgtgtcagttgacggtcccaaacttttcaaaccagactgcctatctgtataacgaaagtgctgtctatgtgtgctccacaggaactgggaaattttctcttccccaggagaaaattgtctttaatgcacaaggagatagtgttttaggtgctggtgcctgtggtggtgttcctatcattttttctagaaacagtggactggtgtctattacttcaagggaaaatgtgtctatattggcagaagacttggaagggtctttagcatcttcagttgctggaccaaacagtgagagtatgatttttgagaccactacaaagaatgaaactatagcccaggaagataaaatcaagttgctgaaagctgcctttctgcaatactgcagaaaagatttaggtcatgctcaaatggtggttgatgagctcttttcctctcactctgatttggattctgattctgaactagacagggcagttacccaaatcagtgtagacctgatggatgactacccagcatctgacccacggtgggctgagtctgtccctgaggaagcacctgggttcagcaatacgtcactgattatccttcaccagctagaagacaagatgaaagctcactcttttcttatggactttattcatcaagttggcttatttggacgtctaggcagttttccagttagagggacaccgatggccactcgactgttgctctgtgagcatgccgaaaagctgtcagccgccattgttctcaagaaccaccactcccggctttctgaccttgtcaacacagccatattgattgctttgaacaagagggagtatgaaatcccatccaacctgactcctgcagatgtctttttcagggaggtatcccaagtagataccatctgtgagtgcttactggagcatgaggagcaagtcttgagggatgcacctatggattccattgaatgggctgaagtggtgatcaatgtgaacaatattctcaaggatatgctgcaggctgctagtcattatcgccaaaatagaaactctttgtatagaagagaagaatcactagaaaaagaacctgaatatgttccatggacggcaacaagtggtcctggtggcatccgaacggtaataatacgccagcatgagattgtcctgaaggtggcttatccacaggcagacagcaacctccgaaacatcgtgaccgagcagctggtagccctgatcgattgcttcctggatggttatgtttctcagcttaagtctgtggataaatccagtaatcgggaaagatatgacaatctggagatggaatacctacagaaaagatcagatctcttatctcctcttctttcactaggccagtacctgtgggctgcttctctagcagagaaatactgtgactttgatatattggtacaaatgtgtgagcagactgacaaccagagccgactccagcgctacatgacccagtttgctgatcagaatttttcagactttctcttccgttggtatctggagaaaggaaagcgaggcaaattattatctcagcccatttctcagcatggacagttggcaaattttttgcaagctcatgaacatctcagctggttacatgaaattaatagccaagaattagaaaaggctcatgcaacacttctgggtttggcaaatatggaaactcgttactttgcaaagaagaaaacccttcttggcttgagtaaattggctgcattagcttcagacttttcagaggatatgctacaagaaaaaattgaagaaatggctgagcaggagcgctttctactgcatcaggagaccctacctgaacagctgctggcggagaaacagctaaatctcagtgcgatgccagtattgactgcaccacaactcattggtctatatatctgtgaagaaaatagaagagctaatgaatatgatttcaagaaagctttggacttgttggaatatattgatgaggaagaagatataaatataaatgatctaaaactggaaatcctttgcaaagctcttcagagagataactggtccagttctgatggcaaagatgatccaattgaagtatctaaagacagtatatttgtgaagatcttacagaaacttttaaaagatggcattcagctcagtgagtacttaccggaggtgaaagacctgctacaagcggatcagcttggaagcttaaagtccaatccttacttcgagtttgttttgaaagcaaattatgaatattatgttcagggacaaatataactttttctaaaaatggccattgtttatgaaatctgtataagtgtgtccttatacaaattttaggccataaacaagtgtaagtttgtacaatttcataacatgtatagctgagtttttatactttatatgtaggaagctaatataaaatagttatgtaactgtgattttggttttcagttatgtgacttgttttttccacctgaaatgtgtcagttgttgttcctgtactcggtgccctttctttttactctcacgtggtcccaggttctggagttcttgtcctggttctagctgctcacatgtacaaatcacttctaggcctcagtttctgcgactatgaaaattactagattgcactagcttgtctctaaaattgctgtgactccagatactttgcactgaagagaatctagggtgtttgatatctgtttcagttagggctaatgggaaatgtctagtaagataaatgtcaacttttgctgacttattatgagatgaaaaaccaaaggagagtgggcctaactcatgtgagcttgataactgatgaactcattgggagcattttaaacttttctacataaataataaatgagcactaatgaaagta

SEQ ID NO: 1579 - DNA, 6237 bp, Homo sapiens
ctaagatggcgacgcctttggcggtaaattcggctgctagtctatggggtccttacaaagacatttggcataaagtgggaaatgctctttggagaagacaacctgaagctgttcaccttcttgataagattttgaagaaacacaaacctgacttcatctcattgttcaaaaatccgccaaaaaatgttcaacagcatgagaaggttcagaaagccagtacagagggagtcgccattcagggtcaacagggaactcgacttcttcctgaacagctcattaaagaagcctttattctcagtgacctttttgatattggagaattggcagctgttgagcttcttcttgctggagagcatcaacagccacattttcctggccttaccagaggattagtagctgttcttctgtactgggatggaaagcgatgcattgcgaattccttgaaagccttgatacagtctagacggggaaagacatggaccctagaactcagtccagagctggcttccatgacaacacgctttacagatgagctgatggagcaaggattgacttataaagttcttacgctggtgtcacagattgatgtgaataatgagtttgagaaactacagcgagagagaggtttgggcagtgaaaaacatcgcaaagaggtttctgatctcattaaggagtgcaggcagtctcttgcagaaagcctttttgcctgggcttgccagtcacctttaggcaaagaagacactctcctcctcattggacatttggaaagagtgacagttgaggctaatggctcactggatgcagtgaatctggctcttcttatggcgcttctatactgttttgatatcagttttatagagcaaagcacagaggaacgagatgatatgattcatcaacttccactgttgacagaaaaacagtacattgcaacaattcactctcgtcttcaggactcacagctttggaaactgcctgggctccaagccactgttagacttgcctgggcgctggcattgaggggaatatcccagctacctgatgtgacagctctggcagaattcacagaggcagatgaagcaatggcagaactcgcaattgctgacaacgttttcctgttcctcatggaatctgtagtggtatcagaatacttttatcaggaagaattttatattcgcagagtccataatctcatcacagatttccttgcacttatgccaatgaaggtgaaacagctgaggaatcgggcagatgaagatgctcgaatgattcacatgagtatgcagatgggtaatgaaccccccatttcacttagaagggacctggaacacttaatgcttttgattggcgagctatataaaaagaacccttttcatctggagcttgctctagaatattggtgtcccacagagcctcttcagactccgactatcatgggctcttatctaggggtggctcatcagcggccccctcaacgccaggttgtcttgtcaaagtttgttaggcaaatgggtgacctgttgcctccaactatttatattccttatttgaagatgctccagggattggccaatgggcctcagtgtgcccactactgtttcagcctgctcaaagtcaatggtagtagtcatgttgaaaatattcagggagcaggtggcagtcctgtttcctgggaacatttctttcactccttgatgctttaccacgaacaccttcggaaggatcttccaagtgcagatagtgtccagtaccgtcaccttccttcccgtggcatcacccagaaggagcaagatggattgattgcttttttgcagctcacgtctaccatcattacttggagtgaaaatgctcgcttggccctctgtgaacaccctcagtggacccctgttgtggtgattctgggactcctccaatgcagtattccccctgtcctaaaagctgagctactgaagacactcgcagcttttggaaaatctcctgaaattgctgcttccctctggcagtcattggaatacactcagatactgcagaccgtgaggattccaagccaaaggcaagctattggtattgaggttgaactaaatgaaatagaatcccggtgtgaagaatacccattgactcgggccttttgccagcttattagtactctggtggagagctcatttccttctaatttgggtgctggactgcggccccctggctttgacccttatttgcagttccttagagactctgtgtttctacgattccgtacaagagcttaccggagagcagctgaaaagtgggaagttgctgaggtggttttggaggtgttttataaattgctcagagattatgagcctcagcttgaagattttgtagaccagtttgtggaactacaaggagaagaaatcatagcctataagccacctggatttagtctgatgtatcatctgctgaatgagtcaccaatgttggagcttgctctcagtttactggaagaaggagttaagcagcttgacacctatgccccctttcctgggaaaaaacacctggagaaagcagtacagcattgccttgcacttctcaatcttactctgcaaaaggaaaatctttttatggaccttctaagagagagtcaactggctctaatagtctgtcctttagaacagcttttgcagggaattaatcccagaactaagaaggcagataatgtggtaaacattgccagatacctatatcatggcaatactaatccagaattggcttttgaaagtgccaagatcctctgttgtatctcttgcaactctaatattcagataaagttggttggagatttcacacatgaccagagtataagtcagaaactaatggctggatttgtggagtgtttggattgtgaagatgcagaagaatttgtacgtctggaagagggatcagaacttgaaaagaaattagttgcaattcgtcatgaaacaagaatccacatcttgaatcttctcattacctctctggaatgcaatccacccaatcttgctctctacctgttgggctttgaattgaaaaaacctgtcagtactacaaacctacaagatccaggagtgttaggttgccctcggacatgccttcacgccattctaaacatcttggagaaaggaacggaagggagaacaggcccagtggcggtgcgagaatctcctcagctggctgagctatgttaccaggtcatatatcagttatgtgcatgctctgatacatctggtcctactatgaggtacttgagaaccagccaggatttcttattttcccagttgcagtatctaccattttctaacaaagaatatgaaatatctatgctgaaccagatgtcatggcttatgaaaactgcctcaatagagctaagggtaacctctctgaatcgtcagcggtcacatacccagaggctcctacacctcttactggatgacatgccagtgaaaccatactcagatggtgaaggaggaatagaagatgaaaacaggtctgtttctgggttccttcactttgacactgctacaaaagtacgtcgaaaaattctaaatattcttgactcgattgacttcagtcaggagatccctgagcctttgcagttggatttttttgatcgggcccagattgaacaagttattgctaactgtgaacacaagaatttacggggacagacagtctgcaatgtcaagcttcttcatagggttcttgtagctgaagtaaatgcccttcagggtatggcagccataggacagagacctctactaatggaggaaatcagcactgtacttcagtatgtggtaggaagaaataaattgctgcagtgtcttcatgcaaaacgtcatgctctggagtcgtggaggcaactagtagaaattatactgacagcttgtccccaggacctcattcaggcagaggatcgacaactgattattcgtgatattttacaagatgtgcatgataagatactggatgatgaagctgcgcaagagttaatgcctgtggtcgccggggcagtgttcacactgactgctcacctaagccaggccgtcctcactgaacagaagcaaacatcagtcttgggaccagcagaggcccattacgcttttatgcttgatagttgcttcacctcacctcctcctgaagagaacccattagtgggttttgcttctattggagattcttcactttacatcatattgaagaaactgttagacttcattttgaagacaggtggtggattccaacgagtgaggactcacttgtatggctctctgctttattacttacagattgcccagagacctgatgaaccagacaccttagaagcagccaagaaaaccatgtgggaaaggctgacagcccctgaagatgtatttagcaaattacagcgagaaaacatagccattattgaaagttatggcgccgccctcatggaagtggtctgtcgagatgcttgtgatggtcatgagattggaaggatgctggccctggctctacttgatagaattgtctccgtggataaacagcagcagtggcttttgtatctttctaacagtggctacttgaaggtcctcgtagacagcttggtagaagatgaccgtactttgcagagcttactcaccccacagcctccccttttaaaagcactttatacttatgaatctaaaatggcatttctcacaagagtggcaaagatacagcagggtgcattagagctgctaagatcaggggtgattgtgagactagctcaatgccaagtctatgacatgcgcccagaaacggacccgcagagcatgtttggcatgagagaccctccaatgttcatccctaccccagtggatcgctaccgccagattctcctcccagctctccagctgtgccaggtcatcctcacatctagtatggcccagcacttgcaggcagcagggcaggtattgcagtttcttatttcacattctgataccatacaagcaattctgcgctgtcaggatgttagtgctgggtctttgcaggaattggctctgctgacaggaattataagtaaagcagcacttcctggaatattaagtgaacttgacgttgatgtaaatgaagggtctctaatggagctacagggacatattggaagattccagcgccagtgcttaggactactaagtcgctttggtggctctgacagactgcgtcagtttaaatttcaagacgataatgtggagggagataaagtaagcaagaaagatgagattgaactggctatgcagcagatttgtgccaatgtaatggaatattgccagtcactcatgttacagagttcccctaccttccagcatgctgtgtgtctcttcactcctagcctttcagaaacagttaatagagatggaccgcggcaagatacccaagctccagtggttccatactggcgcctgcctggtttaggcattatcatctacctgctgaaacagagtgctaatgatttcttcagctattatgacagtcatcgacagagtgtcagcaagctacaaaatgtagagcagcttcccccagatgagataaaagagttgtgtcagtctgtgatgcctgctggtgttgataaaatctccactgctcagaaatatgttctagcaagacggcgcttggtgaaggtgatcaacaatcgagctaaactgctttccctttgttcttttatcatagagacctgcctatttattctttggcgccatctggagtactacttgttacattgcatgcccacggattctcaagattccttatttgcctcgagaaccttgtttaaaagcagaagactgcaagattccttcgcctcagaaaccaatctagattttagaagtgggctggctatagtgagccaacatgatttagaccagcttcaggctgatgcaatcaacgcttttggagaatcactacaaaagaaacttctggacattgaaggattatattcaaaagttcgatctcgatatagtttcatacaggctcttgtcagacgtatccgtggcctcttgaggatatcaaggaactgagagcccgtgcttatgctcttctatgagagagatgaattggggagaattgtctccattttatagattagtttctttctaaattatgaccaaaaatattttgctatttctttctttgtatatggacatcttttctgtaaacttcttcccctagttccatcctcactagtaaaaaataaatactttttaaaaaaac

SEQ ID NO: 1580 - DNA, 894 bp, Homo sapiens
ggaagggacagtcggccgcagaccgcgctgggttgccgctgccgctgccgccatcgtgccagcccctcgggtctccgtgaggccgggtgacgctccagaatgggagacaagccaatttgggagcagattggatccagcttcattcaacattactaccagttatttgataatgatagaacccaactaggcgcaatttacattgacgcgtcatgccttacgtgggaaggacaacagttccaggggaaagctgccattgtggagaagttgtctagccttccgttccagaaaattcagcacagcatcaccgcgcaggaccatcagcccactccagatagctgcatcatcagcatggttgtgggccagcttaaggcggatgaagaccccatcatggggttccaccagatgttcctattaaagaacatcaacgatgcttgggtttgcaccaatgacatgttcaggctcgccctgcacaactttggctgacctcctctcagctaggcactcacgctgtttcctcctccctcctcttcccaatactattcccactcctccagatgctccaaatatcatgcacaaatgagcagggccgcggtgggagtgggcgcagtgcgctgctgccactgaggtgttgtgcatgatgtttggatgctagactagttgcatctgacgggagaagtttgtgttgtaccagcgcatgccttggaaagacttaagtaatgcaaaaggttgtccttttttttttttttttttttttaatctactgacaagttgctctagtaacccaaagaagtgaaggagaaagcagctgcctcaccgcccagacattgatttgttcagatgtttcaatgcctcatgatacaataaaaccacaaaaattttcttaacaaaaaaaaa

SEQ ID NO: 1581 - DNA, 2346 bp, Homo sapiens
cggcgcgcgacgtgctttgctgtataaatgcggtggcgcccggcgtagggacacttcggtcctgagcgcttgggagttaggttgtttgccggcgtagcggccagcgcctgagcccgcccttgatcttcgctgtggcatggcggacgaggggaagtcgtacagcgaacacgatgatgaacgcgttaatttccctcaaagaaagaagaaaggccggggtcccttccggtggaaatatggtgaaggaaaccgtaggtctggaagaggcggttctggtattcggtcttcccgccttgaggaagatgatggagatgtggcaatgagtgatgcccaggatggtccccgagtacgatacaacccctataccacccgacctaaccgtcggggtgatacttggcatgatcgagatcgcattcatgttactgtgcggagagacagagctcctccagagagaggaggggctggcaccagccaggatgggacctcaaagaactggttcaagattacaattccttatggcagaaagtatgacaaggcatggctcctgagcatgattcagagcaagtgcagtgtgcccttcacccctattgagtttcactatgagaatacacgggcccagttcttcgttgaagacgccagtactgcctctgcattgaaggctgtcaactataagattttggatcgggagaaccgaaggatatctatcatcatcaactcttctgctccaccccacactatactgaatgaactgaagccagaacaagtagaacagctaaagctgatcatgagcaaacgatacgatggctcccaacaagcccttgacctcaaaggcctccgttcagacccagatttggtggcccagaacattgacgttgtcctgaatcgcagaagctgtatggcagctaccctgaggatcattgaagagaacatccctgagctattgtccttgaacttgagcaacaacaggctgtacaggctggatgacatgtctagcattgttcagaaggcacccaacctgaagatcctaaacctttctggaaatgaattgaagtctgagcgggaattggacaagataaaggggctgaagctagaagagctctggctcgatggaaactccctgtgtgacaccttccgagaccagtccacctacatcagcgccattcgcgaacgatttcccaagttactacgcctggatggccatgagctacccccaccaattgcctttgatgttgaagcccccacgacgttaccgccctgcaagggaagctattttggaacagaaaacttgaagagtctggtcttgcacttcctgcaacagtactatgcaatttacgactctggagaccgacaagggctcctggatgcctaccatgatggggcctgctgttccctgagcattcctttcattcctcagaaccctgcccgaagcagcttagccgagtatttcaaggatagcagaaatgtgaagaagcttaaagaccctaccttgcggttccggctgctgaagcacacgcgtctcaacgttgttgccttcctcaatgagttgcccaaaacccagcacgacgtcaattccttcgtggtagacataagcgcccagacaagcacattgctgtgtttttctgtcaatggagtcttcaaggaagtggacggaaagtcccgggattctttgcgagccttcacccggacattcattgctgttcctgctagcaattcagggctatgtattgtaaatgatgagctatttgtgcggaatgccagttctgaagagatccaaagagccttcgctatgcctgcacccacgccttcctccagcccggtgcccaccctctctccagagcagcaggaaatgttgcaagcattctctacccagtctggcatgaacctcgagtggtcccagaagtgccttcaggacaacaactgggactacaccagatctgcccaggccttcactcatctcaaggccaagggcgagatcccagaagtggcattcatgaagtgatcgtagtcatgcctcagaagcagtcccccctgtaaatagtccttggatattaccgtctggttgtcgtctgtcatctcctcctgtctggcccgaggccgccccgtgactgtgaccgagggagggagggctgcctgatccctctcctcgcctgccttctggaagacttcagaagattgagcctcactggtgccaggaagccaaagcttactttgtagaactgacactaaactacccgaaggacttaggtgctttgtgtacttaaccccaggacctccttactttttaatataaagagtgatgttgtatttcgtgttctgcactttttaatataaagagtgatgttgtatttc

SEQ ID NO: 1582 - DNA, 2931 bp, Homo sapiens
aagtaattgtccgtgtcaggaaggtaggcgtgccaagccgcggctctgcggagaaaccacgaccaccgcggccgccggaaacccaaagcgctccagagcgtccccgggtggccgggcagcaccagggacagcgcccgggactccactggggaccggctcctgggcttcccagcgtcgcgggtagaggtacagctgctccgtgtgccgcaggctccagattctcgccaccccacccctccctcagaaactcggactgctctcgtctgccgtgtggttctcttttcttccgaaaggccagtgtcttatctctccacttcaagtccagaggacttgctcagtctcctccccttaagtcatttccaccatcctcaggcagctgtgggaagccgagagtcctggactgttcgtccgggtgccagcgctggcagtcccagtccgtccggtgcagcagcccggcgcattcccctctctccctccctcttgctctccctccctttctgtcttcctctctttcctcctctactgctccctccctctcttgcctcttaagtttcctgcaccgtgaatccaactgtgccaagccttggctcccgcgaaccaatcctgagcgcgacccgggcactgggacggcgactccgccaaagctggacgaggcagccggacccgtctgcgctcgagcatggagacggagcgcctgggagggcacgtccggggcgctggagacgccaggcccgagtagcttctccatggagcctgcccagagcggtcccttctcgcaggattcgccccaagtcctgtgcggctgctgagagcgctccttgctctgtaaagtggatgtcaggtggatctatgtttctgaaggaacaaagactcaaagaaggcaccgccaaggaagtttgagacgcgggagaatgcaggctgcgtgctggtacgtgcttttcctcctgcagcccaccgtctacttggtcacatgtgccaatttaacgaacggtggaaagtcagaacttctgaaatcaggaagcagcaaatccacactaaagcacatatggacagaaagcagcaaagacttgtctatcagccgactcctgtcacagacttttcgtggcaaagagaatgatacagatttggacctgagatatgacaccccagaaccttattctgagcaagacctctgggactggctgaggaactccacagaccttcaagagcctcggcccagggccaagagaaggcccattgttaaaacgggcaagtttaagaaaatgtttggatggggcgattttcattccaacatcaaaacagtgaagctgaacctgttgataactgggaaaattgtagatcatggcaatgggacatttagtgtttatttcaggcataattcaactggtcaagggaatgtatctgtcagcttggtaccccctacaaaaatcgtggaatttgacttggcacaacaaaccgtgattgatgccaaagattccaagtcttttaattgtcgcattgaatatgaaaaggttgacaaggctaccaagaacacactctgcaactatgacccttcaaaaacctgttaccaggagcaaacccaaagtcatgtatcctggctctgctccaagccctttaaggtgatctgtatttacatttccttttatagtacagattataaactggtacagaaagtgtgccctgactacaactaccacagtgacacaccttactttccctcgggatgaaggtgaacatgggggtgagactgaagcctgaggaattaaaggtcatatgacagggctgttacctcaaagaagaaggtcacatctgttgcctggaatgtgtctacactgctgctcttgtcaactggctgcaaaatacactagtggaaaacactctgatgtaatttctgcccagtcagcttcatccctcagtataattgtaaatcatcacagattttgaattcacacctgaagacatgctctcacatatagaggtacacaaacacaccgtcatgcacatttcagcttgcgtctatcatgattcctgttgagagggctttcattgtctgactcataatggttcaggatcaactatcatcaaacggaaggattaactagacagagaatgtttctaacagttgctgttatggaaatctcttttaaagtcttgagtacatgctaatcaataatctccactcatgcattcctactgcttggagtagctgtactggtaaatactactgtaggagtatctgcttgttaaaatggaaaaatgtgtctttagagctcagtattctttattttacaaacacaacaaaatgtagtaacttttttccagcatacagtaggcacattcaaagtggtccaagatggctcttttttctttgaaaggggcctgttctcagtaaagatgagcaaacatttggaatttacatgtgggcagacattgggataacaactttcatcaccaatcattggacttttgtgaagttgacaccagctaaggctgcttaaaataagttctgatcattatataagaagggaaatgcctggcagacaccatgtaagttataagtgtctgtcttatctttactacacatattgtaacaaattcaatatcctagtcttcatttgtatgaatggtttgtattgtacatagtttaaccaagtgttatttgagctgcttattaatattaacttgtacttgtctctctgcttgttattggttaagaaaaaaggatatgaggaattcattttatcaatgtagctgtgaaggccattaaaaagacaaacttaatgtacagagcatttattcagatcaagtattgttgaaagctatacatatacaacattacagtctgtctgtatttagatattttatttctggaaaaaatgaaatgtacataaaaataaaacacttaaagttgagtttcaataaaaaaaaaaa

SEQ ID NO: 1583 - DNA, 1798 bp, Homo sapiens
ctctgtttccgtggagacgctctcggcgtcccctgtctccgctccggcggagccaggcttcggaatcactgagagaggagggggcagcgccaacgcccagcacctgccgccggtgggggactgacttcggcggaacggaaaactggagttgtttccctgggccagtgcaccgaggctgaagtctataagcctggagagaccatcagcagtaatctgcaaattccgaaatgaccaccctgcccccactgcccatgacacgcccgaagcttacagccttagccagacagaagctgccttgctcctccagaaaaattccaaggtctcaattgatcaaagaaaaagatgacatagatcattatctagaggtaaatttcaaaggattatcaaaagaggaagttgctgcttataggaactcctacaagaagaatatctgtgtggacatgctgcgagatggttatcataagtccttcaccgagctcttcgctctgatggagcggtgggatgccctgagggaggctgcgagagtcaggtccctcttctggctgcagaagcccctggaggagcagcctgataaactggattacctgtaccattacctgaccagggctgaggacgctgagaggaaagaatccttcgaagatgtacataataacttgtatgctctggcctgttacttcaataattctgaagacaagtgggtaaggaaccacttctatgaacgatgttttaagattgctcagctgatcaaaattgactgtgggaagaaagaagccgaggcacacatgcatatgggtcttctctacgaggaagatggtcagcttctggaagctgctgagcattatgaagcattccatcaattgacacaggggcggatatggaaggatgagacaggccgctctctcaacttgttggcctgtgagagtctcctgaggacttacagattactctcagacaaaatgctagaaaataaagaatacaaacaggccatcaaaattctaataaaagcttctgaaatagccaaagaaggaagtgacaaaaagatggaagcggaagcctcttactacttgggcttagcacacttagctgctgaggaatatgaaacagcattaacagtccttgacacttactgtaaaatctccacagacctggatgatgatctcagtctggggagaggctatgaagccatagccaaggtcctgcagagccaaggagagatgacagaagcaattaaatacttgaaaaaatttgtgaaaattgcaagaaacaattttcaaagcctagatttggtgagagcaagtacaatgcttggggacatctacaatgaaaaaggatactacaacaaagcttctgaatgctttcagcaagcttttgacacaacagtagagctaatgagcatgcctctgatggatgagacaaaagttcactatggaatagcaaaagctcatcagatgatgcttacagtgaacaactatatagagtctgcagatctcaccagcctcaactacctgctgtcatggaaggagagcagaggtaacattgaacctgatccagttactgaagagtttagaggatccacagtggaagctgtatctcaaaactcagaacgtttggaagaactcagtaggtttccaggtgatcaaaaaaatgaaacttaaagcagcttttcacttaacatcaaagcaagaagaaatccatcatgtcaccttagacttcaatacttgtaataggagcatgttacagataatatagagttataataaaacggactatgactcttttcattggaaaaaaaaaaaaa

SEQ ID NO: 1584 - DNA, 1558 bp, Homo sapiens
actctgatgaacactgctctcctgcctagagataccactgagtccagaagcaagacctgtgagagtgcacagtgccacttcgccccatggctgaagatggtttgcccaaaatttattctcatcctccaacagaaagcagtaaaacaccaactgcagcaaccattttctttggggctgacaatgctattcccaaatcagaaacaactattacttcagaaggagaccacgtcacttcagtaaatgaatatatgctagaaagcgatttttcaacaactacagacaacaaactgacagctaaaaaggaaaaactcaaatcagaagatgatatggggaccgactttattaagtcaacaactcacctacagaaagaaattacctctctgactggcactacaaactccataacaagagactctattaccgaacatttcatgccagtgaaaattgggaatatttcatcaccagttactactgtttctttaatagatttttccactgacatagcaaaagaagatatcctcttagctaccattgacacaggagatgcagagatctcaataacctctgaagtctctggcacactaaaggacagcagtgctggtgttgctgacgctcctgcctttccacgtaaaaaggatgaagctgatatgagcaattataattcctccatcaaatccaatgtccctgctgatgaggctgtccaggtcactgattccactattcctgaggctgaaatccctcctgctcctgaagaaagcttcactactattccagacataactgcccttgaagaagagaaaataaccgaaattgacctaagtgttttagaagatgacaccagtgctgtggctacattaactgactctgatgagaagtttatcactgtgtttgaactcactacctctgctgaaaaagacaaagataaacgggaagatactctgctaactgatgaagaaactaccgagggagccagtatttggatggagagagatactgcaaatgaagcagagacccattctgttttgcttactgctgttgaatccagatatgacttcgttgtccctgcatcaatagctacaaacctagtggaagaatcatctacagaagaagatttgtctgaaactgataatacagagactgtacctaagatcactgagccattttctggaactacctctgtattagataccccagactataaggaagacacctccacaactgaaacggatatctttgaactactgaaagaagaacccgatgagttcatgatttaaaagcaacaaaagggataccatgtagaattgtgcaatagtctagccagctagccttaacatctaagaaatttttccaacaagcaaaaacctttagaaatgaaagaatgtgggcatttaaggtcttaaacactgaatatcacactcttcttatgactcttgttagcgattcaaggacataaatcttcattcttttctggcacagactacttaaatgggtctgttttcactttgctcatttttcttcaataaatctttttggcaagcaactgaaaaaaaaaaaaaaa

SEQ ID NO: 1585 - DNA, 4658 bp, Homo sapiens
gcggccgcggcggcggcgaacactccctccgaaagagaagcgcagttctccaaagggtagggactctgggcggggctagcagtcctattccgcaaccgcctcagtctcggccccctcaggccaggcgtgagcgccgcccgcctctccccctgacggcctccggttcccatggcttcccccaccaatgggcatcatggcggtaattgtgggaaatgtagtcccgggcgggctccgctagtgggctcgggcgcgctcgccgaccacgatccccggcaagccccgcgccttcggcggcgcctcacgcagtctgcgccggggcggggcagtgaccgggtaggcgcgtcccaacggctcccgcggcggttcgaattctgtgctgccggggttcgctggttctccgagttgtgtccgaggcttccacgcgcaggggcccgggaaagggtcagaggcttcctaacgcagactcgagtgcgaagcgcgcagtcgccgggtgggtctctccccagcgacgatttgggtgaaatggaatctagttcatcagactactataataaagacaatgaagaggaaagtttgcttgcaaatgttgcttccttaagacatgaactgaagataacagaatggagtttgcagagtttaggggaagagttatccagtgttagtccaagtgaaaattctgattatgcccctaatccttcaaggtctgaaaagctaattttggatgttcagcctagccaccctggacttttgaattattcaccttatgaaaacgtctgtaaaatatctggtagcagcactgattttcaaaaaaagccaagagataagatgttttcatcttctgcccctgtggatcaggagattaaaagccttcgagagaaactaaataaacttaggcaacagaatgcttgtttggtcacacagaatcattccttaatgactaaatttgaatctattcactttgaattaacacagtcaagagcaaaagtttctatgcttgagtctgctcaacagcaggcagccagtgtcccaatcttagaagaacagattataaatttggaagcagaggtttcagctcaagataaagttttgagagaggcagaaaataagctggaacagagccagaaaatggtaattgaaaaggaacagagtttgcaggagtccaaagaggaatgtataaaattaaaggtggacttacttgaacaaaccaaacaaggaaaaagagctgaacgacaaaggaatgaagcactatataatgccgaagagctgagtaaagctttccaacaatataaaaaaaaagtggctgaaaaactggaaaaggttcaagctgaagaagaaatattagagagaaatctaactaactgtgaaaaagaaaataaaaggctacaagaaaggtgtggtctatataaaagtgaacttgaaattctgaaagagaaattaaggcagttaaaagaagaaaataacaacggaaaagaaaaattaaggatcatggcagtgaaaaattcagaagtcatggcacaactaactgaatctagacaaagtattttgaagctagagagtgagttagagaacaaagacgaaatacttagagacaaattttctttaatgaatgaaaaccgagaattaaaggtccgtgttgcagcacagaatgagcgactagatttatgtcaacaagaaattgaaagttcaagggtagaactaagaagtttggaaaagattatatcccagttgccattaaaaagagaattatttggctttaaatcatatctttctaaataccagatgagtagcttctcaaacaaggaagaccgttgcattggctgctgtgaggcaaataaattggtgatttcggaattgagaattaagcttgcaataaaagaggcagaaattcaaaagcttcatgcaaacctgactgcaaatcagttatctcagagtcttattacttgtaatgacagccaagaaagtagcaaattaagtagtttagaaacagaacctgtaaagctaggtggtcatcaagtagcagaaagcgtaaaagatcaaaatcaacatactatgaacaagcaatatgaaaaagagaggcaaagacttgttactggaatagaagaactacgtactaagctgatacaaatagaagctgaaaattctgatttgaaggttaacatggctcacagaactagtcagtttcagctgattcaagaggagctgctagagaaagcttcaaactccagcaaactggaaagtgaaatgacaaagaaatgttctcaacttttaactcttgagaaacagctggaagaaaagatagttgcttattcctctattgctgcaaaaaatgcagaactagaacaggagcttatggaaaagaatgaaaagataaggagtctagaaaccaatattaatacagagcatgagaaaatttgtttagcctttgaaaaagcaaagaaaattcacttggaacagcataaagaaatggaaaagcagattgaaagacttgaagctcaactagagaaaaaggaccaacaatttaaagaacaagaaaagactatgtccatgttgcaacaagatataatatgcaaacaacatcatcttgaatcactagatagactcttgacggaaagcaaaggggaaatgaaaaaggaaaatatgaagaaagatgaagctttaaaagcattacagaaccaagtatctgaagaaacaatcaaggttaggcaactagattcagcattggaaatttgtaaggaagaacttgtcttgcatttgaatcaattggaaggaaataaggaaaagtttgaaaaacagttaaagaagaaatctgaagaggtatattgtttacagaaagagctaaagataaaaaatcacagtcttcaagagacttctgagcaaaacgttattctacagcatactcttcagcaacagcagcaaatgttacaacaagagacaattagaaatggagagctagaagatactcaaactaaacttgaaaaacaggtgtcaaaactggaacaagaacttcaaaaacaaagggaaagttcagctgaaaagttgagaaaaatggaggagaaatgtgaatcagctgcacatgaagcagatttgaaaaggcaaaaagtgattgagcttactggcactgccaggcaagtaaagattgagatggatcagtacaaagaagagctgtctaaaatggaaaaggaaataatgcacctaaaacgagatggagaaaataaagcaatgcacctctctcaattagatatgatcttagatcagacaaagacagagctagaaaagaaaacaaatgctgtaaaggagttagaaaagttacagcacagtactgaaactgaactaacagaagccttgcaaaaacgggaagtacttgagactgaactacaaaatgctcatggagaattaaaaagtactttaagacaactccaggaattgagagatgtactacagaaggctcaattatcattagaggaaaaatacactactataaaggatctcacagctgaacttagagaatgcaagatggagattgaagacaaaaagcaggagctccttgaaatggatcaggcacttaaagagagaaattgggaactaaagcaaagagcagctcaggttacacatttggatatgactattcgtgagcacagaggagaaatggaacaaaaaataattaaattagaaggtactctggagaaatcagaattggaacttaaagaatgtaacaaacagatagaaagtctgaatgacaaattacaaaatgctaaagaacagcttcgagaaaaagagtttataatgctacaaaatgaacaggagataagtcaactgaaaaaagaaattgaaagaacacaacaaaggatgaaagaaatggagagtgttatgaaagagcaagaacagtacattgccactcagtacaaggaggccatagatttggggcaagaattgaggctgacccgggagcaggtgcagaactctcatacagaattggcagaggctcgtcatcagcaagtccaagcacagagagaaatagaaaggctctctagtgaactggaggatatgaagcaactctctaaagagaaagatgctcatggaaaccatttagctgaagaactgggggcttctaaagtacgtgaagctcatttagaagcaagaatgcaagcagaaatcaagaaattgtcagcagaagtagaatctctcaaagaagcttatcatatggagatgatttcacatcaagagaaccatgcaaagtggaagatttctgctgactctcaaaagtcttctgttcagcaactaaacgaacagttagagaaggcaaaattggaattagaagaagctcaggatactgtaagcaatttgcatcaacaagtccaagataggaatgaagtaattgaagctgcaaatgaagcattacttactaaaggagaaaatgtgtaattcaaagaagatactgatgtgttgaaaaaatggaatttttggtactgtgctgtttacttattatatgtagctcatacttcatagaagctgttattttgcttttgaataaattttatatttcaatattttaaaagaaagcccttctaaaacttaattatatttttaaagaaaatttattattttatttattgttttttggcttaaacttgctgctttcttttgctttttatataaaa

SEQ ID NO: 1586 - DNA, 1451 bp, Homo sapiens; identical to SEQ ID NO: 235

SEQ ID NO: 1587 - DNA, 10810 bp, Homo sapiens
accagcaggactgatgtgcacacagaaggaatgaagtatggatgtgaaagaacgcaggccttactgctccctgaccaagagcagacgagagaaggaacggcgctacacaaattcctccgcagacaatgaggagtgccgggtacccacacagaagtcctacagttccagcgagacattgaaagcttttgatcatgattcctcgcggctgctttacggcaacagagtgaaggatttggttcacagagaagcagacgagttcactagacaaggacagaattttaccctaaggcagttaggagtttgtgaaccagcaactcgaagaggactggcattttgtgcggaaatggggctccctcacagaggttactctatcagtgcagggtcagatgctgatactgaaaatgaagcagtgatgtccccagagcatgccatgagactttggggcaggggggtcaaatcaggccgcagctcctgcctgtcaagtcggtccaactcagccctcaccctgacagatacggagcacgaaaacaagtccgacagtgagaatgagcaacctgcaagcaatcaaggccagtctaccctgcagcccttgccgccttcccataagcagcactctgcacagcatcatccatccatcacttctctcaacagaaactccctgaccaatagaaggaaccagagtccggccccgccggctgctttgcccgccgagctgcaaaccacacccgagtccgtccagctgcaggacagctgggtccttggcagtaatgtaccactggaaagcaggcatttcctattcaaaacaggaacaggtacaacgccactgttcagtactgcaaccccaggatacacaatggcatctggctctgtttattcaccacctactcggccactacctagaaacaccctatcaagaagtgcttttaaattcaagaagtcttcaaagtactgtagctggaaatgcactgcactgtgtgccgtaggggtctcggtgctcctggcaatactcctgtcttattttatagcaatgcatctctttggcctcaactggcagctacagcagactgaaaatgacacatttgagaatggaaaagtgaattctgataccatgccaacaaacactgtgtcattaccttctggagacaatggaaaattaggtggatttacgcaagaaaataacaccatagattccggagaacttgatattggccgaagagcaattcaagagattcctcccgggatcttctggagatcacagctcttcattgatcagccacagtttcttaaattcaatatctctcttcagaaggatgcattgattggagtatatggccggaaaggcttaccgccttcccatactcagtatgacttcgtggagctcctggatggcagcaggctgattgccagagagcagcggagcctgcttgagacggagagagccgggcggcaggcgagatccgtcagccttcatgaggccggctttatccagtacttggattctggaatctggcatctggctttttataatgatgggaaaaatgcagagcaggtgtcttttaataccattgttatagagtctgtggtggaatgtccccgaaattgccatggaaatggagaatgcgtttctggaacttgccattgttttccaggatttctgggtccggattgttcaagagccgcctgtccagtgttatgtagtggcaacgggcagtactccaagggccgctgcctgtgtttcagcggctggaagggcaccgagtgtgatgtgccgactacccagtgtattgacccacagtgtgggggtcgtgggatttgtatcatgggctcttgtgcttgcaactcaggatacaaaggagaaagttgtgaagaagctgactgtatagaccctgggtgttctaatcatggtgtgtgtatccacggggaatgtcactgcagtccaggatggggaggtagcaattgtgaaatactgaagaccatgtgtccagaccagtgctccggccacggaacgtatcttcaagaaagtggctcctgcacgtgtgaccctaactggactggcccagactgctcaaacgaaatatgttctgtggactgtggctcacacggcgtttgcatgggggggacgtgtcgctgtgaagaaggctggacgggcccagcctgtaatcagagagcctgccacccccgctgtgccgagcacgggacctgcaaggatggcaagtgtgaatgcagccagggctggaatggagagcactgcactatcgagggttgtcctggtctgtgcaacagcaatggaagatgtaccctggaccaaaatggctggcattgtgtgtgccagcctggatggagaggagcaggctgtgacgtagccatggagactctttgcacagatagcaaggacaatgaaggagatggactcattgactgcatggatcccgattgctgcctacagagttcctgccagaatcagccctattgtcggggactgccggatcctcaggacatcattagccaaagccttcaatcgccttctcagcaagctgccaaatccttttatgatcgaatcagtttccttataggatctgatagcacccatgttatacctggagaaagtcctttcaataagagccttgcatctgtcatcagaggccaagtactgactgctgatggaactccacttattggagtaaatgtctcgtttttccattacccagaatatggatatactattacccgccaggacggaatgtttgacttggtggcaaatggtggggcctctctaactttggtatttgaacgatccccattcctcactcagtatcatactgtgtggattccatggaatgtcttttatgtgatggataccctagtcatgaagaaagaagagaatgatattcccagctgtgatctgagtggattcgtgaggccaaatcccatcattgtgtcatcacctttatccacctttttcagatcttctcctgaagacagtcccatcattcccgaaacacaggtactccacgaggaaactacaattccaggaacagatttgaaactctcctacttgagttccagagctgcagggtataagtcagttctcaagatcaccatgacccagtctattattccatttaatttaatgaaggttcatcttatggtagctgtagtaggaagactcttccaaaagtggtttcctgcctcaccaaacttggcctatactttcatatgggataaaacagatgcatataatcagaaagtctatggtctatctgaagctgttgtgtcagttggatatgagtatgagtcgtgtttggacctgactctgtgggaaaagaggactgccattctgcagggctatgaattggatgcgtccaacatgggtggctggacattagataaacatcacgtgctggatgtacagaacggtatactgtacaagggaaacggggaaaaccagttcatctcccagcagcctccagtcgtgagtagcatcatgggcaatgggcgaaggcgcagcatttcctgccccagttgcaatggtcaagctgatggtaacaagttactggccccagtggcgctagcttgtgggatcgatggcagtctgtacgtaggcgatttcaactatgtgcggcggatattcccttctggaaatgtaacaagtgtcttagaactaagcagcaacccagctcatagatactaccttgcaacggatccagtcacgggagatctgtacgtttctgacacaaacacccgcagaatttatcgcccaaagtcacttacgggggcaaaagacttgactaaaaatgcagaagtcgtcgcagggacaggggagcaatgccttccgtttgacgaggcgagatgtggggatggagggaaggccgtggaagccacactcatgagtcccaaaggaatggcagttgataagaatggattaatctactttgttgatggaaccatgattaggaaagttgaccaaaatggaatcatatcaactcttctgggctctaacgatttgacttcagccagacctttaacttgtgacaccagcatgcacatcagccaggtacgtctggaatggcccactgacctagccattaaccctatggataactccatttatgtcctggataataatgtagttttacagatcactgaaaatcgtcaagttcgcattgctgctggacggcccatgcactgtcaggttcccggagtggaatatcctgtggggaagcacgcggtgcagacaacactggaatcagccactgccattgctgtgtcctacagtggggtcctgtacattactgaaactgatgagaagaaaattaaccggataaggcaggtcacaacagatggagaaatctccttagtggccggaataccttcagagtgtgactgcaaaaatgatgccaactgtgactgttaccagagtggagatggctacgccaaggatgccaaactcagtgccccatcctccctggctgcttctccagatggtacactgtatattgcagatctagggaatatccggatccgggctgtgtcaaagaataagcctttacttaactctatgaacttctatgaagttgcgtctccaactgatcaagaactctacatctttgacatcaatggtactcaccaatatactgtaagtttagtcactggtgattacctttacaattttagctacagcaatgacaatgatattactgctgtgacagacagcaatggcaacacccttagaattagacgggacccaaatcgcatgccagttcgagtggtgtctcctgataaccaagtgatatggttgacaataggaacaaatggatgtttgaaaagcatgactgctcaaggactggaattagttttgtttacttaccatggcaatagtggccttttagccactaaaagtgatgaaactggatggacaacgttttttgactatgacagtgaaggtcgtctgacaaatgttacgtttccaactggagtggtcacaaacctgcatggggacatggacaaggctatcacagtggacattgagtcatctagccgagaagaagatgtcagcatcacttcaaatctgtcctcgatcgattctttctacaccatggttcaagatcagttaagaaacagctaccagattggttatgacggctccctcagaattatctacgccagtggcctggactcacactaccaaacagagccgcacgttctggctggcaccgctaatccgacggttgccaaaagaaacatgactttgcctggcgagaacggtcaaaacttggtggaatggagattccgaaaagagcaagcccaagggaaagtcaatgtctttggccgcaagctcagggttaatggcagaaacctcctttcagttgactttgatcgaacaacaaagacagaaaagatctatgacgaccaccgtaaatttctactgaggatcgcctacgacacgtctgggcacccgactctctggctgccaagcagcaagctgatggccgtcaatgtcacctattcatccacaggtcaaattgccagcatccagcgaggcaccactagcgagaaagtagattatgacggacaggggaggatcgtgtctcgggtctttgctgatggtaaaacatggagttacacatatttagaaaagtccatggttcttctgcttcatagccagcggcagtacatcttcgaatacgatatgtgggaccgcctgtctgccatcaccatgcccagtgtggctcgccacaccatgcagaccatccgatccattggctactaccgcaacatatacaaccccccggaaagcaacgcctccatcatcacggactacaacgaggaagggctgcttctacaaacagctttcttgggtacaagtcggagggtcttattcaaatacagaaggcagactaggctctcagaaattttatatgatagcacaagagtcagttttacctatgatgaaacagcaggagtcctaaagacagtaaacctccagagtgatggttttatttgcaccattagatacaggcaaattggtcccctgattgacaggcagattttccgctttagtgaagatgggatggtaaatgcaagatttgactatagctatgacaacagctttcgagtgaccagcatgcagggtgtgatcaatgaaacgccactgcctattgatctgtatcagtttgatgacatttctggcaaagttgagcagtttggaaagtttggagttatatattatgatattaaccagatcatttctacagctgtaatgacctatacgaagcactttgatgctcatggccgtatcaaggagattcaatatgagatattcaggtcgctcatgtactggattacaattcagtatgataacatgggtcgggtaaccaagagagagattaaaatagggccctttgccaacaccaccaaatatgcttatgaatatgatgttgatggacagctccaaacagtttacctcaatgaaaagataatgtggcggtacaactacgatctgaatggaaacctccatttactgaacccaagtaacagtgcgcgtctgacaccccttcgctatgacctgcgagacagaatcactcgactgggtgatgttcaatatcggttggatgaagatggtttcctacgtcaaaggggcacggaaatctttgaatatagctccaaggggcttctaactcgagtttacagtaaaggcagtggctggacagtgatctaccgttatgacggcctgggaaggcgtgtttctagcaaaaccagtctaggacagcacctgcagtttttttatgctgacttaacttatcccactaggattactcatgtctacaaccattcgagttcagaaattacctccctgtattatgatctccaaggacatctttttgccatggaaatcagcagtggggatgaattctatattgcatcggataacacagggacaccactggctgtgttcagtagcaatgggcttatgctgaaacagattcagtacactgcatatggggaaatctattttgactctaatattgactttcaactggtaattggatttcatggtggcctgtatgacccactcaccaaattaatccactttggagaaagagattatgacattttggcaggacggtggacaacacctgacatagaaatctggaaaagaattgggaaggacccagctccttttaacttgtacatgtttaggaataacaaccctgcaagcaaaatccatgacgtgaaagattacatcacagatgttaacagctggctggtgacatttggtttccatctgcacaatgctattcctggattccctgttcccaaatttgatttaacagaaccttcttacgaacttgtgaagagtcagcagtgggatgatataccgcccatcttcggagtccagcagcaagtggcgcggcaggccaaggccttcctgtcgctggggaagatggccgaggtgcaggtgagccggcgccgggccggcggcgcgcagtcctggctgtggttcgccacggtcaagtcgctgatcggcaagggcgtcatgctggccgtcagccagggccgcgtgcagaccaacgtgctcaacatcgccaacgaggactgcatcaaggtggcggccgtgctcaacaacgccttctacctggagaacctgcacttcaccatcgagggcaaggacacgcactacttcatcaagaccaccacgcccgagagcgacctgggcacgctgcggttgaccagcggccgcaaggcgctggagaacggcatcaacgtgacggtgtcgcagtccaccacggtggtgaacggcaggacgcgcaggttcgcggacgtggagatgcagttcggcgcgctggcgctgcacgtgcgctacggcatgaccctggacgaggagaaggcgcgcatcctggagcaggcgcggcagcgcgcgctcgcccgggcctgggcgcgcgagcagcagcgcgtgcgcgacggcgaggagggcgcgcgcctctggacggagggcgagaagcggcagctgctgagcgccggcaaggtgcagggctacgacgggtactacgtactctcggtggagcagtaccccgagctggccgacagcgccaacaacatccagttcctgcggcagagcgagatcggcaggaggtaacgcccgggccgcgcccgccgagccgctcacgccctgcccacattgtcctgtggcacaacccgagtgggactctccaacgcccaagagccttcctcccgggggaatgagactgctgttacgacccacacccacaccgcgaaaacaaggaccgcttttttccgaatgaccttaaaggtgatcggctttaacgaatatgtttacatatgcatagcgctgcactcagtcggactgaacgtagccagaggaaaaaaaaatcatcaaggacaaaggcctcgacctgttgcgctgggccgtctgttccttctaggcactgtatttaactaactttaaaaaagaaaaaaaaatgtgtacagtgtttccaaatagtcccgaattgtcgacctttgcttacaagaagtagtctgtctgcataggatgtgatagctatctctgttcattttacaatgtggggcaaagttactgtttctagacaacccaactgctttccctgtgcagctttgtagaaggacattggcacagtgacttctgcggcggggatttattaatggattttacaatgctaacgtggtttcccttcggggaaaaaactggcaactagaatccttgtcactgataagcaaaggaaatcctgatttttttgtaaattatgtgagacaagttgtttatggatttttatatgaattacaatttactgtacatcaaatcttagtctcagaggagttaatttatgtaaagtgtttaaaaatttatacttaaaaataaaatgataaaaacgtgaactgtgtgatttttttaaaaggattgcaccttttgttatctgttatagctgtacagtatgaattattatattgtagagatataacaacttatgcctataatgtccagaagtgttaatatttttgtattaggttgaaaaaatgtgcaagcttctatcactagatggataggaccgtgcaattctaggtgggtggcgaatcagagagctcctttctcttccctctctcacgcatcaggccagtgtcctcagcattgtcaactgagaggcacagtagacaactagggctggtggaatgtaagggaagaagattgaaaaaacgggaggaagggttctctggccctctctcaaccttgcaagtcaatggggagttgttgatataattaaccccgaggtttttactgttactgttccaaagctctgtctcttgatggaggagagaccacatcagatgctggggaaataggaggaggaaaggttctgatgtagtcgtgatcctaaacacgtgtcttaagatctaggaaagacagcagaaaccgagcagtggtgggtgagccagatggagccggtcagggttactctaagcccacatgaccaaaccatcttggggggctggtttgaatgacagcctctgctctgtctcggggaagccgggggtggcagatccagctggaagtgaactgacagccgcgccctcctgcacacatgcatgcacgcgtgtgggaacgagcccagccgccatctgcacttccgtgtcggctcagctctgacaaatctctttcctgagcactaaattcagccacgaaaatatttttagaagatatttctcagttcatcgagctatagtacacactgttttcctctatgtataatggtgataaaatatagcaagtgaacatgtcgtaaatataaaggttcaagtgatgtattgaaaataattttctaactgctttgtatgtatcacatactctaaattgcacagtaggcgtgtttattaaacagatgattggctgggaaagtttcaaaatagctactgaatttacagtatcagtgctattactgtctttgtgtatttggtagagcataccgaagtaattaatcttctaatgaatgctgatgatattttattagaatgaaagcacagattagcattaatattttttattctggaaatcctttggcaagtattatgaagcccaaatttagaaaactatgagatttcaaaccacataaacatgattctgttttccattttattttttaactgttaggtatttgcagttctgttccgtggaacttctgcaggcctgtatttagcatgctgtaagtacttttgggtgaaataggctctgagtctaaattctcagacatgtttctgatgtattaccatgaaaagcttgtgccacatgacagaagtgagatcatagtcttaacctcttcttgacgtggactggtcttcactcgggcaccgataaataacagatttggagtatctcctggtgcttattttagatgatgaagtcaaatcaacccaattagtgtcctgttagtaggtataatgagcctatttctttctaaaaagacttgtgatctggacatgcttttacaagaaatagtgaccttggggaatatgtaaacaaaagacctttttctaagagttgggagggggtgggggactgtataatgaaaagaattagcttacaaaaaagaaattgatattcaaagtattttaggcaaagccagtcaaaatgctttcatgatattttgagatgtaaattttgtctgatttgtattgttcttttcatttgccttcttaactttatatgtgacctgaattttccataacttgatgactatagattgcacctaggcattccaataaaagccaacccaatgtg

SEQ ID NO: 1588 - DNA, 13566 bp, Homo sapiens
acctgctccttcctgggcgccccgctacggctcgcggagcagaggagccgcgccgccgagagagagaggagccaccggcgcggcgccttgcctccctgccgccgtcctcgccgcttccccggcggtagcagcctgcagccacgatggaaaaactgagaatcagagagggctagtgatctctcagacacttggtcggtagaaaagatcccgcaccatcctccaggatccaatggccttggagagagggctgcagggcccacggacattgctgactcttcagaacgtgctgacatggagccaggtagactgaaattaccatgtgtccaaattaaaattgcatacttcaaggattatttgaaggactattcttagacccttttaagaagatttaaagaaaaaccactcggccctgagtgcggcgaggaccctgtttgtggatgtggaggagcgcgggccggaggccatggacgtgaaggagaggaagccttaccgctcgctgacccggcgccgcgacgccgagcgccgctacaccagctcgtccgcggacagcgaggagggcaaagccccgcagaaatcgtacagctccagcgagaccctgaaggcctacgaccaggacgcccgcctagcctatggcagccgcgtcaaggacattgtgccgcaggaggccgaggaattctgccgcacaggtgccaacttcaccctgcgggagctggggctggaagaagtaacgccccctcacgggaccctgtaccggacagacattggcctcccccactgcggctactccatgggggctggctctgatgccgacatggaggctgacacggtgctgtcccctgagcaccccgtgcgtctgtggggccggagcacacggtcagggcgcagctcctgcctgtccagccgggccaattccaatctcacactcaccgacaccgagcatgaaaacactgagactgatcatccgggcggcctgcagaaccacgcgcggctccggacgccgccgccgccgctctcgcacgcccacacccccaaccagcaccacgcggcctccattaactccctgaaccggggcaacttcacgccgaggagcaaccccagcccggcccccacggaccactcgctctccggagagccccctgccggcggcgcccaggagcctgcccacgcccaggagaactggctgctcaacagcaacatccccctggagaccagaaacctaggcaagcagccattcctagggacattgcaggacaacctcattgagatggacattctcggcgcctcccgccatgatggggcttacagtgacgggcacttcctcttcaagcctggaggcacctccccgctcttctgcaccacatcaccagggtacccactgacgtccagcacagtgtactctcctccgccccgacccctgccccgcagcaccttcgcccggccggcctttaacctcaagaagccctccaagtactgtaactggaagtgcgcagccctgagcgccatcgtcatctcagccactctggtcatcctgctggcatactttgtggccatgcacctgtttggcctaaactggcacctgcagccgatggaggggcagatgtatgagatcacggaggacacagccagcagttggcctgtgccaaccgacgtctccctatacccctcagggggcactggcttagagacccctgacaggaaaggcaaaggaaccacagaaggaaagcccagtagtttctttccagaggacagtttcatagattctggagaaattgatgtgggaaggcgagcttcccagaagattcctcctggcactttctggagatctcaagtgttcatagaccatcctgtgcatctgaaattcaatgtgtctctgggaaaggcagccctggttggcatttatggcagaaaaggcctccctccttcacatacacagtttgactttgtggagctgctggatggcaggaggctcctaacccaggaggcgcggagcctagaggggaccccgcgccagtctcggggaactgtgcccccctccagccatgagacaggcttcatccagtatttggattcaggaatctggcacttggctttttacaatgacggaaaggagtcagaagtggtttcctttctcaccactgccattgagtcggtggataactgccccagcaactgctatggcaatggtgactgcatctctgggacctgccactgcttcctgggtttcctgggccccgactgtggcagagcctcctgccccgtgctctgtagcggaaatggccaatacatgaaaggcagatgcttgtgccacagtggctggaaaggcgctgagtgcgatgtgcccaccaaccagtgtatcgatgtggcctgcagcaaccatggcacctgcatcacgggcacctgcatctgcaaccctggctacaagggcgagagctgtgaggaagtggactgcatggaccccacatgttcaggccggggtgtctgcgtgagaggcgaatgccactgctctgtgggatggggaggcaccaactgcgagacccccagggccacatgcttagaccagtgttcaggccacggaaccttcctcccggacaccgggctttgcagctgtgacccaagctggactggacacgactgttctatcgagatctgtgctgccgactgtggtggccatggcgtgtgcgtagggggcacctgccgctgcgaggatggctggatgggggcagcctgcgaccagcgggcctgccacccgcgctgtgccgagcatgggacctgccgcgacggcaagtgcgagtgcagccctggctggaatggcgaacactgcaccatcgctcactatctggatagggtagttaaagagggttgccctgggttgtgcaatggcaacggcagatgtaccttagacctgaatggttggcactgcgtctgccagctgggctggagaggagctggctgtgacacttccatggagactgcctgcggtgacagcaaagacaatgatggagatggcctggtggactgcatggaccctgactgctgcctccagcccctgtgccatatcaacccgctgtgccttggctcccctaaccctctggacatcatccaggagacacaggtccctgtgtcacagcagaacctacactccttctatgaccgcatcaagttcctcgtgggcagggacagcacgcacataatccccggggagaacccctttgatggagggcatgcttgtgttattcgtggccaagtgatgacatcagatggaacccccctggttggtgtgaacatcagttttgtcaataaccctctctttggatatacaatcagcaggcaagatggcagctttgacttggtgacaaatggcggcatctccatcatcctgcggttcgagcgggcacctttcatcacacaggagcacaccctgtggctgccatgggatcgcttctttgtcatggaaaccatcatcatgagacatgaggagaatgagattcccagctgtgacctgagcaattttgcccgccccaacccagtcgtctctccatccccactgacgtccttcgccagctcctgtgcagagaaaggccccattgtgccggaaattcaggctttgcaggaggaaatctctatctctggctgcaagatgaggctgagctacctgagcagccggacccctggctacaaatctgtcctgaggatcagcctcacccacccgaccatccccttcaacctcatgaaggtgcacctcatggtagcggtggagggccgcctcttcaggaagtggttcgctgcagccccagacctgtcctattatttcatttgggacaagacagacgtctacaaccagaaggtgtttgggctttcagaagcctttgtttccgtgggttatgaatatgaatcctgcccagatctaatcctgtgggaaaaaagaacaacagtgctgcagggctatgaaattgacgcgtccaagcttggaggatggagcctagacaaacatcatgccctcaacattcaaagtggcatcctgcacaaagggaatggggagaaccagtttgtgtctcagcagcctcctgtcattgggagcatcatgggcaatgggcgccggagaagcatctcctgccccagctgcaacggccttgctgacggcaacaagctcctggccccagtggccctcacctgtggctctgacgggagcctctatgtgggtgatttcaactacattagaaggatcttcccctctggaaatgtcaccaacatcctagagctgagaaataaagatttcagacatagtcacagtccagcacacaaatactacctggccacagaccccatgagtggggccgtcttcctttctgacagcaacagccggcgggtctttaaaatcaagtccactgtggtggtgaaggaccttgtcaagaactctgaggtggttgcggggacaggtgaccagtgcctcccctttgatgacactcgctgcggggatggtgggaaggccacagaagccacactcaccaatcccaggggcattacagtggacaagtttgggctgatctacttcgtggatggcaccatgatcagacgcatcgatcagaatgggatcatctccaccctgctcggctctaatgatctcacatcagcccggccactcagctgtgattctgtcatggatatttcccaggttcacctggagtggcccacagacttagccatcaacccaatggacaactcactttatgtcctcgacaacaatgtggtcctgcaaatctctgaaaaccaccaggtgcgcattgtcgccgggaggcccatgcactgccaggtccctggcattgaccacttcctgctaagcaaggtggccatccacgcaaccctggagtcagccaccgctttggctgtttcacacaatggggtcctgtatattgctgagactgatgagaaaaagatcaaccgcatcaggcaggtcaccactagtggagagatctcactcgttgctggggcccccagtggctgtgactgtaaaaatgatgccaactgtgattgtttttctggagacgatggttatgccaaggatgcaaagttaaataccccatcttccttggctgtgtgtgctgatggggagctctacgtggccgaccttgggaacatccgaattcggtttatccggaagaacaagcctttcctcaacacccagaacatgtatgagctgtcttcaccaattgaccaggagctctatctgtttgataccaccggcaagcacctgtacacccaaagcctgcccacaggagactacctgtacaacttcacctacactggggacggcgacatcacactcatcacagacaacaatggcaacatggtaaatgtccgccgagactctactgggatgcccctctggctggtggtcccagatggccaggtgtactgggtgaccatgggcaccaacagtgcactcaagagtgtgaccacacaaggacacgagttggccatgatgacataccatggcaattccggccttctggcaaccaaaagcaatgaaaacggatggacaacattttatgagtacgacagctttggccgcctgacaaatgtgaccttccctactggccaggtgagcagtttccgaagtgatacagacagttcagtgcatgtccaggtagagacctccagcaaggatgatgtcaccataaccaccaacctgtctgcctcaggcgccttctacacactgctgcaagaccaagtccggaacagctactacatcggggccgatggctccttgcggctgctgctggccaacggcatggaggtggcgctgcagactgagccccacttgctggctggcaccgtcaaccccaccgtgggcaagaggaatgtcacgctgcccatcgacaacggcctcaacctggtggagtggcgccagcgcaaagagcaggctcggggccaggtcactgtctttgggcgccggctgcgggttcacaaccgaaatctcctatctctggactttgatcgcgtaacacgcacagagaagatctatgatgaccaccgcaagttcacccttcggattctgtacgaccaggcggggcggcccagcctctggtcacccagcagcaggctgaatggtgtcaacgtgacatactcccctgggggttacattgctggcatccagaggggcatcatgtctgaaagaatggaatacgaccaggcgggccgcatcacatccaggatcttcgctgatgggaagacatggagctacacatacttagagaagtccatggtgctgctactacacagccagaggcagtatatctttgagttcgacaagaatgaccgcctctcttctgtgacgatgcccaacgtggcgcggcagacactagagaccatccgctcagtgggctactacagaaacatctatcagccccctgagggcaatgcctcagtcatacaggacttcactgaggatgggcacctccttcacaccttctacctgggcactggccgcagggtgatatacaagtatggcaaactgtcaaagctggcagagacgctctatgacaccaccaaggtcagtttcacctatgacgagacggcaggcatgctgaagaccatcaacctacagaatgagggcttcacctgcaccatccgctaccgtcagattgggcccctgattgaccgacagatcttccgcttcactgaggaaggcatggtcaacgcccgttttgactacaactatgacaacagcttccgggtgaccagcatgcaggctgtgatcaacgagaccccactgcccattgatctctatcgctatgatgatgtgtcaggcaagacagagcagtttgggaagtttggtgtcatttactatgacattaaccagatcatcaccacagctgtcatgacccacaccaagcattttgatgcatatggcaggatgaaggaagtgcagtatgagatcttccgctcgctcatgtactggatgaccgtccagtatgataacatggggcgagtagtgaagaaggagctgaaggtaggaccctacgccaataccactcgctactcctatgagtatgatgctgacggccagctgcagacagtctccatcaatgacaagccactctggcgctacagctacgacctcaatgggaacctgcacttactgagccctgggaacagtgcacggctcacaccactacggtatgacatccgcgaccgcatcactcggctgggtgacgtgcaatacaagatggatgaggatggcttcctgaggcagcggggcggtgatatctttgagtacaactcagctggcctgctcatcaaggcctacaaccgggctggcagctggagtgtcaggtaccgctacgatggcctggggcggcgcgtgtccagcaagagcagccacagccaccacctgcagttcttctatgcagacctgaccaaccccaccaaggtcacccacctgtacaaccactccagctctgagatcacctccctctactacgacttgcaaggacacctctttgccatggagctgagcagtggtgatgagttttacatagcttgtgacaacatcgggacccctcttgctgtctttagtggaacaggtttgatgatcaagcaaatcctgtacacagcctatggggagatctacatggataccaaccccaactttcagatcatcataggctaccatggtggcctctatgatccactcaccaagcttgtccacatgggccggcgagattatgatgtgctggccggacgctggactagcccagaccacgagctgtggaagcaccttagtagcagcaacgtcatgccttttaatctctatatgttcaaaaacaacaaccccatcagcaactcccaggacatcaagtgcttcatgacagatgttaacagctggctgctcacctttggattccagctacacaacgtgatccctggttatcccaaaccagacatggatgccatggaaccctcctacgagctcatccacacacagatgaaaacgcaggagtgggacaacagcaagtctatcctcggggtacagtgtgaagtacagaagcagctcaaggcctttgtcaccttagaacggtttgaccagctctatggctccacaatcaccagctgccagcaggctccaaagaccaagaagtttgcatccagcggctcagtctttggcaagggggtcaagtttgccttgaaggatggccgagtgaccacagacatcatcagtgtggccaatgaggatgggcgaagggttgctgccatcttgaaccatgcccactacctagagaacctgcacttcaccattgatggggtggatacccattactttgtgaaaccaggaccttcagaaggtgacctggccatcctgggcctcagtggggggcggcgaaccctggagaatggggtcaacgtcactgtgtcccagatcaacacagtacttaatggcaggactagacgctacacagacatccagctccagtacggggcactgtgcttgaacacacgctacgggacaacgttggatgaggagaaggcacgggtcctggagctggcccggcagagagccgtgcgccaagcgtgggcccgcgagcagcagagactgcgggaaggggaggaaggcctgcgggcctggacagagggggagaagcagcaggtgctgagcacagggcgggtgcaaggctacgacggctttttcgtgatctctgtcgagcagtacccagaactgtcagacagcgccaacaacatccacttcatgagacagagcgagatgggccggaggtgacagagaggaccaaggacttcttgccaaagacagctactcttttgtggccgcatacctgactgtgttgtacttttaaaaaaatgattttttaacaagtgcagaaacaaaaagatactggttgcattgtaactcatgcaacatccttttttttagaaaagaaaaacacagatttggccttcgcacattttttgcaaagaacagaaggtatttttttctgtagtgtgatcacaatgaaaactttattgtcttttgttccctttttccttgaggatttttcccttgtcgtttggggtatgtatctcctctctgagatgcatctcctggggtgtgtcctcgtctgtccctaggtacccagtgtgatgtgggacatgaatgtctgtgctaacttgtctcatgtgcaaccctttcttcttcgactggggtcgggcaggagtaaagggagtgatgggccagtacaacaccccttccaagggggcctgggaggagggtctgtaggacctgaggctccttggcagggctcctgcagaagagtggtggatttcttctcaccttgttctctgcctccagaggatcatagatggcttcatcttgctccagggaatttcatggtgttgttcagcaccttttttaagctgccccaaactcctgttcaagctttctattttgatgctgaatgaaaccccctaccacttttgcaaatcctgtgtagttgtcggtgccacccccatgctgggatagagaaagtgtctcccaggtcctttcccccagaccagtgacataacatcctgggctcagagtcccatcctcccgggagggaaagcacccaggatgcctgtgattggttggtcctccatgatgttcctgttcatctcctcctttctcccaaagccagatgtgagaacgagcactgcacagcaagccttcaatgtgggcaccatgtccacagaacagaaggccacccatggcaaaggcatggcagtggtggcgagggcaccagcctgccttccgaggcaaagccctctctctatgactttgagtatcttccctccaccactcagccgccaccactgagacgtaggaatgtggagggaggtgcttggtggcctttgattctggaaaaatgcttaacaaaaaaagccagccaaagagaggaaggcataagctaagcatccttctaaccagttcccaaagtcccatctgcctccatgtaccagctgatcgcagagctggactggggcaggctgggcttccaggaaattcctgaagttctgaaacagcttcccctctagagaagcccacccaatgtgttttttagtgacaggaagaaaggagggaagagctgatgtggtgtggcctgcccatatcatacaaccccaccaggagcagggcagttcccaaggtgggtgcccgtagatctgggaggccaggctggcatgattcctgtgaagaactgtgcctgtgtcgtcagggagaggcctgagccctctcagaagcagggacagcccacacctgaagagcacgcccaagctgaggcagcagccagcaggctgggggagcagtgagggcagggggagtcacagccagagctgggagccccttgttcaaggattccattcctggttcatccgcctaattaccattgtcattaccactcacaggaggctctgggagatgggaggggaagccaaatgcttccttttaagctgggcttcttagaaaatggaacttttatgggttacatttacattaagtgtggaaaatgaattctgagtctgagctattccccgtggaaaccttgttggactgataagctcatggcacctctatagccttactcacatagtcttcagaatattacacaagttaatgaaactgagaaggtctgactgcatgaggatcggagcagcatgtagtctgggttctgcctggcagagggaggcaaccaaaacttcttggggagaggagatttcgccttaacgtcatcccactgggattagaggatgtgtttcgctaagtgctcttcctgtttccaaaaaaaaagccaccctgctgcagcagtgcgctttggcctgcttgtccactggttgcccattgcccctggatccagagctctactgagtcagatacagtgctctgcaggcctgctgtgggaggcatgagctggagatgggggctcccatctggcaggatcattcttggatgagatggaaaacagtttggcctgaagaacacaagttttgtcctccagaagggacttacgcctctcaaaatgtactcttcataccaagggcccttgggcaaagtgctcctgcccagttgatcagtcccatcctggctgcctgacatcagtgaagacctgctggggatgtctgctcagaggtcaggaacggcatgcggtccacaggaaccagctccctacgcttcccccacgccctgtccctcctccacagccccctccccaaaggaatagggtggacttttagggatcaaaaacagaattattgggtgtttcatttatttttttctttctttcttttttttttcatagagatggggtctcactatgttgcccaggctgttctcaaactcctggcctcaggcgatccaccttggcctcctgaagtgctggggttacaggtgtgagccactgcgcctggactgagtgtttgtttctttaaaggatcttatatttttcctgtgctacataccaccacagcagcccagcttctgtggggagagaagttgaaggatcccgaagctttagaaaaaggatctcagctgtggcacaggcagtgttatgcgcctcactgccacattggtgctgttgtattgaaggtggtgcttctggccttggcccttttgagttggtttccatttgggctgcaggtgactcagtgactccctcctcaagctgtcctcctgctaagaccagcagtcacaaacccatggcaagggtgagtgtgaaggcctaaccctgtgcctatgtaataggctccaagcatcgactcccatcctgagaggaccggcccttttgacactcaccaaccaaatctgttcattcgatagagtgaccaggcctccctcacctgcccaggtgtatgatcctacagttcctgccttctctcctaccccgcacagctgccaactggtcctacatcctcagcccctctgccaccaccttaaataggactttactgattccccaactttgtttttttgtaggatgagatttcctttttatcccacccccccacaccccaaacagacattgctggagggcagactggaggaaggggaaggcatgcaggtaaattactgccttgtcagcctctgaccctcatctctcagaattgttggctgagaattaacccaaggaccacaccagtgcctgatttctacttagggagagaggattggaaacgatccctaagaaactgactgagggtgagaatggccaggaggtgtgtgtccaaataaccaggagggggcacagaagatgatggcaaggcagactgggcagtgttttgtagacacagaacaaagaatcagaatttgaaaaaagaagaaaaacaaatcttcgcagctgcaactttaaagtatcacctttatagatggcagggatttccattatgcaaatggaatctaagatttcaatgtgaaatcttagaatgcagttttaccacttgcagtcttgtatttgtggtggccatgtggtgagggcggtgatgctgagctttctgcccaggaggaatgagctttcaagctctcagcagggtgtcaggcttggggatttgagcatccactgctcaaagtccaggctattctccagtcctcacggcagccactaagcccaggagccagacctggcccggggacacatctcctgagggatcccagaaagaacccagtctttcctttcccttggggtccttgttagaatgaaaacctctctatttaaggcacatcattcccagctaggtttatacacttgtctatattttactggaggaaagggaattaaaaaagaactctgcagttcaaggccctttcatttaaccttccaaaaacagcaaactcattttaaagactcattgctgaggtgatagagagaaaccttatcctctccaaccttcacattcacaaaaaccatccttgtgtacttgactgccctagacagtggtgactcttaggtttcattacgaatgtggaatatcagagtgtgggaaggcccaggcgagggccaatgttgtgtttcttaccccctctggaatgccaaaggcaaggtactaggtgacctcctggtccccaagaaaatgtgatttattctgagggcgaacagccaagggaggactagtctggagcacgctcggccgtcctggcaggagctgagcctcaggtgtctggcggtgccccagcagccctggattcacccaacaccagaatcccacttttctaaatccacctgttgttctgagcacctctgaacccgcagcttcggcaaaaggagtctgtaccaagctgcttctggatgaccaacactggagactctggccttaccatgtggaaatcattttcctgaagtctggaactaattttgagaagtttttttctcaacacttttgtgtttctaacactgtatcttgactgtgtaaataccaacaaggctgtaaataaatgcagatgtagataccttctagaaaaaaaaaagcataaaaacaaaaccagaagtgatcccgtgtagccttcgttgacaaataaagactattttgtgtttaaaaaaaaaaaaaaaaaaa

SEQ ID NO: 1589 - DNA, 1419 bp, Homo sapiens
atggaggggcagatgtatgagatcacggaggacacagccagcagttggcctgtgccaaccgacgtctccctatacccctcagggggcactggcttagagacccctgacaggaaaggcaaaggaaccacagaaggaaagcccagtagtttctttccagaggacagtttcatagattctggagaaattgatgtgggaaggcgagcttcccagaagattcctcctggcactttctggagatctcaagtgttcatagaccatcctgtgcatctgaaattcaatgtgtctctgggaaaggcagccctggttggcatttatggcagaaaaggcctccctccttcacatacacagtttgactttgtggagctgctggatggcaggaggctcctaacccaggaggcgcggagcctagaggggaccccgcgccagtctcggggaactgtgcccccctccagccatgagacaggcttcatccagtatttggattcaggaatctggcacttggctttttacaatgacggaaaggagtcagaagtggtttcctttctcaccactgccattgagtcggtggataactgccccagcaactgctatggcaatggtgactgcatctctgggacctgccactgcttcctgggtttcctgggccccgactgtggcagagcctcctgccccgtgctctgtagcggaaatggccaatacatgaaaggcagatgcttgtgccacagtggctggaaaggcgctgagtgcgatgtgcccaccaaccagtgtatcgatgtggcctgcagcaaccatggcacctgcatcacgggcacctgcatctgcaaccctggctacaagggcgagagctgtgaggaagtggactgcatggaccccacatgttcaggccggggtgtctgcgtgagaggcgaatgccactgctctgtgggatggggaggcaccaactgcgagacccccagggccacatgcttagaccagtgttcaggccacggaaccttcctcccggacaccgggctttgcagctgtgacccaagctggactggacacgactgttctatcgagatctgtgctgccgactgtggtggccatggcgtgtgcgtagggggcacctgccgctgcgaggatggctggatgggggcagcctgcgaccagcgggcctgccacccgcgctgtgccgagcatgggacctgccgcgacggcaagtgcgagtgcagccctggctggaatggcgaacactgcaccatcgggccagcctgggccctcatcgcatgtggggatggggaagaaagtcctttcatctggagctgcttactctgcagcccttgcacgataaagtcctggttttccactgaggcatctgctcctgtccctcctggagactgtgccctgtcgtggcagctgcactcagagtccctcacctaa

SEQ ID NO: 1590 - DNA, 2423 bp, Homo sapiens
ttccgcctccagcgcgagccccgccgccgccgagcatggacgaccccgactgcgactccacctgggaggaggacgaggaggatgcggaggacgcggaggacgaggactgcgaggacggcgaggccgccggcgcgagggacgcggacgcaggggacgaggacgaggagtcggaggagccgcgggcggcgcggcccagctcgttccagtccagaatgacagggtccagaaactggcgagccacgagggacatgtgtaggtatcggcacaactatccggatctggtggaacgagactgcaatggggacacgccaaacctgagtttctacagaaatgagatccgcttcctgcccaacggctgtttcattgaggacattcttcagaactggacggacaactatgacctccttgaggacaatcactcctacatccagtggctgtttcctctgcgagaaccaggagtgaactggcatgccaagcccctcacgctcagggaggtcgaggtgtttaaaagctcccaggagatccaggagcggcttgtccgggcctacgagctcatgctgggcttctacgggatccggctggaggaccgaggcacgggcacggtgggccgagcacagaactaccagaagcgcttccagaacctgaactggcgcagccacaacaacctccgcatcacacgcatcctcaagtcgctgggtgagctgggcctcgagcacttccaggcgccgctggtccgcttcttcctggaggagacgctggtgcggcgggagctgccgggggtgcggcagagtgccctggactacttcatgttcgccgtgcgctgccgacaccagcgccgccagctggtgcacttcgcctgggagcacttccggccccgctgcaagttcgtctgggggccccaagacaagctgcggaggttcaagcccagctctctgccccatccgctcgagggctccaggaaggtggaggaggaaggaagccccggggaccccgaccacgaggccagcacccagggtcggacctgtgggccagagcatagcaagggtgggggcagggtggacgaggggccccagccacggagcgtggagccccaggatgcgggacccctggagaggagccagggggatgaggcagggggccacggggaagataggccggagcccttaagccccaaagagagcaagaagaggaagctggagctgagccggcgggagcagccgcccacagagccaggccctcagagtgcctcagaggtggagaagatcgctctgaatttggaggggtgtgccctcagccagggcagcctcaggacggggacccaggaagtgggcggtcaggaccctggggaggcagtgcagccctgccgccaacccctgggagccagggtggccgacaaggtgaggaagcggaggaaggtggatgagggtgctggggacagtgctgcggtggccagtggtggtgcccagaccttggcccttgccgggtcccctgccccatcggggcaccccaaggctggacacagtgagaacggggttgaggaggacacagaaggtcgaacggggcccaaagaaggtacccctgggagcccatcggagaccccaggccccagcccagcaggacctgcaggggacgagccagccgagagcccatcggagaccccaggcccccgcccagcaggacctgcaggggacgagccagccgagagcccatcggagaccccaggcccccgcccggcaggacctgcaggggacgagccagccgagagcccatcggagaccccaggccccagcccggcaggacctacaagggatgagccagccgagagcccatcggagaccccaggcccccgcccggcaggacctgcaggggacgagccagccgagagcccatcggagaccccaggcccccgcccggcaggacctgcaggggacgagccagccgagagcccatcggagaccccaggccccagcccggcaggacctacaagggatgagccagccaaggcgggggaggcagcagagttgcaggacgcagaggtggagtcttctgccaagtctgggaagccttaaggaaaggagtgcccgtcggcgtcttggtcctcctgtccctgctgcaggggctggggcctccggagctgctgcgggctcccctcaggctctgcttcgtgacccgtgacccatgacccacagtgctggcctcctgtggggccactatagcagccaccagaagccgcgaggccctcagggaagcccaaggcctgcagaagcctcctggcctggctgtgtcttccccacccagctctcccctgcgcccctgtctttgtaaattgacccttctggagtggggggcggcgggcagggctgcttttcttagtctgataccaagcaaggccttttctgaataaattcatttgactttgaaaa

SEQ ID NO: 1591 - DNA, 3240 bp, Homo sapiens
gcccgcgccgccaccgcctcttccctccccgtgtccggtccccgtgcgtcccgaggctccccgccgcccgtcccggcgcgcaccgcgggcgtctgtccgaacgccttccagccacctgagccctcctgcgggcgactcgctcagctagcccgtgcccgcctccaccttctccgtcatcccctcttccttgcgtccggctctccactggggctgcacagtcgagggctgctcgcgtcgggaaggagatgcccagagtctctggggcgcaccctcccgtcccgctcagccgcacccagctttagaaggtgctctcagcagccactttcgggctctagcgaggacaccctctcgcagaagtccttgccgagaccccccgccccagccattctctgaaggggctgaggacactcttatcgcgcccctcatggccaagcctcggctgctagttctctacttcgctctgattgtggttccggcctgggtgtccagcattgtcctcacagggacaagcgagcccccagatgcgcagacagtggcgcctgcggaggacgagactctgcaaaacgaggcggacaaccaggagaacgttttatctcagttgctgggggactatgacaaggtcaaggctatgtctgagggctcggactgtcagtgcaagtgtgtggtgagacccctgggccgggatgcctgccagaggatcaatgcgggggcctccaggaaggaagacttctataccgtggaaaccatcacctcaggctcgtcgtgcaagtgtgcctgtgtagcacccccatcggccctcaatccctgcgagggagacttcaggctccagaagctgcgggaggcagacagccaggacttgaagctctccacaatcatagacatgttggaaggagcgttctatggcctggatctcctgaagctacattcagtcaccaccaaactggtggggcgagtggataaactggaggaggaagtgtctaaaaacctcaccaaggaaaacgaacaaatcaaagaggacatggaagaaattcgaaccgagatgaataagcgaggcaaagaaaattgctctgaaaacatcctagatagcatgccagacatccgctcagccctgcagagggatgcagcagcagcctacgcccacccagagtatgaagagcggtttctgcaggaagaaaccgtgtcccagcagatcaactccatcgaacttctgcagacgcgacccctggctctgcctgaggtggtgaagtcacagcggcccctgcagaggcaggtccacctgagaggccggccggcctcccagcccactgtcatccggggcatcacctactataaagccaaggtctctgaagaagagaatgacattgaagagcagcaagatgagtttttcagcggtgacaatggagtggatttgctgattgaagatcagctcctgagacacaacggcctgatgaccagtgtcacccggaggcctgcagccacccgtcagggacacagcactgctgtgacaagcgacctgaacgctcggaccgcaccctggtcctcagcactgccacagccctcgacctcagatcccagcatcgccaaccatgcctcagtgggaccaacactccaaacaacctcggtgtctccagatcccacaagggagtcagtcctgcagccttctcctcaggtaccagccaccactgtggcccacacagccacccagcaaccagcagccccagctcctccggcagtgtctcccagggaggcattgatggaagctatgcacacagtcccagtgcctcccaccacagtcagaacagactcgctggggaaagatgctcctgctgggtggggaacaacccctgccagccccacgctgagccccgaagaagaagatgacatccggaatgtcataggaaggtgcaaggacactctctccacaatcacggggccgaccacccagaacacatatgggcggaatgaaggggcctggatgaaggaccccctggccaaggatgagcggatttacgtaaccaactattactacggcaacaccctggtagagttccggaacctggagaacttcaaacaaggtcgctggagcaattcctacaagctcccgtacagctggatcggcacaggccacgtggtatacaatggcgccttctactacaatcgcgccttcacccgcaacatcatcaagtacgacctgaagcagcgctacgtggctgcctgggccatgctgcatgacgtggcctacgaggaggccaccccctggcgatggcagggccactcagacgtggactttgctgtggacgagaatggcctatggctcatctacccggccctggacgatgagggcttcagccaggaggtcattgtcctgagcaagctcaatgccgcggacctgagcacacagaaggagaccacatggcgcacggggctccggaggaatttctacggcaactgcttcgtcatctgtggggtgctgtatgccgtggatagctacaaccagcggaatgccaacatctcctacgctttcgacacccacaccaacacacagatcgtccccaggctgctgttcgagaatgagtattcctatacgacccagatagactacaaccccaaggaccgcctgctctatgcctgggacaatggccaccaggtcacttaccatgtcatctttgcctactgacacccttgtccccacaagcagaagcacagaggggtcactagcaccttgtgtgtatgtgtgtgcgcgcacgtgtgtgtaggtgggtatgtgttgtttaaaaatatatattattttgtataatattgcaaatgtaaaatgacaatttgggtctatttttttatatggattgtagatcaatccatacgtgtatgtgctggtctcatcctccccagtttatatttttgtgcaaatgaacttctccttttgaccagtaaccaccttccttcaagccttcagcccctccagctccaagtctcagatctcgaccattgaaaaggtttcttcatctgggtcttgcaggaggcaggcaacaccaggagcagaaatgaaagaggcaagaaagaagtgctatgtggcgagaaaaaaagttttaatgtattggagaagttttaaaaaacccagaaaaacgctttttttttttaataaagaagaaatttaaaatcaaaaaaaaaaaaaaaaaaaaaaaaaaaaaaaaaaaaaaaaaaaaaaaaaaaaaaaaaaaaaaaaaaaaaaaaaaaaaaaaa

SEQ ID NO: 1592 - DNA, 939 bp, Homo sapiens
atggatggagataaccagagtgagaactcacagttccttctcctggggatctcagagagtcctgagcagcagcagatcctgttttggatgttcctgtccatgtacctggtcacggtgctgggaaatgtgctcatcatcctggccatcagctctgattcccacctgcacacccccatgtacttcttcctggccaacctctccttcactgacctcttctttgtcaccaacacaatccccaagatgctggtgaacttccagtcccagaacaaagccatctcctatgcagggtgtctgacacagctctacttcctggtctccttggtgaccctggacaacctcatcctggccgtgatggcgtatgatcgctatgtggccatctgctgccccctccactatgtcacagccatgagccctgggctctgtgtcttgctcctctccttgtgttgggggctgtctgttctctatggcctcctcctcaccttcctcctgaccagggtgaccttctgtgggcctcgagagatccactacctcttctgtgacatgtacatcctgctgtggctggcatgttccaacacccacatcattcacacagcattgattgccactggctggttcatcttcctcaccctcttagggttcatgaccacatcctatgtacgtattgtcagaaccatccttcaaatgccctcggcctctaagaaatacaaaactttctctacctgtgcctcgcatttgggtgtggtctccctcttttatgggacgcttgctatggtgtacctgcagcccctccatacctactccatgaaggactcagtagccacagtgatgtatgctgtgctgacacctatgatgaaccctttcatttacagcctgaggaacaaagacatgcatggggctccgggaagagtcctatggagaccctttcagaggcctaaatga

SEQ ID NO: 1593 - DNA, 939 bp, Homo sapiens
atggatggagataaccagagtgagaactcacagttccttctcctggggatctcagagagtcctgagcagcagcggatcctgttttggatgttcctgtccatgtacctggtcacggtgctgggaaatgtgctcatcatcctggccatcagctctgattcccacctgcacacccccatgtacttcttcctggccaacctctccttcactgacctcttctttgtcaccaacacaatccccaagatgctggtgaacttccagtcccagaacaaagccatctcctatgcagggtgtctgacacagctctacttcctggtctccttggtgaccctggacaacctcatcctggccgtgatggcgtatgatcgctatgtggccacctgctgccccctccactatgtcacagccatgagccctgggctctgtgtcttgctcctctccttgtgttgggggctgtctgttctctatggcctcctcctcaccttcctcctgaccagggtgaccttctgtgggcctcgagagatccactacctcttctgtgacatgtacatcctgctgtggctggcatgttccaacacccacatcattcacacagcgttgattgccactggctgcttcatcttcctcacccccttagggttcatgaccacatcctatgtacgtattgtcagaaccatccttcaaatgccctcggcctctaagaaatacaaaaccttctctacctgtgcctcccatttgggtgtggtctccctcttttatgggacgcttgctatggtgtacctgcagcccctccatacctactccatgaaggactcagtagccacagtgatgtatgctgtgctgacacctatgatgaaccctttcatctacaggctgaggaacaaagacatgcatggggctccgggaagagtcctatggagaccctttcagaggcctaaatga

SEQ ID NO: 1594 - DNA, 933 bp, Homo sapiens
atggaaggcaacaagacatggatcacagacatcaccttgccgcgattccaggttggtccagcactggagattctcctctgtggacttttctctgccttctatacactcaccctgctggggaatggggtcatctttgggattatctgcctggactgtaagcttcacacacccatgtacttcttcctctcacacctggccattgttgacatatcctatgcttccaactatgtccccaagatgctgacgaatcttatgaaccaggaaagcaccatctccttttttccatgcataatgcagacattcttgtatttggcttttgctcacgtagagtgtctgattttggtggtgatgtcctatgatcgctatgcggacatctgccaccccttacgttacaatagcctcatgagctggagagtgtgcactgtcctggctgtggcttcctgggtgttcagcttcctcctggctctggtccctttagttctcatcctgagcctgcccttctgcgggcctcatgaaatcaaccacttcttctgtgaaatcctgtctgtcctcaagttggcctgtgctgacacctggctcaaccaggtggtcatctttgcagcctgcgtgttcatcctggtggggccactctgcctggtgctggtctcctacttgcgcatcctggccgccatcttgaggatccagtctggggagggccgcagaaaggccttctccacctgctcctcccacctttgcgtggtgggactcttctttggcagcgccattgtcacgtacatggcccccaagtcccgccatcctgaggagcagcagaaagttctttccctgttttacagccttttcaatccaatgctgaaccccctgatatatagcctaaggaatgcagaggtcaagggcgccctgaggagggcactgaggaaggagaggctgacgtga

SEQ ID NO: 1595 - DNA, 933 bp, Homo sapiens
atgggagacaatataacatccatcagagagttcctcctactgggatttcccgttggcccaaggattcagatgctcctctttgggctcttctccctgttctacgtcttcaccctgctggggaacgggaccatactggggctcatctcactggactccagactgcacgcccccatgtacttcttcctctcacacctggcggtcgtcgacatcgcctacgcctgcaacacggtgccccggatgctggtgaacctcctgcatccagccaagcccatctcctttgcgggccgcatgatgcagacctttctgttttccacttttgctgtcacagaatgtctcctcctggtggtgatgtcctatgatctgtacgtggccatctgccaccccctccgatatttggccatcatgacctggagagtctgcatcaccctcgcggtgacttcctggaccactggagtccttttatccttgattcatcttgtgttacttctacctttacccttctgtaggccccagaaaatttatcactttttttgtgaaatcttggctgttctcaaacttgcctgtgcagatacccacatcaatgagaacatggtcttggccggagcaatttctgggctggtgggacccttgtccacaattgtagtttcatatatgtgcatcctctgtgctatccttcagatccaatcaagggaagttcagaggaaagccttccgcacctgcttctcccacctctgtgtgattggactcgtttatggcacagccattatcatgtatgttggacccagatatgggaaccccaaggagcagaagaaatatctcctgctgtttcacagcctctttaatcccatgctcaatccccttatctgtagtcttaggaactcagaagtgaagaatactttgaagagagtgctgggagtagaaagggctttatga

SEQ ID NO: 1596 - DNA, 933 bp, Homo sapiens
atgggggacaatataacatccatcacagagttcctcctactgggatttcccgttggcccaaggattcagatgctcctctttgggctcttctccctgttctacgtcttcaccctgctggggaacgggaccatactggggctcatctcactggactccagactgcacgcccccatgtacttcttcctctcacacctggcggtcgtcgacatcgcctacgcctgcaacacggtgccccggatgctggtgaacctcctgcatccagccaagcccatctcctttgcgggccgcatgatgcagacctttctgttttccacttttgctgtcacagaatgtctcctcctggtggtgatgtcctatgatctgtacgtggccatctgccaccccctccgatatttggccatcatgacctggagagtctgcatcaccctcgcggtgacttcctggaccactggagtccttttatccttgattcatcttgtgttacttctacctttacccttctgtaggccccagaaaatttatcactttttttgtgaaatcttggctgttctcaaacttgcctgtgcagatacccacatcaatgagaacatggtcttggccggagcaatttctgggctggtgggacccttgtccacaattgtagtttcatatatgtgcatcctctgtgctatccttcagatccaatcaagggaagttcagaggaaagccttctgcacctgcttctcccacctctgtgtgattggactcttttatggcacagccattatcatgtatgttggacccagatatgggaaccccaaggagcagaagaaatatctcctgctgtttcacagcctctttaatcccatgctcaatccccttatctgtagtcttaggaactcagaagtgaagaatactttgaagagagtgctgggagtagaaagggctttatga

SEQ ID NO: 1597 - DNA, 933 bp, Homo sapiens; identical to SEQ ID NO: 1595

SEQ ID NO: 1598 - DNA, 1065 bp, Homo sapiens
atgactaataaaatgtatgctatatatataaagaatcttaattatttttctttcctcatagttcagtgtcttcaaccaaccatggcaatattcaataacaccacttcgtcttcctcaaacttcctcctcactgcattccctgggctggaatgtgctcatgtctggatctccattccagtctgctgtctctacaccattgccctcttgggaaacagtatgatctttcttgtcatcattactaagcggagactccacaaacccatgtattatttcctctccatgctggcagctgttgatctatgtctgaccattacgacccttcccactgtgcttggtgttctctggtttcatgcccgggagatcagctttaaagcttgcttcattcaaatgttctttgtgcatgctttctccttgctggagtcctcggtgctggtagccatggcctttgaccgcttcgtggctatctgtaacccactgaactatgctactatcctcacagacaggatggtcctggtgatagggctggtcatctgcattagaccagcagttttcttacttccccttcttgtagccataaacactgtgtcttttcatgggggtcacgagctttcccatccattttgctaccacccagaagtgatcaaatacacatattccaaaccttggatcagcagtttttggggactgtttcttcagctctacctgaatggcactgacgtattgtttattcttttctcctatgtcctgatcctccgtactgttctgggcattgtggcccgaaagaagcaacaaaaagctctcagcacttgtgtctgtcacatctgtgcagtcactattttctatgtgccactgatcagcctctctttggcacaccgcctcttccactccaccccaagggtgctctgtagcactttggccaatatttatctgctcttaccacctgtgctgaaccctatcatttacagcttgaagaccaagacaatccgccaggctatgttccagctgctccaatccaagggttcatggggttttaatgtgaggggtcttaggggaagatgggattga

SEQ ID NO: 1599 - DNA, 2519 bp, Homo sapiens
ggtggcccttgtgcagggaattgaagaagtgcaggaggatgccacacagagatggtagagggagcgaaaggagcaaaggccctaactttcccttaatgatgtctccttccatctttagtccagcccagcaatgtacatgttatcctccccgtttgaagatgaagacactgaggctcagaaagatcaaacgcctttcccaaactcacagctacggcctgacggagccatgtaagcagcaagaagacccttaccagacactgcatgctggtgccttgatcttggacttcccagcctcctgaactggaccactggtgtcatggcagagatgaacctcaccttggtgaccgagttcctccttattgcattcactgaatatcctgaatgggcactccctctcttcctcttgtttttatttatgtatctcatcaccgtattggggaacttagagatgattattctgatcctcatggatcaccagctccacgctccaatgtatttccttctgagtcacctcgctttcatggacgtctgctactcatctatcactgtcccccagatgctggcagtgctgctggagcatggggcagctttatcttacacacgctgtgctgctcagttctttctgttcaccttctttggttccatcgactgctacctcttggcgctcatggcctatgaccgctacttggctgtgtgccagcccctgctttatgtcaccatcctgacacagcaggcccgcttgagtcttgtggctggggcttacgttgctggtctcatcagtgccttggtgcggacagtctcagccttcactctctccttctgtggaaccagtgagattgactttattttctgtgacctccctcctctgttaaagttgacctgtggggagagctacactcaagaagtgctgattattatgtttgccatttttgtcatccctgcttccatggtggtgatcttggtgtcctacctgtttatcatcgtggccatcatggggatccctgctggaagccaggccaagaccttctccacctgcacctcccacctcactgctgtgtcactcttctttggtaccctcatcttcatgtacttgagaggtaactcagatcagtcttcggagaagaatcgggtagtgtctgtgctttacacagaggtcatccccatgttgaatcccctcatctacagcctgaggaacaaggaagtgaaggaggccctgagaaaaattctcaatagagccaagttgtcctaaccatctccaaacttggaaaatcccgagaaccacctactctgtagtgtcagaattctggacgctcattatttatagcatgctcaatgtttaaatgaatatattatggtactaggtataaaaaagaaccagaacttttagctccagggagaggaaggaagacaaggaaaagtcaacctgaaaagagattggagtgggagttttgattcccaggacaagtgacaaaaggatttgaaattaaagcctgtgcaatccaaatatggcacacttcacctgtctgtgattataagagtaattttttttgcaaaatttttaatgaaagattttcatcatatagaaatgttaaaaataatatgtaggaagtttcctatactcagtactgagattgtgtaattgctaatatttgctgtctttacttggttacatagatgtaatctatccgtgagtttattcatcaatcaattcactcatcaaaccacctttttttgattcatttcaaggtgagttccggacatcagcattagtaccctttacttctatgcacttcagaattatatcatcaattaggattcaatatttagattacatttatttttaatgatcaaactatggtcgtttgatgatccaattagcaaagctgaccctactcaaggtatgccttaatattctggtagtagttctcaagaaggcctcacacaaacttttaacaatgcctacaataacatgtctgtcaattgctatcacctctggatatatgccctgttctttttcttcctacctattacagttctctctcgtcatatggcatgactaaaaatccacttagcaaagttataccattcccactgcccataatggcgtcttcagtgtctgtatcatagacattgactctctgtgttctgaaagctttttccttcagggaggcagaacattgctgcattccacatggcgataggcaggagggtggtcctcgcctatcctgggtccctgcactctgcagcagctcagcctgcatccaaagcctcacaaaatctgtctgttcttaatctttacttctctaatcacaggggacttgtctcaatcaaacccaaggcactggaagagaacaggccccatctattaattttttttcatttaaacaaatttttatacctggaactcaaacttcttttcctgtctcctggattactaaaaaaaaaaaaaaaaaaaaaaaaaaaaaaaaaaaaaaaaaaaaaaaaaaaaaaaaaaaaaaaaaaaaaaaaaaaaaaaaaaa

SEQ ID NO: 1600 - DNA, 3180 bp, Homo sapiens
cggggccacgccgattggcgcgaagttttcttttctccttccaccttcttttcatttctagtgagacacacgctttggtcctggctttcggcccgtagttgtagaaggagccctgctggtgcaggttagaggtgccgcatcccccggagctctcgaagtggaggcggtaggaaacggagggcttgcggctagccggaggaagctttggagccggaagccatggcacactaccccacaaggctgaagaccagaaaaacttattcatgggttggcaggcccttgttggatcgaaaactgcactaccaaacctatagagaaatgtgtgtgaaaacagaaggttgttccaccgagattcacatccagattggacagtttgtgttgattgaaggggatgatgatgaaaacccgtatgttgctaaattgcttgagttgttcgaagatgactctgatcctcctcctaagaaacgtgctcgagtacagtggtttgtccgattctgtgaagtccctgcctgtaaacggcatttgttgggccggaagcctggtgcacaggaaatattctggtatgattacccggcctgtgacagcaacattaatgcggagaccatcattggccttgttcgggtgatacctttagccccaaaggatgtggtaccgacgaatctgaaaaatgagaagacactctttgtgaaactatcctggaatgagaagaaattcaggccactttcctcagaactatttgcggagttgaataaaccacaagagagtgcagccaagtgccagaaacccgtgagagccaagagtaagagtgcagagagcccttcttggaccccagcagaacatgtggccaaaaggattgaatcaaggcactccgcctccaaatctcgccaaactcctacccatcctcttaccccaagagccagaaagaggctggagcttggcaacttaggtaaccctcagatgtcccagcagacttcatgtgcctccttggattctccaggaagaataaaacggaaagtggccttctcggagatcacctcaccttctaagagatctcagcctgataaacttcaaaccttgtctccagctctgaaagccccagagaaaaccagagagactggactctcttatactgaggatgacaagaaggcttcacctgaacatcgcataatcctgagaacccgaattgcagcttcgaaaaccatagacattagagaggagagaacacttacccctatcagtgggggacagagatcttcagtggtgccatccgtgattctgaaaccagaaaacatcaaaaagagggatgcaaaagaagcaaaagcccagaatgaagcgacctctactccccatcgtatccgcagaaagagttctgtcttgactatgaatcggattaggcagcagcttcggtttctaggtaatagtaaaagtgaccaagaagagaaagagattctgccagcagcagagatttcagactctagcagtgacgaagaagaggcttccacaccgccccttccaaggagagcacccagaactgtgtccaggaacctgcgatcttccttgaagtcatccttacataccctcacgaaggtgccaaagaagagtctcaagcctagaacgccacgttgtgccgctcctcagatccgtagtcgaagcctggctgcccaggagccagccagtgtgctggaggaagcccgactgaggctgcatgtttctgctgtacctgagtctcttccctgtcgggaacaggaattccaagacatctacaattttgtggaaagcaaactccttgaccataccggagggtgcatgtacatctccggtgtccctgggacagggaagactgccactgttcatgaagtgatacgctgcctgcagcaggcagcccaagccaatgatgttcctccctttcaatacattgaggtcaatggcatgaagctgacggagccccaccaagtctatgtgcaaatcttgcagaagctaacaggccaaaaagcaacagccaaccatgcggcagaactgctggcaaagcaattctgcacccgagggtcacctcaggaaaccaccgtcctgcttgtggatgagctcgaccttctgtggactcacaaacaagacataatgtacaatctctttgactggcccactcataaggaggcccggcttgtggtcctggcaattgccaacacaatggacctgccagagcgaatcatgatgaaccgggtgtccagccgactgggtcttaccaggatgtgcttccagccctatacatatagccagctgcagcagatcctaaggtcccggctcaagcatctaaaggcctttgaagatgatgccatccagctggtagccaggaaggtagcagcactgtctggagatgcacgacggtgcctggacatctgcaggcgtgccacagagatctgtgagttctcccagcagaagcctgactcccctggcctggtcaccatagcccactcaatggaagctgtggatgagatgttttcatcatcatacatcacggccatcaaaaattcctctgttctggaacagagcttcctgagagccatcctcgcagagttccgtcgatcaggactggaggaagccacgtttcaacagatatatagtcaacatgtggcactgtgcagaatggagggactgccgtaccccaccatgtcagagaccatggccgtgtgttctcacctgggctcctgtcgcctcctgcttgtggagcccagcaggaacgatctgctccttcgggtgcggctcaacgtcagccaggatgatgtgctgtatgcgctgaaagacgagtaaaggggcttcacaagttaaaagactggggtcttgctgggttttgttttttgagacagggtcttgctctgtcgcccaggctggagtgcagtggcacgatcatggctcactgcagccttgacttctcaggcttaggtgaccccccaacctcatcctcccaggtggctgaaactacaggcacatgccaccatgcccagctgattttttgtagagacagggcttcaccatgttgccaagctagtctacaaagcatctgattttggaagtacatggaattgttgtaacaaagtatattgaatggaaatggctctcatgtattttggaattttccattaaataatttgctttttcctgaaaaaaaaaaaaaaaaaaaaaaaa

SEQ ID NO: 1601 - DNA, 2109 bp, Homo sapiens
gattcggccggagctgccagcggggaggctgcagccgcgggttgttacagctgctggagcagcagcggcccccgctcccgggaaccgttcccgggccgttgatcttcggccccacacgaacagcagagaggggcagcaggatgaatgtgggcacagcgcacagcgaggtgaaccccaacacgcgggtgatgaacagccgtggcatctggctctcctacgtgctggccatcggtctcctccacatcgtgctgctgagcatcccgtttgtgagtgtccctgtcgtctggaccctcaccaacctcattcacaacatgggcatgtatatcttcctgcacacggtgaaggggacaccctttgagaccccggaccagggcaaggcgaggctgctaacccactgggagcagatggattatggggtccagttcacggcctctcggaagttcttgaccatcacacccatcgtgctgtacttcctcaccagcttctacactaagtacgaccagatccattttgtgctcaacaccgtgtccctgatgagcgtgcttatccccaagctgccccagctccacggagtccggatttttggaatcaataagtactgagagtgcagccccttcccctgcccagggtggcaggggaggggtagggtaaaaggcatgtgctgcaacactgaagacagaaagaagaagcctctggacactgccagagatgggggttgagcctctggcctaatttcccccctcgcttcccccagtagccaacttggagtagcttgtagtggggttggggtaggccccctgggctctgaccttttctgaattttttgatctcttccttttgctttttgaatagagactccatggagttggtcatggaatgggctgggctcctgggctgaacatggaccacgcagttgcgacaggaggccaggggaaaaacccctgctcacttgtttgccctcaggcagccaaagcactttaacccctgcatagggagcagagggcggtacggcttctggattgtttcactgtgattcctaggttttttcgatgccatgcagtgtgtgcttttgtgtatggaagcaagtgtgggatgggtctttgcctttctgggtagggagctgtctaatccaagtcccaggcttttggcagcttctctgcaacccaccgtgggtcctggttgggagtggggagggtcaggttggggaaagatggggtagagtgtagatggcttggttccagaggtgagggggccagggctgctgccatcctggcctggtggaggttggggagctgtaggagagctagtgagtcgagacttagaagaatggggccacatagcagcagaggactggtgtaagggagggaggggtagggacagaagctagacccaatctcctttgggatgtgggcagggagggaagcaggcttggagggttaatttacccacagaatgtgatagtaataggggagggaggctgctgtgggtttaactcctgggttggctgttgggtagacaggtggggaaaaggcccgtgagtcattgtaagcacaggtccaacttggccctgactcctgcgggggtatggggaagctgtgacagaaacgatgggtgctgtggtcctctgcaggccctcaccccttaacttcctcatgcagactggcactgggcagggcctctcatgtggcagccacatgtggcgttgtgaggccaccccatgtggggtctgtggtgagagtcctgtaggatccctgctcaagcagcacagaggaaggggcaagacgtggcctgtaggcactgtctcagcctgcagagaagaaagtgaggccgggagcctgagcctgggctggagccttctcccctccccagttggactaggggcagtgttaattttgaaaaggtgtgggtccctgtgtccttttccaggggtccaagggaacaggagaggtcactgggcctgttttctccctcctgaccctgcatctcccaccctgtgtatcatagggaactttcaccttaaaatctttctaagcaaagtgtgaataggatttttactccctttgtacagtattctgaggaacgcaaataaaagggcaacatgtttctgtt

SEQ ID NO: 1602 - DNA, 402 bp, Homo sapiens
atgctggactggagattggcaagtgcacatttcatcctggctgtgacactgacactgtggagctcaggaaaagtcctctcagtagatgtaacaacaacagaggcctttgattctggagtcatagatgtgcagtcaacacccacagtcagggaagagaaatcagccactgacctgacagcaaaactcttgcttcttgatgaattggtgtccctagaaaatgatgtgattgagacaaagaagaaaaggagtttctctggttttgggtctccccttgacagactctcagctggctctgtagatcacaaaggtaaacagaggaaagtagtagatcatccaaaaaggcgatttggtatccccatggatcggattggtagaaaccggctttcaaattccagaggctaa

SEQ ID NO: 1603 - DNA, 4361 bp, Homo sapiens
tgttaaggctctgggaccaacgctgggcgaaccagctccgctccggaggggtctgcgcggctggcctcgcccgccccctagcggacccgtgcgatagtgcagcctcagccccagcgcacagcgccgcatccagacgctgtccgcgcgcgcagcctgggaggcgctcctcgctcgcctcctgtacccatccagcgaccagccaggctgcggcgaggggattccaaccgaggctccagtgagagacctcagcttagcatcacattaggtgcagccggcaggccatcccaactcgggccgggagcgcacgcgtcactggggccgtcagtcgccgtgcaacttccccggggggagtcaactttaggttcgcctgcggactcggtgcagtggaagccgctgaacatcccgaggaactggcacgctgggggctctgggcttgtggccggtagaggattcccgctcatttgcagtggctcagaggagggtggacccagcagatccgtccgtggagtctccaggagtggagccccgggcgcccctacaccctccgacacgccggatccggcccagccgcgccaagccgtaaagggctcgaaggccggggcgcaccgctgccgccagggtcatggagggcgcgctcgcagccaactggagcgccgaggcagccaacgccagcgccgcgccgccgggggccgagggcaaccgcaccgccggacccccgcggcgcaacgaggccctggcgcgcgtggaggtggcggtgctgtgtctcatcctgctcctggcgctgagcgggaacgcgtgtgtgctgctggcgctgcgcaccacacgccagaagcactcgcgcctcttcttcttcatgaagcacctaagcatcgccgacctggtggtggcagtgtttcaggtgctgccgcagttgctgtgggacatcaccttccgcttctacgggcccgacctgctgtgccgcctggtcaagtacttgcaggtggtgggcatgttcgcctccacctacctgctgctgctcatgtccctggaccgctgcctggccatctgccagccgctgcgctcgctgcgccgccgcaccgaccgcctggcagtgctcgccacgtggctcggctgcctggtggccagcgcgccgcaggtgcacatcttctctctgcgcgaggtggctgacggcgtcttcgactgctgggccgtcttcatccagccctggggacccaaggcctacatcacatggatcacgctagctgtctacatcgtgccggtcatcgtgctcgctgcctgctacggccttatcagcttcaagatctggcagaacttgcggctcaagaccgctgcagcggcggcggccgaggcgccagagggcgcggcggctggcgatggggggcgcgtggccctggcgcgtgtcagcagcgtcaagctcatctccaaggccaagatccgcacggtcaagatgactttcatcatcgtgctggccttcatcgtgtgctggacgcctttcttcttcgtgcagatgtggagcgtctgggatgccaacgcgcccaaggaagcctcggccttcatcatcgtcatgctcctggccagcctcaacagctgctgcaacccctggatctacatgctgttcacgggccacctcttccacgaactcgtgcagcgcttcctgtgctgctccgccagctacctgaagggcagacgcctgggagagacgagtgccagcaaaaagagcaactcgtcctcctttgtcctgagccatcgcagctccagccagaggagctgctcccagccatccacggcgtgacccaccagccagggccagggctgcagcctgaggctcaggctgtgctggcataagtgctctgctcctaggtgatggcgtatgtttgtgtataaggtacctatcagtttgtatccctcccctccttggggtggcttcagtggggtggagagtggcctccatgatggaagatgataggggactcagccatcagacaacaccctggcctcctacacgtacttctaccaccctgaacccactgctgccctgggcagtgagtggcttgttttttctcctggacttgtaatttcactccagtatatttttacttcttcattctgggatattgtgaaaagcggtaaatataggattggtgaccaattgggtcaggaagtccagtgttctggacttggggtaagcagtggggttgggacctcagatgggaagggtggtgctaagatcctcctgacctcaaagtgtatttgcctttaagcgaacaaatgctggggtccttggggaccagcttgtcagagggtagccctaagagaaggggattaccttgtaagaccatctggcgcagtggacctattagaacttgggttaaaaatgtttaagaagctaatgtttaagaagcatttgggaaagaaaaagaaataaatgtatccagataggaaaagaagaagtaaaactatttgcagatgacacagttttgtatatagaaaatcctaaggaactcacacacacacacacacacacacacgcacacagctattagaactaataagcaagttccgcaaggtttcaagatacaagatcaatatacaaaaatgaattgtatttctttatactagcaacaaacaatatgaaaacgaagttaaataattccatttataataccatcagaaagaataaaataggaatcaacttaacaaaacaagtgcaagactgaaaactacaaaattggaaagaaattaaagaaggcttaaataaatggaaagacatcctgtgttcatggatcagacttagtattgttaagatggcaatactatcctaactgacatgcagattcagtgcaatccttatgaaaatcatagctggcttctttacagaaattgataagctagtcccaaaattcataaagaaatgcaagggacccagaatatccaaataagccttgaaaaagaacaaagttggtggattcacacttcctgatttcataatttacgataaaggtaatcagctcagtgtgttactggtttaaggatagacatacggagcagaataaagagtacagatatgaacacttatacttacggtcaattgatttttgacaaggttcccaagacaattcaatagagaaaggagagtcttttcaacaaatggcaccgagacaatgatatgcaagtgcaaaagaatgaggttggacctttactcacactatgtgcaaaaatcaactcaaaacgcatccaagatctaaatataagagctgaaactataaaatcttagaaagaaacataggcatagatctttgtaaccttgaattaggcagtggtttcttagatatgataccaaagacacaagcaaccaatggaaaaataggtaaattggacttaatcaagatttgaagcttttgtgattgaaaagaccctatcaagaaggtgaaaagataacctgcagaatgggagaaaatatttgcgagtcatatatatgataaggggcttgtatctggaatatataaataactcttataacacaacaataaggagaaaaataaatcaatttaaaaaatgggctaacggtttgaatagacatttctccaaagaagatatgcaaatggctactaagcacatgaaaaaatactcaacattattattcattagggaaatgcaagtcaaaatcacaatgagattccagtttacaatcactaggatggctacaataaaaagatggacaagaacgagtgtcggtgaggatgtagagaaactggtagaaatttaaattgttggtgggaatgtaaatggtgcacctgctttgaaaaacagtttggcagtacctcaaaaagttaaacgtagagtgaccatatgacccaggaatgccactcctaggtatttacccaagagaaatgaaaacgtacatacacacaaaaacttgtacaccaatgttcatagcaacattatttgtaatagccaaaaagtggaaacaacccaaatgtctaccaactgatgaatgggaaataaaatgtggtctgtccacgcaatggaacattattagactctaaaaagaaatgaagtactcacacatgccacaacatggatgagccttgaaaacttgctaagtgaaagaagccaggtgcaaaagcccacatattgtctgactgcattgaaatgcaatgtctaaaatggacgaatctatatagagtgaatatagattagcgtttgccagggcctggaggctgtgagagatgaggcatgactactaagggtttggggtttctttttcgggtgatgaaaatgttctgaaattagtggtgattgtgcacgattttgagaatgtactaaaaaccaatgaactttaaaaaataaaaataaacaaa

SEQ ID NO: 1604 - DNA, 2321 bp, Homo sapiens
cttcctgaaaggatctggagacaccagctccacaagtcctggtgtctttaaaaggatcagcttgaggaataaggctcgtctgagagctgtgacattcatctgactctagtgaaagtccaacagccactccctttttggcctccaactgggcaccatgagggcctgcatctccctggtattggccgtgctgtgtggcctggcctgggctgaggaccacaaagagtcagagccattgccacagctggaggaagagacagaagaggccctcgccagcaacttgtactcggcacccacctcctgccagggccgctgctacgaagcctttgacaagcaccaccaatgtcactgcaatgcccgctgccaagagtttgggaactgctgcaaggattttgagagcctgtgtagtgaccacgaggtctcccacagcagtgatgccataacaaaagaggagattcagagcatctctgagaagatctacagggcagacaccaacaaagcccagaaggaagacatcgttctcaatagccaaaactgcatctccccgtcagagaccagaaaccaagtggatcgctgcccaaagccactcttcacttatgtcaatgagaagctgttctccaagcccacctatgcagccttcatcaacctcctcaacaactaccagcgggcaacaggccatggggagcacttcagtgcccaggagctggccgagcaggacgccttcctcagagagatcatgaagacagcagtcatgaaggagctctacagcttcctccatcaccagaatcgctatggctcagagcaagagtttgtcgatgacttgaagaacatgtggtttgggctctattcaagaggcaatgaagagggggactcgagtggctttgaacatgtcttctcaggtgaggtaaaaaaaggcaaggttactggcttccataactggatccgcttctacctggaggagaaggagggtctggttgactattacagtcacatctacgatgggccttgggattcttaccccgatgtgctggcaatgcagttcaactgggacggctactataaggaagtgggctctgctttcatcggcagcagccctgagtttgagtttgcactctactccctgtgcttcatcgccaggccaggcaaagtgtgccagttaagcctgggaggatatcccttagctgtccggacatatacctgggacaagtccacctatgggaatggcaagaagtacatcgccacagcctacatagtgtcttccacctaatagaacttcgagccagaaaggggcatgagggctcttgcgagactgaagtgctatcttctctggactagagagaagagggagaggactggaagggatcaccaaatctcaaagcaatgagaagcattcctaaatcccaaagtgcccacatgggaaagagataaaatgtacaaattagaaaaatgtggataaacagtcaaacctttatcctctagaattttggcaatgttgactaagaaacagagtccaagcagagaaggtaggaaccctccatagctctctgccctgatgtgtgggggaactaggaagaagtcctttgacctcaccaggcctcatgcttccctttaatgtaaagggaaggggtttgcccactttcctctttttggggttggtgagagggcaaaccctgatatttttactgtgaaggtgttttcagttgttcttaggaagaacagctgatagaaattcaagattactataatggctgttattatacacagctctgtaaactaccactcagccctgtgttggggtcctcaaagaagtaaggccacagtaatcaagcaagggcctttggttttttccagagttagatcctctcagaacagagtctgggagaactccaatgctgaatggagaagggtaataggttggtgcagtgaatgggctgggggtggggtggccttctccaggcctgagtgtttttgtgtccagctcagtatctgcaacaagaagtttcccacttgtggatgtttagtgcagccacagacttgtattttgatccccaatttttttttgaaagagttctcctcataggaggatgattcagcatcagaagaagaaggaacccatagcttggtgtcattaacataattattttaagccttatccagcagccataatttgaataactctacgagaccagagagactgtagttccctattttaacctcaattatgcatttgtcccccaaccccactgagaactaaatgctgtaccacagagccgggtgtgaactatggtttagaaggttcaagtttccaattaaagtcattgaag

SEQ ID NO: 1605 - DNA, 2422 bp, Homo sapiens
gtcagcctcccttccaccgccatattgggccactaaaaaaagggggctcgtcttttcggggtgtttttctccccctcccctgtccccgcttgctcacggctctgcgactccgacgccggcaaggtttggagagcggctgggttcgcgggacccgcgggcttgcacccgcccagactcggacgggctttgccaccctctccgcttgcctggtcccctctcctctccgccctcccgctcgccagtccatttgatcagcggagactcggcggccgggccggggcttccccgcagcccctgcgcgctcctagagctcgggccgtggctcgtcggggtctgtgtcttttggctccgagggcagtcgctgggcttccgagaggggttcgggccgcgtaggggcgctttgttttgttcggttttgtttttttgagagtgcgagagaggcggtcgtgcagacccgggagaaagatgtcaaacgtgcgagtgtctaacgggagccctagcctggagcggatggacgccaggcaggcggagcaccccaagccctcggcctgcaggaacctcttcggcccggtggaccacgaagagttaacccgggacttggagaagcactgcagagacatggaagaggcgagccagcgcaagtggaatttcgattttcagaatcacaaacccctagagggcaagtacgagtggcaagaggtggagaagggcagcttgcccgagttctactacagacccccgcggccccccaaaggtgcctgcaaggtgccggcgcaggagagccaggatgtcagcgggagccgcccggcggcgcctttaattggggctccggctaactctgaggacacgcatttggtggacccaaagactgatccgtcggacagccagacggggttagcggagcaatgcgcaggaataaggaagcgacctgcaaccgacgattcttctactcaaaacaaaagagccaacagaacagaagaaaatgtttcagacggttccccaaatgccggttctgtggagcagacgcccaagaagcctggcctcagaagacgtcaaacgtaaacagctcgaattaagaatatgtttccttgtttatcagatacatcactgcttgatgaagcaaggaagatatacatgaaaattttaaaaatacatatcgctgacttcatggaatggacatcctgtataagcactgaaaaacaacaacacaataacactaaaattttaggcactcttaaatgatctgcctctaaaagcgttggatgtagcattatgcaattaggtttttccttatttgcttcattgtactacctgtgtatatagtttttaccttttatgtagcacataaactttggggaagggagggcagggtggggctgaggaactgacgtggagcggggtatgaagagcttgctttgatttacagcaagtagataaatatttgacttgcatgaagagaagcaattttggggaagggtttgaattgttttctttaaagatgtaatgtccctttcagagacagctgatacttcatttaaaaaaatcacaaaaatttgaacactggctaaagataattgctatttatttttacaagaagtttattctcatttgggagatctggtgatctcccaagctatctaaagtttgttagatagctgcatgtggcttttttaaaaaagcaacagaaacctatcctcactgccctccccagtctctcttaaagttggaatttaccagttaattactcagcagaatggtgatcactccaggtagtttggggcaaaaatccgaggtgcttgggagttttgaatgttaagaattgaccatctgcttttattaaatttgttgacaaaattttctcattttcttttcacttcgggctgtgtaaacacagtcaaaataattctaaatccctcgatatttttaaagatctgtaagtaacttcacattaaaaaatgaaatattttttaatttaaagcttactctgtccatttatccacaggaaagtgttatttttaaaggaaggttcatgtagagaaaagcacacttgtaggataagtgaaatggatactacatctttaaacagtatttcattgcctgtgtatggaaaaaccatttgaagtgtacctgtgtacataactctgtaaaaacactgaaaaattatactaacttatttatgttaaaagattttttttaatctagacaatatacaagccaaagtggcatgttttgtgcatttgtaaatgctgtgttgggtagaataggttttcccctcttttgttaaataatatggctatgcttaaaaggttgcatactgagccaagtataattttttgtaatgtgtgaaaaagatgccaattattgttacacattaagtaatcaataaagaaaacttccatagctaaaaaaaaaaaaaaaaaaa

SEQ ID NO: 1606 - DNA, 3155 bp, Homo sapiens
gtttcattttgcagttactgggagggggcttgctgtggccctgtcaggaagagtagagctctggtccagctccgcgcagggagggaggctgtcaccatgccggcctgctgcagctgcagtgatgttttccagtatgagacgaacaaagtcactcggatccagagcatgaattatggcaccattaagtggttcttccacgtgatcatcttttcctacgtttgctttgctctggtgagtgacaagctgtaccagcggaaagagcctgtcatcagttctgtgcacaccaaggtgaaggggatagcagaggtgaaagaggagatcgtggagaatggagtgaagaagttggtgcacagtgtctttgacaccgcagactacaccttccctttgcaggggaactctttcttcgtgatgacaaactttctcaaaacagaaggccaagagcagcggttgtgtcccgagtatcccacccgcaggacgctctgttcctctgaccgaggttgtaaaaagggatggatggacccgcagagcaaaggaattcagaccggaaggtgtgtagtgtatgaagggaaccagaagacctgtgaagtctctgcctggtgccccatcgaggcagtggaagaggccccccggcctgctctcttgaacagtgccgaaaacttcactgtgctcatcaagaacaatatcgacttccccggccacaactacaccacgagaaacatcctgccaggtttaaacatcacttgtaccttccacaagactcagaatccacagtgtcccattttccgactaggagacatcttccgagaaacaggcgataatttttcagatgtggcaattcagggcggaataatgggcattgagatctactgggactgcaacctagaccgttggttccatcactgccgtcccaaatacagtttccgtcgccttgacgacaagaccaccaacgtgtccttgtaccctggctacaacttcagatacgccaagtactacaaggaaaacaatgttgagaaacggactctgataaaagtcttcgggatccgttttgacatcctggtttttggcaccggaggaaaatttgacattatccagctggttgtgtacatcggctcaaccctctcctacttcggtctggccgctgtgttcatcgacttcctcatcgacacttactccagtaactgctgtcgctcccatatttatccctggtgcaagtgctgtcagccctgtgtggtcaacgaatactactacaggaagaagtgcgagtccattgtggagccaaagccgacattaaagtatgtgtcctttgtggatgaatcccacattaggatggtgaaccagcagctactagggagaagtctgcaagatgtcaagggccaagaagtcccaagacctgcgatggacttcacagatttgtccaggctgcccctggccctccatgacacacccccgattcctggacaaccagaggagatacagctgcttagaaaggaggcgactcctagatccagggatagccccgtctggtgccagtgtggaagctgcctcccatctcaactccctgagagccacaggtgcctggaggagctgtgctgccggaaaaagccgggggcctgcatcaccacctcagagctgttcaggaagctggtcctgtccagacacgtcctgcagttcctcctgctctaccaggagcccttgctggcgctggatgtggattccaccaacagccggctgcggcactgtgcctacaggtgctacgccacctggcgcttcggctcccaggacatggctgactttgccaacctgcccagctgctgccgctggaggatccggaaagagtttccgaagagtgaagggcagtacagtggcttcaagagtccttactgaagccaggcaccgtggctcacgtctgtaatcccagcgctttgggaggccgaggcaggcagatcacctgaggtcgggagttggagacccgcctggctaacaaggcgaaatcctgtctgtactaaaaatacaaaaatcagccagacatggtggcatgcacctgcaatcccagctactcgggaggctgaggcacaagaatcacttgaacccgggaggcagaggttgtagtgagcccagattgtgccactgctctccagcctgggaggcacagcaaactgtcccccaaaaaaaaaaaagagtccttaccaatagcaggggctgcagtagccatgttaacatgacatttaccagcaacttgaacttcacctgcaaagctctgtggccacattttcagccaaagggaaatatgctttcatcttctgttgctctctgtgtctgagagcaaagtgacctggttaaacaaaccagaatccctctacatggactcagagaaaagagattgagatgtaagtctcaactctgtccccaggaagttgtgtgaccctaggcctctcacctctgtgcctctgtctccttgttgcccaactactatctcagagatattgtgaggacaaattgagacagtgcacatgaactgtcttttaatgtgtaaagatctacatgaatgcaaaacatttcattatgaggtcagactaggataatgtccaactaaaaacaaacccttttcatcctggctggagaatgtggagaactaaaggtggccacaaattctttgacactcaagtcccccaagacctaagggttttatctcctccccttgaatatgggtggctctgattgctttatccaaaagtggaagtgacattgtgtcagtttcagatcctgatcttaagaggctgacagcttctacttgctgtcccttggaactcttgctatcggggaagccagacgccatttaaaagtctgcctatcctggccaggtgtggtggctcacacctgtaatcccagcactttgggagaccaaggcgggcggatcacttaaagtcaggagtccaagaccagactcgccaacatggtgaaaccgtatctctaataaaaatacaaaaattagctgggcatggtgcgggcacctgtagtcctagctatcaagaggctgagacaggagaaacacttgaacctgggaggtggaggttgcattgagctgagatcgtgccactgcactccaggctgggtgacagagcgagactccatctcaaaaaaaaaaaaaagaaaaa

SEQ ID NO: 1607 - DNA, 3058 bp, Homo sapiens
gtttcattttgcagttactgggagggggcttgctgtggccctgtcaggaagagtagagctctggtccagctccgcgcagggagggaggctgtcaccatgccggcctgctgcagctgcagtgatgttttccagtatgagacgaacaaagtcactcggatccagagcatgaattatggcaccattaagtggttcttccacgtgatcatcttttcctacgtttgctttgctctggtgagtgacaagctgtaccagcggaaagagcctgtcatcagttctgtgcacaccaaggtgaaggggatagcagaggtgaaagaggagatcgtggagaatggagtgaagaagttggtgcacagtgtctttgacaccgcagactacaccttccctttgcaggggaactctttcttcgtgatgacaaactttctcaaaacagaaggccaagagcagcggttgtgtcccgagtatcccacccgcaggacgctctgttcctctgaccgaggttgtaaaaagggatggatggacccgcagagcaaaggcctgctctcttgaacagtgccgaaaacttcactgtgctcatcaagaacaatatcgacttccccggccacaactacaccacgagaaacatcctgccaggtttaaacatcacttgtaccttccacaagactcagaatccacagtgtcccattttccgactaggagacatcttccgagaaacaggcgataatttttcagatgtggcaattcagggcggaataatgggcattgagatctactgggactgcaacctagaccgttggttccatcactgccgtcccaaatacagtttccgtcgccttgacgacaagaccaccaacgtgtccttgtaccctggctacaacttcagatacgccaagtactacaaggaaaacaatgttgagaaacggactctgataaaagtcttcgggatccgttttgacatcctggtttttggcaccggaggaaaatttgacattatccagctggttgtgtacatcggctcaaccctctcctacttcggtctggccgctgtgttcatcgacttcctcatcgacacttactccagtaactgctgtcgctcccatatttatccctggtgcaagtgctgtcagccctgtgtggtcaacgaatactactacaggaagaagtgcgagtccattgtggagccaaagccgacattaaagtatgtgtcctttgtggatgaatcccacattaggatggtgaaccagcagctactagggagaagtctgcaagatgtcaagggccaagaagtcccaagacctgcgatggacttcacagatttgtccaggctgcccctggccctccatgacacacccccgattcctggacaaccagaggagatacagctgcttagaaaggaggcgactcctagatccagggatagccccgtctggtgccagtgtggaagctgcctcccatctcaactccctgagagccacaggtgcctggaggagctgtgctgccggaaaaagccgggggcctgcatcaccacctcagagctgttcaggaagctggtcctgtccagacacgtcctgcagttcctcctgctctaccaggagcccttgctggcgctggatgtggattccaccaacagccggctgcggcactgtgcctacaggtgctacgccacctggcgcttcggctcccaggacatggctgactttgccaacctgcccagctgctgccgctggaggatccggaaagagtttccgaagagtgaagggcagtacagtggcttcaagagtccttactgaagccaggcaccgtggctcacgtctgtaatcccagcgctttgggaggccgaggcaggcagatcacctgaggtcgggagttggagacccgcctggctaacaaggcgaaatcctgtctgtactaaaaatacaaaaatcagccagacatggtggcatgcacctgcaatcccagctactcgggaggctgaggcacaagaatcacttgaacccgggaggcagaggttgtagtgagcccagattgtgccactgctctccagcctgggaggcacagcaaactgtcccccaaaaaaaaaaaagagtccttaccaatagcaggggctgcagtagccatgttaacatgacatttaccagcaacttgaacttcacctgcaaagctctgtggccacattttcagccaaagggaaatatgctttcatcttctgttgctctctgtgtctgagagcaaagtgacctggttaaacaaaccagaatccctctacatggactcagagaaaagagattgagatgtaagtctcaactctgtccccaggaagttgtgtgaccctaggcctctcacctctgtgcctctgtctccttgttgcccaactactatctcagagatattgtgaggacaaattgagacagtgcacatgaactgtcttttaatgtgtaaagatctacatgaatgcaaaacatttcattatgaggtcagactaggataatgtccaactaaaaacaaacccttttcatcctggctggagaatgtggagaactaaaggtggccacaaattctttgacactcaagtcccccaagacctaagggttttatctcctccccttgaatatgggtggctctgattgctttatccaaaagtggaagtgacattgtgtcagtttcagatcctgatcttaagaggctgacagcttctacttgctgtcccttggaactcttgctatcggggaagccagacgccatttaaaagtctgcctatcctggccaggtgtggtggctcacacctgtaatcccagcactttgggagaccaaggcgggcggatcacttaaagtcaggagtccaagaccagactcgccaacatggtgaaaccgtatctctaataaaaatacaaaaattagctgggcatggtgcgggcacctgtagtcctagctatcaagaggctgagacaggagaaacacttgaacctgggaggtggaggttgcattgagctgagatcgtgccactgcactccaggctgggtgacagagcgagactccatctcaaaaaaaaaaaaaagaaaaa

SEQ ID NO: 1608 - DNA, 1795 bp, Homo sapiens
atggcagccaacgtctcgggtgccaagtcctgccctgccaacttcttggcagctgccgacgacaaactcagtgggttccagggggacttcctgtggcccatactggtggttgagttcctggtggccgtggccagcaatggcctggccctgtaccgcttcagcatccggaagcagcgcccatggcaccccgccgtggtcttctctgtccagctggcagtcagcgacctgctctgcgccctgacgctgcccccgctggccgcctacctctatccccccaagcactggcgctatggggaggccgcgtgccgcctggagcgcttcctcttcacctgcaacctgctgggcagcgtcatcttcatcacctgcatcagcctcaaccgctacctgggcatcgtgcaccccttcttcgcccgaagccacctgcgacccaagcacgcctgggccgtgagcgctgccggctgggtcctggccgccctgctggccatgcccacactcagcttctcccacctgaagaggccgcagcagggggcgggcaactgcagcgtggccaggcccgaggcctgcatcaagtgtctggggacagcagaccacgggctggcggcctacagagcgtatagcctggtgctggcggggttgggctgcggcctgccgctgctgctcacgctggcagcctacggcgccctcgggcgggccgtgctacgcagcccaggcatgactgtggccgagaagctgcgtgtggcagcgttggtggccagtggtgtggccctctacgccagctcctatgtgccctaccacatcatgcgggtgctcaacgtggatgctcggcggcgctggagcacccgctgcccgagctttgcagacatagcccaggccacagcagccctggagctggggccctacgtgggctaccaggtgatgcggggcctcatgcccctggccttctgtgtccaccctctactctacatggccgcagtgcccagcctgggctgctgctgccgacactgccccggctacagggacagctggaacccagaggacgccaagagcactggccaagccctgcccctcaatgccacagccgcccctaaaccgtcagagccccagtcccgtgagctgagccaatgatgtggcctagcggaagctgcctcctcaccctaggtgttgctggagaaccctgagggcagggcccgagccccgacacatcccttcccccaaaaagcaacacctgtgcttgcagccaggtcaggcccagctgcagcccaggcaggagcagtcgcctttcccacccacagcgctggccacagggctccctgcagggtcagggaccagaccacgcccagaggaggggaggcactggcccccgccacaggactggagacgcaagaacaaaaagaaccaagtagagagagtggagctgctttattgcccttggagcccgcgctctcggaggctgtcttctgtcgccaagggtcccggaccgagtacacagtggcagctggcttagttggtggacggcctggggtaggggagggtggcaggtataagacttctgggggcaccccaagaccccagacacccaagtggcatcttgggggtgggtgggcagaggacggggtaatgtgaggacgaagcgggcacggagccagatggccagtctccaggcctggtccacggactggcagggaccccaggcacaagagctgccacccctctgcccggttttggaaaaaaacaataaaggactgtcccctcaaaaccagccgggggactgttaaaaaaaaaaaaaaaaaaaaaa

SEQ ID NO: 1609 - DNA, 2596 bp, Homo sapiens
gagcctcgaagtccgccggccaatcgaaggcgggccccagcggcgcgtgcgcgccgcggccagcgcgcgcgggcgggggggcaggcgcgccccggacccaggatttataaaggcgaggccgggaccggcgcgcgctctcgtcgcccccgctgtcccggcggcgccaaccgaagcgccccgcctgatccgtgtccgacatgctgcgccgcgctctgctgtgcctggccgtggccgccctggtgcgcgccgacgcccccgaggaggaggaccacgtcctggtgctgcggaaaagcaacttcgcggaggcgctggcggcccacaagtacctgctggtggagttctatgccccttggtgtggccactgcaaggctctggcccctgagtatgccaaagccgctgggaagctgaaggcagaaggttccgagatcaggttggccaaggtggacgccacggaggagtctgacctggcccagcagtacggcgtgcgcggctatcccaccatcaagttcttcaggaatggagacacggcttcccccaaggaatatacagctggcagagaggctgatgacatcgtgaactggctgaagaagcgcacgggcccggctgccaccaccctgcctgacggcgcagctgcagagtccttggtggagtccagcgaggtggctgtcatcggcttcttcaaggacgtggagtcggactctgccaagcagtttttgcaggcagcagaggccatcgatgacataccatttgggatcacttccaacagtgacgtgttctccaaataccagctcgacaaagatggggttgtcctctttaagaagtttgatgaaggccggaacaactttgaaggggaggtcaccaaggagaacctgctggactttatcaaacacaaccagctgccccttgtcatcgagttcaccgagcagacagccccgaagatttttggaggtgaaatcaagactcacatcctgctgttcttgcccaagagtgtgtctgactatgacggcaaactgagcaacttcaaaacagcagccgagagcttcaagggcaagatcctgttcatcttcatcgacagcgaccacaccgacaaccagcgcatcctcgagttctttggcctgaagaaggaagagtgcccggccgtgcgcctcatcaccctggaggaggagatgaccaagtacaagcccgaatcggaggagctgacggcagagaggatcacagagttctgccaccgcttcctggagggcaaaatcaagccccacctgatgagccaggagctgccggaggactgggacaagcagcctgtcaaggtgcttgttgggaagaactttgaagacgtggcttttgatgagaaaaaaaacgtctttgtggagttctatgccccatggtgtggtcactgcaaacagttggctcccatttgggataaactgggagagacgtacaaggaccatgagaacatcgtcatcgccaagatggactcgactgccaacgaggtggaggccgtcaaagtgcacagcttccccacactcaagttctttcctgccagtgccgacaggacggtcattgattacaacggggaacgcacgctggatggttttaagaaattcctggagagcggtggccaggatggggcaggggatgatgacgatctcgaggacctggaagaagcagaggagccagacatggaggaagacgatgatcagaaagctgtgaaagatgaactgtaatacgcaaagccagacccgggcgctgccgagacccctcgggggctgcacacccagcagcagcgcacgcctccgaagcctgcggcctcgcttgaaggagggcgtcgccggaaacccagggaacctctctgaagtgacacctcacccctacacaccgtccgttcacccccgtctcttccttctgcttttcggtttttggaaagggatccatctccaggcagcccaccctggtggggcttgtttcctgaaaccatgatgtactttttcatacatgagtctgtccagagtgcttgctaccgtgttcggagtctcgctgcctccctcccgcgggaggtttctcctctttttgaaaattccgtctgtgggatttttagacatttttcgacatcagggtatttgttccaccttggccaggcctcctcggagaagcttgtcccccgtgtgggagggacggagccggactggacatggtcactcagtaccgcctgcagtgtcgccatgactgatcatggctcttgcatttttgggtaaatggagacttccggatcctgtcagggtgtcccccatgcctggaagaggagctggtggctgccagccctggggcccggcacaggcctgggccttccccttccctcaagccagggctcctcctcctgtcgtgggctcattgtgaccactggcctctctacagcacggcctgtggcctgttcaaggcagaaccacgacccttgactcccgggtggggaggtggccaaggatgctggagctgaatcagacgctgacagttcttcaggcatttctatttcacaatcgaattgaacacattggccaaataaagttgaaattttaccacctgtaaaaaaaaaaaaaaaaaa

SEQ ID NO: 1610 - DNA, 2785 bp, Homo sapiens
gatccgccaccatggctgaaggagagaatgaagtgagatgggatggactctgcagcagagattcaactactagggagacagcattggaaaacattaggcaaaccattttgaggaaaaccgagtatcttcgttcggtgaaagaaacacctcatcgtccatcagacgggctttcaaataccgagtcttcggatgggttgaataagctacttgctcatctgcttatgctttctaagaggtgtcccttcaaagatgtgagagagaaaagtgagtttattctgaagagcatccaggaacttggcattagaattcctcgaccactaggacagggaccaagcagattcatcccagaaaaggagatcctccaagtggggagtgaagacgcacagatgcatgctttatttgcagattcttttgctgctttgggccgtttggataacattacgttagtgatggttttccacccacaatatttagaaagtttcttaaaaactcagcactatctactgcaaatggatgggccgttacccctacattatcgtcactacattggaataatggctgcggcaagacatcagtgctcctacttagtgaacctgcatgtaaatgatttccttcatgttggtggggaccccaagtggctcaatggtttagagaatgctcctcaaaaactacagaatttaggagaacttaacaaagtgttagcccatagaccttggcttattaccaaagaacacattgagggacttttaaaagctgaagagcacagctggtcccttgcggaattggtacatgcagtagttttactcacacactatcattctcttgcctcattcacattcggctgtggaatcagtccagaaattcattgtgatggtggccacacattcagacctccttctgttagcaactactgcatctgtgacattacaaatggcaatcacagtgtggatgagatgccggtcaactcagcagaaaatgtttctgtaagtgattctttctttgaggttgaagccctcatggaaaagatgaggcagttacaggaatgtcgagatgaagaagaggcaagtcaggaagagatggcttcacgttttgaaatagaaaaaagagagagtatgtttgtcttctcttcagatgatgaagaagttacaccagcaagagctgtatctcgtcattttgaggatactagttatggctataaagatttctctagacatgggatgcatgttccaacatttcgtgtccaggactattgctgggaagatcatggttattctttggtaaatcgcctttatccagatgtgggacagttgattgatgaaaaatttcacattgcttacaatcttacttataatacaatggcaatgcacaaagatgttgatacctcaatgcttagacgggcaatttggaactatattcactgcatgtttggaataagatatgatgattatgactatggtgaaattaaccagctattggatcgtagctttaaagtttatatcaaaactgttgtttgcactcctgaaaaggttaccaaaagaatgtatgatagcttctggaggcagttcaagcactctgagaaggttcatgttaatctgcttcttatagaagctaggatgcaagcagaactcctttatgctctgagagccattacccgctatatgacctgatgcctttccttcattaaagatgattctggaatgatcagcagatatagtctacaagggggaaggtactaagccccaggaccaatggtagacaaaataattcagaaatccattgtgccatgattcctttagtttctgctatttttctgtggaaaaccactgctggcacaagcagtgactgtttggcagcttcaagtttagagctgtgaagacaggctgccattcacagtattttgctttttgacagtacaagatgctgtgtaactgttttaatacagcaaatagtaactctccaaatcctgttgcttttatgttaaataagataacaagaattggagcatgcaaagaatgggacttggataatgacttaagctttatatgtaaagaattttagaagatcttggtgctgctattcctgctggaggaatgaatagatggctgtttcagttaagctattagtaataaaagtgaacattgctactatctgagcctacatacataacttgtgtgatttcaaattaaacttgcattatgtgttaattttcttgcatctaaaaaagcatagaattcctactcacacagctcagcaacaaccattttgatggtaacagttaatttctttcattagttttttaaattcagggttctggatattaaattaaaatggcattcttaaagattttcttcaaaaagcaatcctaaatgaaagtgtgtaaattataagaagctggcgatcttttgatatgctgtttcacaggatcctgacactggagggcagctgtcttgtgcattacttgtgttcccagcaccaaagttgtgggacatgttgctgtagactgctgcgcagtcctgggtgcattcagtctctctgcctctgcctgcctcctggtccccactttaaaggctgtgcagctccttaaataataaagctggaaaatatttttagtcgggttatcaaatttgatttacaaaaacgctaactttgtttgaaatgcaaacaggtttgaaaatatgtattaagtactttgtattctggaagcgtgaattgcttttgaagtctgtcagtattactggtatttttaaataaagaagaatttttctccaaaaaaaaaaaaaaaaaa

SEQ ID NO: 1611 - DNA, 1697 bp, Homo sapiens
ggatcgaggggactctgaccacagcctgtggctgggaagggagacagaggcggcggcggctcaggggaaacgaggctgcagtggtggtagtaggaagatgtcgggcgaggacgagcaacaggagcaaactatcgctgaggacctggtcgtgaccaagtataagatggggggcgacatcgccaacagggtacttcggtccttggtggaagcatctagctcaggtgtgtcggtactcagcctgtgtgagaaaggtgatgccatgattatggaagaaacagggaaaatcttcaagaaagaaaaggaaatgaagaaaggtattgcttttcccaccagcatttcggtaaataactgtgtatgtcacttctcccctttgaagagcgaccaggattatattctcaaggaaggtgacttggtaaaaattgaccttggggtccatgtggatggcttcatcgctaatgtagctcacacttttgtggttgatgtagctcaggggacccaagtaacagggaggaaagcagatgttattaaggcagctcacctttgtgctgaagctgccctacgcctggtcaaacctggaaatcagaacacacaagtgacagaagcctggaacaaagttgcccactcatttaactgcacgccaatagaaggtatgctgtcacaccagttgaagcagcatgtcatcgatggagaaaaaaccattatccagaatcccacagaccagcagaagaaggaccatgaaaaagctgaatttgaggtacatgaagtatatgctgtggatgttctcgtcagctcaggagagggcaaggccaaggatgcaggacagagaaccactatttacaaacgagacccctctaaacagtatggactgaaaatgaaaacttcacgtgccttcttcagtgaggtggaaaggcgttttgatgccatgccgtttactttaagagcatttgaagatgagaagaaggctcggatgggtgtggtggagtgcgccaaacatgaactgctgcaaccatttaatgttctctatgagaaggagggtgaatttgttgcccagtttaaatttacagttctgctcatgcccaatggccccatgcggataaccagtggtcccttcgagcctgacctctacaagtctgagatggaggtccaggatgcagagctaaaggccctcctccagagttctgcaagtcgaaaaacccagaaaaagaaaaaaaagaaggcctccaagactgcagagaatcccaccagtggggaaacattagaagaaaatgaagctggggactgaggtgcgtcccatctccccagcttgctgctcctgcctcatccccttcccaccaaaccccagactctgtgaagtgcagttcttctccacctaggaccgccagcagagcggggggatctccctgcccccaccccagttccccaacccactcccttccaacaacaaccagctccaactgactctggtcttgggaggtgaggcttcccaaccacggaagactactttaaacgaaaaaaagaaattgaataataaaatcaggagtcaaaattcatcgtcttcaaggcccctctttctagccttttctactactctctgcttggtcaaggtttgtgccccactacagaacagggctaaattagccaccaccactgaaaactcagccgaatttttttataccactctgacgtcagcatttttt

SEQ ID NO: 1612 - DNA, 3521 bp, Homo sapiens
aggaagcgggaagttacttagcacggttccgggtttctcgcgccccgcctgtcccccctccctatcactgctactggctcttggtccctccgttggactgtcctgcggagagaaaccccagcccatcggtctgcgctgggaccgcccgccgcgcatctgcccttcttcgctgactccgccccgcatctggccagacccgcctcgcgtcagagctgacccactcactgcgcgtttgccagtcagtctctccggacctgcctcgagcctcaggctgctgaaatcaccgcgcctcactcgcctcgacagtgattctgagtctgcttttagcttccttttgcctgccttggctttttctgttcgtgaacagctgtttggcccatagcttagagaaagcagccttttttctcttcaaagagaacctcctcccagtgctcagagagatggggagcggggagcctaatcctgctggcaagaaaaagaagtatctcaaggccgctctgtacgtgggtgacttggacccagatgtcaccgaggacatgctctataagaagttcaggcctgctggccctctgcgattcacccgaatctgccgtgatccggtgacccgcagccccctgggctatgggtatgttaacttccgctttcccgcggatgcagagtgggccttgaacaccatgaattttgatttgattaatggaaaaccattccgccttatgtggtctcagccagatgaccgcttaagaaagtctggagtgggaaatatattcatcaaaaacctggacaaatccatagacaatagggccctgttttacttattttctgcttttgggaacattctgtcctgcaaagtcgtatgcgatgacaacggctctaagggttatgcctatgttcactttgacagcctggccgctgccaatagagccatctggcacatgaatggagtgcggctcaacaaccgccaggtgtatgttggcagattcaaattcccagaagagcgggcggctgaggtcagaaccagggatagagcaactttcaccaatgttttcgttaaaaacattggagacgacatagatgacgaaaaactgaaggaacttttctgtgaatatgggccaactgagagtgttaaagtaataagagatgccagtgggaaatctaaaggctttggatttgtgagatatgagacacacgaggctgcccaaaaggctgtgctagacttgcatggaaagtccatcgatggaaaagtcctctatgtagggcgagcacagaagaaaattgaacgcctggctgagttgaggcggagatttgaacggctgaggttaaaagaaaaaagtcggcccccaggggtgcctatctatattaagaacttggatgagacaatcaatgatgaaaaactgaaggaggaattttcttcctttgggtcaattagtcgggccaaagtgatgatggaagtggggcaaggcaaaggatttggtgtggtctgcttttcctcttttgaagaggctaccaaagcagtggatgagatgaatggccgcatagtgggctccaagcccctgcatgtcaccctgggccaggccaggcgcaggtgctgagaataagaatgctcagtttgtttcagccttagttggtgcctccttagtttgggctcctttgtgataaggggttattttatgctaattcacaagttttttttgaagtgaattcttttgaaaaaaaaatgcaaaactagaaaactttattcattttagaatagaacataatttctaactgtaaaattgtcattttgtactttttttgatgtaatatccttagaaatctgtagaataaagtgtattcctccacttttttttcctgaacagtcaaggtgaggcaattgattgagtatatttcccttcttatttcagtaatactctattttttttcatgaaaatgtcaacatggttcttctgaatctatcacagtgaaaagttctaacttgtttttgagaagtcagtacagcaggggaaaacatatgtgatgcaattaacatctgcataatttcacttaaaattattatgcaaaaatgaatgttttttcaaaaaatgtgaaatgtattttattttctttatttgtattcttgtttcattttttaatatgttgtgaacatgctacagatttgatagtacttttgactaaatgttgggagtggtcgtattaacttcttgcccaaagaagtaagcatattggtgttttctcaattagtcactgagaaaattaacactttaggcagtggctatttaaagtaggaattgcatcttaaaaacctttcctaagagatttggtatgtgaggatactttcagtaccactcctaccattcatttttctaaattccttagtacatatacttggatcatgttaaattaacaagaaagatgaataactgcgctgaattgcctttacctataaataatttaatattttaccttcgggttttatcaactgtcaatataaaaggcagtactccacagaatgatgttgaaaaacttcttcgaagaacaccttctattaaacttgttatctcttgtaaattattgtgtgtgtccttttgataatattcacaggtgtttcaaaggtaaggaataggttgtctcttggattaagtcatatgcctccagccattatatgagaactgtgaaaccaatatggttttctttatgtcttggctgcttgaaaattaaaaaaaaaaaaggtttgttcaatattgccgttacatttattagcctgtaatttctaaattggagattctctacatttcacttgcagtttcctgttctcctcattgcctgccttccattcatattacacttatttttctattttttgtattacctttttaaaaatatataccagttcaagtccttttaggaagaagaaaatacctaatttatgtaaaatttaaataattacttttttataatatgattcacttatgccacagattcaacattagaatatgttttatctctactgtcagttttattaccttatatacaaatcttcattttcatacatagtacaatgtaaatatataactttgttaacacttttgttagctctttgaccataaaataatgacaataagctgtttctatgtatttgtttatctacaaattacaggtttatccatttgcaaatattttcaaaatggaaatcactgtttatattgattataaacataagacatgctcattgtaaaaaatgtacacaaggcagaaggaagtaaaatttccacagttcagaaataccacaattaatattttcaatgtgtaaatatcttttcatattttttcctacgtatacacaaacattttgaccaaaaatccacactatatgtactgttctgtatttttaattttaaactgaacaataatcatcttttcctgacaataaatatcaatctctatcatcaaaaaaaaaaaaaaaaaaaaaaaaaaaaaaaaaaaaaaaaaaaaaaaaaaaaaaaaaaaaaaaaaaaaaaaaaaaa

SEQ ID NO: 1613 - DNA, 857 bp, Homo sapiens
catccctctggctccagagctcagagccacccacagccgcagccatgctgtgcctcctgctcaccctgggcgtggccctggtctgtggtgtcccggccatggacatcccccagaccaagcaggacctggagctcccaaagttggcagggacctggcactccatggccatggcgaccaacaacatctccctcatggcgacactgaaggcccctctgagggtccacatcacctcactgttgcccacccccgaggacaacctggagatcgttctgcacagatgggagaacaacagctgtgttgagaagaaggtccttggagagaagactgagaatccaaagaagttcaagatcaactatacggtggcgaacgaggccacgctgctcgatactgactacgacaatttcctgtttctctgcctacaggacaccaccacccccatccagagcatgatgtgccagtacctggccagagtcctggtggaggacgatgagatcatgcagggattcatcagggctttcaggcccctgcccaggcacctatggtacttgctggacttgaaacagatggaagagccgtgccgtttctaggtgagctcctgcctggtcctgcctcctggctcacctccgcctccaggaagaccagactcccacccttccacacctccagagcagtgggacttcctcctgccctttcaaagaataaccacagctcagaagacgatgacgtggtcatctgtgtcgccatccccttcctgctgcacacctgcaccacggccatggggaggctgctccctgggggcagagtctctggcagaggttattaataaacccttggagcatgaaaaaaaaaaaaaaaaa

SEQ ID NO: 1614 - DNA, 5614 bp, Homo sapiens
agggcgttggggcagctcctgtgacagacggagctggagcggcggggcggcggcggagtccggcggccgggagagcgagtgagcgagcggaggagcagcgacacgggagtctagggagcgagaaggagaaggaggggagcgctcgggcgcgagcgagagaaaccgcgagcgccgagcttggactcgagccccggaacggctgaggagcccgcccgctcccctcccctccccctccccgggcccgggcccagcgcgccatcctcccccctccttccctccctccctccttcctccctcccctctccctccccctcccccgccggtggatgggagtgaaggacggaagaggccctgcggaggcggcggtgcagcgctccggtggaatgaatcttacttgttgaatatcttctggttactagttggattcatttgtgaaagaatcattttcccctgtgtggaagacacttagtggcatatttaaattataagtccacggatcaaaaagctttttgatttcccaaaggagggacataccactatatcagataagcttgacattacagccaagatggtgctgtcccagagacaacgagatgaactaaatcgagctatagcagattatcttcgttcaaatggctatgaagaggcatattcagtttttaaaaaggaagctgaattagatgtgaatgaagaattagataaaaagtatgctggtcttttggaaaaaaaatggacatctgttattagattacaaaagaaggttatggaattagaatcaaagctaaatgaagcaaaagaagaatttacgtcaggtggacctcttggtcagaaacgagacccaaaagaatggattccccgtccgccagaaaaatatgcattgagtggtcacaggagtccagtcactcgagtcattttccatcctgtgttcagtgttatggtctctgcttcagaggatgctacaattaaggtgtgggattatgagactggagattttgaacgaactcttaaaggacatacagactctgtacaggacatttcattcgaccacagcggcaagcttctggcttcctgttctgcagatatgaccattaaactatgggattttcagggctttgaatgcatcagaaccatgcacggccatgaccacaatgtttcttcagtagccatcatgcccaatggagatcatatagtgtctgcctcaagggataaaactataaaaatgtgggaagtgcaaactggctactgtgtgaagacattcacaggacacagagaatgggtacgtatggtacggccaaatcaagatggcactctgatagccagctgttccaatgaccagactgtgcgtgtatgggtcgtagcaacaaaggaatgcaaggctgagctccgagagcatgagcatgtggtagaatgcatttcctgggctccagaaagctcatattcctccatctctgaagcaacaggatctgagactaaaaaaagtggtaaacctgggccattcttgctgtctggatccagagacaagactattaagatgtgggatgtcagtactggcatgtgccttatgaccctcgtgggtcatgataactgggtacgtggagttctgttccattctggggggaagtttattttgagttgtgctgatgacaagaccctacgcgtatgggattacaagaacaagcgatgcatgaagaccctcaatgcgcatgaacactttgttacctccttggatttccacaagacggcaccctatgtcgtcactggcagcgtagatcaaacagtaaaagtgtgggagtgccgttgattgtgtctccttcggcccctcctccctcttttcctctggatgcactctgatgataccatggttaccccattgagctctgtttaaataaatattgtcctttcatgtaaattattctggatgtagattgagcttattaaatgttacacacaaagtattcatgcatggtgaatccaaattgtatactgtaaatttacatacgttgtctagaagtaccatagggtttaaaaacctgggctggcattggtcacaccaggcctaagaaggcagaagttgaatcaattgaactagggcactaaactgaatagttgacagtgtcattttatgttggattattaattcctgtttttctttctgctatctgttggtgcctgacttgatggcctcatttggggaaaagtggtggttattagggctttttctgaaatgtgtatctatgtaacatcacttaagtgtgcttaataaatcttctgtaaggattttagatgataaggctacaattcagaatcttctgaaccatctatgtaatgaatggggattatacattggaatttttgtcatgacacatttgccaaatcagtaggatatatttgttttggcagcctatcacgcagaggctagtggtatatttatgtaagaaaatgactgtaaatctcaagaaaaatctcagcagctaatagcaactcatttatttcattttggtcttaatgctttgtaaacaggtcaaaaaatactgtcatactctaagcttctattttccacactggacatacttctagttgtattctccatactattagactgtgtagtgatgtgacttccaagtagaatttaatctccccattgagtgtgtcatggtacaaatcactattcgtttttggtgttttttagggatgtgcaatgtgcattacataatgacagaaatactgagaaggttctgtgtgcccatttgaaaggagtgggaggaatacagcagtttgtttttcaacatgaatctgatattgatttaaactgtgtttcacttacaagttttaaaaaaatgacagggtttaatggagcgtgcataaaaatgtactgttttcaccttttgtttatatgtaaatgtttgtaagtatatgggcctatctgtaagtggataagtctgtatgtgtgtatcatacacatcaacctccatgtccttagtcctgggtttttgaaaaagtgctaaaacggacaagtagaataaatgttgctgtggaatgccatgctttagaacaaaccctttttgatcttaatgcttctgaaaactaggtctgactctggggatttttttccagccgaaggaaaatcacttccgttatgtccccctctaatttagccgctcgacattttacacaacccggatatgttgtatattttgacccaaagttacaggtaggtttaagagaatttttagccatgacttttggagcactattccattgtcagttattaataaagaattccattgcttagctaaccaacaggttttttttgtttccaagagagttatttgaaaagttaacagaacaatgagataacagtgacagtttaacaaagataaaattctgaactgcgttttattcatttgtgtactatgtgattttttaaatgtcccctttagtatttaatggaaaattggttcctgcaaaagacaaagggtgagagttagcgtcctgtagatacacacagagactaggccgtatattaactagaagcagctttatgtctagcttgtgtctttttgtttgtttgcttgtttgtttttagattcctgagagatgtctctggaagggaaagttttgagaactaatggctatttttgaggacaaaaattacatcttaagctaattccttaaatacatacagtaggtgaattttcaggacaatattgcctcacaaccctgcttacattgaaaagtctttttcccttagctcttctgactggatttttctacaaaaactatggaaaatatctttgttcttgtttgctgctattttctgtcctattttgagaaatataaatacatagaaatggtgcatcttaacatttgtttgtacatgtataaatgtcttgtattttaattcatttttagcatgaattgtttaagggtaagccacaacatctagaaatcactcatagatattgaacaataaaggagaatggtaccgatgcaggaggaagcaagcgtgtcttcccctgcagcacacagcgacttgcgttgacaaaggaggaggaaacgattactctgtaaacaaagttatccttacttgggagattgccacagcctgctgctgagttgagttaccagacatcctccatgtgagaagcagcgaacattgaatctcagggatggcccacaactgggtccacatgtaatgagccctgtttaataacgaaggggtgggggagagcagtccgtctacaacctggaatcagatttgcaaaatttcctgcactgctgtctgacactgtcctgttgatgccctttctgactgtgttctctgttttctctgtctgctgtctaaccctgtgccttgcctgggataaggacaatgatgaggttactggtttggattgtaagtagaggacttttattaattggtttagaggttcactgctgctttgtcactttctcaatcaaattggccacttaagaaataaagagctggtagaattgcatcctcagatgattattgactgtgtgtgtgtgtgaaaacagacattccagtgccacccaaatatatatctgtaacgtgcccaagaaatcctagctgcgctcttgagagtgcatgccatggagactggtttagacaccgcgtggagcctagttgcctgttgtcacggcatcttgcactttaggagactaagaccgtcctggttcgtctgtgtgtggtgtgaccaatggtgtgcccagagcactactctcaaaatcactagtgttagcaagtcgtcccgggctggggagcgttcgccgtagtctttggaagctttggctttagatttaccaagccccgcctccccgctgccagtgccctgctctcccgttcgcctctttctgtttctgtgtgaactttcccggtaatatcactcgttaaataggttttctttaaacttaattaaagaaaaactatttaaaggtaaaggatattttgttgacatcggtggctcgatcatccttaagcaactgaagttaaaattgttgaaggaaaaggcacttaaattggttactttcatgtccagctgtatataagtccagtgtgttcatctagatgacgcaaagaatctcctggtagagaagcgacatgtaaaaaactggtggaaaaaggttttggattttttttccagtggggtggggggagggcaagctggatttacaggtcacggctggactgaatgggcctttttatcttcccactgtatcatggaagtagctgcttgcttgtactgtccatccttcaggcatccctaaagctcactctgaagatgttagagacaaacacaaactcttcgagttaaagttgatcctgacactgacatgaaggcaagccttgatttcgtatgaacgttgctgaagtggtaattgaggaaaacagttccccagattgttaagagttcactgaagatattgacacaattttaaaaaatcagtaaaggaatgtatataatattgctctcgtgttttacagtaagatttgttgctctcagactgtgtaaaacaaaatttattcatgttttctgcatattaaaaaatcttattgtaccaactggtaaactattaaatgcctataaaacta

SEQ ID NO: 1615 - DNA, 610 bp, Homo sapiens
gcaggaagaatcctctgcctggagccggcaggctccaacccctcagcttgagagtcaggagccccatagtccccacagcaataggaagcaccagctcctggtcccgaaaaaaggagggccccaactccagggactgcggcccgccctggagctgagaacacgcggactccagggagaggacagggcttcagggacccgagagccgctctgagcaccgggggatgtgactgcctcagcggcagagctggaagggccctcgaatgccattcacaggaacagcccaggaacccagggacttcagaagggctggtttgtccgaaaagtgagaggaggcggaggagagagcctgcgaggtcaagctgcagagaacatgagcttctacctccagatgtgccagggtgcatctcaataaacttggattttggccaggcgcggtggctcaggcctgtaatcccagctctggaagctgaaggatagcttgagcccaggagttcgaggctgcagtgagctatgatctcaccactacactccagcctgggtgacagcaagagatcttgtctcagaaataaataaataaaatttaaaaataaaaaaaaaaaaaaaaaaaaaa

SEQ ID NO: 1616 - DNA, 2306 bp, Homo sapiens
agccccggatgttcgttggggattcaacatggcggcgggagtgtccgcggtggtggcggtgcaagagagctgagggaggcgcgagggcgcggagttccaggtcgagcagttaggccgcgagcgactgcggcgccgagccggccgcaccgagtccccggcaccatgtttgggaagaggaagaagcgggtggagatctccgcgccgtccaacttcgagcaccgcgtgcacacgggcttcgaccagcacgagcagaagttcacggggctgccccgccagtggcagagcctgatcgaggagtcggctcgccggcccaagcccctcgtcgaccccgcctgcatcacctccatccagcccggggcccccaagggggagcctcatgacgtggcccctaacgggccatcagcggggggcctggccatcccccagtcctcctcctcctcctcccggcctcccacccgagcccgaggtgcccccagccctggagtgctgggaccccacgcctcagagccccagctggcccctccagcctgcacccccgccgcccctgctgttcctgggccccctggcccccgctcaccacagcgggagccacagcgagtatcccatgagcagttccgggctgccctgcagctggtggtggacccaggcgacccccgctcctacctggacaacttcatcaagattggcgagggctccacgggcatcgtgtgcatcgccaccgtgcgcagctcgggcaagctggtggccgtcaagaagatggacctgcgcaagcagcagaggcgcgagctgctcttcaacgaggtggtaatcatgagggactaccagcacgagaatgtggtggagatgtacaacagctacctggtgggggacgagctctgggtggtcatggagttcctggaaggaggcgccctcaccgacatcgtcacccacaccaggatgaacgaggagcagatcgcggccgtgtgccttgcagtgctgcaggccctgtcggtgctccacgcccagggcgtcatccaccgggacatcaagagcgactcgatcctgctgacccatgatggcagggtgaagctgtcagactttgggttctgcgcccaggtgagcaaggaagtgccccgaaggaagtcgctggtcggcacgccctactggatggccccagagctcatctcccgccttccctacgggccagaggtagacatctggtcgctggggataatggtgattgagatggtggacggagagcccccctacttcaacgagccacccctcaaagccatgaagatgattcgggacaacctgccaccccgactgaagaacctgcacaaggtgtcgccatccctgaagggcttcctggaccgcctgctggtgcgagaccctgcccagcgggccacggcagccgagctgctgaagcacccattcctggccaaggcagggccgcctgccagcatcgtgcccctcatgcgccagaaccgcaccagatgaggcccagcgcccttcccctcaaccaaagagccccccgggtcacccccgccccactgaggccagtagggggccaggcctcccactcctcccagcccgggagatgctccgcgtggcaccaccctccttgctgggggtagatgagaccctactactgaactccagttttgatctcgtgacttttagaaaaacacagggactcgtgggagcaagcgaggctcccaggacccccaccctctgggacaggccctcccccatgttcttctgtctccaggaagggcagcggccctcccatcactggaagtctgcagtgggggtcgctgggggtggagagaacactaagaggtgaacatgtatgagtgtgtgcacgcgtgtgagtgtgcatgtgtgtgtgtgcaaaggtccagccaccccgtcctccagcctgcaaggggtgtctggcgccttgcctgacacccagccccctctccccctgagccattgtgggggtcgatcatgaatgtccgaagagtggccttttcccgtagccctgcgccccctttctgtggctggatggggagacaggtcagggccccccaccctctccagcccctgcagcaaatgactactgcacctggacagcctcctcttttctagaagtctatttatattgtcattttataacactctagcccctgcccttattgggggacagatggtccctgtcctgcggggtggccctggcagaaccactgcctgaagaaccaggttcctgcccggtcagcgcagccccagcccgcccacccctgcctcgagttagttttacaattaaaacattgtcttgttttgtg

SEQ ID NO: 1617 - DNA, 2765 bp, Homo sapiens
agccccggatgttcgttggggattcaacatggcggcgggagtgtccgcggtggtggcggtgcaagagagctgagggaggcgcgagggcgcggagttccaggtcgagcagttaggccgcgagcgactgcggcgccgagccggccgcaccgagtccccggcaccatgtttgggaagaggaagaagcgggtggagatctccgcgccgtccaacttcgagcaccgcgtgcacacgggcttcgaccagcacgagcagaagttcacggggctgccccgccagtggcagagcctgatcgaggagtcggctcgccggcccaagcccctcgtcgaccccgcctgcatcacctccatccagcccggggcccccaagaccatcgtgcggggcagcaaaggtgccaaagatggggccctcacgctgctgctggacgagtttgagaacatgtcggtgacacgctccaactccctgcggagagacagcccgccgccgcccgcccgtgcccgccaggaaaatgggatgccagaggagccggccaccacggccagagggggcccagggaaggcaggcagccgaggccggttcgccggtcacagcgaggcgggtggcggcagtggtgacaggcgacgggcggggccagagaagaggcccaagtcttccagggagggctcagggggtccccaggagtcctcccgggacaaacgccccctctccgggcctgatgtcggcaccccccagcctgctggtctggccagtggggcgaaactggcagctggccggccctttaacacctacccgagggctgacacggaccacccatcccggggtgcccagggggagcctcatgacgtggcccctaacgggccatcagcggggggcctggccatcccccagtcctcctcctcctcctcccggcctcccacccgagcccgaggtgcccccagccctggagtgctgggaccccacgcctcagagccccagctggcccctccagcctgcacccccgccgcccctgctgttcctgggccccctggcccccgctcaccacagcgggagccacagcgagtatcccatgagcagttccgggctgccctgcagctggtggtggacccaggcgacccccgctcctacctggacaacttcatcaagattggcgagggctccacgggcatcgtgtgcatcgccaccgtgcgcagctcgggcaagctggtggccgtcaagaagatggacctgcgcaagcagcagaggcgcgagctgctcttcaacgaggtggtaatcatgagggactaccagcacgagaatgtggtggagatgtacaacagctacctggtgggggacgagctctgggtggtcatggagttcctggaaggaggcgccctcaccgacatcgtcacccacaccaggatgaacgaggagcagatcgcggccgtgtgccttgcagtgctgcaggccctgtcggtgctccacgcccagggcgtcatccaccgggacatcaagagcgactcgatcctgctgacccatgatggcagggtgaagctgtcagactttgggttctgcgcccaggtgagcaaggaagtgccccgaaggaagtcgctggtcggcacgccctactggatggccccagagctcatctcccgccttccctacgggccagaggtagacatctggtcgctggggataatggtgattgagatggtggacggagagcccccctacttcaacgagccacccctcaaagccatgaagatgattcgggacaacctgccaccccgactgaagaacctgcacaaggtgtcgccatccctgaagggcttcctggaccgcctgctggtgcgagaccctgcccagcgggccacggcagccgagctgctgaagcacccattcctggccaaggcagggccgcctgccagcatcgtgcccctcatgcgccagaaccgcaccagatgaggcccagcgcccttcccctcaaccaaagagccccccgggtcacccccgccccactgaggccagtagggggccaggcctcccactcctcccagcccgggagatgctccgcgtggcaccaccctccttgctgggggtagatgagaccctactactgaactccagttttgatctcgtgacttttagaaaaacacagggactcgtgggagcaagcgaggctcccaggacccccaccctctgggacaggccctcccccatgttcttctgtctccaggaagggcagcggccctcccatcactggaagtctgcagtgggggtcgctgggggtggagagaacactaagaggtgaacatgtatgagtgtgtgcacgcgtgtgagtgtgcatgtgtgtgtgtgcaaaggtccagccaccccgtcctccagcctgcaaggggtgtctggcgccttgcctgacacccagccccctctccccctgagccattgtgggggtcgatcatgaatgtccgaagagtggccttttcccgtagccctgcgccccctttctgtggctggatggggagacaggtcagggccccccaccctctccagcccctgcagcaaatgactactgcacctggacagcctcctcttttctagaagtctatttatattgtcattttataacactctagcccctgcccttattgggggacagatggtccctgtcctgcggggtggccctggcagaaccactgcctgaagaaccaggttcctgcccggtcagcgcagccccagcccgcccacccctgcctcgagttagttttacaattaaaacattgtcttgttttgtg

SEQ ID NO: 1618 - DNA, 2379 bp, Homo sapiens
agccccggatgttcgttggggattcaacatggcggcgggagtgtccgcggtggtggcggtgcaagagagctgagggaggcgcgagggcgcggagttccaggtcgagcagttaggccgcgagcgactgcggcgccgagccgatgagtaacccgaagcccctagaggagtggtcacctgcctgagggcacttctgtcccaccagcatcagaccaggccgcaccgagtccccggcaccatgtttgggaagaggaagaagcgggtggagatctccgcgccgtccaacttcgagcaccgcgtgcacacgggcttcgaccagcacgagcagaagttcacggggctgccccgccagtggcagagcctgatcgaggagtcggctcgccggcccaagcccctcgtcgaccccgcctgcatcacctccatccagcccggggcccccaagggggagcctcatgacgtggcccctaacgggccatcagcggggggcctggccatcccccagtcctcctcctcctcctcccggcctcccacccgagcccgaggtgcccccagccctggagtgctgggaccccacgcctcagagccccagctggcccctccagcctgcacccccgccgcccctgctgttcctgggccccctggcccccgctcaccacagcgggagccacagcgagtatcccatgagcagttccgggctgccctgcagctggtggtggacccaggcgacccccgctcctacctggacaacttcatcaagattggcgagggctccacgggcatcgtgtgcatcgccaccgtgcgcagctcgggcaagctggtggccgtcaagaagatggacctgcgcaagcagcagaggcgcgagctgctcttcaacgaggtggtaatcatgagggactaccagcacgagaatgtggtggagatgtacaacagctacctggtgggggacgagctctgggtggtcatggagttcctggaaggaggcgccctcaccgacatcgtcacccacaccaggatgaacgaggagcagatcgcggccgtgtgccttgcagtgctgcaggccctgtcggtgctccacgcccagggcgtcatccaccgggacatcaagagcgactcgatcctgctgacccatgatggcagggtgaagctgtcagactttgggttctgcgcccaggtgagcaaggaagtgccccgaaggaagtcgctggtcggcacgccctactggatggccccagagctcatctcccgccttccctacgggccagaggtagacatctggtcgctggggataatggtgattgagatggtggacggagagcccccctacttcaacgagccacccctcaaagccatgaagatgattcgggacaacctgccaccccgactgaagaacctgcacaaggtgtcgccatccctgaagggcttcctggaccgcctgctggtgcgagaccctgcccagcgggccacggcagccgagctgctgaagcacccattcctggccaaggcagggccgcctgccagcatcgtgcccctcatgcgccagaaccgcaccagatgaggcccagcgcccttcccctcaaccaaagagccccccgggtcacccccgccccactgaggccagtagggggccaggcctcccactcctcccagcccgggagatgctccgcgtggcaccaccctccttgctgggggtagatgagaccctactactgaactccagttttgatctcgtgacttttagaaaaacacagggactcgtgggagcaagcgaggctcccaggacccccaccctctgggacaggccctcccccatgttcttctgtctccaggaagggcagcggccctcccatcactggaagtctgcagtgggggtcgctgggggtggagagaacactaagaggtgaacatgtatgagtgtgtgcacgcgtgtgagtgtgcatgtgtgtgtgtgcaaaggtccagccaccccgtcctccagcctgcaaggggtgtctggcgccttgcctgacacccagccccctctccccctgagccattgtgggggtcgatcatgaatgtccgaagagtggccttttcccgtagccctgcgccccctttctgtggctggatggggagacaggtcagggccccccaccctctccagcccctgcagcaaatgactactgcacctggacagcctcctcttttctagaagtctatttatattgtcattttataacactctagcccctgcccttattgggggacagatggtccctgtcctgcggggtggccctggcagaaccactgcctgaagaaccaggttcctgcccggtcagcgcagccccagcccgcccacccctgcctcgagttagttttacaattaaaacattgtcttgttttgtg

SEQ ID NO: 1619 - DNA, 3889 bp, Homo sapiens
gtccccctgctggggacagcagctgggtccagcagagagctggctgggggcttgacaggagtttatcctaactgatgctgggtgggcgcaggccctgagatgggcgtcagggagaggggacgccagacacacggcctgagcagggtgaggagcagctgccagccccggcaggcccaggccctgtctgggtgcacaggacagagacacagcaagatgcccagggagtgccgcttcctgggctagagacaagcaccagcctgcagtggagaacgcaggaccccgctgcccagaaggagcagccacggcctgcggaggactggcccagcaaggtcccaggtcttccctctcctcagcgcctaagagagaggcccagtgcgggtgaggagtcgcgaggaagaggcggaaggcgccggaaggaccatgttccgcaagaaaaagaagaaacgccctgagatctcagcgccacagaacttccagcaccgtgtccacacctccttcgaccccaaagaaggcaagtttgtgggcctccccccacaatggcagaacatcctggacacactgcggcgccccaagcccgtggtggacccttcgcgaatcacacgggtgcagctccagcccatgaagacagtggtgcggggcagcgcgatgcctgtggatggctacatctcggggctgctcaacgacatccagaagttgtcagtcatcagctccaacaccctgcgtggccgcagccccaccagccggcggcgggcacagtccctggggctgctgggggatgagcactgggccaccgacccagacatgtacctccagagcccccagtctgagcgcactgacccccacggcctctacctcagctgcaacgggggcacaccagcaggccacaagcagatgccgtggcccgagccacagagcccacgggtcctgcccaatgggctggctgcaaaggcacagtccctgggccccgccgagtttcagggtgcctcgcagcgctgtctgcagctgggtgcctgcctgcagagctccccaccaggagcctcgccccccacgggcaccaataggcatggaatgaaggctgccaagcatggctctgaggaggcccggccacagtcctgcctggtgggctcagccacaggcaggccaggtggggaaggcagccctagccctaagacccgggagagcagcctgaagcgcaggctattccgaagcatgttcctgtccactgctgccacagcccctccaagcagcagcaagccaggccctccaccacagagcaagcccaactcctctttccgaccgccgcagaaagacaaccccccaagcctggtggccaaggcccagtccttgccctcggaccagccggtggggaccttcagccctctgaccacttcggataccagcagcccccagaagtccctccgcacagccccggccacaggccagcttccaggccggtcttccccagcgggatccccccgcacctggcacgcccagatcagcaccagcaacctgtacctgccccaggaccccacggttgccaagggtgccctggctggtgaggacacaggtgttgtgacacatgagcagttcaaggctgcgctcaggatggtggtggaccagggtgacccccggctgctgctggacagctacgtgaagattggcgagggctccaccggcatcgtctgcttggcccgggagaagcactcgggccgccaggtggccgtcaagatgatggacctcaggaagcagcagcgcagggagctgctcttcaacgaggtggtgatcatgcgggactaccagcacttcaacgtggtggagatgtacaagagctacctggtgggcgaggagctgtgggtgctcatggagttcctgcagggaggagccctcacagacatcgtctcccaagtcaggctgaatgaggagcagattgccactgtgtgtgaggctgtgctgcaggccctggcctacctgcatgctcagggtgtcatccaccgggacatcaagagtgactccatcctgctgaccctcgatggcagggtgaagctctcggacttcggattctgtgctcagatcagcaaagacgtccctaagaggaagtccctggtgggaaccccctactggatggctcctgaagtgatctccaggtctttgtatgccactgaggtggatatctggtctctgggcatcatggtgattgagatggtagatggggagccaccgtacttcagtgactccccagtgcaagccatgaagaggctccgggacagccccccacccaagctgaaaaactctcacaaggtctccccagtgctgcgagacttcctggagcggatgctggtgcgggacccccaagagagagccacagcccaggagctcctagaccaccccttcctgctgcagacagggctacctgagtgcctggtgcccctgatccagctctaccgaaagcagacctccacctgctgagcccaccccaagtatgcctgccacctacgcccacaggcagggcacactgggcagccagcctgccggcaggacttgcctgcctcctcctctcagtattctctccaaagattgaaatgtgaagccccagccccaccctctgcccttcagcctactgggccaggccggacctgccccctcagtgtctctccctcccgagtccccagatggagacccctttctacaggatgaccccttgatatttgcacagggatatttctaagaaacgcagaggccagcgttcctggcctctgcagccaacacagtagaaaaggctgctgtggttttttaaaggcagttgtccactagtgtcctaggccactgcagagggcagactgctggtctccacagatacctgctgttctcagctccagcttcaaacctcgagtctcgagagggccacggggtggtttttatgaccggaatcccgcttcctccctcacgtctgatgtcctgaaggtgcagtcccacctgtacagcccctccccgcccagaactgtgaatggcctgctccaggccatggctgggggcagggagtgaggggacaatttctgagtgaaagagaaagaatggggtcggtggtgaaggtgctctcactttacagaatggagagaacatcgtgtgtgtgtgtgtgtgtgtgtgtgtgtgtgtgtgtgtgtgtgtgtgtgtaaggggaggaaagccaccttgacagcccaggtccctccaggtcacccacagccagtttcaggaaggctgcccctctctcccactaagttctggcctgaagggacctgctttcttggcctggcttccacctctccactcctgtgtctacctggccagtggagtggtccatgctaagtctaacactcctgggagctcaggaggcttctgagcttctcctgtactgtgcatcgtgagggccagagacaggaatgtaaggattggcaactgtgttacctttcaagtttatctcaataaccaggtcatcagggacccattgttctcttcagaaccctatctgggagagaaggcgaaccacctccgggtttccatcatgtcaaggtcacaggcatccatgtgtgcaaaccatctgccccagctgcctccacagactgctgtctccttgtcctcctcggccctgccccacttcagggctgctgtgagatggaattccaggaaagaacttcaggtgtctggaccctttctatctagataatatttttagattcttctgctccctagtgacctacctgggggcaaagaaattgcaaggacttttttttaagggtcagagttttcaaaacaaaagcatcttccctagaaatttttgtgaattgtttgcacttgtgcctgttttaaattaaattgagtgttcaaagcccaaaaaaaaaaaaaaaaaaaa

SEQ ID NO: 1620 - DNA, 4655 bp, Homo sapiens
cagtagtagttccccagcgtgcgcccggggagaccgggaacatggcgctgggagcgctgtagcagctgagaaggggctgaggcaccgccgcttcgctgacagccggccaccaggtttctgtctcccagtataatcatatccagccccatggctcttactggggcctctgaaatgtttatcaccaaatctgtgtctgcagttccaacctcttccctgagcatcaaagctgtatttccaactttcgctggatgcttctatctggaaatacactgtggtgaaatgcttccacctcttgctaaaatgaacactgaggaaaaatgaagaagactgacaagcaccagcgaaaagttgcagaatagaaatagccacactcctctggagtctttaattcatccacagccatcatataaaggttttggcatcatgtttgggaagaaaaagaaaaagattgaaatatctggcccgtccaactttgaacacagggttcatactgggtttgatccacaagagcagaagtttaccggccttccccagcagtggcacagcctgttagcagatacggccaacaggccaaagcctatggtggacccttcatgcatcacacccatccagctggctcctatgaagacaatcgttagaggaaacaaaccctgcaaggaaacctccatcaacggcctgctagaggattttgacaacatctcggtgactcgctccaactccctaaggaaagaaagcccacccaccccagatcagggagcctccagccacggtccaggccacgcggaagaaaatggcttcatcaccttctcccagtattccagcgaatccgatactactgctgactacacgaccgaaaagtacagggagaagagtctctatggagatgatctggatccgtattatagaggcagccacgcagccaagcaaaatgggcacgtaatgaaaatgaagcacggggaggcctactattctgaggtgaagcctttgaaatccgattttgccagattttctgccgattatcactcacatttggactcactgagcaaaccaagtgaatacagtgacctcaagtgggagtatcagagagcctcgagtagctcccctctggattattcattccaattcacaccttctagaactgcagggaccagcgggtgctccaaggagagcctggcgtacagtgaaagtgaatggggacccagcctggatgactatgacaggaggccaaagtcttcgtacctgaatcagacaagccctcagcccaccatgcggcagaggtccaggtcaggctcgggactccaggaaccgatgatgccatttggagcaagtgcatttaaaacccatccccaaggacactcctacaactcctacacctaccctcgcttgtccgagcccacaatgtgcattccaaaggtggattacgatcgagcacagatggtcctcagccctccactgtcagggtctgacacctaccccaggggccctgccaaactacctcaaagtcaaagcaaatcgggctattcctcaagcagtcaccagtacccgtctgggtaccacaaagccaccttgtaccatcacccctccctgcagagcagttcgcagtacatctccacggcttcctacctgagctccctcagcctctcatccagcacctacccgccgcccagctggggctcctcctccgaccagcagccctccagggtgtcccatgaacagtttcgggcggccctgcagctggtggtcagcccaggagaccccagggaatacttggccaactttatcaaaatcggggaaggctcaaccggcatcgtatgcatcgccaccgagaaacacacagggaaacaagttgcagtgaagaaaatggacctccggaagcaacagagacgagaactgcttttcaatgaggtcgtgatcatgcgggattaccaccatgacaatgtggttgacatgtacagcagctaccttgtcggcgatgagctctgggtggtcatggagtttctagaaggtggtgccttgacagacattgtgactcacaccagaatgaatgaagaacagatagctactgtctgcctgtcagttctgagagctctctcctaccttcataaccaaggagtgattcacagggacataaaaagtgactccatcctcctgacaagcgatggccggataaagttgtctgattttggtttctgtgctcaagtttccaaagaggtgccgaagaggaaatcattggttggcactccctactggatggcccctgaggtgatttctaggctaccttatgggacagaggtggacatctggtccctcgggatcatggtgatagaaatgattgatggcgagcccccctacttcaatgagcctcccctccaggcgatgcggaggatccgggacagtttacctccaagagtgaaggacctacacaaggtttcttcagtgctccggggattcctagacttgatgttggtgagggagccctctcagagagcaacagcccaggaactcctcggacatccattcttaaaactagcaggtccaccgtcttgcatcgtccccctcatgagacaatacaggcatcactgagcagaggattcgtgtaggtggcaaagctagatgaggacatgagaataattcaggagaacaaaaggaaacacagaacatgcaaaaggcctgtgcattctagaccagccaattggtgggacagcgtgatgaccggcagggttcaacagaccagggcatcttcttgtgtcttaaacaggcatctctccactgacagccggtgtggtcacttggagcacggctttaataagtcattattatatttttcagcccttcatccagcaaatcagaaggactcagtacaaactccgttatgatatatcctagccacatgcagggtaacatgtaggattttctatattgaaagaatacttttctggcaaaaaaaaaaaaaaaagaaagaaaggaaaacaaaaagcacttttttcttaatggtagcagtataatgtattttgcaacgaatttgtaatttttctgtacgatagttttgataatttatagtactttgatgtcatgtagccattgtatcagttgaagtaatacttgtttactagaggagtttgaacaaagcctttcctacttttttatccctttaagagaaccaatgattctttaggaactttgaatactgaatgactctcaatcaccgtcagctttagtaaaatctctttcttatcctaacaagtgtcttatttggtggaagaagaattaagagtgatggtgatggtgtgcacgtttcattaatccaaccaaaaataatgaaataaaatttgagccacagtataccactccttgggataaagttaaatatttttaaagatcacattttccatgaacgcctctagtagcaaaccattcttttgcacaccacaatgtttccctcagtgccctttctcaaatgggtacaatgttcccttgtggccaaatttccctcccagggagcaatttcagtgctaggatcattggattcagttcccaaaatagaatgtttcagtgagaccatgagaattccaggctcacaaagggagaggagagaacagggcaagacgtttggtttcatttgtcaccatttttaaaactctgtatgctagcacaccaaactcttgtctatatttacctttgtaccacagtattaatcgctattgttcatgtatcgtgctggaagtctgaactgactctagaggatgaattagcaagagggtattttaccaggtatgatctgacttcagttgtgcccatgttataatgtgtttccgacataggagagtcgtgctgctgtctagatcttcttgaatgttgataaaaatgaatgactactacaatacattttgtgttgcttgttggatgaatttgcatgttaactgtaggccaatatagatttgcctttaaaactctggaagagctacatagtcatcattagtttctattaattatgcatcagacaaaagccatttgttaccaaactgggaaaacagaggcttttcttaactatttcacatactgtaacaaatatgaatttaaatttgtgatagcgctctggttgctctaagcataattaagaatttttgtaattaataggttgctaattatttatcactgctaaaaaggaaaaaaggcataaaatgaccttctactgattagattttcagttttctttcaaactggaaatgcctccataaatatgatctatgattttgcttcataaaacagcaaatcaatgttttatgtaaaatattaaagcattaatataaatatgtgagaataaaaacaatctaaatccagaaaatggcagtcctaaatgttcatgagacagattgtattaatttaaccaggactatgtagaagtagaaagaaaagaaaaagaaaatcttttttaaaccagaataaacattaaaaactattgcagaaaatagtggattttggattccaaacattttcgacagtgtaatggaaatttttctgtaattttcttaccatcgggtattttttaaagtattcattgagtttaccaaaagttactgtagcttaaaaggttttgtgagcactaactattggcagaaactgcatttgcaaataaaaataaatgtttgcctttt

SEQ ID NO: 1621 - DNA, 4506 bp, Homo sapiens
cagtagtagttccccagcgtgcgcccggggagaccgggaacatggcgctgggagcgctgtagcagctgagaaggggctgaggcaccgccgcttcgctgacagccggccaccagaaatacactgtggtgaaatgcttccacctcttgctaaaatgaacactgaggaaaaatgaagaagactgacaagcaccagcgaaaagttgcagaatagaaatagccacactcctctggagtctttaattcatccacagccatcatataaaggttttggcatcatgtttgggaagaaaaagaaaaagattgaaatatctggcccgtccaactttgaacacagggttcatactgggtttgatccacaagagcagaagtttaccggccttccccagcagtggcacagcctgttagcagatacggccaacaggccaaagcctatggtggacccttcatgcatcacacccatccagctggctcctatgaagacaatcgttagaggaaacaaaccctgcaaggaaacctccatcaacggcctgctagaggattttgacaacatctcggtgactcgctccaactccctaaggaaagaaagcccacccaccccagatcagggagcctccagccacggtccaggccacgcggaagaaaatggcttcatcaccttctcccagtattccagcgaatccgatactactgctgactacacgaccgaaaagtacagggagaagagtctctatggagatgatctggatccgtattatagaggcagccacgcagccaagcaaaatgggcacgtaatgaaaatgaagcacggggaggcctactattctgaggtgaagcctttgaaatccgattttgccagattttctgccgattatcactcacatttggactcactgagcaaaccaagtgaatacagtgacctcaagtgggagtatcagagagcctcgagtagctcccctctggattattcattccaattcacaccttctagaactgcagggaccagcgggtgctccaaggagagcctggcgtacagtgaaagtgaatggggacccagcctggatgactatgacaggaggccaaagtcttcgtacctgaatcagacaagccctcagcccaccatgcggcagaggtccaggtcaggctcgggactccaggaaccgatgatgccatttggagcaagtgcatttaaaacccatccccaaggacactcctacaactcctacacctaccctcgcttgtccgagcccacaatgtgcattccaaaggtggattacgatcgagcacagatggtcctcagccctccactgtcagggtctgacacctaccccaggggccctgccaaactacctcaaagtcaaagcaaatcgggctattcctcaagcagtcaccagtacccgtctgggtaccacaaagccaccttgtaccatcacccctccctgcagagcagttcgcagtacatctccacggcttcctacctgagctccctcagcctctcatccagcacctacccgccgcccagctggggctcctcctccgaccagcagccctccagggtgtcccatgaacagtttcgggcggccctgcagctggtggtcagcccaggagaccccagggaatacttggccaactttatcaaaatcggggaaggctcaaccggcatcgtatgcatcgccaccgagaaacacacagggaaacaagttgcagtgaagaaaatggacctccggaagcaacagagacgagaactgcttttcaatgaggtcgtgatcatgcgggattaccaccatgacaatgtggttgacatgtacagcagctaccttgtcggcgatgagctctgggtggtcatggagtttctagaaggtggtgccttgacagacattgtgactcacaccagaatgaatgaagaacagatagctactgtctgcctgtcagttctgagagctctctcctaccttcataaccaaggagtgattcacagggacataaaaagtgactccatcctcctgacaagcgatggccggataaagttgtctgattttggtttctgtgctcaagtttccaaagaggtgccgaagaggaaatcattggttggcactccctactggatggcccctgaggtgatttctaggctaccttatgggacagaggtggacatctggtccctcgggatcatggtgatagaaatgattgatggcgagcccccctacttcaatgagcctcccctccaggcgatgcggaggatccgggacagtttacctccaagagtgaaggacctacacaaggtttcttcagtgctccggggattcctagacttgatgttggtgagggagccctctcagagagcaacagcccaggaactcctcggacatccattcttaaaactagcaggtccaccgtcttgcatcgtccccctcatgagacaatacaggcatcactgagcagaggattcgtgtaggtggcaaagctagatgaggacatgagaataattcaggagaacaaaaggaaacacagaacatgcaaaaggcctgtgcattctagaccagccaattggtgggacagcgtgatgaccggcagggttcaacagaccagggcatcttcttgtgtcttaaacaggcatctctccactgacagccggtgtggtcacttggagcacggctttaataagtcattattatatttttcagcccttcatccagcaaatcagaaggactcagtacaaactccgttatgatatatcctagccacatgcagggtaacatgtaggattttctatattgaaagaatacttttctggcaaaaaaaaaaaaaaaagaaagaaaggaaaacaaaaagcacttttttcttaatggtagcagtataatgtattttgcaacgaatttgtaatttttctgtacgatagttttgataatttatagtactttgatgtcatgtagccattgtatcagttgaagtaatacttgtttactagaggagtttgaacaaagcctttcctacttttttatccctttaagagaaccaatgattctttaggaactttgaatactgaatgactctcaatcaccgtcagctttagtaaaatctctttcttatcctaacaagtgtcttatttggtggaagaagaattaagagtgatggtgatggtgtgcacgtttcattaatccaaccaaaaataatgaaataaaatttgagccacagtataccactccttgggataaagttaaatatttttaaagatcacattttccatgaacgcctctagtagcaaaccattcttttgcacaccacaatgtttccctcagtgccctttctcaaatgggtacaatgttcccttgtggccaaatttccctcccagggagcaatttcagtgctaggatcattggattcagttcccaaaatagaatgtttcagtgagaccatgagaattccaggctcacaaagggagaggagagaacagggcaagacgtttggtttcatttgtcaccatttttaaaactctgtatgctagcacaccaaactcttgtctatatttacctttgtaccacagtattaatcgctattgttcatgtatcgtgctggaagtctgaactgactctagaggatgaattagcaagagggtattttaccaggtatgatctgacttcagttgtgcccatgttataatgtgtttccgacataggagagtcgtgctgctgtctagatcttcttgaatgttgataaaaatgaatgactactacaatacattttgtgttgcttgttggatgaatttgcatgttaactgtaggccaatatagatttgcctttaaaactctggaagagctacatagtcatcattagtttctattaattatgcatcagacaaaagccatttgttaccaaactgggaaaacagaggcttttcttaactatttcacatactgtaacaaatatgaatttaaatttgtgatagcgctctggttgctctaagcataattaagaatttttgtaattaataggttgctaattatttatcactgctaaaaaggaaaaaaggcataaaatgaccttctactgattagattttcagttttctttcaaactggaaatgcctccataaatatgatctatgattttgcttcataaaacagcaaatcaatgttttatgtaaaatattaaagcattaatataaatatgtgagaataaaaacaatctaaatccagaaaatggcagtcctaaatgttcatgagacagattgtattaatttaaccaggactatgtagaagtagaaagaaaagaaaaagaaaatcttttttaaaccagaataaacattaaaaactattgcagaaaatagtggattttggattccaaacattttcgacagtgtaatggaaatttttctgtaattttcttaccatcgggtattttttaaagtattcattgagtttaccaaaagttactgtagcttaaaaggttttgtgagcactaactattggcagaaactgcatttgcaaataaaaataaatgtttgcctttt

SEQ ID NO: 1622 - DNA, 4001 bp, Homo sapiens
aggcatcagcaatctatcagggaacggcggtggccggtgcggcgtgttcggtggcggctctggccgctcaggcgcctgcggctgggtgagcgcacgcgaggcggcgaggcggcagcgtgtttctaggtcgtggcgtcgggcttccggagctttggcggcagctaggggaggatggcggagtcttcggataagctctatcgagtcgagtacgccaagagcgggcgcgcctcttgcaagaaatgcagcgagagcatccccaaggactcgctccggatggccatcatggtgcagtcgcccatgtttgatggaaaagtcccacactggtaccacttctcctgcttctggaaggtgggccactccatccggcaccctgacgttgaggtggatgggttctctgagcttcggtgggatgaccagcagaaagtcaagaagacagcggaagctggaggagtgacaggcaaaggccaggatggaattggtagcaaggcagagaagactctgggtgactttgcagcagagtatgccaagtccaacagaagtacgtgcaaggggtgtatggagaagatagaaaagggccaggtgcgcctgtccaagaagatggtggacccggagaagccacagctaggcatgattgaccgctggtaccatccaggctgctttgtcaagaacagggaggagctgggtttccggcccgagtacagtgcgagtcagctcaagggcttcagcctccttgctacagaggataaagaagccctgaagaagcagctcccaggagtcaagagtgaaggaaagagaaaaggcgatgaggtggatggagtggatgaagtggcgaagaagaaatctaaaaaagaaaaagacaaggatagtaagcttgaaaaagccctaaaggctcagaacgacctgatctggaacatcaaggacgagctaaagaaagtgtgttcaactaatgacctgaaggagctactcatcttcaacaagcagcaagtgccttctggggagtcggcgatcttggaccgagtagctgatggcatggtgttcggtgccctccttccctgcgaggaatgctcgggtcagctggtcttcaagagcgatgcctattactgcactggggacgtcactgcctggaccaagtgtatggtcaagacacagacacccaaccggaaggagtgggtaaccccaaaggaattccgagaaatctcttacctcaagaaattgaaggttaaaaaacaggaccgtatattccccccagaaaccagcgcctccgtggcggccacgcctccgccctccacagcctcggctcctgctgctgtgaactcctctgcttcagcagataagccattatccaacatgaagatcctgactctcgggaagctgtcccggaacaaggatgaagtgaaggccatgattgagaaactcggggggaagttgacggggacggccaacaaggcttccctgtgcatcagcaccaaaaaggaggtggaaaagatgaataagaagatggaggaagtaaaggaagccaacatccgagttgtgtctgaggacttcctccaggacgtctccgcctccaccaagagccttcaggagttgttcttagcgcacatcttgtccccttggggggcagaggtgaaggcagagcctgttgaagttgtggccccaagagggaagtcaggggctgcgctctccaaaaaaagcaagggccaggtcaaggaggaaggtatcaacaaatctgaaaagagaatgaaattaactcttaaaggaggagcagctgtggatcctgattctggactggaacactctgcgcatgtcctggagaaaggtgggaaggtcttcagtgccacccttggcctggtggacatcgttaaaggaaccaactcctactacaagctgcagcttctggaggacgacaaggaaaacaggtattggatattcaggtcctggggccgtgtgggtacggtgatcggtagcaacaaactggaacagatgccgtccaaggaggatgccattgagcacttcatgaaattatatgaagaaaaaaccgggaacgcttggcactccaaaaatttcacgaagtatcccaaaaagttctaccccctggagattgactatggccaggatgaagaggcagtgaagaagctgacagtaaatcctggcaccaagtccaagctccccaagccagttcaggacctcatcaagatgatctttgatgtggaaagtatgaagaaagccatggtggagtatgagatcgaccttcagaagatgcccttggggaagctgagcaaaaggcagatccaggccgcatactccatcctcagtgaggtccagcaggcggtgtctcagggcagcagcgactctcagatcctggatctctcaaatcgcttttacaccctgatcccccacgactttgggatgaagaagcctccgctcctgaacaatgcagacagtgtgcaggccaaggtggaaatgcttgacaacctgctggacatcgaggtggcctacagtctgctcaggggagggtctgatgatagcagcaaggatcccatcgatgtcaactatgagaagctcaaaactgacattaaggtggttgacagagattctgaagaagccgagatcatcaggaagtatgttaagaacactcatgcaaccacacacaatgcgtatgacttggaagtcatcgatatctttaagatagagcgtgaaggcgaatgccagcgttacaagccctttaagcagcttcataaccgaagattgctgtggcacgggtccaggaccaccaactttgctgggatcctgtcccagggtcttcggatagccccgcctgaagcgcccgtgacaggctacatgtttggtaaagggatctatttcgctgacatggtctccaagagtgccaactactgccatacgtctcagggagacccaataggcttaatcctgttgggagaagttgcccttggaaacatgtatgaactgaagcacgcttcacatatcagcaagttacccaagggcaagcacagtgtcaaaggtttgggcaaaactacccctgatccttcagctaacattagtctggatggtgtagacgttcctcttgggaccgggatttcatctggtgtgaatgacacctctctactatataacgagtacattgtctatgatattgctcaggtaaatctgaagtatctgctgaaactgaaattcaattttaagacctccctgtggtaattgggagaggtagccgagtcacacccggtggctctggtatgaattcacccgaagcgcttctgcaccaactcacctggccgctaagttgctgatgggtagtacctgtactaaaccacctcagaaaggattttacagaaacgtgttaaaggttttctctaacttctcaagtcccttgttttgtgttgtgtctgtggggaggggttgttttggggttgtttttgttttttcttgccaggtagataaaactgacatagagaaaaggctggagagagattctgttgcatagactagtcctatggaaaaaaccaagcttcgttagaatgtctgccttactggtttccccagggaaggaaaaatacacttccacccttttttctaagtgttcgtctttagttttgattttggaaagatgttaagcatttatttttagttaaaaataaaaactaatttcatactatttagattttcttttttatcttgcacttattgtcccctttttagttttttttgtttgcctcttgtggtgaggggtgtgggaagaccaaaggaaggaacgctaacaatttctcatacttagaaacaaaaagagctttccttctccaggaatactgaacatgggagctcttgaaatatgtagtattaaaagttgcatttgaaattcttgactttcttatgggcacttttgtcttccaaattaaaactctaccacaaatatacttacccaagggctaatagtaatactcgattaaaaatgcagatgccttctctaaaaaaaaaaaaaaaaa

SEQ ID NO: 1623 - DNA, 7713 bp, Homo sapiens
aaagttagcggcccggagttggcgcggcccctgcagtccggcggagagcggagctgaggatggctgtgcccggctccttcccgctgctggtcgagggctcctggggccccgaccccccgaagaacttgaacaccaagttgcagatgtacttccagagcccgaagaggtcgggaggcggcgagtgtgaggtccgccaggatcccaggagcccatcccgcttcctggtgttcttctacccggaggacgttcggcagaaggttctggagagaaaaaatcatgagttggtatggcaaggaaaaggaacattcaagttaactgtccagttacctgcaaccccagatgaaatcgatcatgtctttgaagaggaacttctaacaaaagaatccaagaccaaagaagatgttaaagaaccagatgtgtcagaagaattggatacaaaactccctcttgatggtggattagacaaaatggaagatatcccagaggaatgtgaaaatatttcctctttggtggcatttgaaaacctcaaggcaaatgtgactgacataatgctaatcttgttagtggagaacataagtggcctgtctaatgatgactttcaagtggaaataataagagattttgatgttgctgttgttacctttcaaaagcacatagatactataagatttgttgatgattgtaccaagcaccattcaattaaacaacttcagctttctccaagacttctggaagtgacaaacacaatcagggttgaaaacctgccacctggtgctgatgactacagtttaaaacttttctttgaaaatccctataatggagggggaagagttgccaatgttgaatattttcctgaagagagttcagctctgattgaattttttgacagaaaagtgttagacaccatcatggccacaaaactcgacttcaataaaatgccactttctgtgttcccatactatgcctcattgggcacagccttgtatggaaaggagaagcctctgatcaagcttccagcaccatttgaagagtcactagatcttcccttatggaagttcttacagaaaaagaatcacctcattgaggagataaacgatgaaatgaggcgttgtcactgtgagctcacgtggtcccaactcagtggtaaagttaccatcagaccagcagccaccttagtcaatgaaggaagaccgagaatcaagacctggcaggcagatacttccacaacactctctagcatcaggtctaaatataaagtcaacccaattaaagtggatccaacaatgtgggacaccataaaaaatgatgtgaaagatgacaggattttgattgagtttgatacacttaaggagatggtaatcttagcagggaaatcagaggatgtccaaagcattgaggtacaagtcagggagttaatagaaagcactactcaaaaaattaaaagggaagagcaaagtttgaaggaaaaaatgatcatttctccaggcaggtattttcttttgtgtcacagcagtctactggaccatttactcacggagtgcccagagatagagatttgttacgatagagtcactcaacacttgtgcttgaaaggacctagtgcagatgtgtataaagcaaagtgtgaaatccaggaaaaggtgtacaccatggctcagaaaaacattcaggtttctcctgagatttttcagtttttgcaacaggtaaactggaaagaattctctaagtgtcttttcatagcacagaagattcttgcactttatgagctagagggtacaactgttctcttaaccagctgttcttctgaagccctgttagaagcagaaaagcaaatgctcagtgccttaaattataagcgcattgaagttgagaacaaagaagttcttcatggcaagaaatggaaagggctcactcacaatttgcttaagaaacaaaattcctccccaaacactgtaatcatcaatgagttaacttcagaaaccacagctgaagtcatcattacaggctgtgtaaaagaagtaaatgaaacctataaattgctttttaacttcgttgaacaaaacatgaaaatagagagactggttgaagtaaagccttccttagttattgactatttaaagacagaaaagaagctattctggccaaagataaagaaggtaaatgtgcaggtaagtttcaatcctgagaacaaacaaaaaggcattttactaactggctcaaagaccgaagtactgaaggcagtggacattgtcaagcaagtctgggattcagtctgtgttaaaagtgtccatactgataagccaggagccaagcagttcttccaggataaagcacggttttatcaaagtgagatcaaacggttgtttggttgttacattgaactacaggagaatgaagtaatgaaggagggaggcagccccgctgggcagaagtgcttctctcggacagtcttggcccctggcgttgtgctgattgtgcagcagggtgacttggcacggcttcctgtcgatgtggtggtgaatgcatctaatgaggaccttaagcattatggtggcctggccgctgcgctctcaaaagcagctggccctgagctccaggccgactgtgaccagatagtgaagagagagggcagactcctaccgggcaatgccaccatctccaaggcaggaaagctgccctaccaccacgtgatccatgcagtggggccccgctggagcggatatgaggccccgaggtgtgtgtacctattaaggagagctgtgcaactcagtctctgtctagccgaaaaatacaagtaccgatccatagccatcccagctattagttctggagtctttggctttcccttaggccgatgcgtggagaccattgtttctgccatcaaggaaaacttccaattcaagaaggatggacactgcttgaaagaaatctaccttgtggatgtatctgagaagactgttgaggcctttgcagaagctgtgaaaactgtatttaaagccaccctgccagatacagctgccccgccaggtttaccaccagcagcagcggggcctgggaaaacatcatgggaaaaaggaagcctggtgtccccgggaggcctgcagatgctgttggtgaaagagggtgtgcagaatgctaagaccgatgttgttgtcaactccgttcccttggatctcgtgcttagtagagggcctctttctaagtccctcttggaaaaagctggaccagagctccaggaggaattggacacagttggacaaggggtggctgtcagcatgggcacagtgctcaaaaccagcagctggaatctggactgtcgctatgtgcttcacgtggtagctccggagtggagaaatggtagcacatcttcactcaagataatggaagacataatcagagaatgtatggagatcactgagagcttgtccttaaaatcaattgcatttccagcaataggaacaggaaacttgggatttcctaaaaacatattcgctgaattaatcatttcagaggtgttcaaatttagtagcaagaatcagctgaaaactttacaagaggttcactttctgctgcacccgagtgatcatgaaaatattcaggcattttcagatgaatttgccagaagggctaatggaaatctcgtcagtgacaaaattccgaaggctaaagatacacaaggtttttatgggactgtttctagccctgattcaggtgtgtatgaaatgaagattggctccatcatcttccaggtggcttctggagatatcacgaaagaagaggcagatgtgattgtaaattcaacatcaaactcattcaatctcaaagcaggggtctccaaagcaattttagaatgtgctggacaaaatgtagaaagggaatgttctcagcaagctcagcagcgcaaaaatgattatataatcaccggaggtggatttttgaggtgcaagaatatcattcatgtaattggtggaaatgatgtcaagagttcagtttcctctgttttgcaggagtgtgaaaaaaaaaattactcatccatttgcctcccagccattgggacaggaaatgccaaacaacacccagataaggttgctgaagccataattgatgccattgaagactttgtccagaaaggatcagcccagtctgtgaaaaaagttaaagttgttatctttctgcctcaagtactggatgtgttttatgccaacatgaagaaaagagaagggactcagctttcttcccaacagtctgtgatgtctaaacttgcatcatttttgggcttttcaaagcaatctccccaaaaaaagaatcatttggttttggaaaagaaaacagaatcagcaacttttcgggtgtgtggtgaaaatgtcacgtgtgtggaatatgctatctcctggctacaagacctgattgaaaaagaacagtgtccttacaccagtgaagatgagtgcatcaaagactttgatgaaaaggagtatcaggagttgaatgagctgcagaagaagttaaatattaacatttccctggaccataagagacctttgattaaggttttgggaattagcagagatgtgatgcaggctagagatgaaattgaggcgatgatcaagagagttcgattggccaaagaacaggaatcccgggcagattgtatcagtgagtttatagaatggcagtataatgacaataacacttctcattgttttaacaaaatgaccaatctgaaattagaggatgcaaggagagaaaagaaaaaaacagttgatgtcaaaattaatcatcggcactacacagtgaacttgaacacatacactgccacagacacaaagggccacagtttatctgttcagcgcctcacgaaatccaaagttgacatccctgcacactggagtgatatgaagcagcagaatttctgtgtggtggagctgctgcctagtgatcctgagtacaacacggtggcaagcaagtttaatcagacctgctcacacttcagaatagagaagattgagaggatccagaatccagatctctggaatagctaccaggcaaagaaaaaaactatggatgccaagaatggccagacaatgaatgagaagcaactcttccatgggacagatgccggctccgtgccacacgtcaatcgaaatggctttaaccgcagctatgccggaaagaatgctgtggcatatggaaagggaacctattttgctgtcaatgccaattattctgccaatgatacgtactccagaccagatgcaaatgggagaaagcatgtgtattatgtgcgagtacttactggaatctatacacatggaaatcattcattaattgtgcctccttcaaagaaccctcaaaatcctactgacctgtatgacactgtcacagataatgtgcaccatccaagtttatttgtggcattttatgactaccaagcatacccagagtaccttattacgtttagaaaataacactttggtatccttcccacaaaattattctccatttgtacatatctagttgtaaaacaagttttagcttttttttttaattcctcttaacagatttttctaatatccaaggatcattctttgtcgctgaagtcagtctttcttcagcttctctttcataatggaaatgaacttattatcttgagagcaaataacttggaaaatttaaatgagataatgcagttgcaactgtgtgtccacaagtatggacatcaaatctgtgggaaaagaacaggtttgtattttcaggaaggagagaataacagtcttatagacagagggcacagctaagcacagctgccactgcaggagacaggccccatgtcaggatgccatagtgctgtggggagcacagtattacccagtgggtagggcttctgtcttccctgggagcagggatggtatcttagtcaatttttttcccttgagatgaggtctgtgcctgatgtacaacggatactccataaatgtttgacaaaccaacgaagaatgaaaaaaagcctagtcagactcccatccaaagtaggaactatctctttaacattcttgactcactatcactttacctcaaattgaacagattccatgacggaacttcattcttcacaaactagccagtgacatgtgggacagctctggccagggctctgggactgcagtgtacttgcgctctgcacggtccaggagctgtgatgtggctgtggtctaggggaatcctgcctgccccatggagttgcgcagcacaaccctggctccaattgccagaaggctctttttaatgctgaaccaaaatgtgcctttttttttttttttttgagatggagtttcactcttgttgcccaggctggagtgcaatggcgcgatctcagctcactgcagccactgcctcccaggttcaagtgattctcctgcctcagcctcccgagtagctgggattacaggcatgcgctaacacacccagctaattttgtatttttagtagagacgaggtttctccatgttcgacaggctggtctcgaactcccacctcagcctcccaaactgctgggattacaggtgtgagccaccgtgaccagccaatgtgccttcttatagtgtctactcattggtctttgttctgcccagtgataacaatgggataacgcctgctacacatcttcattgtgaaacccttcccctgtgctgagattaaatgaactctaagattattaaatagtatattttccttgacagcctagcgtttgatgattttaaagccttatgtataaataaaccaaaggaagtaagcagtcatattgctaatttgctaactcctatctattgaatggtgaagttttaaaaatttccccaggtaagtttaagattcaaacaccatctattgagcacctacattgtgtgccaggtagtaaaataggtgctttcatacacattgtctcaattcctgtgaggtcagaattatctctgcatttgaaacttgaggaaacatgctcagagtgcaagaagcttccttgcctgagatcacctagaaaggaaccctcagagccggcaactgaatcttggtccctgtgatgtcaagcccattgctctcccactgcagaacatggcctctagattaatgccaccgattcaggaacacctccgacagtcttgaaatacccccatgttgccttgtttgttttttccttctggcttcttctattacagtctcttcattggaagctctgtaggccaaggccagagctgatactgacacggagccaatgcagatagcacatcagatgctaggggtcgctgggaggattaagggacttaatctgctaggaacacctgtacttgaagtggaggaggctagggggccacagttgctgcttcattaacatagaggttttggatttttttctcttgtggtttgttttttaagtggattggcagactccttgttgcttaagagtggctttctaggcaggccactggcatctgaattcatcattgacaataaatgtaagaaattggaataaaaaagagagacctgctgttattcgcttttgttctccagtgatttgattaactcagggcaaggctgaatatcagagtgtatcgcactgaagaataataatccattcagtaatgttatagttatcctcaatctaaatatgtcaactgtcattttgctacttttcaaataaaatacttgaaaactgtcaaaaaa

SEQ ID NO: 1624 - DNA, 1899 bp, Homo sapiens
agcgcgcgactttttgaaagccaggagggttcgaattgcaacggcagctgccgggcgtatgtgttggtgctagaggcagctgcagggtctcgctgggggccgctcgggaccaattttgaagaggtacttggccacgacttattttcacctccgacctttccttccaggcggtgagactctggactgagagtggctttcacaatggaagggatcagtaatttcaagacaccaagcaaattatcagaaaaaaagaaatctgtattatgttcaactccaactataaatatcccggcctctccgtttatgcagaagcttggctttggtactggggtaaatgtgtacctaatgaaaagatctccaagaggtttgtctcattctccttgggctgtaaaaaagattaatcctatatgtaatgatcattatcgaagtgtgtatcaaaagagactaatggatgaagctaagattttgaaaagccttcatcatccaaacattgttggttatcgtgcttttactgaagccaatgatggcagtctgtgtcttgctatggaatatggaggtgaaaagtctctaaatgacttaatagaagaacgatataaagccagccaagatccttttccagcagccataattttaaaagttgctttgaatatggcaagagggttaaagtatctgcaccaagaaaagaaactgcttcatggagacataaagtcttcaaatgttgtaattaaaggcgattttgaaacaattaaaatctgtgatgtaggagtctctctaccactggatgaaaatatgactgtgactgaccctgaggcttgttacattggcacagagccatggaaacccaaagaagctgtggaggagaatggtgttattactgacaaggcagacatatttgcctttggccttactttgtgggaaatgatgactttatcgattccacacattaatctttcaaatgatgatgatgatgaagataaaacttttgatgaaagtgattttgatgatgaagcatactatgcagcgttgggaactaggccacctattaatatggaagaactggatgaatcataccagaaagtaattgaactcttctctgtatgcactaatgaagaccctaaagatcgtccttctgctgcacacattgttgaagctctggaaacagatgtctagtgatcatctcagctgaagtgtggcttgcgtaaataactgtttattccaaaatatttacatagttactatcagtagttattagactctaaaattggcatatttgaggaccatagtttcttgttaacatatggataactatttctaatatgaaatatgcttatattggctataagcacttggaattgtactgggttttctgtaaagttttagaaactagctacataagtactttgatactgctcatgctgacttaaaacactagcagtaaaacgctgtaaactgtaacattaaattgaatgaccattacttttattaatgatctttcttaaatattctatattttaatggatctactgacattagcactttgtacagtacaaaataaagtctacatttgtttaaaacactgaaccttttgctgatgtgtttatcaaatgataactggaagctgaggagaatatgcctcaaaaagagtagctccttggatacttcagactctggttacagattgtcttgatctcttggatctcctcagatctttggtttttgctttaatttattaaatgtattttccatactgagtttaaaatttattaatttgtaccttaagcatttcccagctgtgtaaaaacaataaaactcaaataggatgataaagaataaaggacactttgggtaccagaaaaaaaaaaaaaaaaaaaaaaaaaaaaaaaaaaaaaaaaaaaaaaa

SEQ ID NO: 1625 - DNA, 1829 bp, Homo sapiens
agcacatgcgtactcaggtgcgccggtaggggacgcgccggcacagcaaaaatggcggcggcattacgggtggcggcggtcggggcaaggctcagcgttctggcgagcggtctccgcgccgcggtccgcagcctttgcagccaggccacctctgttaacgaacgcatcgaaaacaagcgccggaccgcgctgctgggagggggccaacgccgtattgacgcgcagcacaagcgaggaaagctaacagccagggagaggatcagtctcttgctggaccctggcagctttgttgagagcgacatgtttgtggaacacagatgtgcagattttggaatggctgctgataagaataagtttcctggagacagcgtggtcactggacgaggccgaatcaatggaagattggtttatgtcttcagtcaggattttacagtttttggaggcagtctgtcaggagcacatgcccaaaagatctgcaaaatcatggaccaggccataacggtgggggctccagtgattgggctgaatgactctgggggagcacggatccaagaaggagtggagtctttggctggctatgcagacatctttctgaggaatgttacggcatccggagtcatccctcagatttctctgatcatgggcccatgtgctggtggggccgtctactccccagccctaacagacttcacgttcatggtaaaggacacctcctacctgttcatcactggccctgatgttgtgaagtctgtcaccaatgaggatgttacccaggaggagctcggtggtgccaagacccacaccaccatgtcaggtgtggcccacagagcttttgaaaatgatgttgatgccttgtgtaatctccgggatttcttcaactacctgcccctgagcagtcaggacccggctcccgtccgtgagtgccacgatcccagtgaccgtctggttcctgagcttgacacaattgtccctttggaatcaaccaaagcctacaacatggtggacatcatacactctgttgttgatgagcgtgaattttttgagatcatgcccaattatgccaagaacatcattgttggttttgcaagaatgaatgggaggactgttggaattgttggcaaccaacctaaggtggcctcaggatgcttggatattaattcatctgtgaaaggggctcgttttgtcagattctgtgatgcattcaatattccactcatcacttttgttgatgtccctggctttctacctggcacagcacaggaatacgggggcatcatccggcatggtgccaagcttctctacgcatttgctgaggcaactgtacccaaagtcacagtcatcaccaggaaggcctatggaggtgcctatgatgtcatgagctctaagcacctttgtggtgataccaactatgcctggcccaccgcagagattgcagtcatgggagcaaagggcgctgtggagatcatcttcaaagggcatgagaatgtggaagctgctcaggcagagtacatcgagaagtttgccaaccctttccctgcagcagtgcgagggtttgtggatgacatcatccaaccttcttccacacgtgcccgaatctgctgtgacctggatgtcttggccagcaagaaggtacaacgtccttggagaaaacatgcaaatattccattgtaaacaaatcaaaggaaaagaaaccaagaactgaattactgtctgcccattcacatcccattcctgccttttgcaatcatgaaacctgggaatccaaatagttggataacttagaataactaagtttattaaattctagaaagatcaaaaaaaaaaaaaaa

SEQ ID NO: 1626 - DNA, 3485 bp, Homo sapiens
aaaaagcagcagaacctggaagtccacggggagcttggatgccaaagggaggacggctgggtcctctggagaggactactcactggcatatttctgaggtatctgtagaataaccacagcctcagatactggggactttacagtcccacagaaccgtcctcccaggaagctgaatccagcaagaacaatggaggccagcgggaagctcatttgcagacaaaggcaagtccttttttcctttctccttttgggcttatctctggcgggcgcggcggaacctagaagctattctgtggtggaggaaactgagggcagctcctttgtcaccaatttagcaaaggacctgggtctggagcagagggaattctccaggcggggggttagggttgtttccagagggaacaaactacatttgcagctcaatcaggagaccgcggatttgttgctaaatgagaaattggaccgtgaggatctgtgcggtcacacagagccctgtgtgctacgtttccaagtgttgctagagagtcccttcgagttttttcaagctgagctgcaagtaatagacataaacgaccactctccagtatttctggacaaacaaatgttggtgaaagtatcagagagcagtcctcctgggactacgtttcctctgaagaatgccgaagacttagatgtaggccaaaacaatattgagaactatataatcagccccaactcctattttcgggtcctcacccgcaaacgcagtgatggcaggaaatacccagagctggtgctggacaaagcgctggaccgagaggaagaagctgagctcaggttaacactcacagcactggatggtggctctccgcccagatctggcactgctcaggtctacatcgaagtcctggatgtcaacgataatgcccctgaatttgagcagcctttctatagagtgcagatctctgaggacagtccggtaggcttcctggttgtgaaggtctctgccacggatgtagacacaggagtcaacggagagatttcctattcacttttccaagcttcagaagagattggcaaaacctttaagatcaatcccttgacaggagaaattgaactaaaaaaacaactcgatttcgaaaaacttcagtcctatgaagtcaatattgaggcaagagatgctggaaccttttctggaaaatgcaccgttctgattcaagtgatagatgtgaacgaccatgccccagaagttaccatgtctgcatttaccagcccaatacctgagaacgcgcctgaaactgtggttgcacttttcagtgtttcagatcttgattcaggagaaaatgggaaaattagttgctccattcaggaggatctacccttcctcctgaaatccgcggaaaacttttacaccctactaacggagagaccactagacagagaaagcagagcggaatacaacatcactatcactgtcactgacttggggacccctatgctgataacacagctcaatatgaccgtgctgatcgccgatgtcaatgacaacgctcccgccttcacccaaacctcctacaccctgttcgtccgcgagaacaacagccccgccctgcacatccgcagcgtcagcgctacagacagagactcaggcaccaacgcccaggtcacctactcgctgctgccgccccaggacccgcacctgcccctcacatccctggtctccatcaacgcggacaacggccacctgttcgccctcaggtctctggactacgaggccctgcaggggttccagttccgcgtgggcgcttcagaccacggctccccggcgctgagcagcgaggcgctggtgcgcgtggtggtgctggacgccaacgacaactcgcccttcgtgctgtacccgctgcagaacggctccgcgccctgcaccgagctggtgccccgggcggccgagccgggctacctggtgaccaaggtggtggcggtggacggcgactcgggccagaacgcctggctgtcgtaccagctgctcaaggccacggagctcggtctgttcggcgtgtgggcgcacaatggcgaggtgcgcaccgccaggctgctgagcgagcgcgacgcggccaagcacaggctggtggtgctggtcaaggacaatggcgagcctccgcgctcggccaccgccacgctgcacgtgctcctggtggacggcttctcccagccctacctgcctctcccggaggcggccccgacccaggcccaggccgacttgctcaccgtctacctggtggtggcgttggcctcggtgtcttcgctcttcctcttttcggtgctcctgttcgtggcggtgcggctgtgtaggaggagcagggcggcctcggtgggtcgctgcttggtgcccgagggcccccttccagggcatcttgtggacatgagcggcaccaggaccctatcccagagctaccagtatgaggtgtgtctggcaggaggctcagggaccaatgagttcaagttcctgaagccgattatccccaacttccctccccagtgccctgggaaagaaatacaaggaaattctaccttccccaataactttgggttcaatattcagtgaccatagttgacttttacattccataggtattttattttgtggcatttccatgccaatgtttatttcccccaatttgtgtgtatgtaatattgtacggatttactcttgatttttctcatgttctttctccctttgttttaaagtgaacatttacctttattcctggttcttaaaaggtgacaattcattctttaacccagatggtcttaatttgtaattaatttgcctccctaaagagcaataccaaatcacatttttttcatgcccctatctttagctgaacttcacccactattatgcttatggtaaaattaaatagagcaatttggaagtgattccaattttccagcatttcttcatttgattctctttttttagtcttaaaataatgactcctattcagacatatcatttttcttttttgtaaatccagtgcgtttttagttaacctttaaatatgctttttgctttcaaaaataaaccagaaaacctatatcctatgatacaactctaagtgttatcacttgattcgaaagggtcagaagaccagttttttagtatcctttcctcattcatcctggagaggattgtgcaggcacattaatattgtgaccaatcacagaatctgggaatatgaagctataattttttaattaatgtcacaaagctctagtgcaatctagttgaatgcagatgcctgtgcccaaataataattcatatagcataaattggagttgtgtgttaatgtgtaaaaatttttgcctgtactatcatataatttaatgtatatacaccagaaactatttttcaaactttttttactgcaaccaatagttaagattatattttacatattttgaaacacacaagcttaatagaaataaatgcttgtgaacaatg

SEQ ID NO: 1627 - DNA, 5932 bp, Homo sapiens
cttttaccgcacatttcccctcccctagttcatttcgcacgacgcagcggttgggaacacagacattttcggagctggagccgccactgccgccgccattttgtgtctgtggagaaagaagcttctgtggcggctggaagtggacggagatcacccgcgagacggcggcgtttcatacccgaggttccccctgtgtcgtcccccatcccccctccgcggtcagcatgtggtgaagccggagccgcgagagagccggggagaggaagaggagtcggaagggaggcggggtatccagagcggcttcagcttcagctgcagcggacctcggaggggggccgcggcgcaatgtcagagcagacgccggccgaggccggtgctgcgggggcccgggaggacgcctgtcgggattatcagtcatcgctcgaagacctgaccttcaatagcaagccgcacatcaatatgctgaccattctagccgaggagaacctgcccttcgccaaggagatcgtctctctcatcgaggcccaaaccgccaaggctccttcctcagagaagcttcctgttatgtaccttatggattctattgtgaaaaacgttggaagagagtatctcactgcctttactaaaaatctagttgcaacatttatttgtgtgtttgaaaaggtggatgaaaatactaggaaaagtttatttaagttacgttctacatgggatgaaatattccctttgaagaaactttatgccctggatgtcagagtcaattcattagatcctgcttggcctattaaacctctaccccccaatgtgaatacgtctagcatccatgtgaatcctaaatttttaaataaatcgcccgaggagccttcaacacctggtacagtggtcagttcccctagcatctccactcctccaattgttcctgatatacaaaagaatcttacacaagaacaactaataaggcagcagttactggcaaagcaaaaacagttgttagaacttcagcagaaaaagctggagcttgagctagagcaagctaaggcacagttggcagtttctcttagtgttcagcaggaaacatccaatttaggtcctggatctgcaccatccaaattacatgtttcacagattccccctatggcagttaaagctcctcatcaggttcctgtgcaatctgagaaaagccgtccaggaccatccttacaaattcaggatttaaaaggaactaaccgggatcctcgtctgaacaggataagccaacattctcatggaaaagatcagagtcacaggaaagaatttctaatgaacacattaaaccagtctgatactaagacaagtaaaactataccctctgaaaaactaaattcatccaagcaagaaaaaagtaaatcaggtgaaaaaataaccaagaaagaacttgaccaattagattctaaatcgaaatcgaaatcgaaatcaccctcacctttgaaaaacaaattatctcacacaaaagacttgaaaaatcaagaatcggaaagtatgaggttgtctgatatgaacaagagagatccaagattaaaaaaacatcttcaggataagaccgatggcaaagatgatgatgtgaaagagaagagaaaaactgcagaaaaaaaggataaagatgagcacatgaagtcatccgaacacagactggctggaagtagaaataaaatcataaatggcattgtacaaaaacaggatacaataacagaagagtcagaaaaacaggggacaaaaccagggagatcgagtactagaaagcgatcaagatctcgatcacccaagtctaggtcaccaattatacattccccaaagagaagagataggcggtcacccaaacgaaggcaaagaagtatgtctccaacatcgacacctaaagctggaaagattcgccaatctggagctaagcagtcacatatggaagagtttacaccaccttctagggaagacagaaatgctaagagaagtactaaacaggatattcgggatccaaggcgaatgaaaaagactgaagaggagcgaccacaagaaactacaaatcagcattctacaaagtcaggcactgaaccaaaggagaatgtagaaaactggcaaagttccaagtctgccaaaagatggaaatctggttgggaagaaaataaaagcttacaacaggttgatgaacatagtaaacctcctcatctgaggcatagggagagctggtcaagcactaaaggaattttatcacctcgagccccaaagcagcaacagcatcgattaagtgtagatgccaatcttcagattcctaaagagttaactcttgcaagcaaaagagaattacttcaaaagacgagtgaacgtttagcatctggtgaaattacacaggatgacttccttgttgttgtgcatcaaattcgacagctatttcagtatcaagaaggtgtgcgagaagagcagagatctccattcaatgatcgttttccacttaagcgacctcgatatgaagattcagataaaccatttgtagatagtccagcatcaagattcgccggcctggatacaaatcagcgacttacagctttagctgaagacagaccgttatttgatggacctagtaggccatcagtagcaagagatggcccaacgaagatgatttttgaaggacccaataaattaagccctcgaattgatggacctcccacaccagcttctcttcggtttgatgggtcaccaggacaaatggggggaggaggccctttgagatttgaggggccacaaggtcagctaggaggtgggtgtcctttgagatttgaaggtcctccaggaccagtggggacacctctgcggtttgagggcccaattggtcaagcaggaggaggtggttttcggtttgaaggttcccctggtctgaggtttgagggatctccaggtggtttgagatttgagggaccaggaggccagcctgtgggtggtctgaggtttgagggacatcgtggtcaacctgtgggtggtctaaggtttgagggacctcatggtcagcctgtgggtggacttagatttgataatccccgaggtcagcctgtaggtggacttagatttgaggggggtcatggtccatcaggggctgcgattaggtttgatggacctcatggtcagccaggaggtggaatcagatttgagggccctttgctacagcaaggggttggaatgaggtttgagggcccccatggtcagtcagtagctggtctgagatttgagggacaacataatcaacttggtgggaaccttaggtttgagggtccacatggtcagccaggggttggtatcaggtttgaaggccctttagtccaacaaggaggtggaatgaggtttgagggtccttctgtaccaggaggtggcctgagaattgaagggcctctgggtcaaggtggtccaagatttgaaggttgtcatgctttaaggtttgatgggcagccaggtcagccgtcactcttgccaagatttgatggattacatggtcagccaggtcctagatttgaaaggactcctggtcagccaggccctcagaggtttgatggaccacctggacagcaggttcaacccagatttgacggtgtacctcaaagatttgatggtccacaacatcagcaagcatcaaggtttgatattcctcttggtcttcaaggcacaagatttgacaatcatccttcacaaaggcttgaatcagtatctttcaatcagactggtccatataatgatccacctggcaatgcttttaatgccccatcccaaggactacagttccaaagacatgaacaaatatttgattcacctcaaggaccaaattttaatggaccacatggccctggaaaccagagtttctctaatccacttaacagagcttctggacactattttgatgaaaaaaatcttcagagttctcaatttggaaactttggcaatatacctgctccaatgacagtaggaaatattcaggcatctcaacaggttctgagtggtgttgctcagccagtagcttttggtcaaggacaacagtttttaccagttcatccacaaaatcctggatttgttcagaatccttcaggagccctccctaaggcatatcctgataatcatctcagtcaggtggatgtaaatgaattgttttcaaaattgctaaaaacaggaattctcaaattgtcccaaactgattcagctacaacacaagtaagtgaagtaactgctcagcctccccctgaagaggaggaagatcaaaatgaagatcaagatgttccagatcttactaattttacagttgaagaattgaaacaacgttatgacagtgttataaatcgactgtacactggtattcagtgttactcttgtggaatgaggtttacaacatcacagacagatgtttatgcagatcatttggactggcattatcggcaaaatagaactgaaaaggatgttagccgaaaagtcactcatagacgttggtactacagtttaacagactggatagaatttgaggagatagctgatctggaagaacgggcaaagagccagttttttgaaaaggtgcatgaagaagttgtgctcaaaactcaagaggctgctaaagaaaaagagttccaaagtgtacctgctggaccagctggagcagttgagagttgtgaaatctgtcaagaacaatttgaacaatactgggatgaagaagaggaggaatggcatttgaaaaatgctattagagtagatggaaagatttatcatccatcatgttatgaagattatcaaaatacatcttcatttgattgtacaccatctcccagcaagacaccagttgaaaaccccttgaatattatgttgaacattgtcaaaaacgaattgcaggaaccctgtgacagtcccaaagttaaggaagaacgaattgatacaccaccagcttgtacagaggaaagcatagcaacaccctctgaaattaaaacagaaaatgacacagtcgagtcagtttaaataaaatgagaaaggtatgtttttcttttttaaaaaagctgctgttggatctagaaggtgaagaatttttttatgtatatatagacatatctatataaattgtctggctgaggcagggccttcagctatcatttggttaataaatacattttagtatttgcatttcctactgcctgcagagtttcaggtgcttgttgtgtgaaagttctgtagatgtgtgcaaatttaacgaaatgaaattgtatgtgtaaaaatgtacgatttttcactgtgcaactgtaaattataaataaaaaatatttttgctattcatggagtgtaatatttatgcacaccatcaaatagtttctgtactttttattgggtaaaaatggaattgaacagcaacctcaacataagattttttttctagtagcctcccactgattaaagaagcaagtttgaggtttcatccttcaaaagggggttccgagagagcaccgtagggcttttctcaaatagaaaagccagattttgaaaaaattttaaagataaaataggacatattttgcagatatatatatatatatacacaaacacatctccaggtatagagaaccatccagatgttcacttttgaaaatatctaatgatgcaaagttttattcttgaacttggacactgatgccatcaaacaattaacaaatatatttaagtactaaaggtgattttttttttaaagactttttcaaattgtcaaatgatttaatgcagatgaacatatttctattttaagtaacgggaatctgtaagaatgtttgcttgagatatggttaacttttttcttttgttggttttgacttagatggacaccatgagatgttaatattcatacatgtaataaatagaatgatgaagaaaaaaaaaaaaaaaaaaaaaa

SEQ ID NO: 1628 - DNA, 1355 bp, Homo sapiens
ggatggccggagctggcgccctggttctggaggtaaccggttactgagggcgagaagcgccacccggaggctctagcctgacaaatgcttgctgacctgggccagagctcttcccttacgcaagtctcagccggtcgtcgcgacgttcgcccgctcgctctgaggctcctgaagccgaaaccagctagactttcctccttcccgcctgcctgtagcggcgttgttgccactccgccaccatgttcgaggcgcgcctggtccagggctccatcctcaagaaggtgttggaggcactcaaggacctcatcaacgaggcctgctgggatattagctccagcggtgtaaacctgcagagcatggactcgtcccacgtctctttggtgcagctcaccctgcggtctgagggcttcgacacctaccgctgcgaccgcaacctggccatgggcgtgaacctcaccagtatgtccaaaatactaaaatgcgccggcaatgaagatatcattacactaagggccgaagataacgcggataccttggcgctagtatttgaagcaccaaaccaggagaaagtttcagactatgaaatgaagttgatggatttagatgttgaacaacttggaattccagaacaggagtacagctgtgtagtaaagatgccttctggtgaatttgcacgtatatgccgagatctcagccatattggagatgctgttgtaatttcctgtgcaaaagacggagtgaaattttctgcaagtggagaacttggaaatggaaacattaaattgtcacagacaagtaatgtcgataaagaggaggaagctgttaccatagagatgaatgaaccagttcaactaacttttgcactgaggtacctgaacttctttacaaaagccactccactctcttcaacggtgacactcagtatgtctgcagatgtaccccttgttgtagagtataaaattgcggatatgggacacttaaaatactacttggctcccaagatcgaggatgaagaaggatcttaggcattcttaaaattcaagaaaataaaactaagctctttgagaactgcttctaagatgccagcatatactgaagtcttttctgtcaccaaatttgtacctctaagtacatatgtagatattgttttctgtaaataacctatttttttctctattctctgcaatttgtttaaagaataaagtccaaagtcagatctggtctagttaacctagaagtatttttgtctcttagaaatacttgtgatttttataatacaaaagggtcttgactctaaatgcagttttaagaattgtttttgaatttaaataaagttacttgaatttcaaacatca

SEQ ID NO: 1629 - DNA, 3130 bp, Homo sapiens
gcggagcgcggcgcgcgcggcggttgggccgttggctgttcggccctgggatccgccgccactccgcgatcagaccgctctgtgccgcgagccgccgtgagcactcggattcaagccggcgccaacgagtccgggggcatcgcccgcagcggccaagctcatggccggctgagcgggacgccgcctccgcctcagccaccgccgccgccgccgcctcctcctcctcagccggcggcggcccgggcccagcaaccatggctgaagactactgggacgggcgcctgcggcgaacaggaggagaaggaggtcgcgcggcctcatcccgggccgccgccccaggcgccgccgcgccggccccgcggctctgaggttgctcgcgcgcccccgccgatcgccatggatcggatgaagaagatcaaacggcagctgtcaatgacactccgaggtggccgaggcatagacaagaccaatggtgcccctgagcagataggcctggatgagagtggtggtggtggcggcagtgaccctggagaggcccccacacgtgctgctcctggggaacttcgttctgcacggggcccactcagctctgcaccagagattgtgcacgaggacttgaagatggggtctgatggggagagtgaccaggcttcagccacgtcctcggatgaggtgcagtctccagtgagagtgcgtatgcgcaaccatcccccacgcaagatctccactgaggacatcaacaagcgcctatcactaccagctgacatccggctgcctgagggctacctggagaagctgaccctcaatagccccatctttgacaagcccctcagccgccgcctccgtcgtgtcagcctatctgagattggctttgggaaactggagacctacattaagctggacaaactgggcgagggtacctatgccaccgtctacaaaggcaaaagcaagctcacagacaaccttgtggcactcaaggagatcagactggaacatgaagagggggcaccctgcaccgccatccgggaagtgtccctgctcaaggacctcaaacacgccaacatcgttacgctacatgacattatccacacggagaagtccctcacccttgtctttgagtacctggacaaggacctgaagcagtacctggatgactgtgggaacatcatcaacatgcacaacgtgaaactgttcctgttccagctgctccgtggcctggcctactgccaccggcagaaggtgctacaccgagacctcaagccccagaacctgctcatcaacgagaggggagagctcaagctggctgactttggcctggcccgagccaagtcaatcccaacaaagacatactccaatgaggtggtgacactgtggtaccggccccctgacatcctgcttgggtccacggactactccactcagattgacatgtggggtgtgggctgcatcttctatgagatggccacaggccgtcccctctttccgggctccacggtggaggaacagctacacttcatcttccgtatcttaggaaccccaactgaggagacgtggccaggcatcctgtccaacgaggagttcaagacatacaactaccccaagtaccgagccgaggcccttttgagccacgcaccccgacttgatagcgacggggccgacctcctcaccaagctgttgcagtttgagggtcgaaatcggatctccgcagaggatgccatgaaacatccattcttcctcagtctgggggagcggatccacaaacttcctgacactacttccatatttgcactaaaggagattcagctacaaaaggaggccagccttcggtcttcgtcgatgcctgactcaggcaggccagctttccgcgtggtggacaccgagttctaagccacagaccgaggccccagcaggcagcggctggagggatgccacacccctcacagggcagcccccaactacatcttccctgcttactctctgcctacctgcctgagccatgttcacctgcccacttgtcccctgctgcctgcccaaacaccccaccattggcctgtcaacccacccattggcctgtctgctgggtgctaacaaagctctcatcactccttcacttggtctgtctgtctctgtcttggtagttgccggtggacagcatggccgtgccagcctcccacactgaggccaggtctaccccccatcataccagcccccaggaccactaccccacggccagccaggggtccagagctagcccaggctggggatctcgactcagacaagatggtgacaatgccttgagtctgaggcatcctctgcctgctttcctgcctgccccacctgcctcatattgtgtgggcctttttttgtttgtttcattcattgtttttttttttttaattattttaaatgagatttttgttttttttaaatgcaatatctctgtatacagactggctgggccccaccccctgcgtgtggccctcccacagtattttgtgcaatgaagccctgctcccagcctttcagagacagggacacagcccctatttggaaccctgatcatcaccagaccctgggattggctatgggaaagcatgccacagccactcgccttcctacccccgcccgccatccccagttgcagggggatctggggactaccagagactctgggaaatggacaaggtggggggccccactctttctctcctgcagtcccgtagctggggcctccttccttctcagggtctccccagcccagtccccttgctcccatcccactcggtgctgttgggtaggggccctgccaggaactgaccagctcagcgaggagccataatgtgcatatgtgcacaagcagggttgggggaggggggtgtgaggggttgtgcccaggtgttgccccctatctcctggggagggtgaggcagggcagggacagtctccagggtcagtccctggatgggtggttacctccccttcctccaccctaagccctggggccctgaaatggggtgggagggcaggggtgggagccctcctagtgggtttggggggttgggttcctgaatgcaccataatcgctgtatgaaatattaaaaagtctaaagtgaaaaaaaaaaaaaaaaaa

SEQ ID NO: 1630 - DNA, 3165 bp, Homo sapiens
cttcctcctcctcctcctcctcctcctccctcctcttccccaccttcctccactccctcccttcccctccccttctacctcctcctcggccagctcaggttgcagcttctctggggaactgctcacctttccggagcaggggaagctgccccgtgcccgggagggagcgggcgcaccgcggcccccaggacacgcgctgacccggctgcccagtccctcatgatcatgaacaagatgaagaactttaagcgccgtttctccctgtcagtgccccgcactgagaccattgaagaatccttggctgaattcacggagcaattcaaccagctccacaaccggcggaatgagaacttgcagctcggtcctcttggcagagaccccccgcaggagtgcagcaccttctccccaacagacagcggggaggagccggggcagctctcccctggcgtgcagttccagcggcggcagaaccagcgccgcttctccatggaggtgagggcctctggagctctgccccggcaggtggcaggatgcacgcacaagggtgtgcacaggagggcagctgccttacagccagactttgacgtcagcaagaggctctctctgcccatggatatccgcctgccccaggaattcctacagaagctacagatggagagcccagatctgcccaagccgctcagccgcatgtcccgccgggcctccctgtcagacattggctttgggaaactggaaacatacgtgaaactggacaaactgggagagggcacctatgccacagtcttcaaagggcgcagcaaactgacggagaaccttgtggccctgaaagagatccggctggagcacgaggagggagcgccctgcactgccatccgagaggtgtctctgctgaagaacctgaagcacgccaatattgtgaccctgcatgacctcatccacacagatcggtccctcaccctggtgtttgagtacctggacagtgacctgaagcagtatctggaccactgtgggaacctcatgagcatgcacaacgtcaagattttcatgttccagctgctccggggcctcgcctactgtcaccaccgcaagatcctgcaccgggacctgaagccccagaacctgctcatcaacgagaggggggagctgaagctggccgactttggactggccagggccaagtcagtgcccacaaagacttactccaatgaggtggtgaccctgtggtacaggccccccgatgtgctgctgggatccacagagtactccacccccattgatatgtggggcgtgggctgcatccactacgagatggccacagggaggcccctcttcccgggctccacagtcaaggaggagctgcacctcatctttcgcctcctcgggacccccacagaagagacgtggcccggcgtgaccgccttctctgagttccgcacctacagcttcccctgctacctcccgcagccgctcatcaaccacgcgcccaggttggatacggatggcatccacctcctgagcagcctgctcctgtatgaatccaagagtcgcatgtcagcagaggctgccctgagtcactcctacttccggtctctgggagagcgtgtgcaccagcttgaagacactgcctccatcttctccctgaaggagatccagctccagaaggacccaggctaccgaggcttggccttccagcagccaggacgagggaagaacaggcggcagagcatcttctgagccacgcccaccttgctgtggccaagggacaagagatcacatggagcacaaattcgggtaggatggagcctgtgtggccctcggaggactgaagaacgagggctgacagccagcctggaagaccgcttggcagcccttctggccacggctgtttcttctttgtgcttcccgtgtgcctccccagtagccctcacctgcataccaacccctcctttacccacgttggggctggcataagctgcttccctgagaggacatgaggggggggcggtcctcgtaccctctcccaccctggtgtttgggcacctgcgtgggatgcacacggatgacagaatcaaggcgccaggatgggcactctgccctggatacaggctctaccctcctcccccaggacctgcctagtgccagtttggtagtccccctttctggccccttggagcccacacacgtttcatctttttcccctctgagagcaagaagagacatggcatgttctctgggaccctggaatcctaggtacccacatgtgtgccaaagcctaccccacctggcaggtgtcccacagcaacagaaggaatagtagtccccactctttccatcagccctaccctaccctcattccccgacaccctctggcttgaaccatggctgagcagtgccggcatacgctttgctggcatgcttggatgcccagctgtgtccagaggtggcctgggaccgccagttgcacgcctgccacctcagccagcccccgcccagctcatcagtctgaatggagttgccttaaattggcaggtggtaccgtactcactgcccttggagctgtgaccggctcctgcctgtccaccccttcccgaggtggctcctgcttaccttatcatcccagggctctgattagccaggcctggtcagggtcctggggacggcacccagatatgcagagtcaccctgacactggtgccaggctgacctcagctcccgaaggctcgcacagcctccccatccttccttcccagcccttgtggctctgtccacctgatcccaataccagcttcccccagcccctgccaccccagagggcggccacgacagggagaggtgtagatgccaccatctgagggagaggaacgtggaacaggagcaggctctgatgctgagaggcttgcctccgggggctggaagcctgggtggccggggcccctgaagaaggctcccctctgtatcccccaggtctcctcaacactgggctgatcctgaatggcacaggccaaggggaggccagcctcgcctttctacccaggccccctgccctgcccacctcaggcccccaccctccactcctccccacggtactgtgaacgtcgtgtgactcagtgcagagacagataatatatttaattcatgtacagaaaaaaaaaaaaaaaaaaaaaa

SEQ ID NO: 1631 - DNA, 3075 bp, Homo sapiens
cttcctcctcctcctcctcctcctcctccctcctcttccccaccttcctccactccctcccttcccctccccttctacctcctcctcggccagctcaggttgcagcttctctggggaactgctcacctttccggagcaggggaagctgccccgtgcccgggagggagcgggcgcaccgcggcccccaggacacgcgctgacccggctgcccagtccctcatgatcatgaacaagatgaagaactttaagcgccgtttctccctgtcagtgccccgcactgagaccattgaagaatccttggctgaattcacggagcaattcaaccagctccacaaccggcggaatgagaacttgcagctcggtcctcttggcagagaccccccgcaggagtgcagcaccttctccccaacagacagcggggaggagccggggcagctctcccctggcgtgcagttccagcggcggcagaaccagcgccgcttctccatggaggacgtcagcaagaggctctctctgcccatggatatccgcctgccccaggaattcctacagaagctacagatggagagcccagatctgcccaagccgctcagccgcatgtcccgccgggcctccctgtcagacattggctttgggaaactggaaacatacgtgaaactggacaaactgggagagggcacctatgccacagtcttcaaagggcgcagcaaactgacggagaaccttgtggccctgaaagagatccggctggagcacgaggagggagcgccctgcactgccatccgagaggtgtctctgctgaagaacctgaagcacgccaatattgtgaccctgcatgacctcatccacacagatcggtccctcaccctggtgtttgagtacctggacagtgacctgaagcagtatctggaccactgtgggaacctcatgagcatgcacaacgtcaagattttcatgttccagctgctccggggcctcgcctactgtcaccaccgcaagatcctgcaccgggacctgaagccccagaacctgctcatcaacgagaggggggagctgaagctggccgactttggactggccagggccaagtcagtgcccacaaagacttactccaatgaggtggtgaccctgtggtacaggccccccgatgtgctgctgggatccacagagtactccacccccattgatatgtggggcgtgggctgcatccactacgagatggccacagggaggcccctcttcccgggctccacagtcaaggaggagctgcacctcatctttcgcctcctcgggacccccacagaagagacgtggcccggcgtgaccgccttctctgagttccgcacctacagcttcccctgctacctcccgcagccgctcatcaaccacgcgcccaggttggatacggatggcatccacctcctgagcagcctgctcctgtatgaatccaagagtcgcatgtcagcagaggctgccctgagtcactcctacttccggtctctgggagagcgtgtgcaccagcttgaagacactgcctccatcttctccctgaaggagatccagctccagaaggacccaggctaccgaggcttggccttccagcagccaggacgagggaagaacaggcggcagagcatcttctgagccacgcccaccttgctgtggccaagggacaagagatcacatggagcacaaattcgggtaggatggagcctgtgtggccctcggaggactgaagaacgagggctgacagccagcctggaagaccgcttggcagcccttctggccacggctgtttcttctttgtgcttcccgtgtgcctccccagtagccctcacctgcataccaacccctcctttacccacgttggggctggcataagctgcttccctgagaggacatgaggggggggcggtcctcgtaccctctcccaccctggtgtttgggcacctgcgtgggatgcacacggatgacagaatcaaggcgccaggatgggcactctgccctggatacaggctctaccctcctcccccaggacctgcctagtgccagtttggtagtccccctttctggccccttggagcccacacacgtttcatctttttcccctctgagagcaagaagagacatggcatgttctctgggaccctggaatcctaggtacccacatgtgtgccaaagcctaccccacctggcaggtgtcccacagcaacagaaggaatagtagtccccactctttccatcagccctaccctaccctcattccccgacaccctctggcttgaaccatggctgagcagtgccggcatacgctttgctggcatgcttggatgcccagctgtgtccagaggtggcctgggaccgccagttgcacgcctgccacctcagccagcccccgcccagctcatcagtctgaatggagttgccttaaattggcaggtggtaccgtactcactgcccttggagctgtgaccggctcctgcctgtccaccccttcccgaggtggctcctgcttaccttatcatcccagggctctgattagccaggcctggtcagggtcctggggacggcacccagatatgcagagtcaccctgacactggtgccaggctgacctcagctcccgaaggctcgcacagcctccccatccttccttcccagcccttgtggctctgtccacctgatcccaataccagcttcccccagcccctgccaccccagagggcggccacgacagggagaggtgtagatgccaccatctgagggagaggaacgtggaacaggagcaggctctgatgctgagaggcttgcctccgggggctggaagcctgggtggccggggcccctgaagaaggctcccctctgtatcccccaggtctcctcaacactgggctgatcctgaatggcacaggccaaggggaggccagcctcgcctttctacccaggccccctgccctgcccacctcaggcccccaccctccactcctccccacggtactgtgaacgtcgtgtgactcagtgcagagacagataatatatttaattcatgtacagaaaaaaaaaaaaaaaaaaaaaa

SEQ ID NO: 1632 - DNA, 3157 bp, Homo sapiens
cttcctcctcctcctcctcctcctcctccctcctcttccccaccttcctccactccctcccttcccctccccttctacctcctcctcggccagctcaggttgcagcttctctggggaactgctcacctttccggagcaggggaagctgccccgtgcccgggagggagcgggcgcaccgcggcccccaggacacgcgctgtgagtcccgcgggcggtgcgcctgggaggaagggggaggtcggaggagggggcaccgcggcgccgggtataaggagcaaaggacccggctgcccagtccctcatgatcatgaacaagatgaagaactttaagcgccgtttctccctgtcagtgccccgcactgagaccattgaagaatccttggctgaattcacggagcaattcaaccagctccacaaccggcggaatgagaacttgcagctcggtcctcttggcagagaccccccgcaggagtgcagcaccttctccccaacagacagcggggaggagccggggcagctctcccctggcgtgcagttccagcggcggcagaaccagcgccgcttctccatggaggacgtcagcaagaggctctctctgcccatggatatccgcctgccccaggaattcctacagaagctacagatggagagcccagatctgcccaagccgctcagccgcatgtcccgccgggcctccctgtcagacattggctttgggaaactggaaacatacgtgaaactggacaaactgggagagggcacctatgccacagtcttcaaagggcgcagcaaactgacggagaaccttgtggccctgaaagagatccggctggagcacgaggagggagcgccctgcactgccatccgagaggtgtctctgctgaagaacctgaagcacgccaatattgtgaccctgcatgacctcatccacacagatcggtccctcaccctggtgtttgagtacctggacagtgacctgaagcagtatctggaccactgtgggaacctcatgagcatgcacaacgtcaagattttcatgttccagctgctccggggcctcgcctactgtcaccaccgcaagatcctgcaccgggacctgaagccccagaacctgctcatcaacgagaggggggagctgaagctggccgactttggactggccagggccaagtcagtgcccacaaagacttactccaatgaggtggtgaccctgtggtacaggccccccgatgtgctgctgggatccacagagtactccacccccattgatatgtggggcgtgggctgcatccactacgagatggccacagggaggcccctcttcccgggctccacagtcaaggaggagctgcacctcatctttcgcctcctcgggacccccacagaagagacgtggcccggcgtgaccgccttctctgagttccgcacctacagcttcccctgctacctcccgcagccgctcatcaaccacgcgcccaggttggatacggatggcatccacctcctgagcagcctgctcctgtatgaatccaagagtcgcatgtcagcagaggctgccctgagtcactcctacttccggtctctgggagagcgtgtgcaccagcttgaagacactgcctccatcttctccctgaaggagatccagctccagaaggacccaggctaccgaggcttggccttccagcagccaggacgagggaagaacaggcggcagagcatcttctgagccacgcccaccttgctgtggccaagggacaagagatcacatggagcacaaattcgggtaggatggagcctgtgtggccctcggaggactgaagaacgagggctgacagccagcctggaagaccgcttggcagcccttctggccacggctgtttcttctttgtgcttcccgtgtgcctccccagtagccctcacctgcataccaacccctcctttacccacgttggggctggcataagctgcttccctgagaggacatgaggggggggcggtcctcgtaccctctcccaccctggtgtttgggcacctgcgtgggatgcacacggatgacagaatcaaggcgccaggatgggcactctgccctggatacaggctctaccctcctcccccaggacctgcctagtgccagtttggtagtccccctttctggccccttggagcccacacacgtttcatctttttcccctctgagagcaagaagagacatggcatgttctctgggaccctggaatcctaggtacccacatgtgtgccaaagcctaccccacctggcaggtgtcccacagcaacagaaggaatagtagtccccactctttccatcagccctaccctaccctcattccccgacaccctctggcttgaaccatggctgagcagtgccggcatacgctttgctggcatgcttggatgcccagctgtgtccagaggtggcctgggaccgccagttgcacgcctgccacctcagccagcccccgcccagctcatcagtctgaatggagttgccttaaattggcaggtggtaccgtactcactgcccttggagctgtgaccggctcctgcctgtccaccccttcccgaggtggctcctgcttaccttatcatcccagggctctgattagccaggcctggtcagggtcctggggacggcacccagatatgcagagtcaccctgacactggtgccaggctgacctcagctcccgaaggctcgcacagcctccccatccttccttcccagcccttgtggctctgtccacctgatcccaataccagcttcccccagcccctgccaccccagagggcggccacgacagggagaggtgtagatgccaccatctgagggagaggaacgtggaacaggagcaggctctgatgctgagaggcttgcctccgggggctggaagcctgggtggccggggcccctgaagaaggctcccctctgtatcccccaggtctcctcaacactgggctgatcctgaatggcacaggccaaggggaggccagcctcgcctttctacccaggccccctgccctgcccacctcaggcccccaccctccactcctccccacggtactgtgaacgtcgtgtgactcagtgcagagacagataatatatttaattcatgtacagaaaaaaaaaaaaaaaaaaaaaa

SEQ ID NO: 1633 - DNA, 1677 bp, Homo sapiens
cccgggcgtctccccgcaacctcctcaacttccctagtcagtgacgcggcgccggccagaaatccgaccggaccgggctcgggggagcgtgagttgcagcatgtgccgaagcgccacctcagaagataaaaagaaatgagtctcatatttggcattcttttagttaaaagaagatggatgcacagtgttcagccaaggtcaatgcaaggaagaggagaaaagaggcgcccggacccaacggggcaacagaagaagatggggttccttccaaagtgcagcgctgtgcagtgggcttacggcaaccagctcctttttctgatgaaattgaagttgactttagtaagccctatgtcagggtaactatggaagaagccagcagaggaactccttgtgagcgacctgtgagagtttatgccgatggaatatttgacttatttcactctggtcacgcccgagctctgatgcaagcgaagaaccttttccctaatacgtacctcattgtgggagtttgcagtgatgagctcacacacaacttcaaaggcttcacggtgatgaacgagaatgagcgctatgacgcagtccagcactgccgctacgtggatgaggtggtgaggaatgcgccctggacgctgacacccgagttcctggccgaacaccggattgattttgtagcccatgatgatattccttattcatctgctggcagtgatgatgtttataagcacatcaaggaggcaggcatgtttgctccaacacagaggacagaaggtatctccacatcagacatcatcacccgaattgtgcgggattatgatgtgtatgcgaggcggaacctgcagaggggctacacagcaaaggagctcaatgtcagctttatcaacgagaagaaataccacttgcaggagagggttgacaaagtaaagaagaaagtgaaagatgtggaggaaaagtcaaaagaatttgttcagaaggtggaggaaaaaagcattgacctcattcagaagtgggaggagaagtcccgagaattcattggaagttttctggaaatgtttggtccggaaggagcactgaaacatatgctgaaagaggggaagggccggatgctgcaggccatcagcccgaagcagagccccagcagcagccctactcgcgagcgctccccctccccctctttccgatggcccttctccggcaagacttccccaccttgctccccagcaaatctctccaggcacaaggctgcagcctatgatatcagtgaggatgaagaagactaatgtttcctccctcctttcctgtcctccctttctgtcccattaccttcagaagctctctgttgaattccaaattgtgaccccaacactaaacctaaggacagctacaaaggaaagacaactggggaaagaagacctaggactgggggaacccaaacagcctgtcctgcaagtgacatcactcacccacacgaaggagggggactgcaccttagaagcctgctctgcatccatttacccccccccaagggctttgtttcactgtttatgttcacgtgatctcaacagggaaattgtcattttctttaaaaaaaaaaaaaaaaaaaaaaaaaaaaaaaaaaaaaaaaaaaaaaaaaaaaaaaaaaaaaaaaaaaaaaaaaaaaaaaaaaaaaaaaaaaaaaaa

SEQ ID NO: 1634 - DNA, 6416 bp, Homo sapiens
gggtatcctggtctccgcgtgtgtgagtaccgcggcgcgaggttagtggtagctgggtgcagacgccgtggcgctggagacccaaacatggcaaacctggaagaaagcttcccccgaggaggtacaagaaagatccacaaaccagagaaagctttccagcagtcagttgaacaagacaacttatttgatatttctactgaagagggatccaccaaaagaaaaaagagccagaaggggccagcaaaaacaaaaaagttgaaaatcgaaaagagagaaagcagcaagtccgcaagagagaagtttgaaatccttagtgttgagtccctgtgtgagggaatgcgtattttgggttgcgtgaaagaggtgaatgaactggaactggtgattagtctccccaatggcctccagggctttgtgcaagtcactgaaatctgtgatgcctacaccaaaaagctgaatgagcaggtgacacaagaacaacctctgaaggacctacttcacttgcctgaacttttctcacctggaatgctggtaagatgtgtggtgagcagtctgggcatcacagacaggggcaagaagagtgtcaagctgtctctgaaccccaaaaatgtcaacagagtgctgagtgctgaggccctgaagcctggcatgctacttacaggtaccgtatccagcctggaagaccatggctacctagtggacattggtgttgatgggaccagagcttttctgccactgctgaaagcccaggagtacatcagacagaagaacaaaggtgctaaactaaaggtgggtcagtacctgaactgcattgttgaaaaggtgaaaggcaacggaggagttgttagtctgtctgttggtcactcagaggtttctacggccattgctactgaacagcagagctggaaccttaataacttgctaccaggactggtggtcaaagctcaggtacagaaggtgactccatttggccttacgctaaacttcctcacattcttcacgggcgtggttgactttatgcacctggatcccaagaaagctggaacatatttctcaaatcaggcagtgagggcctgcatcctttgcgtccatcctcgaaccagagttgtgcacctgagcctgcgccccatcttcctacagcctggacgcccactcacccgactctcttgccagaaccttggagcagtgctggatgatgttcctgtccagggttttttcaaaaaggctggggccacctttaggctgaaggatggggttctggcctatgcccggctcagccatctctctgattctaagaacgtcttcaatcctgaggccttcaagccagggaacactcacaagtgtagaattattgactacagccaaatggatgaactggccttgctctctctacgaacgtctattattgaagctcagtaccttagatatcatgacatcgaacctggggcagtggtaaagggcacagtgctaaccataaagtcatatgggatgctggtgaaggtgggcgagcagatgaggggcctggtacctcccatgcacctggctgacatcctgatgaagaatccggagaagaagtaccacatcggggatgaggtcaagtgccgggttttgctttgtgaccctgaagccaagaagctgatgatgaccctgaaaaaaaccctgattgagtccaaactacctgtcattacctgctatgccgatgccaagcctggtctgcagacacatggcttcatcatcagggtcaaggactatggctgcattgtgaagttctacaacaatgtgcagggactggtgcccaagcatgagctcagtactgagtatatccctgacccggagagagttttttacactggccaggtggtgaaggttgtcgtattgaactgtgagccatccaaagagaggatgctcttatccttcaagctgtcgagtgatccagagccaaagaaagagcctgcaggacacagtcagaagaaaggaaaagccattaacattgggcagttggtagatgtgaaggttttagagaagaccaaagatgggctggaggtggctgtcctgccccacaacatccgtgctttcctccccacatctcatctgtcggaccacgttgccaacggcccattgttacatcattggctccaggcaggtgacatccttcaccgagtcctgtgtctgagccagagcgaggggcgtgttcttctttgcaggaagccagccttggtctccacagtagaaggtggccaggatcccaagaacttctcagaaatccatcctggaatgctgctcattggttttgtgaagagcatcaaggactatggcgtgttcatccagttcccctcaggtcttagcggactggccccaaaagctatcatgagtgacaaatttgtgacctccacaagtgaccactttgttgagggccagacagtagcggcaaaggtgaccaatgtggatgaggagaagcagcggatgctgctgtcactgcggctgtcggactgtggtctgggggacttggctatcaccagcctcctcctcctgaatcagtgcctggaggagctgcagggcgtgcgcagccttatgagcaaccgagactctgtgttgatccagacgctggccgagatgaccccaggaatgttccttgacctagtggtgcaggaggtgttggaagatggctctgtggtattcagtgggggtccagtgcccgacctggtcctgaaagccagcagataccatcgcgcagggcaggaggtggaatctgggcagaaaaagaaggttgttatcttaaatgttgatcttttgaagttggaagtgcacgtttcccttcaccaggacttggtgaatagaaaagctagaaagctgaggaaaggcagcgaacaccaggcgattgtgcagcacttggagaagtcctttgccattgcctccttggtagagacgggccacctggcagctttctccctgacctctcacctcaacgacaccttccgctttgactcagagaaattgcaggtgggacagggtgtctccctaaccctcaagaccacagaaccaggagtgactggccttcttttggctgtggaggggccggctgccaagaggaccatgaggccgacccagaaggactctgagacagttgatgaggatgaagaagtggatccagctctgactgtagggaccataaagaagcacaccctctccatcggggacatggtcacagggactgtcaagtccattaagcctacccatgtggttgtgactctggaagatggcattattggctgtatccatgcctcccacattctagatgatgttccagagggcacctctcctactaccaagctgaaggttgggaagacggtcactgcccgagtgattggcgggcgagacatgaagacattcaagtatctcccaataagtcaccccagattcgttcgaaccatcccggagctgagtgttcggccaagtgagctggaggatggccacactgctcttaacactcactctgttagccccatggagaagattaaacagtaccaggccggccagactgttacttgcttcttaaagaaatacaatgtggtgaagaaatggcttgaggtggagattgccccagacatccgggggagaattcccttattgctcacttctctgagcttcaaggttctgaagcatccagataagaagttccgggttggccaggccctgagggccaccgttgttggcccagattcctccaagaccctcttatgtctgtccctcacaggtcctcacaagcttgaggaaggggaagtggccatgggccgagtggtgaaggtgactcccaacgaggggctgaccgtctccttcccctttgggaagataggaacagtcagtatatttcacatgagtgactcctactccgagacgcccctggaagacttcgtcccccagaaggttgtcagatgttacatcctgtccactgcagacaacgtattgactttgtcgctgcgatcatccagaacaaacccggagacgaaaagcaaagtagaagatccagagattaactccatccaggacattaaggaagggcagcttctgaggggctatgtagggtccatccagccacacggtgtgttctttcgccttggcccctccgttgtgggtttggctcggtactcccatgtctcccagcacagcccgtccaagaaagccctttataacaaacacctccctgaagggaagctgctcacagccagggtcctacgccttaaccaccagaagaacctggtagagctgtctttcctccccggagacactgggaagccagacgtgctttctgcttccttggaagggcaacttacaaagcaagaggagaggaaaacagaggctgaggagagagaccaaaaaggggaaaagaaaaatcagaaaaggaacgagaagaagaaccagaaggggcaggaggaggtggagatgcccagcaaggagaagcaacagccccagaagccacaggcgcagaagcggggcgggcgggagtgccgggagtctgggagtgagcaggaaagagtgagcaagaagccaaagaaagccggcctgtcagaggaggacgacagccttgtggacgtgtactatcgggagggaaaagaggaggcagaagagacgaatgtgctgcccaaggagaagcaaaccaagccagcagaagcgccccggctgcagctgtcttcaggcttcgcttggaatgtgggactagactctctgaccccggccttgccacctctagcagagagctcagacagcgaggaggatgagaagccacaccaagccacgataaagaaaagcaagaaagaaagggagttggagaagcagaaggcagagaaggaactgtcccgcattgaggaggcgctgatggatcctgggcggcagccagagtccgcggatgattttgaccgactggtgctgagctcccccaacagctccattctgtggctgcagtacatggctttccacctgcaggccacggagatcgagaaggcccgtgccgtggctgagagggcccttaagaccatctccttcagagaggagcaggagaagctgaacgtgtgggtggctctgctgaacctggagaacatgtacggctctcaggagtccctgaccaaggtctttgagcgagccgtgcagtacaacgagcctctcaaagtctttctccacctggctgacatctacgccaagtcagagaaattccaggaagctggtgaactctacaaccggatgctgaagcgtttccggcaggagaaagctgtgtggatcaaatacggcgccttccttctgcggaggagccaggctgcagccagtcaccgcgtgctgcagcgagccctggagtgcctgcctagcaaggagcatgtggatgtcattgccaagtttgcccagcttgagtttcagctgggggatgcagagcgggccaaagccatttttgagaacacgctgagcacctacccaaagcgcacagatgtctggtcggtctatatcgacatgaccatcaagcacggcagccagaaggacgtccgggacatctttgagcgggtcattcatctgagcttggcccccaagagaatgaagttcttcttcaagcgctacctggactacgagaagcagcatggcactgagaaggatgtgcaggcagtcaaggccaaggccctggagtatgtggaggccaagagctcagtgctagaggactagtggcaggctggctctgtgggacactgtcaacaatgggccagcccggccccgcctcgagtgcctgggcactcggaaaactgttacctcaggactctatttaaatgctgctttttctgcagcacgcttggggaaatcctgtcaggatgaaaaggaagttgagattttttaaatccctcttcgcttgctttattttcagtaccaacttgttatctttttccttatctgaggctacctggggattgtgggcagcaggcccctggactcccagaaatgctgagggtccctcttccaggggagttccctggggagcaagagtagaggggctattcccgagggtcctgtggtcagggtcctgctttgtccctggcaggctgtcagtccagctggagggggtcagtaggctccagggagtgggccctcccctccgatcttggagtctctgggtgttccttcagcctcagcctcactggtaccttctgccctttaggggaggctatgagtctgggacaggaggacaaattcagagcccagagggggaaatggagaaacctgggctgctgaggaaagccacgggtgttggcgtgaactgatgatgtctcatcccacgcccactatggccacattacctaacctctccatatctgggctattcaaggtcttggaggccagcacagacccagctagttgttgaagccagttcttttttgtcttgg

SEQ ID NO: 1635 - DNA, 4476 bp, Homo sapiens
gcagcggcggcagccagaacaggagcagcgatagctcgggtttccggaacaggagccggggcagcggcggcagctcagtgctgggcacctgtgcggagcaggagtagcaggaccacggggtggggtcggcgccagccactctgagccagagaaggaaggggcatctcccagattccactgctgggaataatctccaggggaggtggcgctgaactgggaatactggtgggggtgaacatgtgcaggaacagctagaggcctcggggcaggaaaacatttggttcacgtgtaaacaggcaaggaaagctgtctgggaccatggcagcctcccgcctggactttggggaggtggaaactttcctggacaggcacccagagttgtttgaagattacttgatgcggaaggggaagcaggagatggttgaaaagtggctgcagaggcacagtcagggtcagggggctttaggtccaaggccctctttggctggtaccagcagcttggctcacagcacctgcagaggtggcagcagcgttggtggtggcactggaccaaatggctctgcccacagccagccccttcccggtggcggggactgtggtggggttcccttgagtcccagctgggccggtggcagcaggggcgatgggaacctgcagcggagagcttctcagaaagagctaaggaagagttttgcccgctccaaggccatccacgtgaacaggacctacgatgaacaggtgacctcccgggctcaggaacccctgagtagtgtacgacggagggcacttctccggaaggcaagctccctgccccccaccacagcccatattctcagtgcgctgctggaatcgagagtgaatctgcctcagtatccccctacagccatcgactacaagtgccatctgaaaaagcataatgagcgtcagttctttctggaattggtcaaagatatctccaatgaccttgacctcaccagcctgagctacaagattctcatctttgtctgccttatggtggatgctgaccgctgctctcttttcctggtggaaggggcagctgctggcaagaagaccttggtctccaaattctttgatgtgcatgcaggaacccctctgctgccttgcagcagcacagagaactcaaatgaggtgcaggtcccctggggcaaaggtatcattggctatgtcggggagcatggagaaacggtcaacattcctgatgcctaccaggatcgacgattcaatgatgaaatcgacaagctaactggatacaagacaaaatcattattgtgcatgcctatccgaagcagtgatggtgagattattggtgtggcccaagcgataaataagattcctgaaggagctccatttactgaagatgatgaaaaagttatgcagatgtatcttccattttgtggaatcgccatatctaacgctcagctctttgctgcctcaaggaaagaatatgaaagaagcagagctttgctagaggtggttaatgacctctttgaagaacagactgacctggagaaaattgtcaagaaaataatgcatcgggcccaaactctgctgaaatgtgaacgctgttctgttttactcctagaggacatcgaatcaccagtggtgaaatttaccaaatcctttgaattgatgtccccaaagtgcagtgctgatgctgagaacagtttcaaagaaagcatggagaaatcatcatactccgactggctaataaataacagcattgctgagctggttgcttcaacaggccttccagtgaacatcagtgatgcctaccaggatccgcgctttgatgcagaggcagaccagatatctggttttcacataagatctgttctttgtgtccctatttggaatagcaaccaccaaataattggagtggctcaagtgttaaacagacttgatgggaaaccttttgatgatgcagatcaacgactttttgaggcttttgtcatcttttgtggacttggcatcaacaacacaattatgtatgatcaagtgaagaagtcctgggccaagcagtctgtggctcttgatgtgctatcataccatgcaacatgttcaaaagctgaagttgacaagtttaaggcagccaacatccctctggtgtcagaacttgccatcgatgacattcattttgatgacttttctctcgacgttgatgccatgatcacagctgctctccggatgttcatggagctggggatggtacagaaatttaaaattgactatgagacactgtgtaggtggcttttgacagtgaggaaaaactatcggatggttctataccacaactggagacatgccttcaacgtgtgtcagctgatgttcgcgatgttaaccactgctgggtttcaagacattctgaccgaggtggaaattttagcggtgattgtgggatgcctgtgtcatgacctcgaccacaggggaaccaacaatgccttccaagctaagagtggctctgccctggcccaactctatggaacctctgctaccttggagcatcaccatttcaaccacgccgtgatgatccttcaaagtgagggtcacaatatctttgctaacctgtcctccaaggaatatagtgaccttatgcagcttttgaagcagtcaatattggcaacagacctcacgctgtactttgagaggagaactgaattctttgaacttgtcagtaaaggagaatacgattggaacatcaaaaaccatcgtgatatatttcgatcaatgttaatgacagcctgtgaccttggagccgtgaccaaaccgtgggagatctccagacaggtggcagaacttgtaaccagtgagttcttcgaacaaggagatcgggagagattagagctcaaactcactccttcagcaatttttgatcggaaccggaaggatgaactgcctcggttgcaactggagtggattgatagcatctgcatgcctttgtatcaggcactggtgaaggtcaacgtgaaactgaagccgatgctagattcagtagctacaaacagaagtaagtgggaagagctacaccaaaaacgactgctggcctcaactgcctcatcctcctcccctgccagtgttatggtagccaaggaagacaggaactaaacctccaggtcagctgcagctgcaaaatgactacagcctgaagggccattttcagtccagcaatgtcatccttttgttcttttagctcagaaagacctaacatctcaaggatgcactgggaaccatgcctgggctttcaccttgaagcatggtcagcagcagagagagcaacgggaaggacaaagaaagaggtggggcagggagcacaccccaggaccctcacttttccctaatgaacacgcatgggctgaaatgaaggctctgggtaggggactgttttggatccaaggacctgtggacagtcggcctacttactctgagctgagggaacactgaacagtaaaagcgtcattagcgctgcttcattttgtatagggcttttctgtttgttacaagccaaacattgcctgtctttgcttcccgtccctgaatgcctttttgtgccagactgtcccaagaatcctaatttgtattccatagaggtattttatttttaatcctagagcttcttattgatggatcctttagaattgcctacctaaaaggtaaactatactatccttataaatactgatcaatcccagttctccccctaaaaatgaatacatagtaggactatagcaaatgtgtttgatgggtaattctagactgggactatggtacccttttccagagttttaaaattcaaccttcattacagacaaagttttctcccagaaggaatggattgatagattttgattaaagtaagggtggaaggaaatctgtagctggatttaccacaagtgacatctagaaactatagttcacaggacagagcagagccatggagaataagcattgactaccttgagttctcctagtgaggagttctggtataaaatttaagattactaccagtaaccaacttaaagcaaactataggggtccctaattttggatttttccttaagtgtaagaaacaatgcttcaaatgttaagaaataacagtctgggcaaagaacgcatattctataggaagccaggtttacaataggtaagaataaactgtattaagtagatgtaatgactagaaagctgctttgctccctatattgagaaattgtggacatggtatgtgttatccaaagaacattgggctagaagatagatttctatccttagctttggcattattgactggattgacttgaacaagtcgcttaacttctacaagcttgtttccttatttgtcaaattagattacactaggaaacgattctcgaacatgttttaaccttacaactctttgttcaaataaatctttcaatgaatccccaacataaaaaaaaaaaaaaaaaaaaaaaaaaaaaa

SEQ ID NO: 1636 - DNA, 5346 bp, Homo sapiens
atgggacccaggcaggactccgcagtggtgcaccatctgggcatcgacagctcctcggtgtcggccccaccttgagccccagttccaccttctaccgcttcagcacctccggcgcggacagctcctcgctgtcgcctccactcccggccctgggccggacccgggagcagacgctcctcggcgcccgctcacggggacgagtcctgctccctgctatcccagacccctttctctggcgcatggagaacctgggggtcggcgaaggggcagaggcttgcagcaggttgagtcgctctcgcggccgccacagcatgaccagagccccgaagcacctgtggcggcaaccccggcgccccatccgcatccaacagcgcttctattcggatccggacaagtccgcgggctgccgcgagagggacctgagcccgcggccggagctcaggaagtcgcggctctcctggcccgtttcctcctgcaggcgctttgacctggaaaatgggctctcgtgtgggaggagggccctggaccctcagtccagccctggcctgggccggattatgcaggctccagtcccgcacagccagcggcgcgagtccttcctgtaccgctcagatagcgactatgaactctcgcccaaggccatgtctcggaactcctctgtggccagcgacctacatggagaggacatgattgtgacgccctttgcccaggtcctggccagtctgcggaccgttcggagcaacgtggcggcccttgcccgccagcaatgcctaggagcagccaagcagggacccgtcggaaacccttcatccagcaatcagctccctcctgcagaggacacggggcagaagctggcattggagacgctagacgagctggactggtgcctggatcagttggagacgctgcagacccggcactcggtgggggagatggcctccaacaagttcaagcggatcctgaaccgggagttgacccacctgtccgaaaccagccgctccgggaaccaggtgtccgagtacatctcccggaccttcctggaccagcagaccgaggtggagctgcccaaggtgaccgctgaggaggccccacagcccatgtcccggatcagtggcctacatgggctctgccacagtgccagcctctcctcagccactgtcccacgctttggggtccagactgaccaggaggagcaactggccaaggagctagaagacaccaacaagtggggacttgatgtgttcaaggtggcggagctaagtgggaaccggcccctcacagctatcatattcagcatttttcaggagcgggacctgctgaagacattccagatcccagcagacacactggccacctacctgctgatgctggaaggtcactaccacgccaatgtggcctaccacaacagcctacatgccgccgacgtggcccagtccacgcatgtgctgctggctacgcccgccctcgaggctgtgttcacagacttggaaatcctggctgccctctttgcaagcgccatccacgacgtggaccatcctggggtctccaaccagtttctgattaacaccaactcagagctggcgcttatgtacaacgacgcctcggtgctggagaaccatcacctggctgtgggcttcaagctgctgcaggcagagaactgcgatatcttccagaacctcagcgccaagcagcgactgagtctgcgcaggatggtcattgacatggtgctggccacagacatgtccaaacacatgaacctcctggccgacctcaagaccatggtggagaccaagaaggtgacaagcctcggtgtcctcctcctggacaactattccgaccgaatccaggtcttgcagaacctggtgcactgtgctgatctgagcaaccccaccaagccgctgcccctgtaccgccagtggacggaccgcatcatggccgagttcttccagcagggagaccgcgagcgtgagtcgggcctggacatcagtcccatgtgtgacaagcatacggcctcagtggagaagtcccaggtgggtttcattgactacattgctcacccactgtgggagacttgggctgacctggtccacccagatgcacaggacctgctggacacgctggaggacaatcgagagtggtaccagagcaagatcccccgaagtccctcagacctcaccaaccccgagcgggacgggcctgacagattccagtttgaactgactctggaggaggcagaggaagaggatgaggaggaagaagaggagggggaagagacagctttagccaaagaggccttggagttgcctgacactgaactcctgtcccctgaagccggcccagaccctggggacttacccctcgacaaccagaggacttagggccagccctgcgtgaactgcaggggcaatggatggtaaagccctttggctcttggcaggcagactttccaggaagaggctccatgtggctcctgcttcactttcccacccatttagggagacaatcaagctcttagttataggtggctcccagggtctaattggaggcacctggctggggtccactctgaccctagacttgcctaaaagagctctctaaggggcagcctcttacgatgccctggtgtctttctcctgggcttctatccctgtgaggagaggtgctgtctgctggagcctctagtccaccctctccagtggtcactcttgagtcacatctgtcacttaattatttccttctttatcaaatatttattgctcatctacttcgtgccagctttctgcctctgtagtagccctgcacaaagggtggggagtcaggagaccatcccaaaggcatctccctgtcttcctctaccaagcggctctctgcaagagcatggaaatgtgagtggggaaaattttcagcaccaaagcttcactcatacccagttttgtttctgaaactacggtagggggcaggaagaggagcagaaaagaagggctgggcaaggcatagtggcttatgcctgtaatcccggtactttgggaggctgaggtgggaggactgcttaagctcaggagtttgagaccagcctgggcaacatagcaagacccccaccatctctgaaaaaaaaaattagccaggcatggtggtgtgcacctgagaatcccagctactcagaaggttgagacaaaggggatcgcttgagcccaggagttggaggctgaagagagctatgactgcatcactgcactccagcctgggcaacacagcaagatcctgtctaaaaataaaaagaaaagagaaggaaaggaaagagacggggctctgaggccgagcacagtggcccatgcctataatcccagcactttgggaggctgaggcaggtggatcacctgaggttaggagttcgagaccagcctggccaacatggtgaaaccccatctctactaaaaatacaaaaattggctgggcatggtggcgggtgcctgtaatcccagctactggggaggctgaggcaggagaatcacttgaattcaggaggtggaggttgcagtgagccgacatcatgccactgcactccagcctgggcgacagagcaagacactgtctcaaaaaagaaaagaaaaaaaaaaaagccgggccaggtggctcacgcctgtaatcctagcactttgggaggctgagtgggggtggatcgcctgagatcaggagttcaaaatcagcctggccaacatagtgaaaccctgtctctactaaaaatacaaaaaattagaggctgggtgcggcggctcacacctgtaatcccagaactttgggaggccgaggcgggtggatcacgaggtcaggagttcaagaccagcctggccaacacggtgaaaccccatctctactaaaaatacacaaattagctgggcatggtgttgggtgcctgaatcccagctactcgggaggctgaggcaggagaatcgcttgaatccgggaggcggggcttgcagtgagccgagatcgtgccattgcactccagcctgggtgacagagcaagactccgtctcaaaaagaaaaaaaaaaaattagccaggcatggtggcaggtgcctgtaatcccagctacttgagaggctgaggcaggagaatcgcttgaacccgggaggtggaggttgtggtgagccgaggtcgcgccactgcactccagcctgggcaacgacaacaacaataaaaagagggggctctgtgcccggcatgtctctgaagactgattgaacctatgcaccagttgttgctttaagtcgctttattttctgtctttggtgtctctggatgtaggagccccctgctttctctgtccgcagaactccatactgggtcccctacgtgttcctccttccctaggacagcaacaaaaacacacaattttccctctctagcaggtctctaagtctcctgattcctgaaactgcctcagactccccctagagggagggaggcccctgaggctttcttgccatcatagcctcttctgggcctcagtttcccctctgtaacctgatcctagtacttggataaactccgacgaggtgtggggggttgttgtctgtgacctccctgaaatatcttagacatttggggtactgagcatttatctggggttaaataaaatctttacatcttaagacattcgattgaccaaattgagtgtcctggccatttcactgatgaggaaactgaggcgcagagaggtcctcttgccagctcaaagtcaagcatctgggcgcccaatgttagccagcggcaccccctggtggcgggcgtgggagacacggcggggcgcgcttgtcgggggttggggggtgggtcggaggggtggcatcctccagccctgatggtcccacttaccgcacctcgccgggaagagctcgtcctgctggtcgggcctccgagcggactgggcagcaccatgctcaagcctagggttcgatccccgcctccggaagcctcagtatccatccctcccctctgcctccctcttcgcgtgcctgaatatttatacaagatacaggcgtcatcacagccgccctcggcttccagagcagctggcttcgttcataaatattataaccactcagaattcatcatcatcacagttaatgataaaattccacagtgccagaactaaaagtcatccgggttcacgaacttggtgcatttccttccagacttttaaaaagaagatatttagggaatttttttttcaagatttttccccccagtccgcttacaaagtaataccatgttcgctgtaaaaaatttggaaataatggaaatgtataaagaaggaaataaaattctgctgtatctccaccca

SEQ ID NO: 1637 - DNA, 726 bp, Homo sapiens
aaagaaggcagctgggcagctgataggaacaacattcagctccgaggctgaaagggaaacatcagccgcccggggggagttaaaatgagtgacaacactactctgcctgctccagcttcaaaccagggtcctaccaccccacgcaaaggccctcccaagttcaagcagaggcagactcgccaattcaagagtaaacctccaaagaaaggtgtgaaaggatttggagatgacattccaggaatggaggggctaggaacagatatcacagtgatttgtccatgggaggcattcagccacctggaattgcatgagctcgctcagtttgggattatctgaagtgccagaggttctgccactctcaatgacatctgctgtaattttggttgcttttgccctgttgatctgccggagtcttgaaattcagctgattggaagtggtttctttgactttcaaggtcattccctatcagttactactaagagttctcttactgtcagaatctctcttgcagtacagctcaaaatagtggatgcatttcaaacttgaccaccttttcctaccagctagttagaagtcatcaatatttctctacattttgtttatctgtaagtcctttaaatctatttttgctaggcattcattatgattaatagtagacttttaagacaacatttatgtcactccccacctcctcatatttaataaaggagatatttaccttgaaa

SEQ ID NO: 1638 - DNA, 1739 bp, Homo sapiens
ggggatcactgttggaaggcagctgcttgaggtccaaggcagtcagtgtcccctctcttttgcctcgggacagctggtatttatcagactcctaagaagttttccttgctccctagtagaagagagagattatgcagcgggcttttgattgatccaatgggaattacattgatctggtgtctggccttggttcttatcaagtggatcacctctaagaggcgtggagctatttcctatgacagttctgatcagactgcattatacattcgtatgctaggagatgtacgtgtaaggagccgagcaggatttgaatcagaaagaagaggttctcacccatatattgattttcgtattttccactctcaatctgaaattgaagtgtctgtctctgcaaggaatatcagaaggctactaagtttccagcgatatcttagatcttcacgcttttttcgtggtactgcggtttcaaattccctaaacattttagatgatgattataatggacaagccaagtgtatgctggaaaaagttggaaattggaattttgatatctttctatttgatagactaacaaatggaaatagtctagtaagcttaacctttcatttatttagtcttcatggattaattgagtacttccatttagatatgatgaaacttcgtagatttttagttatgattcaagaagattaccacagtcaaaatccttaccataacgcagtccacgctgcggatgttactcaggccatgcactgttacttaaaggaacctaagcttgccaattctgtaactccttgggatatcttgctgagcttaattgcagctgccactcatgatctggatcatccaggtgttaatcaacctttccttattaaaactaaccattacttggcaactttatacaagaatacctcagtactggaaaatcaccactggagatctgcagtgggcttattgagagaatcaggcttattctcacatctgccattagaaagcaggcaacaaatggagacacagataggtgctctgatactagccacagacatcagtcgccagaatgagtatctgtctttgtttaggtcccatttggatagaggtgatttatgcctagaagacaccagacacagacatttggttttacagatggctttgaaatgtgctgatatttgtaacccatgtcggacgtgggaattaagcaagcagtggagtgaaaaagtaacggaggaattcttccatcaaggagatatagaaaaaaaatatcatttgggtgtgagtccactttgcgatcgtcacactgaatctattgccaacatccagattggttttatgacttacctagtggagcctttatttacagaatgggccaggttttccaatacaaggctatcccagacaatgcttggacacgtggggctgaataaagccagctggaagggactgcagagagaacagtcgagcagtgaggacactgatgctgcatttgagttgaactcacagttattacctcaggaaaatcggttatcataacccccagaaccagtgggacaaactgcctcctggaggtttttagaaatgtgaaatggggtcttgaggtgagagaacttaactcttgactgccaaggtttccaagtgagtgatgccagccagcattatttatttccaagatttcctctgttggatcatttgaacccacttgttaattgcaagacccgaacatacagcaatatgaatttggcttt

SEQ ID NO: 1639 - DNA, 5387 bp, Homo sapiens
cagtcagttggtctgggcactgcagcaggctcggctctgtcccagcacttgtctgggagaaaagtggtgttactcacccagggagagtctctctttctaccttccttctttctcgatctccttgtgtgcttttgtgtttctttatttcttttccttttttttctttttttttttttgttacttaattatattcctaatcctggatgaagttgctggattctgcagcacaagtcttcatgaacaagcagcaccgctcagagatttcacggcattcaaaggtcacagaactgccactatggttaaatgtcttgtttaatggttgagaggtgtggcgaaatcttgtttgagaaccccgatcagaatgccaaatgtgtttgcatgctgggagatatacgactaaggggtcagacgggggttcgtgctgaacgccgtggctcctacccattcattgacttccgcctacttaacagtacaacatactcaggggagattggcaccaagaaaaaggtgaaaagactattaagctttcaaagatacttccatgcatcaaggctgcttcgtggaattataccacaagcccctctgcacctgctggatgaagactaccttggacaagcaaggcatatgctctccaaagtgggaatgtgggattttgacattttcttgtttgatcgcttgacaaatggaaacagcctggtaacactgttgtgccacctcttcaatacccatggactcattcaccatttcaagttagatatggtgaccttacaccgatttttagtcatggttcaagaagattaccacagccaaaacccgtatcacaatgctgttcacgcagccgacgtcacccaggccatgcactgctacctgaaagagccaaagcttgccagcttcctcacgcctctggacatcatgcttggactgctggctgcagcagcacacgatgtggaccacccaggggtgaaccagccatttttgataaaaactaaccaccatcttgcaaacctatatcagaatatgtctgtgctggagaatcatcactggcgatctacaattggcatgcttcgagaatcaaggcttcttgctcatttgccaaaggaaatgacacaggatattgaacagcagctgggctccttgatcttggcaacagacatcaacaggcagaatgaatttttgaccagattgaaagctcacctccacaataaagacttaagactggaggatgcacaggacaggcactttatgcttcagatcgccttgaagtgtgctgacatttgcaatccttgtagaatctgggagatgagcaagcagtggagtgaaagggtctgtgaagaattctacaggcaaggtgaacttgaacagaaatttgaactggaaatcagtcctctttgtaatcaacagaaagattccatccctagtatacaaattggtttcatgagctacatcgtggagccgctcttccgggaatgggcccatttcacgggtaacagcaccctgtcggagaacatgctgggccacctcgcacacaacaaggcccagtggaagagcctgttgcccaggcagcacagaagcaggggcagcagtggcagcgggcctgaccacgaccacgcaggccaagggactgagagcgaggagcaggaaggcgacagcccctaggggccggcccaacttagacgcggctctcctccggcagggcccccagagggcagaagcagcgtggaggggccctcacgcagcagcccagccactttctgagtgttgtcctggggctctttggaacgccatcttcctcccacttacctgcctcccctccttttcgcaaatgtacagaagccatttgtcacctcagcattcgctgccgaaatgagcaactccattcagtaacgtgggagctgatcccacgggcaggctctccctgctccaggagaagactaggaggaagaatgaggtgctcctgccgtgtccgccttgttccgggtcgcactggaacaggcagcaattcctaagtccggagcgtttgagcgtttgctatctgactgctgatctgcgtgacagaaacaccagcatatttgcaacgccaaggatattggtcttaagtgcaagagcacaaatgagagtgtgagagaaagtaccttctattttaataataatattattataaaaataataaatctttttaacttttatattttatgcactagacaatggatctgcaactttggactaaggtcattcaatgtacccaaacttgaacagggggttcattgttttgctattgactttattatgccactttggggcagagacttggcatcttcgcagtttaagaaaccacgtttcctatccaatccgaagggaaggtgctgtacagttcattcctttgcaccattagccaatctgtcttttatggattctgtgacatgtttatattcacccatgtacattttctgtaaataccaaacgctactgattcccatgccaaaatacatgagtattatgggattgctacctgtataaacaatggcactgtgaaaatactgttagttttaatacaagagaatgcatttgtaaatatggtatagagtttattaatatactattgtttgcagataaaggccttaactttaaacatctttcatcttctgaaagctgcccaacttaaatcctcatagatgtctttctcaactgccttcccatgttcatctgtatgttttccagctaaggtcacaaaccaaaactgaataaagtctttgaggaaacattttggaaacttcacatgcattccgcttgagaccatagtgtttaatctatggcaccaagcatcgtttcctcagattaatgagacccttcaacaagcctgaatcagtcacttttcaacacagcgatgttttaacaagccagctgctaagcttgtgtttatgtgactcttgttacagatcatggcggtgcgtcagcctcacaggagacatagcaggtctcagaaaccttctatgaccctgtcatctaaccatcagggaattccctgctcccatgccacacatttgtctattatggctatagtaccaaagtacttttggtgtttggttggtgtgcatttctttagtgtcgatagtaactggatttttctttttccttaatctcatgtgaacaactacccaactgtttagctgaagttcatattatttaagtaaagaaaatatttcagttttataacagactttaccttcctggcaggtcattgtagttaattatgtctctagcttggagtgtcaccttggaatttcgttgccattttttctcagacacctggccgtaaaatcagtttgttacagcattcttctctaggctgctaaacgctgtgcattgaaccttttctttagaagtttcagcgtaactaatgttagatgaaaattgttgatgcccctttctttttactttaaacaatgtggtagtgggagaatgactgtttctgccactatcaacctgatcctcatgctgatagaatgacagctagcacttatttcctaagtgcaactgttttagagatttttctcctaacatgcaaaggaaatactgattggcctataataagttcctatagggagactgaggcttgcagaattaaggttcaggggaaattttggaaagttggttgtattttcattgaagtaggagagattatcagatggtgctaaagaaagtgtgaagatcttatgaaataggtggatggtaagttgaaattattgatgtgggtaagaagggaggttgtggaaagttaacactagctttgtatttttttttctgtaaaactgtgaactgatatattttcctttatcactttagtattctgcagttctcagcttggtgaggctccaaaagagaatatgtcagatgtattcctacttccaaacctgtcttactttggtttgatggtacacatagggcttttgaacagtctatttttaatgtatatgaggtcaaatcaaggaaggcaattgctggggacaagaaaagtagaggtaggaaagaagacactattttagctaatggggtttcttgggactaaaaaatggctttgtttaaattataattatataataatttaaataaatgagattggaggtattcttagtagttctgagttgatagtttacattacaattaggtcttgaagaagagctcacagagaaaaaactaccaaatatccaatgggtaagcccatgatgtagccactagtacaataaaaatctgaagtaaaatgaggcataaacttgatgcagctgcctccctcattcaactggggagttcttgagttcctcatttgttggtaaaaagaaaaagaatgtgaaaatgtctctttttttcttggctattagtggctgtcttgcaatatttcaataggagtccaattactagttaaaacactggcggggtgcggtggctcacgcctgtaatcctagcactttgggaggccaagttgggcagatcacaagttcaagagatcgagaccattctggccaacatggtgaaaccccgtctctactaaaaatacaaaaattagctgggcatggcagtgcgtgcctgcaatcccagctactcaggaagctgaggcaggagaatcgcttgaacctgggaggtggaagttgtagtgaactgagatcgcaccactgcactccagcctggcaacagagctagaatccgtctcaaacaaacaaacaaaaaatcccacagctattggatcatccacagattttttctttacaatcttgttctccttgtccatggaccatcaatagttgacttgccaggtttaattctttcattgcttgagaagaaaggaatcaaaggactgtgtgtagtaagctgacggtaaagttaagattaaattaagacagagagagaatacatatcactgccaggcctgataggaaaaatctgctcttccttttaataacagtgatgaattgtcaggaccttatttaggaaaccctgacctacccataactccctgctaggctaagtagaaaccaggttatttctccctgcttatggctccccgcaaagggacttgcagcgtgtcctgcaactttgtcttcagatagtgcttcctacaaaactaggtcttgttttgtaatcttttctcgtgttgaatcagatctgcttacttatttaggtttggttatgagcttgtatctcactgtatttctcatgctttgttcttttaaacaaatcctttaaactgtgtcattttgtatacacatgtgaggtttgaaaaaaaaaaaaaaaaaaaaaagaactaccttgtgagttttgctcaaaatgtggcctaagtagccattggcatgtctagatgaacaaataaaaataaagataatttctttaaaata

SEQ ID NO: 1640 - DNA, 5718 bp, Homo sapiens
ctcctgaggctgccagcagccagcagtgactgcccgccctatctgggacccaggatcgctctgtgagcaacttggagccagagaggagatcaacaaggaggaggagagagccggcccctcagccctgctgcccagcagcagcctgtgctcgccctgcccaacgcagacagccagacccagggcggcccctctggcggctctgctcctcccgaaggatgcttggggagtgaggcgaagctgggccgctcctctcccctacagcagcccccttcctccatccctctgttctcctgagccttcaggagcctgcaccagtcctgcctgtccttctactcagctgttacccactctgggaccagcagtctttctgataactgggagagggcagtaaggaggacttcctggagggggtgactgtccagagcctggaactgtgcccacaccagaagccatcagcagcaaggacaccatgcggcttccgggtgcgatgccagctctggccctcaaaggcgagctgctgttgctgtctctcctgttacttctggaaccacagatctctcagggcctggtcgtcacacccccggggccagagcttgtcctcaatgtctccagcaccttcgttctgacctgctcgggttcagctccggtggtgtgggaacggatgtcccaggagcccccacaggaaatggccaaggcccaggatggcaccttctccagcgtgctcacactgaccaacctcactgggctagacacgggagaatacttttgcacccacaatgactcccgtggactggagaccgatgagcggaaacggctctacatctttgtgccagatcccaccgtgggcttcctccctaatgatgccgaggaactattcatctttctcacggaaataactgagatcaccattccatgccgagtaacagacccacagctggtggtgacactgcacgagaagaaaggggacgttgcactgcctgtcccctatgatcaccaacgtggcttttctggtatctttgaggacagaagctacatctgcaaaaccaccattggggacagggaggtggattctgatgcctactatgtctacagactccaggtgtcatccatcaacgtctctgtgaacgcagtgcagactgtggtccgccagggtgagaacatcaccctcatgtgcattgtgatcgggaatgaggtggtcaacttcgagtggacatacccccgcaaagaaagtgggcggctggtggagccggtgactgacttcctcttggatatgccttaccacatccgctccatcctgcacatccccagtgccgagttagaagactcggggacctacacctgcaatgtgacggagagtgtgaatgaccatcaggatgaaaaggccatcaacatcaccgtggttgagagcggctacgtgcggctcctgggagaggtgggcacactacaatttgctgagctgcatcggagccggacactgcaggtagtgttcgaggcctacccaccgcccactgtcctgtggttcaaagacaaccgcaccctgggcgactccagcgctggcgaaatcgccctgtccacgcgcaacgtgtcggagacccggtatgtgtcagagctgacactggttcgcgtgaaggtggcagaggctggccactacaccatgcgggccttccatgaggatgctgaggtccagctctccttccagctacagatcaatgtccctgtccgagtgctggagctaagtgagagccaccctgacagtggggaacagacagtccgctgtcgtggccggggcatgccccagccgaacatcatctggtctgcctgcagagacctcaaaaggtgtccacgtgagctgccgcccacgctgctggggaacagttccgaagaggagagccagctggagactaacgtgacgtactgggaggaggagcaggagtttgaggtggtgagcacactgcgtctgcagcacgtggatcggccactgtcggtgcgctgcacgctgcgcaacgctgtgggccaggacacgcaggaggtcatcgtggtgccacactccttgccctttaaggtggtggtgatctcagccatcctggccctggtggtgctcaccatcatctcccttatcatcctcatcatgctttggcagaagaagccacgttacgagatccgatggaaggtgattgagtctgtgagctctgacggccatgagtacatctacgtggaccccatgcagctgccctatgactccacgtgggagctgccgcgggaccagcttgtgctgggacgcaccctcggctctggggcctttgggcaggtggtggaggccacggctcatggcctgagccattctcaggccacgatgaaagtggccgtcaagatgcttaaatccacagcccgcagcagtgagaagcaagcccttatgtcggagctgaagatcatgagtcaccttgggccccacctgaacgtggtcaacctgttgggggcctgcaccaaaggaggacccatctatatcatcactgagtactgccgctacggagacctggtggactacctgcaccgcaacaaacacaccttcctgcagcaccactccgacaagcgccgcccgcccagcgcggagctctacagcaatgctctgcccgttgggctccccctgcccagccatgtgtccttgaccggggagagcgacggtggctacatggacatgagcaaggacgagtcggtggactatgtgcccatgctggacatgaaaggagacgtcaaatatgcagacatcgagtcctccaactacatggccccttacgataactacgttccctctgcccctgagaggacctgccgagcaactttgatcaacgagtctccagtgctaagctacatggacctcgtgggcttcagctaccaggtggccaatggcatggagtttctggcctccaagaactgcgtccacagagacctggcggctaggaacgtgctcatctgtgaaggcaagctggtcaagatctgtgactttggcctggctcgagacatcatgcgggactcgaattacatctccaaaggcagcacctttttgcctttaaagtggatggctccggagagcatcttcaacagcctctacaccaccctgagcgacgtgtggtccttcgggatcctgctctgggagatcttcaccttgggtggcaccccttacccagagctgcccatgaacgagcagttctacaatgccatcaaacggggttaccgcatggcccagcctgcccatgcctccgacgagatctatgagatcatgcagaagtgctgggaagagaagtttgagattcggccccccttctcccagctggtgctgcttctcgagagactgttgggcgaaggttacaaaaagaagtaccagcaggtggatgaggagtttctgaggagtgaccacccagccatccttcggtcccaggcccgcttgcctgggttccatggcctccgatctcccctggacaccagctccgtcctctatactgccgtgcagcccaatgagggtgacaacgactatatcatccccctgcctgaccccaaacccgaggttgctgacgagggcccactggagggttcccccagcctagccagctccaccctgaatgaagtcaacacctcctcaaccatctcctgtgacagccccctggagccccaggacgaaccagagccagagccccagcttgagctccaggtggagccggagccagagctggaacagttgccggattcggggtgccctgcgcctcgggcggaagcagaggatagcttcctgtagggggctggcccctaccctgccctgcctgaagctccccccctgccagcacccagcatctcctggcctggcctgaccgggcttcctgtcagccaggctgcccttatcagctgtccccttctggaagctttctgctcctgacgtgttgtgccccaaaccctggggctggcttaggaggcaagaaaactgcaggggccgtgaccagccctctgcctccagggaggccaactgactctgagccagggttcccccagggaactcagttttcccatatgtaagatgggaaagttaggcttgatgacccagaatctaggattctctccctggctgacaggtggggagaccgaatccctccctgggaagattcttggagttactgaggtggtaaattaacttttttctgttcagccagctacccctcaaggaatcatagctctctcctcgcacttttatccacccaggagctagggaagagaccctagcctccctggctgctggctgagctagggcctagccttgagcagtgttgcctcatccagaagaaagccagtctcctccctatgatgccagtccctgcgttccctggcccgagctggtctggggccattaggcagcctaattaatgctggaggctgagccaagtacaggacacccccagcctgcagcccttgcccagggcacttggagcacacgcagccatagcaagtgcctgtgtccctgtccttcaggcccatcagtcctggggctttttctttatcaccctcagtcttaatccatccaccagagtctagaaggccagacgggccccgcatctgtgatgagaatgtaaatgtgccagtgtggagtggccacgtgtgtgtgccagtatatggccctggctctgcattggacctgctatgaggctttggaggaatccctcaccctctctgggcctcagtttccccttcaaaaaatgaataagtcggacttattaactctgagtgccttgccagcactaacattctagagtattccaggtggttgcacatttgtccagatgaagcaaggccatataccctaaacttccatcctgggggtcagctgggctcctgggagattccagatcacacatcacactctggggactcaggaaccatgccccttccccaggcccccagcaagtctcaagaacacagctgcacaggccttgacttagagtgacagccggtgtcctggaaagcccccagcagctgccccagggacatgggaagaccacgggacctctttcactacccacgatgacctccgggggtatcctgggcaaaagggacaaagagggcaaatgagatcacctcctgcagcccaccactccagcacctgtgccgaggtctgcgtcgaagacagaatggacagtgaggacagttatgtcttgtaaaagacaagaagcttcagatgggtaccccaagaaggatgtgagaggtgggcgctttggaggtttgcccctcacccaccagctgccccatccctgaggcagcgctccatgggggtatggttttgtcactgcccagacctagcagtgacatctcattgtccccagcccagtgggcattggaggtgccaggggagtcagggttgtagccaagacgcccccgcacggggagggttgggaagggggtgcaggaagctcaacccctctgggcaccaaccctgcattgcaggttggcaccttacttccctgggatccccagagttggtccaaggagggagagtgggttctcaatacggtaccaaagatataatcacctaggtttacaaatatttttaggactcacgttaactcacatttatacagcagaaatgctattttgtatgctgttaagtttttctatctgtgtacttttttttaagggaaagattttaatattaaacctggtgcttctcactcacaaaaa

SEQ ID NO: 1641 - DNA, 1516 bp, Homo sapiens
tttggcagcggatagaggacacgaccaagatggcggcggtgtctggcttggtgcggagaccccttcgggaggtctccgggctgctgaagaggcgctttcactggaccgcgccggctgcgctgcaggtgacagttcgtgatgctataaatcagggtatggatgaggagctggaaagagatgagaaggtatttctgcttggagaagaagttgcccagtatgatggggcatacaaggttagtcgagggctgtggaagaaatatggagacaagaggattattgacactcccatatcagagatgggctttgctggaattgctgtaggtgcagctatggctgggttgcggcccatttgtgaatttatgaccttcaatttctccatgcaagccattgaccaggttataaactcagctgccaagacctactacatgtctggtggccttcagcctgtgcctatagtcttcagagggcccaatggtgcctcagcaggtgtagctgcccagcactcacagtgctttgctgcctggtatgggcactgcccaggcttaaaggtggtcagtccctggaattcagaggatgctaaaggacttattaaatcagccattcgggataacaatccagtggtggtgctagagaatgaattgatgtatggggttccttttgaatttcctccggaagctcagtcaaaagattttctgattcctattggaaaagccaaaatagaaaggcaaggaacacatataactgtggtttcccattcaagacctgtgggccactgcttagaagctgcagcagtgctatctaaagaaggagttgaatgtgaggtgataaatatgcgtaccattagaccaatggacatggaaaccatagaagccagtgtcatgaagacaaatcatcttgtaactgtggaaggaggctggccacagtttggagtaggagctgaaatctgtgccaggatcatggaaggtcctgcgttcaatttcctggatgctcctgctgttcgtgtcactggtgctgatgtccctatgccttatgcaaagattctagaggacaactctatacctcaggtcaaagacatcatatttgcaataaagaaaacattaaatatttagtttggacttgaatatcaagtcgttgaaatttatttgaaatacttgctggcactgcacctggatttgtactgcaagacctgactattcataacggaaaacgatttctaaagcaacagcaggtatttttgtacagggaagtttaaatgtgtttgtgtatggaaaactctccactctcctcccctagatgccatgcttccttttgtctgttacggttgccatgttctttgaataacaaattatataacattttatcctctctcaccacaaggacaaagtatggatgtggcagagtcctcatgaaagatgtatccaaacaagataacttatatgtataaaattaaagcatataatatacatttactgttagtttgttttgataaggaataaaggaatttctaacatgacta

SEQ ID NO: 1642 - DNA, 2319 bp, Homo sapiens
agggcaagggtagggaggaggcggccgaaccgcgtcgctgggccgaaaggtgcgcgagcgctgcccgcgcggggaccacaacccaagtcgcggccgccgcagccatgcgctgggtgtgggcgctgctgaagaatgcgtccctggcaggggcgcccaagtacatagagcacttcagcaagttctccccgtccccgctgtccatgaagcagtttctggacttcggatccagcaatgcctgtgagaaaacctccttcaccttcctcaggcaggagctgcctgtgcgcctggccaacatcatgaaagagatcaacctgcttcccgaccgagtgctgagcacaccctccgtgcagctggtgcagagctggtatgtccagagcctcctggacatcatggagttcctggacaaggatcccgaggaccatcgcaccctgagccagttcactgacgccctggtcaccatccggaaccggcacaacgacgtggtgcccaccatggcacaaggcgtgcttgagtacaaggacacctacggcgatgaccccgtctccaaccagaacatccagtacttcctggaccgcttctacctcagccgcatctccatccgcatgctcatcaaccagcacaccctcatctttgatggcagcaccaacccagcccatcccaaacacatcggcagcatcgaccccaactgcaacgtctctgaggtggtcaaagatgcctacgacatggctaagctcctgtgtgacaagtattacatggcctcacctgacctggagatccaggagatcaatgcagccaactccaaacagccgattcacatggtctacgtcccctcccacctctaccacatgctctttgagctcttcaagaatgccatgagggcgactgtggaaagccatgagtccagcctcattctcccacccatcaaggtcatggtggccttgggtgaggaagatctgtccatcaagatgagtgaccgaggtgggggtgttcccttgaggaagattgagcgactcttcagctacatgtactccacagcacccaccccccagcctggcaccgggggaacgccgctggctggctttggttatgggctccccatttcccgcctctacgccaagtacttccagggagacctgcagctcttctccatggaaggctttgggaccgatgctgtcatctatctcaaggccctgtccacggactcggtggagcgcctgcctgtctacaacaagtcagcctggcgccactaccagaccatccaggaggccggcgactggtgtgtgcccagcacggagcccaagaacacgtccacgtaccgcgtcagctaagggccgccgtgcatctgcacctgagaggacggactgccgcctctgggtccccccaccgtggtgcccctcaccatcctcctgggggagcagggggtgggttctccctgatgaccaggttctgtctctatggaagtcactgcggtgataggtctgtgatggtccctaagtgccagtccatctctgtggagacccctcggtggcctccctatctctgtgggcgatgcctgagggttagggatgtctccaccctgatggggtgtcccagagacattttcccatggcagtcctcctctctgagaccagggctgtcacttttctgccaggggtactgggtccccctcagcaccctccacagcacaggccttccaagtggatgtcccgttgccttattcccccagcccacaaaggcaccctggccttggtctgctgaagtgttaggaagagggtgggtgccctccagacctggggactgagtggggaaaggagttacacccgtgagtggggaatgaggctggtcctgcagcctctccctccgctcagggcttgaaggtcggtggcggagggggtggctctcacagggcccaactctaaagtggaagaaccttgttagaccgagagcttgccatccagccaagctgctcgaggccctgcagtggccttggcaatgtctgtgccacctcctgagccctcccagcatgtcctcacatgctcatgcccacccgctcctccacaagcctagtccatcctgcctgagctccagcccccagcccccactgtgcccagacatgtgtgctcagggtggctttctccctaggaccttctgtgtatatagttagttttataaccctgaatgcccccacccttcccctaagcacacaggggttaaagctgtgtgtccctcccagtggctgtggcagtgacagtgacacccacacccacagtaaagaggagactgaatgagaaaaaaaaaaaaaaaaaaaaaaaaaaaaaa

SEQ ID NO: 1643 - DNA, 3710 bp, Homo sapiens
aggacgcgtttccaagttccagtgactcctcctgtttgggactcggggggagagtgcggggagacaaataaaacctcgggcggcggcggctggtgggaagacttgaacttgaatctcgaaccactgcatctccgactctgcccagactcttcactccgcggcaccctcaaaccccagcccaggccggggcgcacaagccagccagcgcacctgcagtcctcgcccggacgcgccgcgccccctcggaaccaggctctgctccgagcagccttcgcccctcaagccagccacagtccccgccaggccgggtgggcgtcaagatgaaggcggcccgcttcgtgctgcgcagcgctggctcgctcaacggcgccggcctggtgccccgagaggtggagcatttctcgcgctacagcccgtccccgctgtccatgaagcagctactggactttggttcagaaaatgcatgtgaaagaacttcttttgcatttttgcgacaagaattgcctgtgagactcgccaacattctgaaggaaattgatatcctcccgacccaattagtaaatacctcttcagtgcaattggttaaaagctggtatatacagagcctgatggatttggtggaattccatgagaaaagcccagatgaccagaaagcattatcagactttgtagatacactcatcaaagttcgaaatagacaccataatgtagtccctacaatggcacaaggaatcatagagtataaagatgcctgtacagttgacccagtcaccaatcaaaatcttcaatatttcttggatcgattttacatgaaccgtatttctactcggatgctgatgaaccagcacattcttatatttagtgactcacagacaggaaacccaagccacattggaagcattgatcctaactgtgatgtggtagcagtggtccaagatgcctttgagtgttcaaggatgctctgtgatcagtattatttatcatctccagaattaaagcttacacaagtgaatggaaaatttccagaccaaccaattcacatcgtgtatgttccttctcacctccatcatatgctctttgaactatttaagaatgcaatgcgggcaacagttgaacaccaggaaaatcagccttcccttacaccaatagaggttattgttgtcttgggaaaagaagaccttaccattaagatttcagacagaggaggtggtgttcccctgagaattattgaccgcctctttagttatacatactccactgcaccaacgcctgtgatggataattcccggaatgctcctttggctggttttggttacggcttgccaatttctcgtctgtatgcaaagtactttcaaggagatctgaatctctactctttatcaggatatggaacagatgctatcatctacttaaaggctttgtcttctgagtctatagaaaaacttccagtttttaacaagtcagccttcaaacattatcagatgagctctgaggctgatgactggtgtatcccaagcagggaaccaaagaacctggcaaaagaagtggccatgtgaagagggacactcaggacactttacgggatcaaagtgggtctacaccagtgctgcttcctgaatgtttgtgtgtgaacccttgtttcctccaaaacaaacgacagcaacgaaaactccttaatcagaacactgatccaatgaggaatggagcttgtttctgtgacccaggagaacttagtgcaagactacaggagttaacagatggccagctccttattttttaatgtagaataactcctgagtttatatcaaatcctgaagaaataagcctcagttttccatctgtttttgataagaataagaaagggagtgagtgtgaagatggtggttagcagtttcactaagactgatattttaggcctcttgttcacatcaaaagatattggtgtcagaataccagcattttcctgccatgcaaaggattaaaacttagtttacactatgtggttacaaatatatgtcaatgtacattttgaacatatttatgtgctatggaaggaaatgctggtgactaaaataaggtttactctgaaagaggaggaattttattcaaagcattcaaacattttattcaagtgtttcaaaattcaaagcattgtattcaaagttgcagtgaaggcatcaacttatgtaaaaactcagaaggaaggctcctctgataaaaacacagctcctttattatgctgcttttcttgttcactttacacactaagtaaacacttattgtcaggtgcctagtcttgagtgaattgttagatgtgcactgaactcgggatgttggggattggagagagagaattgccaaagtaacagcaaaaatatctcttactttgctttgtttataaataaattagtagattggaaaaactagtgttagggaaagaaatcacatgttcagagcctaattcagtaggaagggcttttctctaccctgaaatgaaggtaatccaaaggcatccattttctaggcttaaaagatatatttttgatatatttaattatattctctacactccagcattaatatgtctgtttaaaaattactaattctcaaatggctcaagaacattagaatttaagtaccttttagagtaattattttaagcaaatagcctggacgtaagagattctcatgccagcatgctttcatttgtcagttgttgtgactgagagataatgaatgacacctgaaatgcatatggtatttttgggagagttaaggtataatttgaaggttggcagaccagttgcgctgattactcttagagaagaagaaatggaaaaatgaaagaaggcaggaaggaaagaaaggatataggaagagagggaagcagaaggcaggcatttttctattttccccacaaattatttcaaaaaaaatctgtattttctgggatatgtcattggcaagaggaagaactggtgttttgaaagcagtatggattctttaaatgcctctcactcttacaagatagtaggctttgagataataaacttacccgtgtcaattaacatttaaactggcatatagaaaaaaaggaggatttttctgcattgtaaaataatcagtatggtttatatgttgaatttgacatttgtgtgtaatttcatggtggcctagtgttgtggtgcttctggtaatggtaatagaagctcaactatttttttgtggatttcagtttttatcatcagaagtcctagacagtgacatttcttaatggtgggagtccagctcatgcatttctgattatacaaaacagtttgcagtaggttatttgtcatttcagttttttactgaaatttgagctaaacatttttacatgtaaatacttgtatttaccaaagatttaaatcagttgattaattaattaactcaaatactgtgaactatctctaaaacactagaaaaaagaaatgttagtatctcaattacaccaactgtgcaaatgaactttgataaaatagaaataatctacattggcctttgtgaaatctggggaagagctttaggattctagtagatggatactgaatactcaggcccacttaaattattaatgtatacattgtgtttttgtctttatgctatgtacagagaaatgtgataattttttataataaatattttttatgatgataaaagaaaaaaaaaaa

SEQ ID NO: 1644 - DNA, 7390 bp, Homo sapiens
cggaactcgcgggttcggagccgcccgctgaggtcagaaggaggcgtctgcgctgatcgggtccgccgcgcgccagagccagagtcgcagccgaggggagccggggccggagcccgagcccgagccgagccggagcccgagcgagcggcggagaccgtgcccccgcctcggccccgcgccgccgcggccaggcccggcatggaggaggagtgccgggtgctctccatacagagccacgtcatccgcggctacgtgggcaaccgggcggccacgttcccgctgcaggttttgggatttgagattgacgcggtgaactctgtccagttttcaaaccacacaggctatgcccactggaagggccaagtgctgaattcagatgagctccaggagttgtacgaaggcctgaggctgaacaacatgaataaatatgactacgtgctcacaggttatacgagggacaagtcgttcctggccatggtggtggacattgtgcaggagctgaagcagcagaaccccaggctggtgtacgtgtgtgatccagtcttgggtgacaagtgggacggcgaaggctcgatgtacgtcccggaggacctccttcccgtctacaaagaaaaagtggtgccgcttgcagacattatcacgcccaaccagtttgaggccgagttactgagtggccggaagatccacagccaggaggaagccttgcgggtgatggacatgctgcactctatgggccccgacaccgtggtcatcaccagctccgacctgccctccccgcagggcagcaactacctgattgtgctggggagtcagaggaggaggaatcccgctggctccgtggtgatggaacgcatccggatggacattcgcaaagtggacgccgtctttgtgggcactggggacctgtttgctgccatgctcctggcgtggacacacaagcaccccaataacctcaaggtggcctgtgagaagaccgtgtctaccttgcaccacgttctgcagaggaccatccagtgtgcaaaagcccaggccggggaaggagtgaggcccagccccatgcagctggagctgcggatggtgcagagcaaaagggacatcgaggacccagagatcgtcgtccaggccacggtgctgtgagggccccgccgcttgcccgtgacacgcagcgcgttggtgtctccgtgtttgtccctgtgaaaacatgtaacgtctgccttagagccatgaccgaaacttgatatttttttctttcatgagtgtccggcatctgctggtcttcattgtgaaacgtgccagtcgtgctttgtgaaaaataacaaagtggtcacagaaatttgtgatctgaaaacccggctcccttccccacaaggctcctgggcctccgggaagacgggcccctgtttgccatctcgggggtgttccctgtgggagggtgagtgggtgaggccgagcctgctgcgtgtggagcctcgagtgggccctggctgccactaccgtacagaggccgtgtcgcgctgggctgggcctgggtggcctctgtctttgcatctctgagaaggagtcgggtggtaacggttggggtcaggaagaattctgccaagtatctttactgtcattctgaccatagcctctttgttcccgcattcgaacttttggttcttactttgctgctcgtttagtccctggggatttcagatcttaggctgttgtttcaccgtatgggagggttgatgtgagcttgcttggagacacacggtgcagcatcagggaccttcccaggccccagcaaattcaagtcggtctgcagacctctcagctacccgcgggacctcttgtaacccatcggcatcttccaggaatccgccgagtgacttgaggaagatgctaacgcagtaaggtctgtgctgggccaagagcagctttgaagctccagagaaccaccccgtcaggttccttgtggaagctcccctcatccgtggtgcagcaggctgagcactgcgcgtttgccacgtgctgcccgtgacagcacattgagccacagcatttgtagacaggacagaggggtgcctgccccctgcccctgctggcacatttaacccttgtcccctgacctcagttctgtgccccaccaaatgcccaggggcaagaggccaccctggaagctgccaatcttccaaggtgggtgtggggcacggtgggggcgggcagctcccaggcccttgggcaggctggggtgacggcagaggccacagcaccagctctgacaagtcctatcatcctctgctcagcagtgacctccctggccccactttgcccagagtttggggtccccccaggtatagctataggcggcagtgcctgtccctggcctgccttgatttcagccacacccctgcagccctgcatcccagctctggggtgtgcagaggtttgtgtctccagggaacccacggctggagagaaatagggagatgcaggaagtgggggcccatggggcccccaagaagcggactctccaaggggtacccccaccccgctaccttccccacggacgggcccctcctggagcccataccctcctgtgaggccattccagtgtcttctagaaagactcgcttgccaggagtgcgttctttgttgaaaaatgccctgaagcgaaaagatgcaggtttatatggaacccccaccccctcccccactctcccactctgttcgttctgaatgtcttcacgagcgtgcatcagggcgcctggctcccccacctcagccagtgagtcagacacgggtttcgcagccatgtttcctggctccgaggacacgggtggcaggcccgttgcagcccagagccactggtccctacagggcgccgccacaccagcaggaaggaggatggctgtgtccggagcctggcggggaggcggcctccccagtatgtgagtgcagggatctgccagaaccacctggccctctgtagggcgtttaactggaaataccctcactgccaagtggagactggggcgtgtgccacattgccagccaccaggaaagcttttctttttcttttttttttttttttaaacaccaagagcacgtatagcatgggggaaagaacctaaatgtctctctgtcctgtgagctggtgaaaaacccagcatgagaacgcagtgtcaggtgtgggactccttctgcccctgcagtgggtgttacgggcggtgtgccctggcgagcaagctttgattcttggttctttgagctcgtttcagaggctgagtccccacatcagctttagttcttggacttccctgtattaagcaagaattaggagaatggctgtccctgcaggcgcctcccgtaaatcctgagctctctggcgcaatctgaaacttctcttctgttttctttggctgtatcagccgaaccaggagaggcctgggctgcgactaaggagaaagaaatcgggggtttctgagagcagatggtgcctttgtgggtgcagggcttttgtggaaattgtcagcctctacgggcagagtccggcatcccctccccagactgcctgctgtcaaaccacggagcagctggagcctgccctgtccacggcccgtttccacccgggcatgttcgtctctcatgacttcggcagaggcccctggtggccttcagtttcagtttctcatccaggaaggtaaccttgggcattggcagtgggtttccctatggcttggatccagattagaattgatctttgttttcactttccatagttaataacatgcaaaataatgagaagaatttattttaaggtgacagctatactggtccaacatcgcctgcttattgtcagggtacagaagtttaatactttcttaatccagtttttcaaacttctccctgtagaccgtaaggatgaattccacaataggatcctttttaaaatcgattttaaattgttgcctagtcctgccaaggttattatgtgcatctgttatttttccaatacatgtaaacagttgcagcatgatgctttgtttaatgtcctgttcttaagctcgttagagccagttttgaaacgtttggtcttaccgtgaacggaggctggcttggcttagccacgctgatgagtaagtgagggatgtctccatcttgagatcaccaggcaagagagttgcctgcaccaggtaagaggccaaagcccctggggtaacagtccccaccgctacccgaggtaaaacaataaaagctatgtggttgagctcaggcctctcgtgcctggtgtcagagaaggcagagcccacagtaggtgcacggtgcaaggccctgggagggcactggccagggaaggtggtatagatggccctcagattgcggggccccgagcagctccccactctgcccgtccaccttccctggctccagcctcattctctctttagtttaactatgcaaagagaggaggttgagagtgttctggcagctggagctcttttccttgtccttcctgccctccgatggggccacctgtgtcggggcagcagtgtccatgtttatggagatcagaggtgtccccactgtgtggctggactgtactctgctgcccgggtagccaggagtctctccctctctcccctgccgcctgcctggtctcatgggcctccttcacacacccctccctgtggatcgcctgcctgggcccagagcaggggaactggagtttgtgagtgagcagagcaggttatgtgcagacagggaaacgagaactttggacctggctttctgagtccaggtgagagctgtgtggccccccgatgccactctgcccgccggagggatgtgcctgctgagccttttccttccacgccgcctctcactgccaggccagcggcttccgctgagactcgctggagaggcggctcccgtgtccgtccaccgagcactcagatggatgctgatcaccagggccgagggggctcccagaaggaccccaggccctggggagggtggctgtgggaggccaagtccactgcccggaagtcttgtcagccctaagccagggaagcctggagcgtggcctggcgggtctgggtggacaccgtccccactccggactcccagcacaggggaggatacctgagcctgtatggccctgtagccctgggcagagctgggcctgtcgtgtgttcctgcctggcaggtgcaggtgctggccatctgcaggtggaaggaggtgggaatcttggattttttgtttttttttgtttttttttttttgagatgaagtctcgctctgacacccaggctggcgtgcagtggtgtgatctcggctcactgcaaactccgcttcctgggttcaagtggttctcctgccccagcctcccaagtagctgggattacaggcatgcgccaccacgctcagctgatttttgtatttttagtagagatggggtttcaccatgttggccaagctggtctcaaactcctgacctcaagtgatctgcccgcctcggcctcccagagtgctgggattacaggcatgagccagtgcacccggcggaatcttggaatttttatagacagcacctcagtttctgactccagccgcacacctcctgcctctgccagcaggggttgccgccagaccagagccagggccaggtccctgcgtccatcccccccggtaggatggacgtgagccatccttctaggggacttttttcagtgtgcgactcgtctctgttaggtggtaggagccagtttgtgtggcctgtgccacgctccacagtgcgtggctgggctctgtgtgtggcctgtgtcccctgtccctgcaggacccagcaggcatcgtggcgtgacagctgtgtccaagccactgcccgggcatcccatcacccaccagggtgcacggtctctcctgctgggggctttctgtcgcatgtgtgtctcctgtcgactctgcagtttgttctcagagcagaatgtttcctgttctcagtgcacaaagacactggttttcaatcggcgtctaaaaccacgttcctgcctttcattgcaacacggtgtgttcatttgtttaaaacagtttaatgagtaagtttagatgactggtcaatatcttaaaaatgtatattagtaagaagttcttcctggaatttttctttcgattctggcagaataaacaggtgtttttagttttcccactgtctgagccaagcaggaccctgtcccagagcaagagatgtccccttccatctctgacccttgcctgggacaagctttgatggggggccccagcttcaaggctgtggtgggaacagcacccccaaatgccagcctctcctttcttcccatccaccagtatactgcggggccatttctggtctttgtccaacaggaaacccatttctggtgggatatgccttccagtgccacagggccactcaccccatgcatctctgtcctgcccgtcagtgctgggacggacagcaagggcaagcccagtgtctggcggataggtgggtgggaacagagaggggagaatgccgtcctaagcttctgcttggggatcccccacacgacctgggtactgcctgggaaacctgtcctaagtaaaactatggacctcgcctcgcccaccggcctgcgaagccagcatctccgtgaaggtggatggaagcgcctttgtcctcattttgagctgcaagctgggtcagcggctctgaagccctcgagtgactttctaacccaagacccagcccctggcaggaggagggtgggtgcagggctggtgggacaaaaagaggcctcagcaggcctggaagacccttccagtacatcccacagcgtgtcgagcagctgggagaacctgtgtcaagctcgagccgtcataggtccccatgaggtgtctgaagccccttcttggtgatgggaggcagaggtgctgacgttctggagcatggacgtgagtcctcagctggctccgcgtgggcccttggagggtgccaggtgtgtggtgaccttctggatgcctttaacttcatggctgcgtcattcctgatttagaactttaaccggagcttcatctagtgattgcaaaactggaccaatgggaggacggcggcgcagcccgctccctccgtggaatggagctcagctcttcggaggcatcaaagcacctgtcgcctccgtggtccccctgctgagggagtgcggcctctgcaaggttcgggggtggcttcgtttgcctggagtggccggccctgcttgtgccatgtggatgtttgtgagcctcggtcctacagcactgtgtaggctgcatctgtttcgtgctggtcctgttgacttgtatgatatccacaaataaatattttcatggcggtcgtgttgaaaaaaaaaa

SEQ ID NO: 1645 - DNA, 2072 bp, Homo sapiens
cgccgtgcccgcggagagagcgcggcgcgggaggccggcggccggccggctgcatggcgcgctgcgagaggctgcgcggagcggccctgcgcgacgtgctgggccgggcgcagggggtcctgttcgactgtgacggggtgctgtggaacggcgagcgcgccgtgccgggcgccccggagctgctggagcggctggcgcgggccggcaaggcggctctgtttgtgagcaacaacagccggcgcgcgcggcccgagctggccctgcgcttcgcgcgcctcggcttcggggggctgcgcgccgagcagctcttcagctccgcgctgtgcgccgcgcgcctgctgcgccagcgcctgcccgggcctccggacgcgccgggcgccgtgttcgtgctgggcggcgaggggctgcgcgccgagctgcgcgccgcggggctgcgcctggccggggacccgagcgcgggggacggcgcggccccgcgcgtgcgcgccgtgcttgtgggctacgacgagcacttctccttcgccaagctgagggaggcgtgcgcgcacctgcgcgaccccgagtgcctactcgtggccaccgaccgtgacccatggcacccgctgagcgacggcagccggacccctggcaccgggagcctggccgctgcagtggagacagcctcgggacgccaggccctggtggtgggcaagcccagcccctacatgttcgagtgcatcacggagaacttcagcatcgaccccgcacgcacgcttatggtgggtgaccgcctggagaccgacatcctctttggccaccgctgcggcatgaccactgtgctcacgctcacaggagtctcccgcctagaagaggcccaggcctacctagcggccggccagcacgacctcgtgccccattactatgtggagagcatcgcagacttgacagaggggttggaggactgagcccactgcacctgcagccacaggcccacccctccccactccctgatcccgtaggtggaggcgatgggtcacgagccatgttaagcacaaccggctccttggtccagttctgcaccggggtggggctgggacccggggaaggtttgagggcccttgcaaccccctcccagcagtggctgggcactctttgctgccccagaagctggtcccctatggattcatcttggcctgacccagccaggtggccttatttcttccctgtcacctcccctccttgaaatctgggccctggtgcctgctgaagattccctctatccctgagtacttagtcttctcccccttccctggggcttctagagctctctctgcccctcaggtcctggcccttgggtccttgtcaaccagaggtctagggaaccacaacccttattgtcctgggtggaccaatccaaaggctaagtgatagtgactcatcaatgttgggtcctgtggggtaccagtttaggttcctaagtaatagtgaccctttcacgtcctggagcccgagtggaccaatcggaagcctaagtgacgatgaccctcgcatgtcctaggtccctgggtggacccatcaggaccccaagtgatagtgacccagtggtcttttagatcctcagtagaacagtccagaagcctgagagacagtggccccttgataatctgggtctcacgggaccagctaggggtccaggtttcagtcagtaaataagagtggtccacgtcctaaagacacctctcctttacaaagacttgtgatgctctggggcttctgtggccaagccccaccctttcctggtcatggtacccgtacagcgttgatggccacagctcgaaggggggctttcgtgtccccctgtgcggtcagtgttttcagtaccacctctctcccgtgcccacttggctatttacttatttatttattgtgtgccagtgatggtgggtgggggctgggccttccccgccacctccacccctgttgtgacctgtccttccgtacttaataaagtgcgcgtgggagtgttaaaaaaaaaaaaaaaaaaaaaaaaaaaaaaaaaaaaaaaaaaaaaaaaaaaaaaaaaaaaaaaaaaa

SEQ ID NO: 1646 - DNA, 11659 bp, Homo sapiens
gctggagggatcctccattcctgtgtcatttgcatgggtcctgctgtgaaatgaacctggcagggacttgttagacacttccttccttccctcattgagcactccagtgccattgttccacagttgttctaattgggtcctagcttcctcctgccaaggcaaacagcatagtctcgagtaggtgtccctaggctcatctgccagcctgaacatgaacacaggcaaagctgatgatggccagggaccccaggggacgtggggccctgtggggtctggcccccaggagcaagacctctgatgatgctggtgtctgggagtgagcaccatgcccatcacccaggacaatgccgtgctgcacctgcccctcctctaccagtggctgcagaacagcctgcaggaaggtggggatgggccggagcagcggctctgccaggcggccatccagaagctgcaggagtacatccagctgaactttgctgtggatgagagtacggtcccacctgatcacagcccccccgaaatggagatctgtactgtgtacctcaccaaggagctgggggacacagagactgtgggcctgagttttgggaacatccctgttttcggggactatggtgaaaagcgcagggggggcaagaagaggaaaacccaccagggtcctgtgctggatgtgggctgcatctgggtgacagagctgaggaagaacagcccagcagggaagagtgggaaggtccgactgcgggatgagatcctctcactgaatgggcagctgatggttggagttgatgtcagtggggccagttacctggctgagcagtgctggaatggcggctttatctacctgatcatgctgcgtcgctttaagcacaaagcccactccacttataatggcaacagtagcaacagctctgaaccaggagaaacacctaccttggagctgggtgaccgaactgcgaaaaaggggaaacgaaccagaaagtttggggtcatctccaggcctcctgccaacaaggcccctgaagaatccaagggcagcgctggctgtgaggtgtccagtgaccccagcactgagctggagaacggccctgaccctgaacttggaaacggccatgtctttcagctagaaaatggcccagattctctcaaggaggtggctggaccccatctagagaggtcagaagtggacagagggacagagcatagaattccaaagacagatgctcctctgaccacaagcaatgacaaacgccgcttctcaaaaggtgggaagacggacttccaatcgagtgactgcctggcacgggaggaagttggccgaatatggaagatggagctgctcaaagaatcggatgggctgggaattcaggttagtggaggccgaggatcaaagcgctcacctcacgctatcgttgtcactcaagtgaaggaaggaggtgccgctcacagggatggcaggctgtccttaggagatgagctgctggtaatcaatggtcatttactggtcgggctctcccacgaggaagcagtggccattcttcgctccgccacgggaatggtgcagcttgtggtggccagcaaggaaaactccgcagaggacctcctcaggttaacatctaagagcttgccagatctgaccagctcggtagaagatgtgtcctcctggactgataacgaagaccaggaggcagacggggaagaggacgaaggaaccagctcttctgtccagagagcaatgcctgggacagatgaaccccaagatgtgtgcggtgctgaggaatccaaggggaacttggaaagtcccaaacagggcagcaataaaatcaagctcaagagtcgcctttcagggggtgtacaccgccttgagtcagttgaagaatataacgagctgatggtgcggaatggggacccccggatccggatgttggaggtctcccgagatggccggaaacactccctcccgcagctgctggactcttccagtgcctcacaggaataccacattgtgaagaagtctacccgctccttaagcacgactcaggtggaatctccttggaggctcattcggccatccgtcatctcgatcattgggttgtacaaagaaaaaggcaagggccttggctttagtattgctggaggtcgagactgcattcgtggacagatggggatttttgtcaagaccatcttcccaaatggatcagctgcagaggacggaagacttaaagaaggggatgaaatcctagatgtaaatggaataccaataaagggcttgacatttcaagaagccattcatacctttaagcaaatccggagtggattatttgttttaacggtacgcacaaagttggtgagccccagcctcacaccctgctcgacacccacacacatgagcagatccgcctccccgaacttcaataccagtgggggagcctcagcgggaggttccgatgaaggcagttcttcatccctgggtcggaagacccctgggcccaaggacaggatcgtcatggaagtaacactcaacaaagagccaagagttggattaggcattggtgcctgctgcttggctctggaaaacagtcctcctggcatctacattcacagccttgctccaggatcagtggccaagatggagagcaacctgagccgcggggatcaaatcctggaagtgaactccgtcaacgtccgccatgctgctttaagcaaagtccacgccatcttgagtaaatgccctccaggacccgttcgccttgtcatcggccggcaccctaatccaaaggtttccgagcaggaaatggatgaagtcatagcacgcagcacttatcaggagagcaaagaggccaattcctctcctggcttaggtacccccttgaagagtccctctcttgcaaaaaaggactcccttatttctgaatctgaactctcccagtactttgcccacgatgtccctggccccttgtcagacttcatggtggccggttctgaggacgaggatcacccgggaagtggctgcagcacgtcggaggagggcagcctgcctcccagcacctccactcacaaggagcctggaaaacccagagccaacagcctcgtgactcttgggagccatcgggcttctgggctcttccacaagcaggtgacagttgccagacaagccagtctccccggaagcccacaggccctccgaaaccctctcctccgccagaggaaggtaggctgctacgatgccaacgatgccagtgatgaggaagagtttgacagagaaggggactgcatttcactcccaggggccctcccgggtcccatcaggcctctgtcagaggatgacccgaggcgtgtctcaatttcctcttccaagggcatggacgtccacaaccaagaggaacgaccccggaaaacactggtgagcaaggccatctcggcacctcttcttggtagctcagtggacttagaggagagtatcccagagggcatggtggatgctgcgtcctatgcagccaacctcacggactctgcagaggcccccaaggggagccctggaagctggtggaagaaggaactgtcaggatcaagtagcgcacccaaattggaatacacagtccgtacagacacccagagtccgacgaacactgggagccccagttccccccagcagaaaagtgaaggcctgggctccaggcacagaccagtggccagggtaagcccccactgcaagagatccgaggctgaggccaagcccagtggctcacagacagtgaacctgactggcagagccaatgatccatgcgatctggactcgagagtccaggccacttctgtcaaagtgactgtcgctggctttcagccaggtggagctgtggagaaggaatctctgggaaagctgaccactggagatgcttgtgtctctaccagctgtgaactagccagtgctctgtcccatctggatgccagccacctcacagagaacctgcccaaagctgcatcagagctggggcaacaacccatgactgaactggacagctcctcagacctcatctcttccccagggaagaagggggccgctcatcctgaccccagcaagacctctgtagacacagggcaagtcagtcggccagagaatcccagccagcctgcatcgcccagggtcaccaagtgcaaggccaggtctccagtcaggctcccccatgagggcagcccctccccgggggagaaagcagcggctccccctgactacagcaagactcgatcagcatcggaaaccagcacaccccacaataccaggagggtggctgccctcaggggagcgggacctggagcagagggaatgacaccagctggtgctgtcctgccaggagaccccctcacatcccaggagcagagacagggagctccaggtaaccacagtaaggctctggaaatgacaggaatccatgcacctgaaagctcccaggagccttccctgctggagggagcagattctgtgtcctcaagggcaccgcaggccagcctctccatgctgccatccactgacaacaccaaagaagcatgtggccatgtctcggggcactgctgcccaggggggagtagagagagccctgtgacggacattgacagcttcatcaaggagctggatgcttctgcagcaaggtctccgtcttcccagacgggggacagtggctctcaggagggcagtgctcagggccacccaccagccggggctggaggtgggagctcctgccgtgccgaaccagtcccggggggccagacctcctccccgaggagggcctgggctgctggtgcccccgcctacccacaatgggcctcccagccttcggttttagattcaattaatcccgacaaacattttactgtgaacaaaaactttctgagcaactactctagaaattttagcagttttcatgaagacagcacctccctatcaggcctgggtgacagcacggagccgtctctgtcatccatgtatggcgatgctgaggattcttcttctgaccctgagtcactcactgaagccccacgagcttctgccagggacggctggtcccctcctcgttcccgtgtgtctttgcacaaggaagatccttcggagtcagaagaggaacagattgagatttgttccacacgtggctgccccaatccaccctcgagtcctgctcatcttcccacccaggctgccatctgtcctgcctcagccaaagttctgtcattaaaatacagcactccgagagagtcggtggccagtccccgtgagaaggccgcctgcttgccaggctcatacacttcaggcccagactcttcccagccatcatcactcttggagatgagctctcaggagcatgaaactcatgcggacataagcacttcacagaaccacaggccctcgtgtgcagaagaaaccacagaagtcaccagcgctagctcagccatggaaaacagtccgctgtctaaagtagccaggcattttcacagtccgcccatcattctcagctcccccaacatggtaaatggcttggaacatgacctgctagatgacgaaaccctgaatcaatacgaaacaagcattaatgcagctgccagtctgtcctccttcagtgtggatgtccctaagaatggagaatctgttttggaaaacctccacatctctgaaagtcaagacctggatgacttgctacagaaaccaaaaatgatcgctaggaggcccatcatggcctggtttaaagaaataaataaacataaccaaggcacacatttgaggagcaaaaccgagaaggaacaacctctaatgcctgccagaagtcccgactccaagattcagatggtgagttcaagccaaaaaaagggcgttactgtgcctcatagccctcctcagccgaaaacaaacctggaaaataaggacctgtctaagaagagtccggcagaaatgcttctgactaatggtcagaaggcaaagtgtggtccgaagctgaagaggctcagcctcaagggcaaggccaaagtcaactctgaggcccctgctgcgaatgctgtgaaggctggggggacggaccacaggaaacccttgatctcaccccagacctcccacaaaacactttctaaggcagtgtcacagcggctccatgtagccgaccacgaggaccctgacagaaacaccacagctgcccccaggtccccccagtgtgtgctggaaagcaagccacctcttgccacctctgggccactgaaaccctcagtgtctgacacgagcatcaggacatttgtctcgcccctgacctctcccaagcctgttcctgagcaaggcatgtggagcaggttccacatggctgtcctctctgaacccgacagaggttgcccaaccacccctaaatctcctaagtgtagagcagagggcagggcgccccgtgctgactccgggccggtgagtccggcagcgtctaggaacggcatgtccgtggcagggaacagacagagtgagccgcgcctggccagccatgtggcagcagacacagcccaacccaggccgactggcgaaaaaggaggcaacataatggccagcgatcgcctcgaaagaacaaaccagctgaaaatcgtggagatttctgctgaagcagtgtcagagactgtatgtggtaacaagccagctgaaagcgacagacggggagggtgcttggcccagggcaactgtcaggagaagagtgaaatcaggctctatcgccaggtcgcagaatcatccacaagtcatccatcctcactcccatctcatgcctcccaggcagagcaggaaatgtcacgatcattcagcatggcaaaactggcgtcctcctcctcctcccttcaaacagccattagaaaggcagaatactcccagggaaaatcaagcctgatgtcagactcccgaggggtgcccagaaacagcattccagggggcccctcgggggaggaccatctctacttcaccccaaggccagcgaccaggacctactccatgccagcccagttctcaagccattttggacgggagggtcaccccccacacagcctgggtcgctctcgggacagccaggtccctgtgacaagcagtgttgtccccgaggcaaaggcatccagaggtggtcttcccagcctggctaatggacagggcatatatagtgtaaagccgctgctggacacatcgaggaatcttccagccacagatgaaggggatatcatttcagtccaggagacgagctgcctagtcacagacaaaatcaaagtcaccagacgacactactgctatgagcagaactggccccatgaatctacctcatttttctctgtgaagcagcggatcaagtcttttgagaacctggccaatgctgaccggcctgtagccaagtccggggcttccccatttttgtcggtgagctccaagcctcccattgggaggcggtcttccggcagcattgtttccgggagcctgggccacccaggtgacgcagcagcaaggttgttgagacgcagcttgagttcctgcagcgaaaaccaaagcgaagccggcaccctcctgccccagatggccaagtctccctcaatcatgacactgaccatctctcggcagaacccaccagagaccagtagcaagggctctgattcggaactaaagaaatcacttggtcctttgggaattcccaccccaacgatgaccctggcttctcctgttaagaggaacaagtcctcggtacgccacacgcagccctcgcccgtgtcccgctccaagctccaggagctgagagccttgagcatgcctgaccttgacaagctctgcagcgaggattactcagcagggccgagcgccgtgctcttcaaaactgagctggagatcacccccaggaggtcacctggccctcctgctggaggcgtttcgtgtcccgagaagggcgggaacagggcctgtccaggaggaagtggccctaaaaccagtgctgctgagacacccagttcagccagtgatacgggtgaagctgcccaggatctgccttttagaagaagctggtcagttaatttggatcaacttctagtctcagcgggggaccagcaaagattacagtctgttttatcgtcagtgggatcgaaatctaccatcctaactctcattcaggaagcgaaagcacaatcagagaatgaagaagatgtttgcttcatagtcttgaatagaaaagaaggctcaggtctgggattcagtgtggcaggagggacagatgtggagccaaaatcaatcacggtccacagggtgttttctcagggggcggcttctcaggaagggactatgaaccgaggggatttccttctgtcagtcaacggcgcctcactggctggcttagcccacgggaatgtcctgaaggttctgcaccaggcacagctgcacaaagatgccctcgtggtcatcaagaaagggatggatcagcccaggccctctgcccggcaggagcctcccacagccaatgggaagggtttgctgtccagaaagaccatccccctggagcctggcattgggagaagtgtggctgtacacgatgctctgtgtgttgaagtgctgaagacctcggctgggctgggactgagtctggatgggggaaaatcatcggtgacgggagatgggcccttggtcattaaaagagtgtacaaaggtggtgcggctgaacaagctggaataatagaagctggagatgaaattcttgctattaatgggaaacctctggttgggctcatgcactttgatgcctggaatattatgaagtctgtcccagaaggacctgtgcagttattaattagaaagcataggaattcttcatgaattttaacaagaatcattttctcagttctcttctttctttagcaaatcagagtgacttctttaaaccacaggttgttgaaatggccaacactggtacagacacggactataaaaatctccaagcttgtgcttacacatgaagcctgacttaactgtatgtgcaacagcaatgaaattaactccagaagccttccacctgcgtcacccaggccgggagggttccttcgttccagtgcctgtcccctacctttatgttatgtttactgatggggatacaagatgtgacacacccttctttatttgaaacaaacaaacatttagctagacctttgcttccttcttgccagctctcccaacatacccaatcctggtgatcagggaactaaaagtctgagggggacacaaatgtcacacctaagaggacaatcaatcattttgtatgattttgtaagtaaatgacagaatgcttttaggcacattcaatggaaggaggagatgtaggtctgtatatgttaccctgaaaagagaataagacttacttaaaaaaatgaattatgacctgttaggctgagctcaggaattgtccaaaaaggaaaaagcaaaataattaattgagagtattttttagtgagtgtaatgtataatgtacgtatgcaaagttcaactcaataggttattgatcaccatgaagtattgatcattttctatctcaaaagtgtaagccataaggctgttttacagaatagcacttctgataagctgtattaaatagccatgagcttcactgcttagagggagcagaaaggtcaacatctaaaagcaccttacaactagtttttgaacctgtcttgataagtgcttgaattcaagactggtcagtccaagagcagacaaaaatatcacaagtcagtcagtcactgggtttccatttctgaattttatgcactccaaccatgaatttaaactaaatttttagaaatcaagtatctttctaagtgtccttggatttatagacaatgtatgtacaatccaaatagaggagcttaatggaatccttttaggagactggttggtttttttccctctttcccaacatgtttaagaaatgtaacattctaagtattggatctcttttcttgacctagtataatgacaactgcagtgacttaagtttttgctgttttcgttttcccgctttgcaatttcctccttttgccaaaaatgttttcctacagaagactgtcgtgactcacgctacttgggaaactcactctggccactcctcctctggtggcatgagctgcttcccagtagctattccgattggatattccgttcgtcgtcacatagctggcttttctctcctcatgatgtaccttattttcttaggtaaataattccaaactctcatcgggtcataaagaggaggagaaacagggtgagtcaaggtaaaggagcagaaatgtagttacaagccaggtcgtcttcagtggcacaaaccaacccgttgagccctgacaacatgagtggagagtgcatttgccatacctgtgtgcatgacactaagattttatgttggagatacttctttaaataacctacagcttgggtctatggctgtgacccccagattcatggaggggctttagccatcagctttgtacatcatcatttttctgaatgaccaatcccactaaacatctttgaagtcggcctagagaggtccttcagatgagagagaaatagctggcttgtctgagtccagatttctcatcaactggcaatacaaaggaaaatatggtacaggagttagttagaaaggtcttattgattttacttctacttttcactacagttacaggtagaatactgtaggaagtcagtgcaaggtgcatgcttgattgatagatattgattgattgtttttcagtctctggggtcagttttgtggtttctgctttcttgcctaaatcaaagactatttcaagtcaacaacactgaaaactgcttttcgcctccactcttacagctgtgcctaataataattaattaataaacgcacagccctatgtgaacagacaggaatttcttgtgcaatgtggagcaaatggaatggtctccttccgcaagtctttttaatcctcatatctggagtacaagggtagacctctggcttaccacatacactatgctaaagtcatcagccactgctactacatcttgccagaaggtttccctcgccaacaaacagttgaaatttaagggaagaagcaaaagctaaactgtctttgaccctaagatagatagaaagctatttatttgtcttcagtgttcaaggcatgactagtatttctaattagcctaataaattcccacactttctgaagtgaacactaatggtattgtcctactaaaactgtcattgtttctttttttttaactggtcagtcattcacaataagctatgagggtaaataaatatgtgttataacaagtaaaccgtagttgcaagaatataccatgaagattaaagtaggctgggtttcatttccatcttcccacacatctcattgaatttgatggttgacttaattggcaccataactttgtatgatattatacattaacctttatttatgtaaagtaaaatgccttatatattaaagagtaagtgcaataatatgaaatagcctgtacattttaaaaatgttgtcaccaagttatataaatccacatctctgtaaacaaccttttttaagtaattttaaaaaaaataaacactctgcttactacttgaaaaaaaaaaaaaaaaaa

SEQ ID NO: 1647 - DNA, 901 bp, Homo sapiens
cccaaagtacttgtgtccgggtggtggactggattagctgcggagccctggaagctgcctgtccttctccctgtgcttaaccagaggtgcccatgggttggacaatgaggctggtcacagcagcactgttactgggtctcatgatggtggtcactggagacgaggatgagaacagcccgtgtgcccatgaggccctcttggacgaggacaccctcttttgccagggccttgaagttttctacccagagttggggaacattggctgcaaggttgttcctgattgtaacaactacagacagaagatcacctcctggatggagccgatagtcaagttcccgggggccgtggacggcgcaacctatatcctggtgatggtggatccagatgcccctagcagagcagaacccagacagagattctggagacattggctggtaacagatatcaagggcgccgacctgaagaaagggaagattcagggccaggagttatcagcctaccaggctccctccccaccggcacacagtggcttccatcgctaccagttctttgtctatcttcaggaaggaaaagtcatctctctccttcccaaggaaaacaaaactcgaggctcttggaaaatggacagatttctgaaccgtttccacctgggcgaacctgaagcaagcacccagttcatgacccagaactaccaggactcaccaaccctccaggctcccagagaaagggccagcgagcccaagcacaaaaaccaggcggagatagctgcctgctagatagccggctttgccatccgggcatgtggccacactgcccaccaccgacgatgtgggtatggaaccccctctggatacagaaccccttcttttccaaataaaaaaaaaatcatccaggaaaaaaa

SEQ ID NO: 1648 - DNA, 5755 bp, Homo sapiens
ggcgctcagcgcaggcaggtccccctgctgccgggtcccatttgttgccggctctgactcggggcggccgcggcgcgcggagctccggggagtcaggcggagcagccgcgcagccacgacggagcagcagcgggactggccgccccgcgcccccttcgccgccgtgcccttccccggcgcgctcaccccgttctcgggatgggattgtagcggcggcgcggactcggcggggatcgcggcggaggcggcggcgtcggcggcggcgtcggcggccgagcggggctccatgttttcccctggccaggaggaacactgcgcccccaataaggagccagtgaaatacggggagctggtggtgctcgggtacaatggtgctttacccaatggagatagaggacggaggaaaagtagatttgccctctacaagcggcccaaggcaaatggtgtcaaacccagcaccgtccatgtgatatccacgccccaggcatccaaggctatcagctgcaaaggtcaacacagtatatcctacactttgtcaaggaatcagactgtggtggtggagtacacacatgataaggatacggatatgtttcaggtgggcagatcaacagaaagccctatcgacttcgttgtcacagacacgatttctggcagccagaacacggacgaagcccagatcacacagagcaccatatccaggttcgcctgcaggatcgtgtgcgacaggaatgaaccttacacagcacggatattcgccgccggatttgactcttccaaaaacatatttcttggagaaaaggcagcaaagtggaaaaaccccgacggccacatggatgggctcactactaatggcgtcctggtgatgcatccacgagggggcttcaccgaggagtcccagcccggggtctggcgcgagatctctgtctgtggagatgtgtacaccttgcgagaaaccaggtcggcccagcaacgaggaaagctggtggaaagtgagaccaacgtcctgcaggacggctccctcattgacctgtgtggggccactctcctctggagaacagcagatgggctttttcatactccaactcagaagcacatagaagccctccggcaggagattaacgccgcccggcctcagtgtcctgtggggctcaacaccctggccttccccagcatcaacaggaaagaggtggtggaggagaagcagccctgggcatatctcagttgtggccacgtgcacgggtaccacaactggggccatcggagtgacacggaggccaacgagagggagtgtcccatgtgcaggactgtgggcccctatgtgcctctctggcttggctgtgaggcaggattttatgtagacgcaggaccgccaactcatgctttcactccctgtggacacgtgtgctcggagaagtctgcaaaatactggtctcagatcccgttgcctcatggaactcatgcatttcacgctgcttgccctttctgtgctacacagctggttggggagcaaaactgcatcaaattaattttccaaggtccaattgactgacgcccttgacagccatctacgactttattaacaggttactgtgaagattttgccactaactctagattttacctttttgtaatgctgtttatcagaggagggtgacaggggctggaaataaagagaggggacatggtgatgaaacatggcaggagtgtaacagataccagtggtgtgttgcatgctcaaaacagcagcgtcgtcattgaagtctgcttgattaaaccataatatctttgtaataattggatttaaaatgctatgcttctatttttaaccttgggtttttaaccaagtttttttttttttgtaatcttggacaagactttaaatcatattttacagatgtagaagaaatttattcaaaagtgtgggctcatgaagttcacttcagtgcagtgtggtgtaggtgttacgcgaagggcgcacagtgtctagaaatacttgatcgtggctcaaacctgaccagacagcagaggggcggctctgtacagtgtgactggtggacagatggccttaggcacaggtggttttgaaatctggggctttttctgatttatttttctgacttgttgggggagagaatattcataacttgtgggctttttttttttttaacttcagtggaatttactttagatattcattcatcaaatacatgggacttcacaaacaattttccataactttttagcctgtcttttgttatttctgcctaatatgatttgccccgatactcatcttgcacggccagaactgtttggttgattaaaatacatcagctcttaaaaactcattaactgagggtaattacagtagtagacatggtctgggtactatactaccatgtttatttgctgactgaattaagatttaagaatgattaaaaataagcttttactttttaaaaccacttgaggtttcataaagcttggggtttttttttttcctttgttaagaaagccaaccaatcacaatgatatagtcattgttgtgcactcccttttcaccatctgtcaccttcccttgcagcttaaggagcccagtaagttttgaaaatgtttgcgaatcaaactaaatttaagtgggatgattagatatacacaacaccaagtggtacatctgcagagataattcaaaattcctgcttttgagagagcaaatgagtgttgctgaggaataattaaatgagaatttcataggagctccaccattcctgttactttcatttcattttgattaataattcttggatgcttggcatcgatcgtatcactgctcctagaaggtaaagatcctttaggacatgagactggtagaagctggctgagataaaataagtatttatttaaactaatgttctcttaatttgaccattgcagatttgggtgacttttttttaacctttgtacatatacgtaatttatatgattctaatgtactatatccatacttgaattggttttttcgtattttgcctactggcaaatattttgcctattttcagtcgttctaacctatttgaatacgcttttccttaaagtgatacgataatattactcttgattgctgctgcttaatttgatgtaatatgtttaaagttcagcctctcagttttaatatagctttatttttcagtggagatcattgtttaggatgagacatttttggttttggttttgtttgggtaaattttaaatggtgtgaaaatcgatgacaacagtcctcttacagatagcttgctgtattctgtatagcttactctacctgcagacagaaaatgaaagaaaaaaatggacttgcctagaataatatattgaatgccttttgatttagccagagtctctgatgattagctttcactgatagagtatgtcttttcagcctgtaattctttgggccccaaagaatgacaaaggaggcactcgttctcttttcttgctgtatgcctagaaagtggttgaaggattcttgatgccctaaaaccatcttgtaagctaaatggtcttgcatccagaaaggccagattttacctaccaagaaaaaaagatatttttccagagagttaggtatatcataattttccatttcaagtcctgtttataagtctagtcattctgcaacgtgacatatcccccaaaatgaagttaccttccaagttggacacgtcccgtagttgggcatatgtctaactaaaagtttctgacttttagtaaattcagcttaaatataagttgaaatttgggaaataatttccaagctcttggaaggggtaacagtgaaccgccctccatgggctccacatcttttcctttggcttccaaagtcaggtcccgcccaccctgcctaaggaactgcagagaggtggcaaatcagcaaaaaggacaccaggctcttcttggccacttgtaggaagatccctttacaattttgactaaggagattttttttttcacagttgagttagtttgtgaaaataaagaactctgtagctcaccaaggtggagaaacgcaattcagaaaagtaatttctccaaggtcacttctttttttatgtcttgccatcactttaaaggactagccccactcccccatgtgtatacacaaggaaattgcagaccaattagttgtcttggcctgactctaatgccttttgcaagtagctttccagaagtaaaagtcccagtgatgtattcccatagaaatatttttcagttgtttatgtcgtttactacaaaaaaaaagattcagagtggatggagtacaactctgagtatttttctagtccggaattttttattaataatcggtgctgccgggtcatgcatgctgcaactctcaacatttcccttatttggttcagcttttagcaaaaagggctacagttcaccctgcagagtattaaggtttctggatttttttctcccaactgtggcccaaaagaattaaaatctgttaatataaatagagaacatatttatcattcctcgatagttaattatagactttggtacctttgtgcctcagggaagccacgtgatataactggttatagaatttcagggttagggtttaaagaaaggagaaagccattggaaaaatgatgggctccattaaggagactaatgaatctggatgcagaaatatgtcagaaactggcataaacatgattgtagtagaatttattttccagtaccaatagggaaattattttaagttattacatttactgtattgggaaacttgaggagaactctttagttcataaagcttcaatgtcttttttttttttttcatggaaaaactcaaacctctgttatttgggagctcagtattgtgtggacacttacgagagttttctgcttaattgaagtgtaatataggttgtagaattgttacctgcagttctatggttttgtttcacttcttttcttttttaaagccattctgttctttggatgtgcttgaaagggtgtgtgattacaccattgttaatgctgggtaaaaactatcttcttgcagccttgcctcataacagtggaatttctgatagacaaaccacaggactttgattttaagccaaatccatctccatccctttactgtcaatcttctgtcccagtagtttagcctttgtggcttaggttatgatgcgcctccttctgtgcgaccaatgagacgacttcagcatctttttaaaataatctaagcatcattgaagcagtaacacaaaaaaaaggttcagtattttctttttagtataacttacatcctttcaaataagtctttgccctcatgaagaatccctagaggaagataaggaaaataagtattttccagttttgcttgacagtttctaaacaaacaaaaataaactcaatgaaaggaaagatgtttctttttagctgagatgacagattgcttctctgtattaaatagtctagaagttaaggggatggtcacatttaccatgtattgtgttattagcagttaaattttatgaatatgtttgtaaaattgttgttttatatttcatgtcaaattgaaaagtttatttcttcactattgtacctgtggaaatacaagccattttacaggaaaaaatcttcaaaaactattaaatggatatcagcctgtttgtgagccaaaaaaaaaaaaaaaaaaaaaaaaaaaaaaaaaaaaaaaaaaaaaaaaaaaaaaaaaaaa

SEQ ID NO: 1649 - DNA, 2044 bp, Homo sapiens
cctggagttacaatggcggcgcccatgctgcgctggggctgccgtggaagacgttgggctttcgcccgggttgacggtggttcttgccaccgaagaggggctccgactgggtccacatccaaccagattaggggagagagctcagtggctcagcagcccctccacacggcccagaagacgaggaaaggtgaacacaaatgggctgctgtggtaggtttggaaattcatgcccagatttcctccaactctaaactcttctctggatctcaagttcgcttttcagcacctccaaattctttggtttctttttttgatgcatctctacctggaactttgccggttctcaacaggaggtgtgtagaagcggcggtgatgacaggcctggctctgaactgccacataaacaagaagtccttgtttgacaggaagcactacttctatgcagacctccctgcaggctaccaaattacccagcagaggctcccaattgctgtgaatgggagcttgatatatggcgtctgtgcagggaagaagcagagtcaggtgatccccaagacggtgaggatcaagcagatccagttggagcaagacagtggcaaaagcctccacgacaacctgaggtctcagacgctcattgatttgaacagggcaggagtgggccttctggaggtggtcctggagcccgacatgtcctgtggagaagaggcggcaacagctgtcagggagctgcagctgatccttcaagccctggggaccagccaggcgaacatggcagagggccagttgagagtggatgccaatatatccgtgcatcaccctggggagcctttgggcgttcgaacggaagtgaagaatctcaacagcatcaggttcctggccaaagccatagactatgaaattcagaggcaaatcaatgaacttgagaatggaggtgaaattctgaacgaaacacgctcatttcatcacaagctggggtgcaccatgtcaatgagagacaaagaaggaaaacaggactacaggttcatgccagaacccaacctgcctcccctggtgctctacgacgccacatctctgcccgcaggtgcagacccacagcaagtgatcaatattgaccagattcgggagacactcccggagctccccagtgtgacccgagagaagcttgtccaacagtatgggatgctgctggaacacagcttcactttgctgaacgaagtcggcctactggagttcttccaaaatgtgataaaagaaactagggcagagccaaaaaaggtgactagttgggtcctcaacacttttctgggctatttaaagcaacagaacctcgctgtcagtgagagtcctgtcacaccctctgcactcgctgagcttcttgacctgctggacagcagaacaatttcttcatcagcagctaaacaggtgtttgaggaactgtggaagagggaaggcaagactccagggcagattgtttcagaaaagcagcttgaactgatgcaggaccagggggcactggagcagctctgccactctgtgatggaggcccatcctcaagtggtaatggatgtgaagaacagaaaccccagagctataaataaactgattgggttggtccggaaagcgactcaaagccgagcagatccagtcatgataaaggagatcctggagaagaagctgtcattgtgagatgtttgggatccccttgcccaagggacaacaacaaacagtgcagcctgactgggaacaggatcctgtgaaagctgatgcccatgtgccctgagagctgcctctcaatccctgtcccaagccacagctatggcgttaatgtcaccagtgttctcaccctctaggccctgtgcctggaggtgcctccacagccgaccagcagccaccccgcctgcttcatccacatcaggagggtccggtgaggctgcagcagtggttaaggagtaacaccttcttgtattaaggaattttaaactaaataaaatgtatgttggagatactgttaaaaaaaaaaaaaaaaaaaaaaaaaaaaaaaaaa

SEQ ID NO: 1650 - DNA, 2279 bp, Homo sapiens
cttggcagggcacgtgcgggaggaagtggagctccctgtacgcgcggccctagtcggctcctcaacgtggagcgatgggaggccttgagaagaagaagtatgaacgaggctcggccaccaactacatcacccggaacaaagcccggaagaagctccagctgagcttggctgactttaggcggctgtgcattctgaagggcatttatccccatgaacccaaacacaagaagaaggttaacaagggttctacagcagcccgaacgttttaccttatcaaagacatcaggtttctcctccacgaacccattgtcaacaagttccgtgaatacaaggtgttcgtccggaagctccggaaggcttatgggaagagcgagtggaacactgtagagcgtttaaaggacaataagcccaactacaaactcgaccacatcatcaaggaacggtatcccacgttcatcgatgccctgcgggacctggacgatgccctctccatgtgcttcctgttttccaccttcccgcggactggcaagtgccacgtgcagaccattcagctgtgccgccggctcactgtggagttcatgcactacattatcgctgcccgtgccctgcgcaaggtcttcctgtccatcaaaggcatttactaccaggccgaggtactggggcagcccatcgtgtggatcactccctatgccttctcccatgaccacccgacagacgtggactacagggtcatggccaccttcaccgagttctacaccacgctgctgggctttgtcaacttccgcctttaccagttgctcaacctccactatcccccgaagctcgagggtcaggcccaagcagaggcaaaggccggtgagggcacctacgcgttggactccgagagttgtatggagaaactggcagccctcagtgccagcctggcccgcgtggtggtgcctgccacagaggaggaggccgaggtggatgagtttcccaccgatggggagatgtcagcgcaggaggaagaccgcaggaaggagctggaggcgcaggagaagcacaagaagctttttgagggcctgaagttcttcctgaaccgagaggtgccccgtgaggccctggccttcatcatcaggagttttggtggggaagtgtcctgggacaaatctttgtgcattggggccacctatgacgtcacagactcccgcatcacccatcagattgtcgaccggcctgggcagcagacctcagtcattggcaggtgctacgtgcagccccagtgggtgtttgactcagtgaacgccaggctccttctccccgtggcagagtacttctctggggtgcagctgcccccacacctttcaccctttgtgaccgagaaggaaggagattacgttccacctgagaagctgaagctgctggctctgcagcggggagaggacccaggaaacctgaatgagtcagaagaggaggaggaagaggacgacaacaacgaaggtgatggtgatgaagagggagaaaatgaggaggaggaggaagatgcagaggctggttcagaaaaggaggaagaggcccggctggcagccctggaagagcagaggatggaggggaagaagcccagggtgatggcaggcaccttgaagctggaggataagcagcggctggcccaggaggaggagagtgaggccaagcgcctggccattatgatgatgaagaagcgggagaagtacctgtaccagaagatcatgtttggcaagaggcgaaaaatccgagaggccaacaagctggcggagaagcggaaagcccacgatgaggcggtgaggtctgagaagaaggccaagaaggcaaggccggagtgagtgcctgcggcccctcacagggctgaggccagcccctagcagctggatgtggcagaggcaggccagaggacctaagtgtgatggaccagagtcacttctcctcctcctttctccagccagccctgacccctcatgctctctggctgggccagtgggcagccctcgcttcccttggatggagctgccctgctggtgcctggtcagagaagaggcctctgtgcccagcctgattctctgctcccaggagccagtgacatgaggtgcagaggcccacccagccccctacctactgcccccattcatcctggctttccacagccccctcccacacagttggacccgtgattctcagggtgctgtgatggggtgagggtagggggagcatttgttattaaatgactggacttttgtgccaattgcaaaaaaaaaaaaaaaaaa

SEQ ID NO: 1651 - DNA, 1979 bp, Homo sapiens
gaaacagtttcctggtgaagcagtccctcacccctagtcagcccacacccctagggcctaaagatgctgaggtctgtatggaattttctgaaacgccacaaaaagaaatgcatcttcctgggcacggtccttggaggagtatatattctggggaaatatggacagaagaaaatcagagaaatacaggaaagggaggctgcagaatacattgcccaagcacgacgacaatatcattttgaaagtaaccagaggacttgcaatatgacagtgctgtccatgcttccaacactgagagaggccttaatgcagcaactgaattccgagagcctcacagctctgctaaaaaacaggccttcaaacaagctagaaatatgggaggatctgaagataataagtttcacaagaagtactgtggctgtatacagtacctgtatgctggttgttcttttgcgggtccagttaaacataattggtggatatatttacctggataatgcagcagttggcaaaaatggcactacaattcttgctcccccagatgtccaacagcagtatttatcaagtattcagcacctacttggagatggcctgacagaattgatcactgtcattaaacaagctgtgcagaaggttttaggaagtgtttctcttaaacattctttgtcccttttggacttggagcaaaaactaaaagaaatcagaaatctcgttgagcagcataagtcttcttcttggattaataaagatggatccaaacctttattatgccattatatgatgccagatgaagaaactccattagcagtgcaggcctgtggactttctcctcgagacattaccactattaaacttctcaatgaaactagagacatgttggaaagcccagattttagtacagttttgaatacctgtttaaaccgaggttttagtagacttctagacaatatggctgagttctttcgacctactgaacaggacctgcaacatggtaactctatgaatagtctttccagtgtcagcctgcctttagctaagataattccaatagtaaacggacagatccattcagtttgcagtgaaacacctagtcattttgttcaggatctgttgacaatggagcaagtgaaagactttgctgctaatgtgtatgaagcttttagtacccctcagcaactggagaaatgatttttccttcaagaaaaactacagtgggattcatttactttttaaaatacactgggtaaatcacctatacttagagtaacagtttgttatcaaaatgcctgataaaatatattcttaataaaagtcttcatttcataatgaaatcaatttatttggcatcttaatatatttttttagattcatcaacagaccagtttttgtgggcatatatatatacacgtgcaaatatcagaattgttaataatttgttacacatggacatttgttccaaactgactaaaaatcaatatagatattttatatacatatatatatatataaatacaaaattcagtgtactttaccatattaatactgaggaaaaatctgttggagacataggtctaggatgtgtgaagtttggaaaaatatgctatttaattataatgttccctagactgctgtaaacagaagtgaatcagacttttctccagctacctttcaaaataataaattatttgtctcaaatataccttgatggaggacttttttattcttatggaaatggtgaattccaacaactatgatgaactatgttctttgctatttcttcactatattttttaaggttttattaaaaagccttagaaagttacatattggtttagaggctaaaattgtgttgatgctgtttactcacctaattacatagttttaatcatttgtacataattttaaaaacttactttgtattgattttgaatacagtgaaaatcttattgcaataaactattttagtaaaaaaaaaaaaaaaa

SEQ ID NO: 1652 - DNA, 1733 bp, Homo sapiens
gacagctagtaagataggaagtgaggccaggtaccttgtgggcagtgatgtcattcggtgcgactcctaagatgtctccagagatgggagagctcacccaaaccaggttgcagaagatctggattccacacagcagcggcagcagcaggctgcaacggagaaggggctcatccataccccagtttaccaattcccccacaatggtgatcatggtgggtttaccagctcgaggcaagacctatatctccacaaagctcacacgatatctcaactggataggaacaccaactaaagtgtttaatttaggccagtatcgacgagaggcagtgagctacaagaactatgaattctttcttccagacaacatggaagccctgcaaatcaggaagcagtgcgccctggcagccctgaaggatgttcacaactatctcagccatgaggaaggtcatgttgcggtttttgatgccaccaacactaccagagaacgacggtcactgatcctgcagtttgcaaaagaacatggttacaaggtgtttttcattgagtccatttgtaatgaccctggcataattgcagaaaacatcaggcaagtgaaacttggcagccctgattatatagactgtgaccgggaaaaggttctggaagactttctaaagagaattgagtgctatgaggtcaactaccaacccttggatgaggaactggacagccacctgtcctacatcaagatcttcgacgtgggcacacgctacatggtgaaccgagtgcaggatcacatccagagccgcacagtctactacctcatgaatatccatgtcacacctcgctccatctacctttgccgacatggcgagagtgaactcaacatcagaggccgcatcggaggtgactctggcctctcagttcgcggcaagcagtatgcctatgccctggccaacttcattcagtcccagggcatcagctccctgaaggtgtggaccagtcacatgaagaggaccatccagacagctgaggccctgggtgtcccctatgagcagtggaaggccctgaatgagattgatgcgggtgtctgtgaggagatgacctatgaagaaatccaggaacattaccctgaagaatttgcactgcgagaccaagataaatatcgctaccgctatcccaagggagagtcctatgaggatctggttcagcgtctggagccagtgataatggagctagaacgacaggagaatgtactggtgatctgccaccaggctgtcatgcggtgcctcctggcctatttcctggataaaagttcagatgagcttccatatctcaagtgccctctgcacacagtgctcaaactcactcctgtggcttatggctgcaaagtggaatccatctacctgaatgtggaggccgtgaacacacaccgggagaagcctgagaatgtggacatcacccgggaacctgaggaagccctggatactgtcccagcccactactgagccctttccaagaagtcaaactgcctgtgtcctcatcgccttccacctttaggaaatgctatctttgctcttctcctactctgccttggcctcactgaggcaccccacttccagtgaagaagtcctccgcaactcccaaacaagcctcgcttgctggccgcaaccaaggagctatctagctctggaggaaactttctttcttaattcctattctctgacgaataaagacttactgcctacaagagg

SEQ ID NO: 1653 - DNA, 1978 bp, Homo sapiens
ggcgggggcgcggagggataccgccccgggacaatcacggccgccacgtgcgggaggcgccggccgggagcggtggcgggccgagcttcggacctcgggccggcggagagggtggaccccgcgtcgctctcggcaccccaggaacagcggcggcacggacgccttggagccccgcggccgggccgcgatgtgcttttctcctgtgttcgctgcccgggatgcggaatcttgagcctcggtgtcgggttacagagttgtcctggtgacgggatgcggagcgtttcctcctttttgttgtgggggcggctggtggcaggggcagctggtggcagggttgcccacgctaatctccgagtctctaagggcaccgtctttcctggatccctcttgcgcctcgtccataaaggcagacccgcgggcgcgcgccggcaacctgaaatcagagcaggcgtccgtggcgctcaggaaccttgctgagcttcgccgatctttcattgttgcttcatttgggtaccaagggcctctcattctgtggattctttgcctggaggagcccccttaatgttgctaatcacgtgtggttaaattgctcgtaaattccgaacaaaacaaatagcgacctgtgttacactgtttcttggtaactgggaaagttactggtggcttgaagtatacgcagaaaatacaaagattaaaaactagggaagagttcactgaatgaacaccgtaacatttctgctctgcagggtaaaataatttcgggacccaggtctgggaaagatttgtattaacaaggtaaacggtgggtagagtgcctgagaagctattcgtatcgtctttggtagcctctgggcactaggactagacatggaattaggggtcccccaacaatgacttcaattttaggttaatagaaaccatctgccacttaagggaaagaaagcaccaaaatgtagataagttgatgttcacccttaaagttatcgtgtgaggtcatgatttgtaggaggattaaggaatgtatctctggaaagggcaagaacgttgcttttaaaagtctaattggttctgaagttttatattttttctgctgattgctttaaaatgttcagctactagagagaaaaaaagtacagtaaaagaaacccccaagtcagagacctatcagactgagaatatgtattttctcatgttctaaagatacagaatacctgtgtggtgtaaaatgtgaaccaaaaattgtttcatttttgtaagtgtgcctcccacctgatttaattacacttaattgttcttgtttatgactctgccttttatggtgatgttgatcattttagtccttcgatcatagcactgtatcatcttaaaagttaataatagattacttgtaacacaggctcactatgtgagaattcatcaagctgtatgtacatttattgtgctcttcattgtatgtataattcaataaattgaaacagtaaacgaaaaggtaattatagaaaaaatacagtgataacttgaagtatgttgaatttttattaatttactctgaaggttttaagatataatttctagacgttactatcttattgttatagcacagagttggaaataactacattcttttcctattcttttattgttggctttaaacagtgaaagaatttgaccaacaatattttctaattcaaatctcaaaagattctaaaacacatttcttgggtaaaatattcacaaaaatttagaattcttgtcattcttctatatttttcaaaatataattcattttaaattactgcttacttttccaacatgatgttatttttctagaattgcaaacagtaaaatttaaacaactatgaaaaaaattctgtataatagattaaattttacagtttcaatttttaggttatatattcaaagagagtccatgtgctgtcttggttttcagtactgtaataaagtaacctgtgctttt

SEQ ID NO: 1654 - DNA, 1978 bp, Homo sapiens; identical to SEQ ID NO: 1653

SEQ ID NO: 1655 - DNA, 1758 bp, Homo sapiens
ctgctgtctgcggaggaaactgcatcgacggacggccgcccagctacgggaggacctggagtggcactgggcgcccgacggaccatccccgggacccgcctgcccctcggcgccccgccccgccgggccgctccccgtcgggttccccagccacagccttacctacgggctcctgactccgcaaggcttccagaagatgctcgaaccaccggccggggcctcggggcagcagtgagggaggcgtccagccccccactcagctcttctcctcctgtgccaggggctccccgggggatgagcatggtggttttccctcggagccccctggctcgggacgtctgagaagatgccggtcatgaggctgttcccttgcttcctgcagctcctggccgggctggcgctgcctgctgtgcccccccagcagtgggccttgtctgctgggaacggctcgtcagaggtggaagtggtacccttccaggaagtgtggggccgcagctactgccgggcgctggagaggctggtggacgtcgtgtccgagtaccccagcgaggtggagcacatgttcagcccatcctgtgtctccctgctgcgctgcaccggctgctgcggcgatgagaatctgcactgtgtgccggtggagacggccaatgtcaccatgcagctcctaaagatccgttctggggaccggccctcctacgtggagctgacgttctctcagcacgttcgctgcgaatgccggcctctgcgggagaagatgaagccggaaaggaggagacccaagggcagggggaagaggaggagagagaagcagagacccacagactgccacctgtgcggcgatgctgttccccggaggtaacccaccccttggaggagagagaccccgcacccggctcgtgtatttattaccgtcacactcttcagtgactcctgctggtacctgccctctatttattagccaactgtttccctgctgaatgcctcgctcccttcaagacgaggggcagggaaggacaggaccctcaggaattcagtgccttcaacaacgtgagagaaagagagaagccagccacagacccctgggagcttccgctttgaaagaagcaagacacgtggcctcgtgaggggcaagctaggccccagaggccctggaggtctccaggggcctgcagaaggaaagaagggggccctgctacctgttcttgggcctcaggctctgcacagacaagcagcccttgctttcggagctcctgtccaaagtagggatgcggatcctgctggggccgccacggcctggctggtgggaaggccggcagcgggcggaggggatccagccacttccccctcttcttctgaagatcagaacattcagctctggagaacagtggttgcctgggggcttttgccactccttgtcccccgtgatctcccctcacactttgccatttgcttgtactgggacattgttctttccggccaaggtgccaccaccctgccccccctaagagacacatacagagtgggccccgggctggagaaagagctgcctggatgagaaacagctcagccagtggggatgaggtcaccaggggaggagcctgtgcgtcccagctgaaggcagtggcaggggagcaggttccccaagggccctggcacccccacaagctgtccctgcagggccatctgactgccaagccagattctcttgaataaagtattctagtgtggaaaaaaaaaaaaaaaaaaaaaaaaaaaaaa

SEQ ID NO: 1656 - DNA, 1043 bp, Homo sapiens
ctagcgacggccgtagggagcgcttcctcctccccgccgccgccctcgccatggccgcgccggccccgggcctcatctcggtgttctcgagttcccaggagctgggtgcggcgctagcgcagctggtggcccagcgcgcagcatgctgcctggcaggggcccgcgcccgtttcgcgctcggcctgtcgggcgggagcctcgtctcgatgctagcccgcgagctacccgccgccgtcgcccctgccgggccagctagcttagcgcgctggacgctgggcttctgcgacgagcgcctcgtgcccttcgatcacgccgagagcacgtacggcctctaccggacgcatcttctctccagactgccgatcccagaaagccaggtgatcaccattaaccccgagctgcctgtggaggaggcggctgaggactacgccaagaagctgagacaggcattccaaggggactccatcccggttttcgacctgctgatcctgggggtgggccccgatggtcacacctgctcactcttcccagaccaccccctcctacaggagcgggagaagattgtggctcccatcagtgactccccgaagccaccgccacagcgtgtgaccctcacactacctgtcctgaatgcagcacgaactgtcatctttgtggcaactggagaaggcaaggcagctgttctgaagcgcattttggaggaccaggaggaaaacccgctgcccgccgccctggtccagccccacaccgggaaactgtgctggttcttggacgaggcggccgcccgcctcctgaccgtgcccttcgagaagcattccactttgtagctggccagagggacgccgcagctgggaccaggcacgcggcccatggggctgggcccctgctggccgccactctccgggctctcctttcaaaaagccacgtcgtgctgctgctggaagccaacagcctccggccagcagccctacccggggctcaacacacaggctgtggctctggacatccggatattaaaaggagcgttgctggaaaaaaaaaaa

SEQ ID NO: 1657 - DNA, 2185 bp, Homo sapiens
cattcaaacccagtccattctggctcatggggcccaagccttgctctgctgccccaggctgtgtaggatgcatctgcggtggccattcttctctccagaggtccttcctaggactgactttgtggagattctgtgctggtaggtggcggggcaagacacgcctgtctctccccctggaaggagtcagtccagcaagaaacctgatgaaaccagtgactcccagctctggatgagatggaccaaacgcccccggcgcgtcctgaatatctggtctcagggattcgaactccccctgtgaggaggaacagcaaactggccaccctgggcaggatcttcaaaccctggaaatggaggaaaaagaaaaacgaaaaactgaagcagacaacgtcagcgctggagaagaagatggccggcaggcaaggccgagaggagctcatcaagaaggggctgctggagatgatggagcaggatgctgaaagcaaaacttgcaaccccgatggaggaccccgatctgtacagagtgaaccacccactcccaagtcggagacgctgacttcagaagatgcccagcccggaagccccttggccactgggacggaccaggtctccctggacaagccactgtcctcagctgcccacttggacgatgcaggccaagccacactcttccaagcctccagcatgaagagtgccgacccttccctccggggccagctctccacacccacggggtctccgcatctcaccacggtccaccggcctcttcccccaagccgcgtcattgaggagctgcacagggcgctggccacgaagcaccgccaggacagttttcaaggaagagaaagtaaagggtctccaaagaagcggctggatgtccgtctgtcgagaacgtccagcgtggagcggggcaaggagagggaggaggcttggagctttgacggggcattggagaacaagcgaactgccgctaaggaatctgaggagaacaaggagaacctgatcataaattctgaactcaaagacgacttgcttttgtatcaggacgaggaggcgctgaacgactccattatttctggaacactgccacggaaatgcaagaaggagctcctggccgtgaagctaaggaaccggccaagcaaacaggaactagaagaccggaacattttccccagaaggactgatgaagaaagacaggagatccggcagcagatcgagatgaagctttccaaacggctgagccaaagacctgccgtggaagagctggagagaagaaatatcttgaaacaaaggaatgatcagacagagcaggaagaaagaagagaaatcaagcaaagattgacaagaaagcttaatcagagacccactgttgatgaattaagagacagaaaaattctgatacgattcagtgattacgtggaagtagcaaaagcgcaggactatgacaggagggcagacaaaccctggacgagactgtcagcagcagataaggcagcaattcgtaaagaattaaatgagtacaaaagtaatgaaatggaggtacatgcatcaagcaagcacttgacaagattccacaggccatagagattttcttctgagaagaatttgtgtttaattttttgataccaacactgaacattcatcagggaactttcctgaagttcagctcaagactaccctacctgctgtgtttgtgagaagagtaggatcacacacacaggtgcaatcttgaccacacttacctgcaagaggagtaaccagaggacacacttccttccttctttggtgtctgaggagtgtgaactgttggggtcagttaagacccaacataactctatcagaagaaaactgttgtttgcctttcaaccttgttttacagttctgcagtgtaatggaggacgggcaacgtgcatgtgcaggctcaccactcccaggcctctgacatgagggacatgtgacagtgtcattcagtattatgttcaaaagacatttttatcctgatcataattaatttgaaaactctttaagttcatgttatacaagatgatttactgtattatacttttccttttttatataatgtctaacaaaaaatacagctgcaacattttgattcctgttaattttgttctttaattaaatgactacttattgcaggaaattaaaaaaaaaaaaaaaaaaaaaaaaa

SEQ ID NO: 1658 - DNA, 2395 bp, Homo sapiens
cattcaaacccagtccattctggctcatggggcccaagccttgctctgctgccccaggctgtgtaggatgcatctgcggtggccattcttctctccagaggtccttcctaggactgactttgtggagattctgtgctggtaggtggcggggcaagacacgcctgtctctccccctggaaggagtcagtccagcaagaaacctgatgaaaccagtgactcccagctctggatgagatggaccaaacgcccccggcgcgtcctgaatatctggtctcagggattcgaactccccctgtgaggaggaacagcaaactggccaccctgggcaggatcttcaaaccctggaaatggaggaaaaagaaaaacgaaaaactgaagcagacaacgtcagcgctggagaagaagatggccggcaggcaaggccgagaggagctcatcaagaaggggctgctggagatgatggagcaggatgctgaaagcaaaacttgcaaccccgatggaggaccccgatctgtacagagtgaaccacccactcccaagtcggagacgctgacttcagaagatgcccagcccggaagccccttggccactgggacggaccaggtctccctggacaagccactgtcctcagctgcccacttggacgatgcagccaagatgccttctgcatccagtggtgaagaagcagacgctggcagcctcctgcccaccaccaatgagctctcccaagccttagctggggctgactccctggacagtcctcccagacctctggagagatccgtgggccagctccccagccccccactgctgcccactccgccacccaaggcaagctccaaaaccacaaaaaatgtcacaggccaagccacactcttccaagcctccagcatgaagagtgccgacccttccctccggggccagctctccacacccacggggtctccgcatctcaccacggtccaccggcctcttcccccaagccgcgtcattgaggagctgcacagggcgctggccacgaagcaccgccaggacagttttcaaggaagagaaagtaaagggtctccaaagaagcggctggatgtccgtctgtcgagaacgtccagcgtggagcggggcaaggagagggaggaggcttggagctttgacggggcattggagaacaagcgaactgccgctaaggaatctgaggagaacaaggagaacctgatcataaattctgaactcaaagacgacttgcttttgtatcaggacgaggaggcgctgaacgactccattatttctggaacactgccacggaaatgcaagaaggagctcctggccgtgaagctaaggaaccggccaagcaaacaggaactagaagaccggaacattttccccagaaggactgatgaagaaagacaggagatccggcagcagatcgagatgaagctttccaaacggctgagccaaagacctgccgtggaagagctggagagaagaaatatcttgaaacaaaggaatgatcagacagagcaggaagaaagaagagaaatcaagcaaagattgacaagaaagcttaatcagagacccactgttgatgaattaagagacagaaaaattctgatacgattcagtgattacgtggaagtagcaaaagcgcaggactatgacaggagggcagacaaaccctggacgagactgtcagcagcagataaggcagcaattcgtaaagaattaaatgagtacaaaagtaatgaaatggaggtacatgcatcaagcaagcacttgacaagattccacaggccatagagattttcttctgagaagaatttgtgtttaattttttgataccaacactgaacattcatcagggaactttcctgaagttcagctcaagactaccctacctgctgtgtttgtgagaagagtaggatcacacacacaggtgcaatcttgaccacacttacctgcaagaggagtaaccagaggacacacttccttccttctttggtgtctgaggagtgtgaactgttggggtcagttaagacccaacataactctatcagaagaaaactgttgtttgcctttcaaccttgttttacagttctgcagtgtaatggaggacgggcaacgtgcatgtgcaggctcaccactcccaggcctctgacatgagggacatgtgacagtgtcattcagtattatgttcaaaagacatttttatcctgatcataattaatttgaaaactctttaagttcatgttatacaagatgatttactgtattatacttttccttttttatataatgtctaacaaaaaatacagctgcaacattttgattcctgttaattttgttctttaattaaatgactacttattgcaggaaattaaaaaaaaaaaaaaaaaaaaaaaaa

SEQ ID NO: 1659 - DNA, 1826 bp, Homo sapiens
agtatgtgtggttggggaattcatgtggaggtcagagtggaagcaggtgtgagagggtccagcagaaggaaacatggctgccaaagtgtttgagtccattggcaagtttggcctggccttagctgttgcaggaggcgtggtgaactctgccttatataatgtggatgctgggcacagagctgtcatctttgaccgattccgtggagtgcaggacattgtggtaggggaagggactcattttctcatcccgtgggtacagaaaccaattatctttgactgccgttctcgaccacgtaatgtgccagtcatcactggtagcaaagatttacagaatgtcaacatcacactgcgcatcctcttccggcctgtcgccagccagcttcctcgcatcttcaccagcatcggagaggactatgatgagcgtgtgctgccgtccatcacaactgagatcctcaagtcagtggtggctcgctttgatgctggagaactaatcacccagagagagctggtctccaggcaggtgagcgacgaccttacagagcgagccgccacctttgggctcatcctggatgacgtgtccttgacacatctgaccttcgggaaggagttcacagaagcggtggaagccaaacaggtggctcagcaggaagcagagagggccagatttgtggtggaaaaggctgagcaacagaaaaaggcggccatcatctctgctgagggcgactccaaggcagctgagctgattgccaactcactggccactgcaggggatggcctgatcgagctgcgcaagctggaagctgcagaggacatcgcgtaccagctctcacgctctcggaacatcacctacctgccagcggggcagtccgtgctcctccagctgccccagtgagggcccaccctgcctgcacctccgcgggctgactgggccacagccccgatgattcttaacacagccttccttctgctcccaccccagaaatcactgtgaaatttcatgattggcttaaagtgaaggaaataaaggtaaaatcacttcagatctctaattagtctatcaaatgaaactctttcattcttctcacatccatctacttttttatccacctccctaccaaaaattgccaagtgcctatgcaaaccagctttaggtcccaattcggggcctgctggagttccggcctgggcaccagcatttggcagcacgcaggcggggcagtatgtgatggactggggagcacaggtgtctgcctagatccacgtgtggcctccgtcctgtcactgatggaaggtttgcggatgagggcatgtgcggctgaactgagaaggcaggcctccgtcttcccagcggttcctgtgcagatgctgctgaagagaggtgccggggaggggcagagaggaagtggtctgtctgttaccataagtctgattctctttaactgtgtgaccagcggaaacaggtgtgtgtgaactgggcacagattgaagaatctgcccctgttgaggtgggtgggcctgactgttgccccccagggtcctaaaacttggatggacttgtatagtgagagaggaggcctggaccgagatgtgagtcctgttgaagacttcctctctaccccccaccttggtccctctcagatacccagtggaattccaacttgaaggattgcatcctgctggggctgaacatgcctgccaaagacgtgtccgacctacgttcctggccccctcgttcagagactgcccttctcacgggctctatgcctgcactgggaaggaaacaaatgtgtataaactgctgtcaataaatgacacccagaccttcc

SEQ ID NO: 1660 - DNA, 5899 bp, Homo sapiens
gggggtcacgtggtgcagagcacgcagagtccttctgtcggttggtcctggagcggcgcagccggagtggggccgtgaggagaataaaggcagccccgttgatgactgaaaatgacaaagcatccacctaacagacgaggaatcagctttgaagtgggagcccagttggaagcccgggaccgtttaaaaaactggtatccagctcacatagaagacattgactacgaggaaggaaaagtactcatccatttcaagcgttggaaccatcgttatgatgagtggttctgctgggacagtccttatttacgccctttagagaaaatacagctgaggaaagagggcttgcatgaagaggatggatcttctgaatttcaaataaatgagcaggtccttgcttgctggtctgattgtcgtttttacccggccaaagtcactgctgttaacaaggatggtacttacactgtgaaattttatgatggagtagttcagactgtcaaacatattcatgtcaaagctttttccaaagatcagaatattgtgggtaatgctaggcctaaagaaacagatcacaaaagtctttcatcatctcctgataaacgagagaagtttaaagaacagagaaaagcaacagtgaatgtgaagaaagacaaagaagataaacccttaaagacagaaaagcgacccaagcagcctgataaagaaggaaagttaatctgttctgaaaaggggaaagtgtcagagaaaagtcttcccaagaacgagaaggaagacaaggaaaacatttccgaaaatgacagagagtattctggagatgcccaagtggataagaaacctgaaaatgacattgtgaagagtccacaagaaaacttgagggaacccaaaagaaaacgaggcagacccccttccatagctcctactgctgtggattcaaactctcaaactttgcaaccaataacattggaactgagaagaaggaaaatatcaaaaggatgtgaagtcccattaaaacgtcctcggcttgacaaaaattcatcccaggaaaagtcaaaaaactactcggaaaacactgacaaagacttatcgaggagacgttcctccaggctgtccactaatgggacccatgagatcctagatcctgacttggttgtatcagatttggttgatacggatcctttgcaagacacgttgtctagtaccaaggaatctgaagaaggtcagttgaagtctgctttggaagctggccaggtctcatctgcactgacttgccactcctttggggatggatccggggctgcaggcttggagttgaactgcccatcaatgggagaaaacacgatgaaaacagaaccgacttctccccttgtggaattacaagagatttcgactgtggaagtaacaaatacttttaagaaaacagatgattttgggtcatctaatgcaccagctgtcgacctagaccataagtttagatgcaaagttgtggactgtttaaaatttttccgcaaagccaaactgttgcactatcacatgaagtatttccatggaatggagaagtcactggagccagaagagagcccgggaaagaggcatgtccaaaccaggggcccttcagcttcagacaagcccagccaggagaccctgaccaggaagcgggtctctgccagttccccaactacaaaagacaaggaaaagaataaagagaagaaattcaaggagtttgtgagagtgaagccaaagaagaaaaagaaaaagaaaaagaaaaccaaacctgaatgcccctgcagtgaggagatcagtgacacctcccaggaaccttctccacccaaggcatttgctgttaccaggtgtgggtcctcacacaagccaggggtccatatgagcccgcagcttcatggcccagaatctggacaccacaaagggaaagtgaaagcattggaggaggataatttgagtgagtcctcttctgagagctttctctggagtgatgatgagtatggccaagatgtggatgtgaccaccaacccagatgaggaacttgatggggatgaccgctatgacttcgaggtggtccgctgcatctgtgaggtccaggaggaaaatgacttcatgattcagtgtgaagagtgccagtgctggcagcatggggtctgcatgggattactggaagaaaatgtgcccgagaaatacacctgttatgtttgccaagaccctccaggtcagaggcctggcttcaagtactggtatgacaaggagtggctgagcaggggacatatgcatggcctggcatttctagaagagaactactcccatcagaatgccaagaagatcgtggccacccaccagcttcttggtgatgtgcagagagtgattgaggttctgcatggcctgcagctcaagatgagcatcttgcaaagccgggagcatcctgatctgccgctgtggtgccagccttggaaacagcactcaggggaggggagatctcatttcagaaacatccctgtcactgacaccaggagcaaggaggaagctccaagctatagaactttgaacggggcagtggagaagcccaggcccctggccctgcccctgccgcgttctgtggaggaatcctatatcaccagtgagcattgctaccagaagccccgcgcctattaccctgccgtggagcagaagctggtggtggagacgaggggctctgccctcgacgatgcggtcaaccccctccatgagaacggcgatgattccctttccccgcgcctgggctggcctctagaccaagacaggagcaagggggacagtgaccccaaacccggctccccaaaggtgaaggaatatgtctccaaaaaggccctaccagaagaagcccctgctcggaagctgctggacagaggtggagaggggctgctgagctcccagcaccagtggcagtttaacctgctgacccatgtggaatctcttcaggatgaagttacgcacaggatggactccattgagaaggagttggatgtgttggagagctggctggactacactggggaactggagccccctgagccgctggccaggcttccgcagctcaagcattgtatcaagcagctgctgatggacctgggcaaggtgcagcagatcgccctctgctgctcaacatgaaactgggcacccaaaactcatgggggcacaatcctggggcacctgcaggaggagcttcgcatatttaaataaataaacctagcatgctgaatgcacgtgacaccgactgacttcagggatctgggccaggagtgtggtggacattggacaaagaggccattttggctgcgggaggacactctgatctcgaagcctgccataaaggtagcaaatagactcttgggattcccctcttctgtgcacatcgttgaatgaagagagtctttttgcacaaacttcacttgaaattgtgccactgatgataaacggaatgagagccaaaaaagtttagttggagacagttgtaaattcaatttggagtttatttaattgacttttctatcacgttggggcacatgccaactccctggtttcttcctggcatggtgtttgggcagcaggcatcattttccttttctagcttcataggaatattgtgagctcaccatgctgtggaggttgggaaagagcagagtcttggctgccctgctttctccttaggactcttcacttttctcaccacatctcttgcatgacttcatggtactggggacaagtttgtatgccttcaccccagagctggctgggttatggcttttgtagcagagcccatacagcctatggaagaactagaatctcactcacagtaataagaatctaggaggaattccaaaccgaagcaggcagggtctggaacccaaaggacagcattttctacccacttcttaatattgacagcttccccgttctatttaatgtccaaaaatgtttcccaaaatttcaaactctttcactgtaaagatttgttacaaagaatgtggtttggggaattaccttattttatattgttgtaaacaaacttcaaattctacatgtgcgacttttctccttcctgaagggtgtttagtagtcagcgttttcagaattgttttgttactatactttaacattttacatttcctgtttgtattattttgtgagagcaaggtgatcatgctgcttaaggtccaggtacaacctatttgtaccttttgagacaatatttgtgttacttttgcaggttacggttccacatgtaattgctatattttgttttgtttttccttactaggcaaagttaaaatgttccatgctttgaggagtgacccatttcactactttgttttcttatcactaaaggcaaaaatcaaagcacagttgtccattaacacttataagttaattatgggtttatgagtctgtaatgttatatgctgcaaacatttactatgtaaacgtgaagtagccaataatatctcaatagtagtaacagtatctttagcgacctttggaatagttaagcacaggtcattgtggacatgaattcaggcctctgtactaaaatctatttcagggaatgttctgtctagtgatttgctcaccatttgatatataatgaattataggacaagtataagctgatctgctatagctgtccatcagagagaatacacgtggctataacatctataacaaaacgacgattcctctacaagaggctgtttctcactgctaacgttggtgtttctggcgtgggaagaaatgcacaggcgtgcatggcatgcacgttcagacagctgcattgtaagagttctgtcatgcagtctgaaaagggaagaaacaggatggctttctgtagccacacctgtgaggcgtgatgattgttgtattattagattactgatttttcttttctgaaaatacatttgagttttaatcacatctgtggaagctgtaacttttaaggtagtcaatttcatgtcttgttcaacgatgtaagcagaaactgaattgccctaattttgccaactggccattattgggattattgtttaaatttttggtaaaggaagtaatctcctttcattcattgtgacttttgttcttagggaagcagagaagactccccaagttcttataacctcattgtgcttccctaatttaaagccatgttgaggggctccattcccaattcctgggtcaaggtgaattaaccctatgttggagcactggaaaccgttatttgcaaacattgctgttaccatttagaaatatgtgcactatcagctgggtgcagtggctcacgtctgtaatcccagcactttgggaggccgaggcaggtggatcacctgaggtcaggagttcgagaccagcctggccaacagggtgaaaccccgtctctactaaaagtacaaaaattagctgggcgtggtggcggacgcctgtaatctcagctacttgggaggctgaagcaggagaggtgctggaacctgggaggcggaggttgaagtgagccgagattgcgctattgcactccagctcgggcgacaactgcaagactccatctcaaaaaaataaaaataaaagaaaagaaagaaatatgtgcactacctaagttttgtctttagaaaaactatccacctataaaaaattaccttgacaaaaatagttccggtttgactaatcattttgtttctttaagtggtaagtgtatgcaaggtggatccttgatgagccaacattgcactgtggatacatatctatgtttacgcgctattagaacagaaggcgctgtatatagaaatgttgctttgaagcaatatttgcaaaacacgcagacttctgtatctgtatttggaaaaaataaaacaggttcttgttaaaaaaaaaa

SEQ ID NO: 1661 - DNA, 6947 bp, Homo sapiens
gggctgaaagacacacagaagtcttcatggatatagttgatacatttaatcatttaattcctactgaacacttagatgatgccctatttctaggatccaacctggagaatgaagtctgtgaggattttagtgcaagtcaaaatgtcttagaggactcgctgaagaacatgctcagcgataaggatcctatgctaggatctgcaagtaaccagttctgtttgcctgttttggatagcaatgatcccaatttccagatgccttgttcaacagttgttggtcttgacgatattatggatgaaggagttgttaaagaaagtggcaatgataccattgatgaagaagaactgattttacctaacaggaacttaagggacaaggtagaagaaaattcagtgagatctccaagaaaatcacctcgtttaatggcacaagaacaagtaagaagtttgcgacagagcactattgccaagcgttcaaatgcagcaccattaagtaacacaaaaaaagcatctgggaagactgtatctactgctaaagcaggagtgaaacaaccagaaaggagtcaggttaaagaagaagtatgtatgtcactgaaacctgagtaccataaggagaatagaaggtgcagccgaaatagcggacaaattgaagtggtacctgaagtatcagtgtcttcaagtcattcttcagtgtcatcttgtcttgaaatgaaggatgaagatggattagattctaagcataagtgtaataatccgggagaaatagatgtgccatctcatgaattaaattgttcacttctttcagagacttgtgttactattggagaaaagaaaaatgaagctttgatggaatgtaaagccaagcctgttggtagtccattgtttaagttttcagataaagaagaacatgaacaaaatgattccatttcaggtaaaacgggtgagactgttgttgaagaaatgatagcaacaagaaaagttgaacaagattcaaaggagacagtaaaattatcccatgaagatgaccatattcttgaggacgctggatcttctgatatttctagtgatgctgcttgtacaaatccaaataagacagaaaacagccttgtaggtttgcctagttgtgtagatgaagtgactgaatgtaatttggaattgaaggataccatgggtattgctgataaaactgagaacacccttgaaagaaataaaattgaaccgttgggttattgtgaagatgcggagtctaataggcagttggagagcactgagtttaataaatcaaacttagaggtggttgatactagtacttttggaccggaaagtaatatcttggaaaatgctatttgtgatgtgcctgaccaaaattcaaaacagttgaatgctatagaaagtactaaaatagagtcccatgaaacagcaaaccttcaggatgacagaaacagccagtcaagtagcgtttcttacttagagtcaaaaagtgtaaaatccaaacatacaaaacctgtaattcattctaagcaaaacatgaccacagatgctccgaagaaaattgttgcagcaaagtatgaagtaatacatagcaaaactaaagttaatgtcaaaagtgtgaaacgaaatactgatgtaccagaatctcagcaaaattttcataggccagtcaaagtcagaaaaaaacaaattgataaggagccaaagattcagagttgcaattctggggttaaatctgtgaaaaaccaagctcattctgtactgaaaaaaacattacaggatcaaactttagtacaaattttcaagcccttaactcattctttgagtgataagtcacacgctcatcctggttgcttgaaagaacctcatcatcctgcacaaactggacatgtatcacattctagccagaaacagtgtcataagcctcagcaacaggccccagcaatgaaaaccaatagtcacgtgaaggaagagcttgaacacccaggcgttgagcattttaaggaagaggataaactgaaactgaaaaaacctgagaagaacctacaaccccgccaaagaagaagcagcaaaagtttttctttagatgagccaccattgttcattccagataacatagctaccataagaagagaaggctctgatcatagctcctcatttgaaagcaaatatatgtggactcccagcaagcagtgtgggttttgcaaaaaaccacatggcaacaggtttatggttggctgtgggagatgtgatgactggtttcatggtgattgtgttgggttaagtctttctcaagcacagcagatgggcgaggaagacaaagaatatgtctgtgtaaaatgttgtgctgaagaagacaaaaagactgaaatactagatccagatactttggaaaaccaagctacagttgaattccatagtggagataaaacaatggagtgtgaaaagcttggattatcaaaacacacaacaaatgatagaaccaaatatatagatgatacagtgaagcacaaggtcaaaattttaaaacgggagtctggtgaaggcagaaattcatcagactgtagagataatgaaattaaaaaatggcagctagctcctcttcgtaagatgggacaaccagttttacctcggagatcctcagaagaaaaaagtgaaaaaataccgaaagagtctacaactgttacttgcacaggagaaaaagcttcaaaaccaggtactcatgagaagcaagagatgaaaaagaagaaagttgaaaaaggagtgcttaatgtacatcctgctgcttctgcttccaagccttctgcagatcagatcaggcaaagtgtcagacattctctcaaagacattcttatgaagagacttacagactcaaatttgaaggtaccagaggaaaaggcagcaaaagttgccacaaaaattgagaaagagcttttctctttttttcgggacacagatgctaaatataagaacaaatatagaagtttgatgtttaatttgaaagatcctaaaaacaatatattatttaaaaaagtactgaaaggagaagtaactcctgatcatcttatcagaatgagtccagaagaactagcttctaaagagttagctgcttggagacgaagagaaaacagacataccatagaaatgattgagaaagagcagagagaagtggaacgacggccaatcaccaaaataactcataaaggtgaaatagaaattgagagtgatgccccaatgaaagaacaggaagcagccatggagattcaggaaccagccgccaataagtcattggagaagccagaaggatctgaaaaacaaaaagaggaggttgactctatgtctaaagataccactagtcaacacagacagcatctttttgatctcaactgcaaaatctgcataggtcgaatggcaccacctgtagatgatctttctccaaaaaaagtaaaagttgttgtaggagtagctcgcaaacattcagacaatgaagcagaaagtatagcagatgcattatcttcaacctcaaatattttggcttctgaattctttgaggaggagaaacaggagtctccaaagtcaacgttctctcctgctccacgtccagagatgcctggaactgttgaagttgagtctacctttctggctcgattgaacttcatctggaaaggttttatcaacatgccttctgtggcaaaatttgttaccaaagcctatccagtatctggctccccagaatacctgacagaggacctaccagatagtattcaagtaggtggcaggatatcacctcagacagtttgggattatgtggaaaaaataaaagcatcaggaaccaaggaaatttgtgtggttcgcttcacaccagtaactgaagaagatcaaatttcttatactttgctctttgcatacttcagtagcagaaagcgctatggagtagctgctaacaacatgaagcaggttaaagatatgtaccttattcctttgggtgccacagataaaattccacaccctcttgtgccttttgatggacctgggcttgaactgcatagacctaatctattgttgggcttaattattcgtcagaaactgaagcgacagcacagtgcctgtgctagtactagtcatatagctgagactcctgaaagtgcaccaccaatagcattgccacctgataaaaaaagtaaaatagaagtttctacagaagaagcaccagaggaagaaaatgacttttttaattcttttacaactgtattacacaagcagagaaataaacctcagcagaatcttcaggaagaccttccaacagcagttgaacctttaatggaagtcaccaaacaggagccaccaaaacctttaagatttcttcctggcgtgttgattggctgggagaatcaacctactactctggaattagcaaataaacctcttcctgtggatgatatacttcaaagccttttgggcaccactggtcaagtatatgaccaggcccagtcagtgatggaacaaaacactgttaaagaaattccatttttaaatgagcagaccaactcaaaaatagagaaaacagataatgtggaagtaactgatggtgaaaacaaggagataaaagttaaagtagataatatttcagaatctacagataagtcagcagaaatagaaacatcagtagtagggtcctcttccatttctgcagggtctttgacgagtcttagtctcagaggtaagccaccagatgtttctacagaagcatttttaacaaatttatcaattcagtcaaaacaagaggaaactgtggagagtaaagagaaaacattaaaaagacagcttcaggaagatcaagagaataatttgcaagataaccagacttcaaatagttctccatgcagatctaatgtaggaaaaggaaacatagatggtaatgtgagctgtagtgaaaaccttgttgctaatacagcgaggtctccacagtttatcaacctgaaaagggatcctaggcaagcagcaggacgaagtcagcctgtaactacttcagaaagcaaagatggagatagttgccggaatggagaaaaacacatgctgcctggcctgtcacacaacaaggagcacttaacagaacaaatcaatgtagaggaaaagttgtgttctgcagagaaaaactcgtgtgttcagcagagtgacaatttaaaagttgcacaaaactcaccatcagtagaaaacatacagacttctcaagcagaacaagcaaaacccttacaggaggatattttaatgcaaaatattgaaactgtgcacccatttcgaagaggatcagcagtagcgacatctcattttgaagttggaaacacatgtccatcagaatttccttctaaaagcatcacctttacttccagaagcaccagccccagaacaagtacaaacttttcacccatgaggccacagcagcccaaccttcagcatctcaagtctagcccacctggatttccatttccagggcctcctaattttcccccacaaagcatgtttggatttccaccacatttgccacctccattacttccccctccaggctttggctttgctcaaaatcccatggttccctggccacctgttgttcatctcccaggtcagccacagcgtatgatgggtcctctctcacaagcatcaaggtatataggcccgcagaatttttaccaggttaaagacattcggaggccagaaaggcgccatagtgacccttggggtaggcaagaccaacagcaactggataggccatttaataggggtaaaggggaccgccagagattttatagtgattcacaccatttgaaaagagagcgacatgaaaaggaatgggagcaagaatctgaaaggcatagacgcagagacagaagccaagacaaggacagagacagaaaaagcagggaggaagggcacaaagataaagagagggcacggttatcacatggtgatcgaggaacagatggaaaagcaagcagagatagtaggaatgtagacaagaagccagataaacctaaaagtgaagactatgagaaggacaaagaacgagagaaaagtaaacacagagaaggagaaaaggacagggataggtaccacaaagatagggaccacactgacagaactaaaagcaaaaggtaaaatttgcaggctgcttcaggattacatttaaataactgttaaaatgttgtatcttgtaaacaaaagaaagattgcctgctaggattgtgccatctttaaaatttttactattggtcatttgcagaacagtaaattctgtgtgttggtacagagtgctctgtaccagtgctcatcatcccttcttcataccaacggtccctagttataggaatttaatatttttaaaagttttacattgctgtatattcaaagatttgttttattaatatgcaataaaggcttagaaattttagttttattccttaattggtaaatatggttaactatggaatatatttacttcctctagtgaatgtcctttatataatgactaatttgggagtaatgtgtgctctgtaagtttgttttaaattgcactgtttttaaagaaactgtagaggagcaacaaaaatccaagcaacttcataatcagattatgctaatcatttagttgagcagtttttgaccaagaatcagaagcccaaggggtacatttattgctttaatctgcactcattgaagtcatttattaccatatactacagctttgtggtaggccattattttcattttcatttttggctcttcagaaacttgaatacttaagcttgtacatgatcttgtgttttgctatcctttttactgtaaaatgtaaatattttaagggatattttgattctaaatatgataaaataatttctcacctattttgtgtgtgtgacttgaaattcagtagtaaaagaatttcttctttaaagcttt

SEQ ID NO: 1662 - DNA, 1571 bp, Homo sapiens
aaggtgagcgactgcaggcaaacccggcgacagcgcagctcgcgtcgaccctggctcctctgcctgccccctcaggcccccgcctccttcaggatgacgctggacgtggggccggaggatgagctgcccgactgggccgccgccaaagagttttaccagaagtacgaccctaaggacgtcatcggcagaggagtgagctctgtggtccgccgttgtgttcatcgagctactggccacgagtttgcggtgaagattatggaagtgacagctgagcggctgagtcctgagcagctggaggaggtgcgggaagccacacggcgagagacacacatccttcgccaggtcgccggccacccccacatcatcaccctcatcgattcctacgagtcttctagcttcatgttcctggtgtttgacctgatgcggaagggagagctgtttgactatctcacagagaaggtggccctctctgaaaaggaaaccaggtccatcatgcggtctctgctggaagcagtgagctttctccatgccaacaacattgtgcatcgagatctgaagcccgagaatattctcctagatgacaatatgcagatccgactttcagatttcgggttctcctgccacttggaacctggcgagaagcttcgagagttgtgtgggaccccagggtatctagcgccagagatccttaaatgctccatggatgaaacccacccaggctatggcaaggaggtcgacctctgggcctgtggggtgatcttgttcacactcctggctggctcgccacccttctggcaccggcggcagatcctgatgttacgcatgatcatggagggccagtaccagttcagttcccccgagtgggatgaccgttccagcactgtcaaagacctgatctccaggctgctgcaggtggatcctgaggcacgcctgacagctgagcaggccctacagcaccccttctttgagcgttgtgaaggcagccaaccctggaacctcaccccccgccagcggttccgggtggcagtgtggacagtgctggctgctggacgagtggccctaagcacccatcgtgtacggccactgaccaagaatgcactgttgagggacccttatgcgctgcggtcagtgcggcacctcatcgacaactgtgccttccggctctacgggcactgggtaaagaaaggggagcagcagaaccgggcggctctctttcagcaccggccccctgggccttttcccatcatgggccctgaagaggagggagactctgctgctataactgaggatgaggccgtgcttgtgctgggctaggacctcaaccccagggattcccaggaagcagaactctccagaagaagggttttgatcattccagctcctctgggctctggcctcaggcccactaatgatcctgctaccctcttgaagaccagcccggtacctctctccccactggccaggactctgagatcagagctggggtggaagggagccattctgaacgccacgcctggcccggtcagtgctgcatgcactgcatatgaaataaaatctgctacacgccaggg

SEQ ID NO: 1663 - DNA, 3058 bp, Homo sapiens
gcagctgggaaccgcgggcgctaggcgcgcgcacccagcactcggtcccagccgataaatctggggcagcgcgcggtaggagctgcgggcggccaggccccttcctgcgtccgcacctggccccgcgcgcccctctcgggcgtccggcttccggcgtcctggcggctcgggtggcggcggttcgggcggccgcctggctgctcctcggggcggcgaccgggctcacgcgcgggcccgccgcggccttcaccgccgcgcgctctgacgccggcataagggccatgtgttctgaaattattttgaggcaagaagttttgaaagatggtttccacagagaccttttaatcaaagtgaagtttggggaaagcattgaggacttgcacacctgccgtctcttaattaaacaggacattcctgcaggactttatgtggatccgtatgagttggcttcattacgagagagaaacataacagaggcagtgatggtttcagaaaattttgatatagaggcccctaactatttgtccaaggagtctgaagttctcatttatgccagacgagattcacagtgcattgactgttttcaagcctttttgcctgtgcactgccgctatcatcggccgcacagtgaagatggagaagcctcgattgtggtcaataacccagatttgttgatgttttgtgaccaagagttcccgattttgaaatgctgggctcactcagaagtggcagccccttgtgctttggagaatgaggatatctgccaatggaacaagatgaagtataaatcagtatataagaatgtgattctacaagttccagtgggactgactgtacatacctctctagtatgttctgtgactctgctcattacaatcctgtgctctacattgatccttgtagcagttttcaaatatggccatttttccctataagttttatgtagttaaatgcttcctagaaacctaaataagatctattaatttctgacgagaggtgttcttctagaattaattacttttatcttttgtcttcatttgtggccaaaattatgtttactagaggaaatttgggatcattctcagctaattccaaaatgtagtgctctattgcatggatccttggtaatcctcaagcatcagatgccataaggggaaacttaattctgctaaattaatgtttattttgtgagaagtgactttatcttcatttggggtagaaaaattatttctttatgtagtagagacaaattattctcattttgcaagtactttcaatttaagctacaaattgagaaaaccgttataaataagaataaaataggccaggcacagtggctcacacctgtaatcccagcactttgggaggccgaggtgggcggatcaccagaggtcaagagtttgagaccagcttggtgaaaccctgtctctactaaaaatacaaaagttagctggggctggtggtgggcatctgtagtcccagctaattggaagggtgaggcgggaggatcgcttgaacctgggaggcggaggttccagagagccaagatcgcaccactgcactacagcctgggcgacagaacgagaccctgtctccaaaggaaaaacaaaaaagaagaataaaataatttggatgaaaatcatgtttatttaaatagtaatgtcatgagactattaaagatgtgccagagtttcaatgaaaatcattaaagtaggacagctaagaaattaatattaatatcaaaattattgataatcttaaattattgattattccttaacgcactccattctccttttacattttatcatgtttcttttgaatatatgaattggcaaaggacttgatgaaactgagtactaagatttggtacagagtatgtcaggaagacaactcagattgccattttaaataaagttgtacatgaacaataattggaatcatcaggtaatttttttaaacaaaggttcttcatttactgttatgattggaaaaaaattagaaaataaagtaagtgccataggctaattaaaaaataaaaccttggccgggcgcggtggcttacgcctataatcccagcactttgggaggccgagacgggcagatcacgaggtcaggagattgagaccatcctggctaacacggtgaaaccccatctctactaaaaatacaaaaaaatgagccgggtatggtggtgcatacctgtagtcccagctactcgggaggctgaggcaggagaatggcatgaacccggaaggcagagcttgcagtgagccgagatcacgccactgcactccagcctgggcgacagagtgagactctgtctcaaaaaaaaaaaaaaaaaaaaaaaaaaaaaagtaaataaaaccttagggcaagcatgttccaaaacagaagacatcaaaccagggtgtgttggcattatttattttatgtagagtattgagatgtgataaacctttgtatatgccatcactgctccatttcctaaagtattttggtgttttcatgggactacatcttgtataatttgacatgtatgacctgactagtcctaacagttctttttaaacgtgtatttgagacttaaatattggaaaaggtaacccagtgccataaagcagaaacagtgacctttaaaatgactaaaatttcaacccagtatagtttcatacctatttcatgctttctcgtaagaaagaatttcatgttttagaaacatttctttcactatgggattaataatatgacactgaaatggaattatatatgtcagctacaattcaggcattgttttgggatatggttagattgacaggcaacgttttggaatatggttagacggggagggaacacggtactgtttaacatcttaagagtatgtgggggtatgtgtatacagaatgtttttgtttttgctcatcacaaccaggtttcatcagtatttaaaatatttaagattgtggcttggaatgtggttcagccatttactcacttatacaaatattcagaagtgtaataaaaatgtgaatgaagaaaaaaaaaaaaaaaaaaaaaa

SEQ ID NO: 1664 - DNA, 7618 bp, Homo sapiens
aagaatcagaagacatttgtgctttggggagcagaggccctcagggtatagagaaggaagaagagagaggttcactgtagtcctgaagcagaaataagacctgtggctgaaggaagccttagcaattcactccttcctcttcctgagaactctctgtaggaagtctcacctagcagaggcttcacagtatttcagagaagccaaagattgtttgcctctttggaaactgttatccttccatcatgactgtgtcactcctgccactgttccaccatagagatggcgtcctttgcagcaaaccgtaagttataaggatgagggaagaagagtagagggccaaaaggattccattttgaggaaaaactacagtttgccttgccaggtagaagaatcaggcgcccagacaccatgtcacaaccctccagaactgacgttggcaggaagtagagactttgttgcctgtgtcccccatcctcaccatgtcttcgactcaggacaatggggaacactggaagtccctggagtctgtgggcatcagccgcaaagaactagcgatggccgaagccctgcagatggagtatgatgccctgtcccggctccggcatgacaaggaggagaacagagccaagcagaacgcagacccctctctcatcagctgggatgagcctggggtagacttttacagcaagccagcaggaaggcggaccgacctcaagctgttacgcggtctctctggctctgatcctacccttaactacaactcactatccccacaggaagggccgcccaaccactctacctcccaagggccacagcctggctcagatccctggcccaaaggctccctgtctggagactatctctacatttttgatggttcagatgggggagtctcttcgtccccaggaccaggggacatagagggctcttgcaagaaactatccccacctcctctgcctccccgagcttctatctgggatacccctcccctgcctcccagaaaggggtccccctcatcctccaagatctcccagcccagtgacatcaacactttctctttggtcgaacaattgccaggcaaactgctagagcatcggatcctagaagaggaagaggtgctgggaggtgggggtcaggggcgcctactggggtctgtggactatgatggtatcaatgatgcaattactaggctcaacttgaaatcgacctatgatgcggagatgttgcgggatgccaccaggggctggaaggagggccgagggccgctggacttcagcaaagacacctctggaaaacccgtggccaggagcaagactatgccccctcaggtgcccccccgcacctatgcctcccgctatggcaaccgaaagaatgcgacgcctggcaagaaccgccggatttctgcagccccggtgggctcccggccccacactgttgccaatggccatgagttgtttgaggtctcagaagagagagatgaggaggttgctgcattttgccacatgctggatatccttcgatctggctctgacatccaagactacttcctcactggctatgtctggagtgctgtcacccctagcccagagcacctcggggatgaggtcaacctgaaggtgactgtgttgtgtgacaggcttcaagaggcactcactttcacctgcaactgttcctccactgtagacttgcttatctaccagaccctgtgctacacccatgatgacctgaggaatgtggacgtgggtgactttgtgctaaagccctgcgggctggaggagttcctgcagaacaagcatgccttgggcagtcatgagtacatccaatactgccgcaagtttgacattgacattcggctacagctgatggagcagaaggttgtgcgcagtgacctggcccggacggtgaatgatgaccagagcccctccaccttgaactacctcgtccatctccaagagaggcctgtcaagcagaccatcagcaggcaggccctgagtcttctgttcgacacttaccacaatgaggtggatgccttcctgctggctgatggagacttcccactgaaggctgacagggtggtccagtccgtcaaggccatctgcaacgccctggccgccgtggaaacccctgagatcaccagtgctctcaaccagctgcccccctgcccctcccgcatgcagcctaaaattcagaaggatcccagtgtcttggctgtgagggaaaaccgagagaaggtcgtggaagccctgaccgctgccatcttggacctggtggagctgtactgcaacacattcaacgcagacttccagacggcagtgcccgggagccgcaagcatgacctggtccaggaggcctgccatttcgccaggtccctggccttcactgtctatgccacccaccgcatccccatcatctgggctaccagctatgaagatttctacctctcctgctccctcagccatggcggcaaggagctgtgcagccccctgcagacccgaagagctcacttctccaagtacctcttccacctcatcgtctgggaccagcagatctgcttcccagtgcaggtgaaccggctgcctcgggagacactgctgtgtgccactctctatgctctgcccatccccccaccggggagctcctcagaggccaataagcagcggcgggtgcctgaagccctgggctgggtcactaccccactcttcaacttcaggcaggtcctgacctgtggccggaagcttctgggtttgtggccagcaacacaggaaaatcccagcgcccgttggagtgcacctaatttccaccagccagacagtgtcatcctgcagattgacttccccacctcggcctttgacatcaagttcaccagcccccctggagacaagttcagcccccgctatgagtttggcagcctccgggaagaagaccagcgcaagcttaaagacatcatgcagaaagagtccttgtactggctcactgatgctgacaagaagcgcctgtgggagaagcgatattactgccactcggaggtgagctcgctccccctggtgctcgccagcgcccccagctgggagtgggcttgcctgcctgacatctatgttctcctgaagcagtggacccacatgaaccaccaggatgccctggggctcctgcatgccaccttcccggaccaggaggtgcgtcgtatggctgtgcagtggattggctcactctcagatgctgagctgctagactacctgccccagctggtacaggccctgaagtatgaatgctacctggacagcccgttggtgcgcttcctcctgaaacgagctgtgtctgacttgagagtgactcactacttcttctggttactgaaggacggcctcaaggactctcagttcagcatccgctaccagtatctgctggcagccttactgtgctgctgtggcaaggggctgagagaagagtttaaccgccagtgctggcttgtcaatgccctggccaaactggcccagcaggtccgggaggcagccccatctgcaaggcagggaatcctccgcacgggcctggaggaggtgaagcagttctttgccctcaatggctcgtgccgcttgccactcagccccagtctgctggttaagggaattgtgcccagggactgttcctacttcaactccaatgctgtccccctcaaactctccttccaaaatgtggatcccctgggtgagaacatccgtgtcatcttcaagtgtggggacgaccttcgccaggacatgctaacgctgcagatgattcgcatcatgagcaagatctgggtccaggaggggctggacatgcgcatggtcatcttccgctgcttctccaccggccggggcagagggatggtggagatgatccctaatgctgagaccctgcgtaagatccaggtggagcatggggtgaccggctcgttcaaggaccggcccctggcagactggctgcagaaacacaaccctggggaggacgagtatgagaaggctgtggagaactttatctactcctgcgctggctgctgcgtggccacgtacgtcttgggcatctgtgaccgacataatgacaacatcatgctgaagaccactggtcacatgttccacattgattttggccgcttcctgggccatgcccagatgtttggcaacatcaagcgggaccgtgccccctttgtcttcacctcggacatggcgtatgtcatcaacgggggtgacaagccttccagccgcttccatgattttgttgacctttgctgccaagcctacaacctcattcgcaagcacacccacctcttcctcaaccttctgggcctgatgttgtcctgtgggatccctgaactctcagacctggaggacctcaagtatgtgtacgatgccctgaggcctcaggatacagaggccaatgccactacctacttcactaggttgattgagtccagcctgggcagtgtagccacaaagctcaattttttcatccataatctggctcagatgaagttcacgggctcagatgaccggctgaccctctcctttgcctcccgaacacacactctcaagagctctggccgaatcagtgatgttttcctctgccgccatgagaagatcttccaccccaacaaaggctatatatatgtggtaaaggtgatgcgagagaacactcacgaggccacctacatccagcggacctttgaggagttccaggaattacacaataagttgcggctgctcttcccttcttcccacttgcccagcttccctagtcgcttcgtgatcggccgctcccggggagaggcggtggccgagcggcggagggaggagctaaacggttacatctggcacttgatccacgcaccccctgaggtggccgagtgtgatttggtgtacaccttcttccacccactgccccgggatgagaaggctatgggcaccagcccagctcctaagtcctcagatggcacatgggcccggcccgtcggaaaggtgggaggggaggtgaagctgtccatctcctacaaaaacaataaactcttcatcatggtgatgcatattcggggcttgcaactgctccaggatggaaatgaccctgacccctatgtgaaaatttacctccttcctgaccctcagaaaaccactaagaggaaaaccaaagtggcccggaaaacctgcaatcctacctacaatgagatgttggtatatgatgggatccccaagggtgacctgcagcagcgggagctccagctgagcgtgctgagtgagcagggattctgggagaacgtcctcctcggtgaggtgaacatccgcctgcgagagctggacctggctcaggagaagaccggctggttcgccctgggatctcgaagtcatggcaccttgtgagcccagcagagccaccacccagcatcccaggctggtggcaggagctgggggagaggactctcccctgtgagactcctccttgtgaagggccagggccctgggcaggcctccagctcggtccaggtgattctggcctctgtggtaggaggcagggagagtaagacatgctctgctgtctcttcctctggagactgaacttgggttggttgtgatgagcagccccttggaggctgtgaggttgcagcaaagttttaagtttaccttgtgtcaagggagcaatgcttggtttggggagtgtgtggggtgggctgtatgaagtagcattttgggggtgggtgggtggatatcttaatttttatttttaaaaaatgaaatagtgatgttgtcctaactgggacaggaagccttgcgagaagggacgtacctatgccccagaaggcaagagaggaagactatttggactttttgtatgattaaggttcttattggacttttccctaggttttttttttttgttattgttgttgttgtttcgttttctagctataggaactatctggggaggggcccagtgggtcctcggccagagccctctctaaggacaggttggggagggttggggagggctgcctgtgctggactgaggcttgtgccactgggcctttctgattttgcctccaaaggagagcgctgtgatacctacatgtgtaaggaagggccttccgtattggggttctgccaaggacccgtattcagggacccatgctcttttggggggacttttcctcttgtcttccctactttattaggacttgccctgaataccattttctaccccttgcccctccattctcctggcccttctgggggtcagctggtctctatgaatatgctgggggtgcttccccataggtctctcccttcatttgtctctggtgggacaaaatactgactcagtccttagatgtagtttcacccaagagcatcttggccctgggaagaggtccctaggctgcagatgctactgactgcttgctaggtagcctctggaaagcattccccatccatcactccccacttctttctgctgtgctgcttccctcccaaactccatttctgtcaccctttttataagacttttcctcattctgtggggccataaacctatttagtctggagccaaagggatgccctatctgaaggaaaggggcatggggtgggggattccatcaaaactgttgttttttgccccatgatttttctttggtcagtaggaggctggattggagtggtgattattcccctggagctaagctcaggagcccgaagggagagactgagactgactcccttatctcttcatattctttattccctaccagatggatttttttttttttttttggagacggagtctcgccctgtcgccaggctggagtgtagtggcatgatctcgactcactgcaaaatctgcctcccgggttcaagcgattctcctacctcagcctcccgagtagctgggattacaggcatgtgccaccacgccaagctaatttttgtatttttagtagagacggggtttcaccatgttggccaggatggtctcgatctcttgacctcgtgatctgcctgccttggcctcccaaagtgctgggattacaggcgtgagccaccatgccccgccccagatggattttacatttgctcttttgtgtttcgctccaaagggttgtcttcctcgccaaaaggagggagggactttgaatttgatatgaatctttaaaaccagaattggctggatatttcccatgattgggaaaagagtgaaatgaggacattctgtaaactgtccctccctaattccaaggatcagaaactccccgttttgctgactcattccataactggagaaagaagctccattgaccgaagccacagggcagcatggaagtttaaattttctctaaaattaaaatgccaaggataaagctggctgcttccaggagggggaagaggagtggggagtgggcggtgaaacttttccagatgaacggaccataaatgtgttactggctttgtgcctgtagctcattttattatgacctatatgctcctgatttaaagagatctgtgtactgtttacttcccacttcccagaatcccttgtatctcctttctcgggaattgtattttctaataaatgacatttgagaaaaaaaaaaaaaaaaaaaaaa

SEQ ID NO: 1665 - DNA, 997 bp, Homo sapiens
aggcgctgcggcaggagggaagatggcggacgaggagaagctgccgcccggctgggagaagcgcatgagccgcagctcaggccgagtgtactacttcaaccacatcactaacgccagccagtgggagcggcccagcggcaacagcagcagtggtggcaaaaacgggcagggggagcctgccagggtccgctgctcgcacctgctggtgaagcacagccagtcacggcggccctcgtcctggcggcaggagaagatcacccggaccaaggaggaggccctggagctgatcaacggctacatccagaagatcaagtcgggagaggaggactttgagtctctggcctcacagttcagcgactgcagctcagccaaggccaggggagacctgggtgccttcagcagaggtcagatgcagaagccatttgaagacgcctcgtttgcgctgcggacgggggagatgagcgggcccgtgttcacggattccggcatccacatcatcctccgcactgagtgagggtggggagcccaggcctggcctcggggcagggcagggcggctaggccggccagctcccccttgcccgccagccagtggccgaaccccccactccctgccaccgtcacacagtatttattgttcccacaatggctgggagggggcccttccagattgggggccctggggtccccactccctgtccatccccagttggggctgcgaccgccagattctcccttaaggaattgacttcagcaggggtgggaggctcccagacccagggcagtgtggtgggaggggtgttccaaagagaaggcctggtcagcagagccgccccgtgtccccccaggtgctggaggcagactcgagggccgaattgtttctagttaggccacgctcctctgttcagtcgcaaaggtgaacactcatgcggcccagccatgggccctctgagcaactgtgcagcaccctttcacccccaattaaacccagaaccact

SEQ ID NO: 1666 - DNA, 2680 bp, Homo sapiens
cgcagaggcaccgccccaagtttgttgtgaccggcgggggacgccggtggtggcggcagcggcggctgcgggggcaccgggccgcggcgccaccatggcggtgcgacaggcgctgggccgcggcctgcagctgggtcgagcgctgctgctgcgcttcacgggcaagcccggccgggcctacggcttggggcggccgggcccggcggcgggctgtgtccgcggggagcgtccaggctgggccgcaggaccgggcgcggagcctcgcagggtcgggctcgggctccctaaccgtctccgcttcttccgccagtcggtggccgggctggcggcgcggttgcagcggcagttcgtggtgcgggcctggggctgcgcgggcccttgcggccgggcagtctttctggccttcgggctagggctgggcctcatcgaggaaaaacaggcggagagccggcgggcggtctcggcctgtcaggagatccaggcaatttttacccagaaaagcaagccggggcctgacccgttggacacgagacgcttgcagggctttcggctggaggagtatctgatagggcagtccattggtaagggctgcagtgctgctgtgtatgaagccaccatgcctacattgccccagaacctggaggtgacaaagagcaccgggttgcttccagggagaggcccaggtaccagtgcaccaggagaagggcaggagcgagctccgggggcccctgccttccccttggccatcaagatgatgtggaacatctcggcaggttcctccagcgaagccatcttgaacacaatgagccaggagctggtcccagcgagccgagtggccttggctggggagtatggagcagtcacttacagaaaatccaagagaggtcccaagcaactagcccctcaccccaacatcatccgggttctccgcgccttcacctcttccgtgccgctgctgccaggggccctggtcgactaccctgatgtgctgccctcacgcctccaccctgaaggcctgggccatggccggacgctgttcctcgttatgaagaactatccctgtaccctgcgccagtacctttgtgtgaacacacccagcccccgcctcgccgccatgatgctgctgcagctgctggaaggcgtggaccatctggttcaacagggcatcgcgcacagagacctgaaatccgacaacatccttgtggagctggacccagacggctgcccctggctggtgatcgcagattttggctgctgcctggctgatgagagcatcggcctgcagttgcccttcagcagctggtacgtggatcggggcggaaacggctgtctgatggccccagaggtgtccacggcccgtcctggccccagggcagtgattgactacagcaaggctgatgcctgggcagtgggagccatcgcctatgaaatcttcgggcttgtcaatcccttctacggccagggcaaggcccaccttgaaagccgcagctaccaagaggctcagctacctgcactgcccgagtcagtgcctccagacgtgagacagttggtgagggcactgctccagcgagaggccagcaagagaccatctgcccgagtagccgcaaatgtgcttcatctaagcctctggggtgaacatattctagccctgaagaatctgaagttagacaagatggttggctggctcctccaacaatcggccgccactttgttggccaacaggctcacagagaagtgttgtgtggaaacaaaaatgaagatgctctttctggctaacctggagtgtgaaacgctctgccaggcagccctcctcctctgctcatggagggcagccctgtgatgtccctgcatggagctggtgaattactaaaagaacatggcatcctctgtgtcgtgatggtctgtgaatggtgagggtgggagtcaggagacaagacagcgcagagagggctggttagccggaaaaggcctcgggcttggcaaatggaagaacttgagtgagagttcagtctgcagtcctctgctcacagacatctgaaaagtgaatggccaagctggtctagtagatgaggctggactgaggaggggtaggcctgcatccacagagaggatccaggccaaggcactggctgtcagtggcagagtttggctgtgacctttgcccctaacacgaggaactcgtttgaagggggcagcgtagcatgtctgatttgccacctggatgaaggcagacatcaacatgggtcagcacgttcagttacgggagtgggaaattacatgaggcctgggcctctgcgttcccaagctgtgcgttctggaccagctactgaattattaatctcacttagcgaaagtgacggatgagcagtaagtaagtaagtgtggggatttaaacttgagggtttccctcctgactagcctctcttacaggaattgtgaaatattaaatgcaaatttacaactgcagatgacgtatgtgccttgaactgaatatttggctttaagaatgattcttatactctgaaggtgagaatattttgtgggcaggtatcaacattggggaagagatttcatgtctaactaactaactttatacatgatttttaggaagctattgcctaaatcagcgtcaacatgcagtaaaggttgtcttcaactgaaaaaaaaaaaaaaaaaaaaa

SEQ ID NO: 1667 - DNA, 2654 bp, Homo sapiens
aacttgcagactgtggcgcaactggtcttggtagcggaggcacccgaatgctgcccgggtgagatgaggaagccaaggcccagcagagctgagatgtgactgcagagccgtccaaccccagtcctgtgacctttctctggtgcctgatacctctcagcatttgagggccttttctcttcctgcttcatctctaaaggtccttctaggagagaggtgaaagaaacctggcaaagaaaacggtctcgacaatgagtaggccacccatcactactaactacagatgacttgccatttcatttacaaagatgtcttctgctgctgaaaatggagaggcagcacctggaaaacaaaatgaagaaaaaacctataaaaagactgcatcatctgctattaaaggtgctattcagctgggaataggatacacagtgggtaatctcacttccaagccagaacgagatgttcttatgcaagacttttatgtggtggaaagtgtgttcctacccagcgaagggagcaatctgaccccagcacatcactacccagactttagatttaagacatacgctccattagcattccgatatttcagagaactttttggtatcaagcctgatgattacttgtattccatctgcagtgaacctctaatagaactgtctaaccctggagccagtggatccttgttttttgtgaccagtgatgatgaatttatcatcaaaacagttcagcacaaagaagctgagtttcttcagaagctactgccaggctattacatgaatttaaaccagaatccaaggactcttttgccaaaattttacggactgtattgtatgcaatcaggaggcattaatatcaggattgtggtgatgaacaacgttttgccacgctccatgagaatgcactttacatatgacttgaaaggctcaacgtataagcgaagagcatcccgtaaagagagagagaaatccaaccccacatttaaggacttagatttcctgcaagacatgcacgaagggttgtattttgatacggaaacatacaacgcgcttatgaaaacacttcagagagactgccgggtgctagaaagcttcaagatcatggattatagccttctgttgggaattcatttcctggaccattccctcaaagagaaagaggaggagaccccacaaaatgtgcctgatgctaagcggactgggatgcagaaggttctctactcaacagccatggaatctatccagggtccagggaaatctggagatgggataatcacagagaacccagacacaatgggaggcattccagctaaaagccataggggagaaaaactacttttatttatgggcattattgacattctgcaatcatataggttaatgaagaagttagaacattcctggaaagctcttgtttatgatggggacactgtttctgttcatagaccaagcttttatgcagacagatttcttaagttcatgaattccagagttttcaagaaaattcaagctttgaaggcttcaccgtctaagaaacggtgcaattcaatcgccgccctaaaggccacttcacaggagattgtgtcctcaattagccaggaatggaaggatgagaagcgggatttgctgactgaaggacaaagttttagcagccttgatgaagaagccctgggatcccgacacaggccagacctggtccctagcactccatcactgtttgaagctgcttccttggcaaccacaatttcatcttcttccttatacgtcaatgagcactatccacacgacaggcctacactctattcaaacagcaaagggttaccttccagttcaacatttaccttggaagaggggaccatctacttgaccgctgagcccaacactctggaagtgcaggatgacaatgcttctgtgcttgacgtctatttataagtgaaaatggtgatcacctaagcacatggatgagacgtgagcacagttatggcagagaagtttctccgcaccagaattatccacagcaacttggctgagccccactacacacagagaaatcatcaacctgacttaagagttttcaagatgtcaacttcaggctgatcagcagatgggatgtgaaaaatactaccctattctatcatttgctgttgcttgctgaactgtgaagaactgcatgaactatatttaagctgctttctgtaccattgccaatcacctttttggagttggaagtgctattttcctatggacttttgcattatttcattgtgcatgcatccagtgattatacataagcaacatatgtaatctgcttatatatttttaaaaatccatccacacacatggtaaattaagtataaattcttttgcaaaattatagttcatgtcattgaaagtttaaattggtttcatttaaagatcaatatactaggtctgccttcactttatagaaaactagcttctataaagattttttcactgtttactagtgaaatgagaaaagcaaagctatttataaaaggccttatgtcgtgtacatacattgtctttgaaatatttgtgatctagtttattgcttgtaaaagagaaattatataatttatttagtaaatactactgtaaactatagttttgtgagagaaataaaatattttgttctca

SEQ ID NO: 1668 - DNA, 1486 bp, Homo sapiens
ttgcgggaaagagccaaaccctggcgttggggggcccgggcggggagcccctcccgcggtccacagcgacgcctgcccagccctcctccccttccggctccggcacggggccccgaggcgttcggaggccaggcgggtttctgtcaggcccggggaggaggggcgggcggggcggccgctgcctccccgggacgggccgtaccacgcggacggggaggacggggccaggggactgcagggcggctgcaccgcccgggggcggggtgcggagcgggccggcgggctccccggggcggggcgggagggcggggcgtggggcggacggaaccaccggggcggggtgggaggtaacgggacgggcgcgaccatggcgcggtgagggagcgggggtggggatcggtccgggggaggcctgaggccgctggcttgtgcgctgtctccgccgcccccctctttcgccgccgccgccgccgccccgggcatgtcgtccaactgcaccagcaccacggcggtggcggtggcgccgctcagcgccagcaagaccaagaccaagaagaagcatttcgtgtgccagaaagtgaagctattccgggccagcgagccgatcctcagcgtcctgatgtggggggtgaaccacacgatcaatgagctgagcaatgttcctgttcctgtcatgctaatgccagatgacttcaaagcctacagcaagatcaaggtggacaatcatctcttcaataaggagaacctgcccagccgctttaagtttaaggagtattgccccatggtgttccgaaaccttcgggagaggtttggaattgatgatcaggattaccagaattcagtgacgcgcagcgcccccatcaacagtgacagccagggtcggtgtggcacgcgtttcctcaccacctacgaccggcgctttgtcatcaagactgtgtccagcgaggacgtggcggagatgcacaacatcttaaagaaataccaccagtttatagtggagtgtcatggcaacacgcttttgccacagttcctgggcatgtaccgcctgaccgtggatggtgtggaaacctacatggtggttaccaggaacgtgttcagccatcggctcactgtgcatcgcaagtatgacctcaagggttctacggttgccagagaagcgagcgacaaggagaaggccaaggacttgccaacattcaaagacaatgacttcctcaatgaagggcagaagctgcatgtgggagaggagagtaaaaagaacttcctggagaaactgaagcgggacgttgaggagattctcgttctgtccccaggctggagaatcgcttgaacccaggaggcggaggttgcggtgaccctccagcttgggcaacatgttatgaatgaaactccatctcaaaaaataaaaaaaaaaaaaggaagcaaaaaaaaaaaaaaaaaaaaaaaaaaaaaaaaaaaaaaaaaaaaaaaaaaaaaaaaaaaaaaaaaa

SEQ ID NO: 1669 - DNA, 3878 bp, Homo sapiens
ttgcgggaaagagccaaaccctggcgttggggggcccgggcggggagcccctcccgcggtccacagcgacgcctgcccagccctcctccccttccggctccggcacggggccccgaggcgttcggaggccaggcgggtttctgtcaggcccggggaggaggggcgggcggggcggccgctgcctccccgggacgggccgtaccacgcggacggggaggacggggccaggggactgcagggcggctgcaccgcccgggggcggggtgcggagcgggccggcgggctccccggggcggggcgggagggcggggcgtggggcggacggaaccaccggggcggggtgggaggtaacgggacgggcgcgaccatggcgcggtgagggagcgggggtggggatcggtccgggggaggcctgaggccgctggcttgtgcgctgtctccgccgcccccctctttcgccgccgccgccgccgccccgggcatgtcgtccaactgcaccagcaccacggcggtggcggtggcgccgctcagcgccagcaagaccaagaccaagaagaagcatttcgtgtgccagaaagtgaagctattccgggccagcgagccgatcctcagcgtcctgatgtggggggtgaaccacacgatcaatgagctgagcaatgttcctgttcctgtcatgctaatgccagatgacttcaaagcctacagcaagatcaaggtggacaatcatctcttcaataaggagaacctgcccagccgctttaagtttaaggagtattgccccatggtgttccgaaaccttcgggagaggtttggaattgatgatcaggattaccagaattcagtgacgcgcagcgcccccatcaacagtgacagccagggtcggtgtggcacgcgtttcctcaccacctacgaccggcgctttgtcatcaagactgtgtccagcgaggacgtggcggagatgcacaacatcttaaagaaataccaccagtttatagtggagtgtcatggcaacacgcttttgccacagttcctgggcatgtaccgcctgaccgtggatggtgtggaaacctacatggtggttaccaggaacgtgttcagccatcggctcactgtgcatcgcaagtatgacctcaagggttctacggttgccagagaagcgagcgacaaggagaaggccaaggacttgccaacattcaaagacaatgacttcctcaatgaagggcagaagctgcatgtgggagaggagagtaaaaagaacttcctggagaaactgaagcgggacgttgagttcttggcacagctgaagatcatggactacagcctgctggtgggcatccacgacgtggaccgggcagagcaggaggagatggaggtggaggagcgggcagaggacgaggagtgtgagaatgatggggtgggtggcaacctactctgctcctatggcacacctccggacagccctggcaacctcctcagctttcctcggttctttggtcctggggaattcgacccctctgttgacgtctatgccatgaaaagccatgaaagttcccccaagaaggaggtgtatttcatggccatcattgatatcctcacgccatacgatacaaagaagaaagctgcacatgctgccaaaacggtgaaacacggggcaggggccgagatctcgactgtgaaccctgagcagtactccaaacgcttcaacgagtttatgtccaacatcctgacgtagttctcttctaccttcagccagagccagagagctggatatggggtcggggatcgggagttagggagaagggtgtatttgggctagatgggagggtgggagcagagtcgggtttgggagggctttagcaatgagactgcagcctgtgacaccgaaagagactttagctgaagaggagggggatgtgctgtgtgtgcacctgctcacaggatgtaaccccaccttctgcttacccttgattttttctccccatttgacacccaggttaaaaaggggttccctttttggtaccttgtaaccttttaagataccttggggctagagatgacttcgtgggtttatttgggttttgtttctgaaatttcattgctccaggtttgctatttataatcatatttcatcagcctacccaccctccccatctttgctgagctctcagttcccttcaattaaagagatacccggtagacccagcacaagggtccttccagaaccaagtgctatggatgccagattggagaggtcagacacctcgccctgctgcatttgctcttgtctggattaactttgtaatttatggagtattgtgcacaacttcctccacctttcccttggattcaagtgaaaactgttgcattattcctccatcctgtctggaatacaccaggtcaacaccagagatctcagatcagaatcagagatctcagaggggaataagttcatcctcatgggatggtgaggggcaggaaagcggctgggctcttggacacctggttctcagagaaccctgtgatgatcacccaagccccaggctgtcttagcccctggagttcagaagtcctctctgtaaagcctgcctcccactaggtcaagaggaactagagtacctttggatttatcaggaccctcatgtttaaatggttatttccctttgggaaaacttcagaaactgatgtatcaaatgaggccctgtgccctcgatctatttccttcttccttctgacctcctcccaggcactcttacttctagccgaactcttagctctgggcagatctccaagcgcctggagtgctttttagcagagacacctcgttaagctccgggatgaccttgtaggagatctgtctccctgtgcctggagagttacagccagcaaggtgcccccatcttagagtgtggtgtccaaacgtgaggtggcttcctagttacatgaggatgtgatccaggaaatccagtttggaggcttgatgtgggttttgacctggcctcagccttggggctgtttttccttgttgccccgctctagacttttagcagatctgcagcccacaggcttttttggaaggagtggcttcctgcaggtgttccacctgccttcggagcctgccacccaggccctcagaactgagccacaggctgctctggccaggagagaaacagctctgttgttctgcattgggggaggtacattcctgcatcttctcaccccctcaaccaggaactggggatttgggatgagatatggtcagacttgtagataaccccaaagatgtgaagatcgcttgtgaaaccattttgaatgaatagattggtttcctgtggctccctccaaacctggccaagcccagcttccgaagcaggaaccagcactgtctctgtgcctgactcacagcatataggtcaggaaagaatggagacggcattcttggacttcactggggctgctggattggatgggaaaccttctggaagaggcagatgggggtcaaaccactgccttggccccaggaaggggccataggtaggtctgaacaactgccgcaagaccactacatgacttagggaacttgaaaccaactggctcatggagaaaacaaatttgacttgggaaagggattatgtaggaataatgtttggacttgatttccccacgtcataatgaagaatggaagtttggatctgctcctcgtcaggcgcagcatctctgaagcttggaaagctgtcttccagcagcctccgtggcctcgggttcctaccggcttctctgcatttggtctgctgatcatgttgccataatgtgtatggaaagtgtaacacattcttactggttaaagacgactaccaggtatctaacttgtttaacattga

SEQ ID NO: 1670 - DNA, 2937 bp, Homo sapiens
ggttgcgcgggagactatggcgtcctcctcggtcccaccagccacggtatcggcggcgacagcaggccccggcccaggtttcggcttcgcctccaagaccaagaagaagcatttcgtgcagcagaaggtgaaggtgttccgggcggccgacccgctggtgggtgtgttcctgtggggcgtagcccactcgatcaatgagctcagccaggtgcctcccccggtgatgctgctgccagatgactttaaggccagctccaagatcaaggtcaacaatcaccttttccacagggaaaatctgcccagtcatttcaagttcaaggagtattgtccccaggtcttcaggaacctccgtgatcgatttggcattgatgaccaagattacttggtgtcccttacccgaaacccccccagcgaaagtgaaggcagtgatggtcgcttccttatctcctacgatcggactctggtcatcaaagaagtatccagtgaggacattgctgacatgcatagcaacctctccaactatcaccagtacattgtgaagtgccatggcaacacgcttctgccccagttcctggggatgtaccgagtcagtgtggacaacgaagacagctacatgcttgtgatgcgcaatatgtttagccaccgtcttcctgtgcacaggaagtatgacctcaagggttccctagtgtcccgggaagccagcgataaggaaaaggttaaagaattgcccacccttagggatatggactttctcaacaagaaccagaaagtatatattggtgaagaggagaagaaaatatttctggagaagctgaagagagatgtggagtttctagtgcagctgaagatcatggactacagccttctgctaggcatccacgacatcattcggggctctgaaccagaggaggaagcgcccgtgcgggaggatgagtcagaggtggatggggactgcagcctgactggacctcctgctctggtgggctcctatggcacctccccagagggtatcggaggctacatccattcccatcggcccctgggcccaggagagtttgagtccttcattgatgtctatgccatccggagtgctgaaggagccccccagaaggaggtctacttcatgggcctcattgatatccttacacagtatgatgccaagaagaaagcagctcatgcagccaaaactgtcaagcatggggctggggcagagatctctactgtccatccggagcagtatgctaagcgattcctggattttattaccaacatctttgcctaagagactgcctggttctctctgatgttcaaggtggtggggttctgagacacttgggggaattgtggggatattctagccaccagttctcttcttcctttgctaaattcaggctgcaggctccttccatccagataactccatcctgtcgagtaggctctttctgaccctcagaaatacattgtcctttttcctctttgcccatttttcttccctctcttcctccccatgagaagtctgcttgtagtattagaatgttattgttgactctctcccaagtgccttgatctttgtaatatctcctgttgtttctatgatataggagctaggggaagggggttgtttgccttcttcaggacctgactggacagatggacctggctcaagcaactactctggatgcactttgctgtgtgggatgaactaaaagtgtctgaattttgctgataactttataaaactcactatggcatgcttccctcctggtgggccctaggatggatgacactcaagatactacagatgtgggtgcaggcatgcacacacacgatggaatatggccattcctacacaggtggggtagagagtgggtcagcagcctggcacctcacagaggtgggacctaagaggactcatgattatgcagagaattggattgggtctctgtcatagattgagtaatctcttcccttacctcaattccatctccacccatctctacatctgggcacagcaacccagagatggccaaaagcattcaagcctgggggaagatgtttgactattgctgctcttcaccagaacctcacacctctcctgggactggaacccttcagtgggtgtgtggccagttttggaggctggaatgatgggccagggtgtaggattcattctccatgtaaagtttcctttcatcctgcctagccatccccaaggtttatttccagaagaaaggaatatctctacttggatcaattctggtcatttcaagaggatggaggcctcaagtgtgggaacttcccctactccctggatgtgtgtacctagcacacttccttctcccacccctttttccagttggatttgtttttctgttctcttctgtcctgtcttatactgcaactgtgtctcctaggggacagatggccttctttgtcatcttcactctccacccccagagaggagtcagagccataactcaatcactcagcccctccaaagatagttgatgtgtgataatctcataatgttgagaaccctgatgagatacattgtcttcctctccctacaatgcctctggggccaaggcacccattcttcttgctatcctccatcccccttgaggcttccactttttttttttttagacataaagctgggcatcagcaactggcctgtggtgatgcaaagctgctttgctctgtatctggctggactgatctgtctcacaagaagccatgaggccatagggagaagctccctctccccttcatcttctgctccaaaggtggtagcaagaggagtacccagttaggggttggagcccccatataacatcttcctgtcagaagactgatggatctttttcattccaaccatctccctttcccccgatgaatgcaataaaactctgtgacaccagcaaaaaaaaaaaaaaa

SEQ ID NO: 1671 - DNA, 2941 bp, Homo sapiens
gcgcaggcgctgtgagaggcggtagcggcggcggcggcggtggtatcggcggcagctgtgagggggttccgggaagatggtgctgatcaaggaattccgtgtggttttgccatgttctgttcaggagtatcaggttgggcagctttactctgttgcagaagctagtaagaatgagactggtggtggagaaggaattgaagtcttaaagaatgaaccttatgagaaggatggagaaaagggacagtatacgcacaaaatttatcacctaaagagcaaagtgcctgcattcgtgaggatgattgctcccgagggctccttggtgtttcatgagaaagcctggaatgcgtacccctactgtagaacaattgtaacgaatgaatatatgaaagatgatttcttcattaaaatcgaaacatggcacaaaccagacttgggaacattagaaaatgtacatggtttagatccaaacacatggaaaactgttgaaattgtccatatagatattgcagatagaagtcaagttgaaccagcagactacaaagctgatgaagacccagcattattccagtcagtcaagaccaagagaggccctttgggacccaactggaagaaggagctggcaaacagccctgactgtccccagatgtgtgcctataagctggtgaccatcaaattcaagtggtggggactgcaaagcaaagtagaaaacttcattcaaaagcaagaaaaacggatatttacaaacttccatcgccagcttttttgttggattgacaagtggatcgatctcacgatggaagacattaggagaatggaagacgagactcagaaagaactagaaacaatgcgtaagaggggttccgttcgaggcacgtcggctgctgatgtctagatgagtcccctgtagggtcagagacaatgtcaaactgtttacgtaatcaaggtcaagtgaggggaacaagcgcagccagtgatgagtgaagaagaatctgaccagtatcttgcagtgttgacgtttcccagatgtgtgcttgtgatgatacacacacatgcacaggttctcaaccacgtgtgtatatatgtatgtgtgcatatgtctgtagctgtatataaagcgcatgtagagctacagatccagatacacacacttgtgtatatatgtacatacagacatactgaagggattagtacaatttctccaaagtactgtacctatcttcagcaagaatgcaaaagaaaatattttcaatatatatacctggaacagattttaataattatcagagtaataccattaatggacaaattgactgcaatgtaatactagctggtatgtttcataaatgtcaagctgtggaccaacatatatagccttttattatttttctcttcttttaagtcagtctgttataaatttttttttagtcccataagcagtagactcccacagaaaatttcttcaaaattttttggtgttccaatgaatctgggatgtaaactctgaatgtatttataactatttatttctggatggtcattatcttgtagccaaatttgacaatataaagtaaggagcaaagttacaggccagtttttacttgtttgccctgagggaaaaatccttttaaaaaaaatttctggtttttattggatttttgtattttaaatttcaaatatttttctacatcaaacctagcaaaaatggagatgacggtttctgatttataataaatactagacagttttcaggctcctgttagacaaacacattgatgaagaaattagtcttaataggattgtaggctgtgtagaaaagttggaaatatagcacttcatggagtcttgttttgaagatgacagttttctgtaactacagcttggaaactatgcaaatggtctagattcctcagagctcacatgataggatatagttagtgatgacattttgctcttcttgtgggaacacacacttcaaggaggagatagtgactttgagataggaacagtttaagatgcagtgtgagtctggcctgcgtgcggtgaggaggccccgccaagagactggtggacatctgactgtgggatgtgctctcaagtaggacgtcatcaggacagattctgaataggcatcatgagagtgctggtcagaaacggctgccactttttttaatttaattttattttttatttaaaggaaggaacaatagctaggtaagatttttatcagctttctctgtctgaatccagtttttcctctgtcagtcctggaagcttgaatagaattatattgttgaagccttcaggtcacaaactgtcttttgtaacctcctgtccctcctaaaacacgccaacccctgcagtcaaatcacattagtaatctgatttgctgacagtcctgccctgcctgctcctcgttttcccacatgtcctgcatccctcccccactggagtgatttcagtgaatcagacaaggaaggatgtgtaggatcactactgcattgcaataccctgttatcctcagcaacaaaacccacatttcatacatcctttgtgtactcaggataaagactgatgtttactctctgggcactgttgtaagataggttttgtcagagcataatcattgtctgcaaagtgtttggtgcgaggaagattattgctaattttgtgaaataaagagtctagccctctccttttaatgaacttaactctcgctggcatctgtagtatcattgggagcttaggcgcacatggaaatgagagcccggcgcatggattttaatgtttttctaacaactgtggagatttgagggaatgtgtggtgaatgtaaaatacctagtttacttgccagtctcttgtgtaaattacagtaaaacaaagtaaatgaaatttaaacaaaaaataaatttgatcacaaaatgccaaaaaaaaaaaaaaaaa

SEQ ID NO: 1672 - DNA, 2900 bp, Homo sapiens
ccgggtgggctccaggcggccggtccccggcctccccccatggccaccgccccctcttatcccgccgggctccctggctctcccgggccggggtctcctccgccccccggcggcctagagctgcagtcgccgccaccgctactgccccagatcccggccccgggttccggggtctcctttcacatccagatcgggctgacccgcgagttcgtgctgttgcccgccgcctccgagctggctcatgtgaagcagctggcctgttccatcgtggaccagaagttccctgagtgtggcttctacggcctttacgacaagatcctgcttttcaaacatgaccccacgtcggccaacctcctgcagctggtgcgctcgtccggagacatccaggagggcgacctggtggaggtggtgctgtcggcctcggccaccttcgaggacttccagatccgcccgcacgccctcacggtgcactcctatcgggcgcctgccttctgtgatcactgcggggagatgctcttcggcctagtgcgccagggcctcaagtgcgatggctgcgggctgaactaccacaagcgctgtgccttcagcatccccaacaactgtagtggggcccgcaaacggcgcctgtcatccacgtctctggccagtggccactcggtgcgcctcggcacctccgagtccctgccctgcacggctgaagagctgagccgtagcaccaccgaactcctgcctcgccgtcccccgtcatcctcttcctcctcttctgcctcatcgtatacgggccgccccattgagctggacaagatgctgctctccaaggtcaaggtgccgcacaccttcctcatccacagctatacacggcccaccgtttgccaggcttgcaagaaactcctcaagggcctcttccggcagggcctgcaatgcaaagactgcaagtttaactgtcacaaacgctgcgccacccgcgtccctaatgactgcctgggggaggcccttatcaatggagatgtgccgatggaggaggccaccgatttcagcgaggctgacaagagcgccctcatggatgagtcagaggactccggtgtcatccctggctcccactcagagaatgcgctccacgccagtgaggaggaggaaggcgagggaggcaaggcccagagctccctggggtacatccccctaatgagggtggtgcaatcggtgcgacacacgacgcggaaatccagcaccacgctgcgggagggttgggtggttcattacagcaacaaggacacgctgagaaagcggcactattggcgcctggactgcaagtgtatcacgctcttccagaacaacacgaccaacagatactataaggaaattccgctgtcagaaatcctcacggtggagtccgcccagaacttcagccttgtgccgccgggcaccaacccacactgctttgagatcgtcactgccaatgccacctacttcgtgggcgagatgcctggcgggactccgggtgggccaagtgggcagggggctgaggccgcccggggctgggagacagccatccgccaggccctgatgcccgtcatccttcaggacgcacccagcgccccaggccacgcgccccacagacaagcttctctgagcatctctgtgtccaacagtcagatccaagagaatgtggacattgccactgtctaccagatcttccctgacgaagtgctgggctcagggcagtttggagtggtctatggagggaaacaccggaagacaggccgggacgtggcagttaaggtcattgacaaactgcgcttccctaccaagcaggagagccagctccggaatgaagtggccattctgcagagcctgcggcatcccgggatcgtgaacctggagtgcatgttcgagacgcctgagaaagtgtttgtggtgatggagaagctgcatggggacatgttggagatgatcctgtccagtgagaagggccggctgcctgagcgcctcaccaagttcctcatcacccagatcctggtggctttgagacaccttcacttcaagaacattgtccactgtgacttgaaaccagaaaacgtgttgctggcatcagcagacccatttcctcaggtgaagctgtgtgactttggctttgctcgcatcatcggcgagaagtcgttccgccgctcagtggtgggcacgccggcctacctggcacccgaggtgctgctcaaccagggctacaaccgctcgctggacatgtggtcagtgggcgtgatcatgtacgtcagcctcagcggcaccttccctttcaacgaggatgaggacatcaatgaccagatccagaacgccgccttcatgtacccggccagcccctggagccacatctcagctggagccattgacctcatcaacaacctgctgcaggtgaagatgcgcaaacgctacagcgtggacaaatctctcagccacccctggttacaggagtaccagacgtggctggacctccgagagctggaggggaagatgggagagcgatacatcacgcatgagagtgacgacgcgcgctgggagcagtttgcagcagagcatccgctgcctgggtctgggctgcccacggacagggatctcggtggggcctgtccaccacaggaccacgacatgcaggggctggcggagcgcatcagtgttctctgaggtcctgtgccctcgtccagctgctgccctccacagcggttcttcacaggatcccagcaatgaactgttctagggaaagtggcttcctgcccaaactggatgggacacgtggggagtggggtggggggagctatttccaaggcccctccctgtttccccagcaattaaaacggactcatctctggccccatggccttgatctcaaaaaaaaaaaaaaaaaaaaa

SEQ ID NO: 1673 - DNA, 3352 bp, Homo sapiens
acgagggacgcagccatggcggaggcggctttggaagccgtgcggagcgagttacgagaattcccggccgctgcaagggagctctgcgtgcctcttgctgtgccctacctggacaaacccccaactccgctccacttctaccgggactgggtctgccccaacaggccgtgcattatccgcaacgctctgcagcactggccggccctccagaagtggtccctcccctatttcagagccacagtgggctccacagaggtgagtgtggccgtgaccccagatggttacgcggatgccgtgagaggggatcgcttcatgatgccagctgagcgccgcctgcccctgagcttcgtgctggatgtgctggagggccgggcccagcaccctggagtcctctatgtgcagaagcagtgctccaacctgcccagcgagctgccccagctgctgcctgatctggaatcccatgtgccctgggcctccgaagccctgggaaagatgcccgatgctgtgaacttctggctgggggaggcggctgcagtgacttctttgcacaaggaccactatgagaacctctactgcgtggtctcaggagagaagcatttcctgttccatccgcccagcgaccggcccttcatcccctatgagctgtacacgccggcaacctaccagctaactgaagagggcacctttaaggtggtggatgaagaggccatggagaaggcagaggtgtccaggacctgcctgctcacggttcgtgtcctgcaggcccatcgcctaccctctaaggacctagtgaccccctctgactgctacgtgactctctggctgcccacggcctgcagccacaggctccagacacgcacggtcaagaacagcagtagccctgtctggaaccagagctttcacttcaggatccacaggcagctcaagaatgtcatggaactgaaagtctttgaccaggacctggtgaccggagatgaccctgtgttgtcagtactgtttgatgcggggactctgcgggctggggagttccggcgcgagagcttctcactgagccctcagggtgaggggcgcctggaagttgaatttcgcctgcagagtctggctgaccgtggcgagtggctcgtcagcaatggcgttctggtggcccgggagctctcctgcttgcacgttcaactggaggagacaggagaccagaagtcctcagagcacagagttcagcttgtggttcctgggtcctgtgagggtccgcaggaggcctctgtgggcactggcaccttccgcttccactgcccagcctgctgggagcaggagctgagtattcgcctgcaggatgcccccgaggagcaactaaaggcgccactgagtgccctgccctctggtcaagtggtgaggcttgtcttccccacgtcccaggagcccctgatgagagtggagctgaaaaaagaagcaggactgagggagctggccgtgcgactgggcttcgggccctgtgcagaggagcaggccttcctgagcaggaggaagcaggtggtggccgcggccttgaggcaggccctgcagctggatggagacctgcaggaggatgagatcccagtggtagctattatggccactggtggtgggatccgggcaatgacttccctgtatgggcagctggctggcctgaaggagctgggcctcttggattgcgtctcctacatcaccggggcctcgggctccacctgggccttggccaacctttatgaggacccagagtggtctcagaaggacctggcagggcccactgagttgctgaagacccaggtgaccaagaacaagctgggtgtgctggcccccagccagctgcagcggtaccggcaggagctggccgagcgtgcccgcttgggctacccaagctgcttcaccaacctgtgggccctcatcaacgaggcgctgctgcatgatgagccccatgatcacaagctctcagatcaacgggaggccctgagtcatggccagaaccctctgcccatctactgtgccctcaacaccaaagggcagagcctgaccacttttgaatttggggagtggtgcgagttctctccctacgaggtcggcttccccaagtacggggccttcatcccctctgagctctttggctccgagttctttatggggcagctgatgaagaggcttcctgagtcccgcatctgcttcttagaaggtatctggagcaacctgtatgcagccaacctccaggacagcttatactgggcctcagagcccagccagttctgggaccgctgggtcaggaaccaggccaacctggacaaggagcaggtcccccttctgaagatagaagaaccaccctcaacagccggcagratagctgagtttttcaccgatcttctgacgtggcgtccactggcccaggccacacataatttcctgcgtggcctccatttccacaaagactactttcagcatcctcacttctccacatggaaagctaccactctggatgggctccccaaccagctgacaccctcggagccccacctgtgcctgctggatgttggctacctcatcaataccagctgcctgcccctcctgcagcccactcgggacgtggacctcatcctgtcattggactacaacctccacggagccttccagcagttgcagctcctgggccggttctgccaggagcaggggatcccgttcccacccatctcgcccagccccgaagagcagctccagcctcgggagtgccacaccttctccgaccccacctgccccggagcccctgcggtgctgcactttcctctggtcagcgactccttccgggagtactcggcccctggggtccggcggacacccgaggaggcggcagctggggaggtgaacctgtcttcatcggactctccctaccactacacgaaggtgacctacagccaggaggacgtggacaagctgctgcacctgacacattacaatgtctgcaacaaccaggagcagctgctggaggctctgcgccaggcagtgcagcggaggcggcagcgcaggccccactgatggccggggcccctgccacccctaactctcattcattccctggctgctgagttgcaggtgggaactgtcatcacgcagtgcttcagagcctcgggctcaggtggcackgtcccagggtccaggctgagggctgggagctcccttgcgcctcagcagtttgcagtggggtaaggaggccaagcccatttgtgtaatcacccaaaaccccccggcctgtgcctgttttcccttctgcgctaccttgagtagttggagcacttgatacatcacagactcatacaaaaaaaaaaaaaaaaaa

SEQ ID NO: 1674 - DNA, 3239 bp, Homo sapiens
ctgggggtccgttccccaacttcctcggcgctccggactcccaagtctccgccggaccctcctttggatattcctcgtgtctccgattctgagagagggggaagacggtggggcctccccacctgccccgcagaagatgcagttctttggccgcctggtcaataccttcagtggcgtcaccaacttgttctctaacccattccgggtgaaggaggtggctgtggccgactacacctcgagtgaccgagttcgggaggaagggcagctgattctgttccagaacactcccaaccgcacctgggactgcgtcctggtcaaccccaggaactcacagagtggattccgactcttccagctggagttggaggctgacgccctagtgaatttccatcagtattcttcccagctgctacccttctatgagagctcccctcaggtcctgcacactgaggtcctgcagcacctgaccgacctcatccgtaaccaccccagctggtcagtggcccacctggctgtggagctagggatccgcgagtgcttccatcacagccgtatcatcagctgtgccaattgcgcggagaacgaggagggctgcacacccctgcacctggcctgccgcaagggtgatggggagatcctggtggagctggtgcagtactgccacactcagatggatgtcaccgactacaagggagagaccgtcttccattatgctgtccagggtgacaattctcaggtgctgcagctccttggaaggaacgcagtggctggcctgaaccaggtgaataaccaagggctgaccccgctgcacctggcctgccagctggggaagcaggagatggtccgcgtgctgctgctgtgcaatgctcggtgcaacatcatgggccccaacggctaccccatccactcggccatgaagttctctcagaaggggtgtgcggagatgatcatcagcatggacagcagccagatccacagcaaagacccccgttacggagccagccccctccactgggccaagaacgcagagatggcccgcatgctgctgaaacggggctgcaacgtgaacagcaccagctccgcggggaacacggccctgcacgtggcggtgatgcgcaaccgcttcgactgtgccatagtgctgctgacccacggggccaacgcggatgcccgcggagagcacggcaacaccccgctgcacctggccatgtcgaaagacaacgtggagatgatcaaggccctcatcgtgttcggagcagaagtggacaccccgaatgactttggggagactcctacattcctagcctccaaaatcggcagacttgtcaccaggaaggcgatcttgactctgctgagaaccgtgggggccgaatactgcttcccacccatccacggggtccccgcggagcagggctctgcagcgccacatcatcccttctccctggaaagagctcagcccccaccgatcagcctaaacaacctagaactacaggatctcatgcacatctcacgggcccggaagccagcgttcatcctgggctccatgagggacgagaagcggacccacgaccacctgctgtgcctggatggaggaggagtgaaaggcctcatcatcatccagctcctcatcgccatcgagaaggcctcgggtgtggccaccaaggacctgtttgactgggtggcgggcaccagcactggaggcatcctggccctggccattctgcacagtaagtccatggcctacatgcgcggcatgtactttcgcatgaaggatgaggtgttccggggctccaggccctacgagtcggggcccctggaggagttcctgaagcgggagtttggggagcacaccaagatgacggacgtcaggaaacccaaggtgatgctgacagggacactgtctgaccggcagccggctgaactccacctcttccggaactacgatgctccagaaactgtccgggagcctcgtttcaaccagaacgttaacctcaggcctccagctcagccctcagaccagctggtgtggcgggcggcccgaagcagcggggcagctcctacttacttccgacccaatgggcgcttcctggacggtgggctgctggccaacaaccccacgctggatgccatgaccgagatccatgagtacaatcaggacctgatccgcaagggtcaggccaacaaggtgaagaaactctccatcgttgtctccctggggacagggaggtccccacaagtgcctgtgacctgtgtggatgtcttccgtcccagcaacccctgggagctggccaagactgtttttggggccaaggaactgggcaagatggtggtggactgttgcacggatccagacgggcgggctgtggaccgggcacgggcctggtgcgagatggtcggcatccagtacttcagattgaacccccagctggggacggacatcatgctggatgaggtcagtgacacagtgctggtcaacgccctctgggagaccgaggtctacatctatgagcaccgcgaggagttccagaagctcatccacctgctgctctcaccctgagggtccccagcctctcaccggccccagctgacctcgtccattcagcccctgccaggccaagcccagccactgccctcccgggcagatctgggcccaggcacctctgagtccatagaccaggcctgggagaatgccaagctgcctgcccgaggctggtcctgaaggcctgtctcccactaacccccccttccatcactttctgtcatgccaggtgggaaagtctagagccccctttggcccctttccctgactgtcaaggacaactgactcccccatcagctcaaacattaagggtacccgggcacaaccgtacccgtgcccccagccccagcctaccctgagggcctgccgggctgcctttgccccagcccccagcaagggcattcccaggcttcctggtgggtgcagcccaatccctctgccctctgctccgttccctgggggctgggactaaagaaatgggtgtcccccaccccatcagctgggaaagcccaggccgcaggagtgggatgcccgttggactttgcccctcacactggcccagcccctcacactgccccaccccgagaaccctcagctctcaaaggtcactcctgggagtttcttcttcccaatggaagtggcttaagagccaaaactgaaataaatcatttggattcaagttcaaaaaaaaaaaaaaaaa

SEQ ID NO: 1675 - DNA, 493 bp, Homo sapiens
aagcattcagaaggcacacatacttacacttgccctgagacttagttcgaaatgtgaaatatgatttggcgaggaagatcaacatataggcctaggccgaggagaagtgtaccacctcctgagctgattgggcctatgctggagcccggtgatgaggagcctcagcaagaggaaccaccaactgaaagtcgggatcctgcacctggtcaggagagagaagaagatcagggtgcagctgagactcaagtgcctgacctggaagctgatctccaggagctgtctcagtcaaagactgggggtgaatgtggaaatggtcctgatgaccaggggaagattctgccaaaatcagaacaatttaaaatgccagaaggaggtgacaggcaaccacaggtttaaatgaagacaagctgaaacaacacaaaactgtttttatctaagatatttgacttaaaaatatcgaaataaacttttgcagctttctccaaaaaaaaaa

SEQ ID NO: 1676 - DNA, 523 bp, Homo sapiens
gtgagggtgtgagggtcgcgttcctgctgtctggactttttctgtcccactgagacgcagctgtgtgaaatatgatttggcgaggaagatcaacatataggcctaggccgaggagaagtgtaccacctcctgagctgattgggcctatgctggagcccggtgatgaggagcctcagcaagaggaaccaccaactgaaagtcgggatcctgcacctggtcaggagagagaagaagatcagggtgcagctgagactcaagtgcctgacctggaagctgatctccaggagctgtctcagtcaaagactgggggtgaatgtggaaatggtcctgatgaccaggggaagattctgccaaaatcagaacaatttaaaatgccagaaggaggtgacaggcaaccacaggtttaaatgaagacaagctgaaacaacacaaaactgtttttatctaagatatttgacttaaaaatatccaaataaacttttgcagctttctccaaaaaaaaaaaaaaaaaaaaaaaaaaaaa

SEQ ID NO: 1677 - DNA, 3173 bp, Homo sapiens
atggccctgtccactgagcatcctcccgccacacagaaacccgcccagccggggccaccgaccccaccccctgcctggaaacttaaaggaggccggagctgtggggagctcagagctgagatcctacaggagtccagggctggagagaaaacctctgcgaggaaagggaaggagcaagccgtgaatttaagggacgctgtgaagcaatcatggatgcaatgaagagagggctctgctgtgtgctgctgctgtgtggagcagtcttcgtttcgcccagccaggaaatccatgcccgattcagaagaggagccagatcttaccaagtgatctgcagagatgaaaaaacgcagatgatataccagcaacatcagtcatggctgcgccctgtgctcagaagcaaccgggtggaatattgctggtgcaacagtggcagggcacagtgccactcagtgcctgtcaaaagttgcagcgagccaaggtgtttcaacgggggcacctgccagcaggccctgtacttctcagatttcgtgtgccagtgccccgaaggatttgctgggaagtgctgtgaaatagataccagggccacgtgctacgaggaccagggcatcagctacaggggcacgtggagcacagcggagagtggcgccgagtgcaccaactggaacagcagcgcgttggcccagaagccctacagcgggcggaggccagacgccatcaggctgggcctggggaaccacaactactgcagaaacccagatcgagactcaaagccctggtgctacgtctttaaggcggggaagtacagctcagagttctgcagcacccctgcctgctctgagggaaacagtgactgctactttgggaatgggtcagcctaccgtggcacgcacagcctcaccgagtcgggtgcctcctgcctcccgtggaattccatgatcctgataggcaaggtttacacagcacagaaccccagtgcccaggcactgggcctgggcaaacataattactgccggaatcctgatggggatgccaagccctggtgccacgtgctgaagaaccgcaggctgacgtgggagtactgtgatgtgccctcctgctccacctgcggcctgagacagtacagccagcctcagtttcgcatcaaaggagggctcttcgccgacatcgcctcccacccctggcaggctgccatctttgccaagcacaggaggtcgcccggagagcggttcctgtgcgggggcatactcatcagctcctgctggattctctctgccgcccactgcttccaggagaggtttccgccccaccacctgacggtgatcttgggcagaacataccgggtggtccctggcgaggaggagcagaaatttgaagtcgaaaaatacattgtccataaggaattcgatgatgacacttacgacaatgacattgcgctgctgcagctgaaatcggattcgtcccgctgtgcccaggagagcagcgtggtccgcactgtgtgccttcccccggcggacctgcagctgccggactggacggagtgtgagctctccggctacggcaagcatgaggccttgtctcctttctattcggagcggctgaaggaggctcatgtcagactgtacccatccagccgctgcacatcacaacatttacttaacagaacagtcaccgacaacatgctgtgtgctggagacactcggagcggcgggccccaggcaaacttgcacgacgcctgccagggcgattcgggaggccccctggtgtgtctgaacgatggccgcatgactttggtgggcatcatcagctggggcctgggctgtggacagaaggatgtcccgggtgtgtacaccaaggttaccaactacctagactggattcgtgacaacatgcgaccgtgaccaggaacacccgactcctcaaaagcaaatgagatcccgcctcttcttcttcagaagacactgcaaaggcgcagtgcttctctacagacttctccagacccaccacaccgcagaagcgggacgagaccctacaggagagggaagagtgcattttcccagatacttcccattttggaagttttcaggacttggtctgatttcaggatactctgtcagatgggaagacatgaatgcacactagcctctccaggaatgcctcctccctgggcagaaagtggccatgccaccctgttttcagctaaagcccaacctcctgacctgtcaccgtgagcagctttggaaacaggaccacaaaaatgaaagcatgtctcaatagtaaaagataacaagatctttcaggaaagacggattgcattagaaatagacagtatatttatagtcacaagagcccagcagggcctcaaagttggggcaggctggctggcccgtcatgttcctcaaaagcacccttgacgtcaagtctccttcccctttccccactccctggctctcagaaggtattccttttgtgtacagtgtgtaaagtgtaaatcctttttctttataaactttagagtagcatgagagaattgtatcatttgaacaactaggcttcagcatatttatagcaatccatgttagtttttactttctgttgccacaaccctgttttatactgtacttaataaattcagatatatttttcacagtttttccaaaatcagagtggaatggttttgttatagatgctgtatcccactctttattcatgttcacattttaaaatcatttggaattctgcttcactcgcttaacatatacacaacacctgtaacatacaaggcaatgggctaggtgctccagaccgggaaaaggagggacaggaatgcttggtctgatgggctaatatggcatttagagaagtaccaaggtacagtggagccggtcacaaaagggcagacttgtagtagaattcagttgcaagagggattggggaatcttaaggaaaaaatagaatcttaaggaaaaaataactgggtgagacgtggactgtggacaggtgtggaaaaggcactctccatggaggtatgaatatgtagagggccaagagaggggagtacagggagaaatgagttgagcttgtctgaagtgaacttcaggaagaggaacataggctggaatttagattatgggggctctgaacaccaaactgagtttggacttaattgacttctg

SEQ ID NO: 1678 - DNA, 2160 bp, Homo sapiens
atggccctgtccactgagcatcctcccgccacacagaaacccgcccagccggggccaccgaccccaccccctgcctggaaacttaaggaggccggagctgtggggagctcagagctgagatcctacaggagtccagggctggagagaaaacctctgcgaggaaagggaaggagcaagccgtgaatttaagggacgctgtgaagcaatcatggatgcaatgaagagagggctctgctgtgtgctgctgctgtgtggagcagtcttcgtttcgcccagccaggaaatccatgcccgattcagaagaggagccagatcttaccaagtgatctgcagagatgaaaaaacgcagatgatataccagcaacatcagtcatggctgcgccctgtgctcagaagcaaccgggtggaatattgctggtgcaacagtggcagggcacagtgccactcagtgcctgtcaaaagttgcagcgagccaaggtgtttcaacgggggcacctgccagcaggccctgtacttctcagatttcgtgtgccagtgccccgaaggatttgctgggaagtgctgtgaaatagataccagggccacgtgctacgaggaccagggcatcagctacaggggcacgtggagcacagcggagagtggcgccgagtgcaccaactggaacagcagcgcgttggcccagaagccctacagcgggcggaggccagacgccatcaggctgggcctggggaaccacaactactgcagaaacccagatcgagactcaaagccctggtgctacgtctttaaggcggggaagtacagctcagagttctgcagcacccctgcctgctctgagggaaacagtgactgctactttgggaatgggtcagcctaccgtggcacgcacagcctcaccgagtcgggtgcctcctgcctcccgtggaattccatgatcctgataggcaaggtttacacagcacagaaccccagtgcccaggcactgggcctgggcaaacataattactgccggactggacggagtgtgagctctccggctacggcaagcatgaggccttgtctcctttctattcggagcggctgaaggaggctcatgtcagactgtacccatccagccgctgcacatcacaacatttacttaacagaacagtcaccgacaacatgctgtgtgctggagacactcggagcggcgggccccaggcaaacttgcacgacgcctgccagggcgattcgggaggccccctggtgtgtctgaacgatggccgcatgactttggtgggcatcatcagctggggcctgggctgtggacagaaggatgtcccgggtgtgtacaccaaggttaccaactacctagactggattcgtgacaacatgcgaccgtgaccaggaacacccgactcctcaaaagcaaatgagatcccgcctcttcttcttcagaagacactgcaaaggcgcagtgcttctctacagacttctccagacccaccacaccgcagaagcgggacgagaccctacaggagagggaagagtgcattttcccagatacttcccattttggaagttttcaggacttggtctgatttcaggatactctgtcagatgggaagacatgaatgcacactagcctctccaggaatgcctcctccctgggcagaaagtggccatgccaccctgttttcagctaaagcccaacctcctgacctgtcaccgtgagcagctttggaaacaggaccacaaaaatgaaagcatgtctcaatagtaaaagataacaagatctttcaggaaagacggattgcattagaaatagacagtatatttatagtcacaagagcccagcagggcctcaaagttggggcaggctggctggcccgtcatgttcctcaaaagcacccttgacgtcaagtctccttcccctttccccactccctggctctcagaaggtattccttttgtgtacagtgtgtaaagtgtaaatcctttttctttataaactttagagtagcatgagagaattgtatcatttgaacaactaggcttcagcatatttatagcaatccatgttagtttttactttctgttgccacaaccctgttttatactgtacttaataaattcagatatatttttcacagtttttccaaaaaaaaaaaaaaaaaaaaa

SEQ ID NO: 1679 - DNA, 3035 bp, Homo sapiens
atggccctgtccactgagcatcctcccgccacacagaaacccgcccagccggggccaccgaccccaccccctgcctggaaacttaaaggaggccggagctgtggggagctcagagctgagatcctacaggagtccagggctggagagaaaacctctgcgaggaaagggaaggagcaagccgtgaatttaagggacgctgtgaagcaatcatggatgcaatgaagagagggctctgctgtgtgctgctgctgtgtggagcagtcttcgtttcgcccagccaggaaatccatgcccgattcagaagaggagccagatcttaccaaggttgcagcgagccaaggtgtttcaacgggggcacctgccagcaggccctgtacttctcagatttcgtgtgccagtgccccgaaggatttgctgggaagtgctgtgaaatagataccagggccacgtgctacgaggaccagggcatcagctacaggggcacgtggagcacagcggagagtggcgccgagtgcaccaactggaacagcagcgcgttggcccagaagccctacagcgggcggaggccagacgccatcaggctgggcctggggaaccacaactactgcagaaacccagatcgagactcaaagccctggtgctacgtctttaaggcggggaagtacagctcagagttctgcagcacccctgcctgctctgagggaaacagtgactgctactttgggaatgggtcagcctaccgtggcacgcacagcctcaccgagtcgggtgcctcctgcctcccgtggaattccatgatcctgataggcaaggtttacacagcacagaaccccagtgcccaggcactgggcctgggcaaacataattactgccggaatcctgatggggatgccaagccctggtgccacgtgctgaagaaccgcaggctgacgtgggagtactgtgatgtgccctcctgctccacctgcggcctgagacagtacagccagcctcagtttcgcatcaaaggagggctcttcgccgacatcgcctcccacccctggcaggctgccatctttgccaagcacaggaggtcgcccggagagcggttcctgtgcgggggcatactcatcagctcctgctggattctctctgccgcccactgcttccaggagaggtttccgccccaccacctgacggtgatcttgggcagaacataccgggtggtccctggcgaggaggagcagaaatttgaagtcgaaaaatacattgtccataaggaattcgatgatgacacttacgacaatgacattgcgctgctgcagctgaaatcggattcgtcccgctgtgcccaggagagcagcgtggtccgcactgtgtgccttcccccggcggacctgcagctgccggactggacggagtgtgagctctccggctacggcaagcatgaggccttgtctcctttctattcggagcggctgaaggaggctcatgtcagactgtacccatccagccgctgcacatcacaacatttacttaacagaacagtcaccgacaacatgctgtgtgctggagacactcggagcggcgggccccaggcaaacttgcacgacgcctgccagggcgattcgggaggccccctggtgtgtctgaacgatggccgcatgactttggtgggcatcatcagctggggcctgggctgtggacagaaggatgtcccgggtgtgtacaccaaggttaccaactacctagactggattcgtgacaacatgcgaccgtgaccaggaacacccgactcctcaaaagcaaatgagatcccgcctcttcttcttcagaagacactgcaaaggcgcagtgcttctctacagacttctccagacccaccacaccgcagaagcgggacgagaccctacaggagagggaagagtgcattttcccagatacttcccattttggaagttttcaggacttggtctgatttcaggatactctgtcagatgggaagacatgaatgcacactagcctctccaggaatgcctcctccctgggcagaaagtggccatgccaccctgttttcagctaaagcccaacctcctgacctgtcaccgtgagcagctttggaaacaggaccacaaaaatgaaagcatgtctcaatagtaaaagataacaagatctttcaggaaagacggattgcattagaaatagacagtatatttatagtcacaagagcccagcagggcctcaaagttggggcaggctggctggcccgtcatgttcctcaaaagcacccttgacgtcaagtctccttcccctttccccactccctggctctcagaaggtattccttttgtgtacagtgtgtaaagtgtaaatcctttttctttataaactttagagtagcatgagagaattgtatcatttgaacaactaggcttcagcatatttatagcaatccatgttagtttttactttctgttgccacaaccctgttttatactgtacttaataaattcagatatatttttcacagtttttccaaaatcagagtggaatggttttgttatagatgctgtatcccactctttattcatgttcacattttaaaatcatttggaattctgcttcactcgcttaacatatacacaacacctgtaacatacaaggcaatgggctaggtgctccagaccgggaaaaggagggacaggaatgcttggtctgatgggctaatatggcatttagagaagtaccaaggtacagtggagccggtcacaaaagggcagacttgtagtagaattcagttgcaagagggattggggaatcttaaggaaaaaatagaatcttaaggaaaaaataactgggtgagacgtggactgtggacaggtgtggaaaaggcactctccatggaggtatgaatatgtagagggccaagagaggggagtacagggagaaatgagttgagcttgtctgaagtgaacttcaggaagaggaacataggctggaatttagattatgggggctctgaacaccaaactgagtttggacttaattgacttctg

SEQ ID NO: 1680 - DNA, 1437 bp, Homo sapiens
cagggccgagccagccccttcaccaccagccggccgcgccccgggaagggaagtttgtggcggaggaggttcgtacgggaggagggggaggcgcccacgcatctggggctgactcgctctttcgcaaaacgtctgggaggagtccctggggccacaaaactgcctccttcctgaggccagaaggagagaagacgtgcagggaccccgcgcacaggagctgccctcgcgacatgggtcacccgccgctgctgccgctgctgctgctgctccacacctgcgtcccagcctcttggggcctgcggtgcatgcagtgtaagaccaacggggattgccgtgtggaagagtgcgccctgggacaggacctctgcaggaccacgatcgtgcgcttgtgggaagaaggagaagagctggagctggtggagaaaagctgtacccactcagagaagaccaacaggaccctgagctatcggactggcttgaagatcaccagccttaccgaggttgtgtgtgggttagacttgtgcaaccagggcaactctggccgggctgtcacctattcccgaagccgttacctcgaatgcatttcctgtggctcatcagacatgagctgtgagaggggccggcaccagagcctgcagtgccgcagccctgaagaacagtgcctggatgtggtgacccactggatccaggaaggtgaagaagggcgtccaaaggatgaccgccacctccgtggctgtggctaccttcccggctgcccgggctccaatggtttccacaacaacgacaccttccacttcctgaaatgctgcaacaccaccaaatgcaacgagggcccaatcctggagcttgaaaatctgccgcagaatggccgccagtgttacagctgcaaggggaacagcacccatggatgctcctctgaagagactttcctcattgactgccgaggccccatgaatcaatgtctggtagccaccggcactcacgaacgctcactctggggaagctggttgccatgtaaaagtactactgccctgagaccaccatgctgtgaggaagcccaagctactcatgtataaatgccatgtggagatagagccccagatgtttcagccatctcagcccaggcaccagacaagtgggtgaagaagccaccttggacatgtagccccagcagatgtgatatagagaagaaacaggaaacttggctatattagtttcctagggctgcctgtgataaattattacaaactttataaactaacacattgtgtgcctatatcaaaacatcatggaaggacaggcacagtggctcatgcctgtagtcctagcactttgggagggtgagaaaggaagatctcttgagctcaggagttcaagatcagcctgggcaacacagtgagacctcatctccactaaaaataaaaaaaaattggctgg

SEQ ID NO: 1681 - DNA, 1413 bp, Homo sapiens
cagggccgagccagccccttcaccaccagccggccgcgccccgggaagggaagtttgtggcggaggaggttcgtacgggaggagggggaggcgcccacgcatctggggctgactcgctctttcgcaaaacgtctgggaggagtccctggggccacaaaactgcctccttcctgaggccagaaggagagaagacgtgcagggaccccgcgcacaggagctgccctcgcgacatgggtcacccgccgctgctgccgctgctgctgctgctccacacctgcgtcccagcctcttggggcctgcggtgcatgcagtgtaagaccaacggggattgccgtgtggaagagtgcgccctgggacaggacctctgcaggaccacgatcgtgcgcttgtgggaagaaggagaagagctggagctggtggagaaaagctgtacccactcagagaagaccaacaggaccctgagctatcggactggcttgaagatcaccagccttaccgaggttgtgtgtgggttagacttgtgcaaccagggcaactctggccgggctgtcacctattcccgaagccgttacctcgaatgcatttcctgtggctcatcagacatgagctgtgagaggggccggcaccagagcctgcagtgccgcagccctgaagaacagtgcctggatgtggtgacccactggatccaggaaggtgaagaagtcctggagcttgaaaatctgccgcagaatggccgccagtgttacagctgcaaggggaacagcacccatggatgctcctctgaagagactttcctcattgactgccgaggccccatgaatcaatgtctggtagccaccggcactcacgaaccgaaaaaccaaagctatatggtaagaggctgtgcaaccgcctcaatgtgccaacatgcccacctgggtgacgccttcagcatgaaccacattgatgtctcctgctgtactaaaagtggctgtaaccacccagacctggatgtccagtaccgcagtggggctgctcctcagcctggccctgcccatctcagcctcaccatcaccctgctaatgactgccagactgtggggaggcactctcctctggacctaaacctgaaatccccctctctgccctggctggatccgggggacccctttgcccttccctcggctcccagccctacagacttgctgtgtgacctcaggccagtgtgccgacctctctgggcctcagttttcccagctatgaaaacagctatctcacaaagttgtgtgaagcagaagagaaaagctggaggaaggccgtgggccaatgggagagctcttgttattattaatattgttgccgctgttgtgttgttgttattaattaatattcatattatttattttatacttacataaagattttgtaccagtgg

SEQ ID NO: 1682 - DNA, 1548 bp, Homo sapiens
cagggccgagccagccccttcaccaccagccggccgcgccccgggaagggaagtttgtggcggaggaggttcgtacgggaggagggggaggcgcccacgcatctggggctgactcgctctttcgcaaaacgtctgggaggagtccctggggccacaaaactgcctccttcctgaggccagaaggagagaagacgtgcagggaccccgcgcacaggagctgccctcgcgacatgggtcacccgccgctgctgccgctgctgctgctgctccacacctgcgtcccagcctcttggggcctgcggtgcatgcagtgtaagaccaacggggattgccgtgtggaagagtgcgccctgggacaggacctctgcaggaccacgatcgtgcgcttgtgggaagaaggagaagagctggagctggtggagaaaagctgtacccactcagagaagaccaacaggaccctgagctatcggactggcttgaagatcaccagccttaccgaggttgtgtgtgggttagacttgtgcaaccagggcaactctggccgggctgtcacctattcccgaagccgttacctcgaatgcatttcctgtggctcatcagacatgagctgtgagaggggccggcaccagagcctgcagtgccgcagccctgaagaacagtgcctggatgtggtgacccactggatccaggaaggtgaagaagggcgtccaaaggatgaccgccacctccgtggctgtggctaccttcccggctgcccgggctccaatggtttccacaacaacgacaccttccacttcctgaaatgctgcaacaccaccaaatgcaacgagggcccaatcctggagcttgaaaatctgccgcagaatggccgccagtgttacagctgcaaggggaacagcacccatggatgctcctctgaagagactttcctcattgactgccgaggccccatgaatcaatgtctggtagccaccggcactcacgaaccgaaaaaccaaagctatatggtaagaggctgtgcaaccgcctcaatgtgccaacatgcccacctgggtgacgccttcagcatgaaccacattgatgtctcctgctgtactaaaagtggctgtaaccacccagacctggatgtccagtaccgcagtggggctgctcctcagcctggccctgcccatctcagcctcaccatcaccctgctaatgactgccagactgtggggaggcactctcctctggacctaaacctgaaatccccctctctgccctggctggatccgggggacccctttgcccttccctcggctcccagccctacagacttgctgtgtgacctcaggccagtgtgccgacctctctgggcctcagttttcccagctatgaaaacagctatctcacaaagttgtgtgaagcagaagagaaaagctggaggaaggccgtgggccaatgggagagctcttgttattattaatattgttgccgctgttgtgttgttgttattaattaatattcatattatttattttatacttacataaagattttgtaccagtgg

SEQ ID NO: 1683 - DNA, 2707 bp, Homo sapiens
aaaaaaaaaaaaaaaaaaattcaggtccctgcaccgcactccgctcggaccccaggccgccggtgctgtcgctactcaagtgagtcccgcggtgcccctcccgccgcgccgcccgtcgggcatggactcgggccgggacttcctgaccctgcacggcctacaggatgatgaggatctacaggcgctgctgaagggcagccagctcctgaaggtgaagtccagctcatggaggagagagcgcttctacaagttgcaggaggactgcaagaccatctggcaggagtcccgcaaggtcatgcggaccccggagtcccagctgttctccatcgaggacattcaggaggtgcgaatggggcaccgcacggagggtctggagaagttcgcccgtgatgtgcccgaggaccgctgcttctccattgtcttcaaggaccagcgcaatacactagacctcatcgccccatcgccagctgatgcccagcactgggtgctggggctgcacaagatcatccaccactcaggctccatggaccagcgtcagaagctacagcactggattcactcctgcttgcgaaaagctgacaaaaacaaggacaacaagatgagcttcaaggagctgcagaacttcctgaaggagctcaacatccaggtggacgacagctatgcccggaagatcttcagggagtgtgaccactcccagacagactccctggaggacgaggagattgaggccttctacaagatgctgacccagcgggtggagatcgaccgcaccttcgccgaggccgcgggctcaggggagactctgtcggtggatcagttagtgacgttcctgcagcaccagcagcgggaggaggcggcagggcctgcgctggccctctccctcattgagcgctacgagcccagcgagactgccaaggcgcagcggcagatgaccaaggacggcttcctcatgtacttactgtcggctgacggcagcgccttcagcctggcacaccgccgtgtctaccaggacatgggccagccacttagccactacctggtgtcctcttcacacaacacctacctgctggaggaccagctagccgggcccagcagcactgaagcctacatccgggcactgtgcaaaggctgccgatgcctggagcttgactgctgggacgggcccaaccaggaaccaatcatctaccacggctatactttcacttccaagatcctcttctgcgatgtgctcagggccatccgggactatgccttcaaggcgtccccctaccctgtcatcctatccctggagaaccactgcacactggagcagcagcgcgtgatggcgcggcacctgcatgccatcctgggccccatgctgttgaaccgaccactggatggggtcaccaacagcctgccctcccctgagcaactgaaggggaagatcctgctgaaggggaagaagctcggggggctcctgccccctggaggggagggtggccctgaggccactgtggtgtcagacgaagacgaggctgctgagatggaggatgaggcagtgaggagccgtgtgcagcacaagcccaaggaggacaagctcaggctagcacaggagctctctgacatggtcatttactgcaagagtgtccactttgggggcttctccagtcctggcacccctggacaggccttctacgagatggcgtccttctctgagaaccgtgcccttcgactgctccaagaatcaggaaacggctttgtccgccacaacgtggggcacctgagcagaatctacccggctggatggagaacagactcctccaactacagccccgtggagatgtggaatgggggctgccagatcgtggccctgaatttccagacacctgggccagagatggacgtgtaccagggccgcttccaggacaacggggcctgtgggtacgtgctgaagcccgccttcctgcgagaccccaacggcacctttaacccccgcgccctggctcaggggccctggtgggcacggaagcggctcaacatcagggtcatttcggggcagcagctgccaaaagtcaacaagaataagaattcaattgtggaccccaaagtgacagtggagatccatggcgtgagccgggacgtggccagccgccagactgctgtcatcaccaacaatggtttcaacccatggtgggacacggagtttgcgtttgaggtagttgtgcctgaccttgccctcatccgcttcttggtggaagattatgatgcctcctccaagaatgacttcattggccagagtaccatccccttgaacagcctcaagcaaggataccgccatgtccacctcatgtctaagaacggggaccagcatccatcagccaccctctttgtgaagatctccctccaggactaggctggaggaagccagtggggtcccccctgagtgggctgggccctctgtccacatgtggggacagggctggtgtggctgctcccagcctcttgctcagagctaggcccccaaattgccttcagccctaacatagtgtctgctgctgcctccctggggaccaggagctagcccagtccctggagctgtccttcattccgttaggaataacactgcagccctctccaccctccggccagcgagtggtcaaggatttttataaaaatcacgataagattaaaaaaaaaaaaaaaaaaaaaaaaaaaaaaaaaaaaaaaa

SEQ ID NO: 1684 - DNA, 7992 bp, Homo sapiens
cgctgggcaacgtgggcaacgcggcgggcggcgggctcgcgcggcgggaggggcagcggcggcgcgcccgggctctacctcccgggctctgcctcccgggctctgcctctcgggcacttgcctggctcctgcgcgttcctgggcatcggctctgcagctgacacacagtagcggggacacccgacgccgctagcgacaggcgcgcggacggctggtcccagagggacgctgcgcttggggacgccggcgagactcgccaggagccaagaggaaacaggaatcattcaaactggattttaaaatcattgcaaatcagtgatggatcagaagttgcagagtgcaatcccgagtaaaagtcttcaaaaaattttgcttcaggtaacagaggaaggaaaattgatctaccaccttaaaaccctgatctagaaaaaatatatattcatgataggaagttataactaagaaaatttatttgcctcttaatgctcctgaatgaaaggaattatccctttgttctttgggaggacttgtgtatctgagattgttgtaataatcagtcattttattaaaaccttgacatgatcaccagggaggaaaaatagagcaatagtcaaaacctgtgtgttagtccaagatgacttctgaagaaatgacagcttctgttctcatacctgtgactcagagaaaagtggtttctgcccagtcggctgcagatgaaagtagtgaaaaggtctcagacatcaatatttcaaaagcacatactgtcagacgaagtggggagacttctcataccatctcacaactgaacaaacttaaagaagaaccttctggaagcaacttgccaaagattctctcaatagcgagggagaaaatagtgagtgatgagaacagtaatgaaaaatgttgggagaaaatcatgccagattctgcgaaaaaccttaacattaactgcaacaacatattgagaaaccatcagcatggccttcctcagagacaattttatgaaatgtacaactctgttgctgaggaagacttgtgtttagaaactggaattccttctccactggaaagaaaggtgttccctggaattcaactggaactagacagaccttccatgggcattagtcctttaggaaatcagtcagtgatcatagagacaggcagagcacaccctgacagcagaagggcagtatttcattttcattatgaagttgacagaagaatgtcagacactttctgtaccctatcagaaaacttaattttagacgattgtggaaattgtgtaccactacctgggggtgaggagaagcaaaagaaaaactatgtggcatatacctgtaaactgatggaattggccaaaaattgtgataataagaatgagcagctgcagtgtgatcattgtgacaccttgaatgataaatacttttgctttgaaggctcttgtgagaaggttgacatggtatattcaggtgatagcttttgtaggaaagactttactgacagtcaagctgccaagacctttttgagccattttgaggacttccctgataattgtgatgatgtagaagaagacgcttttaaaagcaaaaaggagcgatccactttgttagtcaggagattctgtaaaaatgacagagaagttaagaaatctgtgtatactggaacaagagcaattgtgagaactctgccttctggccacattgggctgactgcatggagttacatagatcagaagagaaatggtcccttactgccttgtgggagagtaatggaacccccgtcaacagtggagataaggcaagatgggagccaacgtctgtcagaagcccagtggtatcctatctacaatgcagtgagaagagaagaaacagaaaatacagttggatctctactccatttcctcaccaagctcccagcctccgagacagcccatggaaggataagcgttggtccatgcttaaagcaatgtgtccgagacactgtatgtgagtatcgcgccaccctccaaaggacttcaatatcgcagtacatcaccggttctctcctagaagcaaccacgtctttgggagcaagaagtggccttctcagtacttttggaggatccactggacgaatgatgctgaaagaacgccagccaggcccctctgtggccaattccaatgccctcccttcaagttcagctgggatcagcaaggagctgatcgatctgcagcctctcatccagttcccagaggaagtcgccagcatcctgatggagcaagagcagactatttaccgcagggtcttgccagtcgactacctttgcttcttaacacgggacttgggcactcctgaatgccagagctccttgccctgcctcaaagcatccatctcagcgtcgattcttaccactcagaatggagagcacaatgcccttgaagatctggtgatgaggtttaatgaggtgagctcctgggtgacatggctgatcctcacggcaggctccatggaggagaagcgagaagtcttttcatatttggtgcatgtggccaaatgctgctggaacatgggcaactacaacgctgtcatggagttcttggctggcctcaggtcaagaaaagttttaaaaatgtggcagttcatggaccagtctgatattgagaccatgaggagcctgaaggatgctatggcccagcatgagtcctcttgtgagtacagaaaggtggtgacacgtgccctgcacatccctggctgtaaggtggttccattctgtggggtgtttctgaaggagctctgtgaagtgcttgacggcgcctccggtctcatgaagctttgcccgcggtacaattcccaagaagaaactttagagtttgtagcagattacagtggacaagataatttcttacaacgagtgggacaaaatggcttaaagaattcggagaaggagtccactgtcaacagcatctttcaggtcatccggagctgcaatcgaagtctggagacagacgaggaggacagccccagtgaaggaaacagctccaggaaaagctccttgaaggataaaagccgatggcagtttataattggagatttgttggattcagacaatgacatctttgagcaatccaaagaatacgactctcatggttcagaggactcacagaaggccttcgaccatgggacggagctcatcccttggtacgtgctgtccatccaagccgatgtgcaccagttcctgctgcagggggccacggtcatccactacgaccaggacacacacctctctgcccgctgcttcctccagcttcagcccgacaatagcaccttgacctgggtaaagcccacaactgcctccccagccagcagtaaagcaaaacttggtgtacttaataacacagctgagcctggaaaattcccactactgggtaatgctggattaagtagcctgacggaaggggtcttggatctttttgcagtgaaggctgtatacatgggccaccctggcattgatatacacactgtgtgtgttcagaacaaactgggtagcatgttcctgtcagagactggtgtgacattgctctatgggcttcagaccacagacaacagattattgcacttcgtggcaccaaagcacacagctaaaatgctcttcagcggattattggaactcactagagctgtgagaaagatgaggaaattccctgaccaaagacagcagtggctgcggaaacagtacgtcagcctttatcaggaggatggacggtatgaaggcccaactttggctcacgctgtggagttgtttggtggcagacggtggagtgctcgaaaccccagccccggaacatcagcaaagaatgctgagaagcccaatatgcagagaaacaataccctgggcataagcactaccaagaaaaagaagaaaatcctcatgaggggtgagagtggagaggtaactgacgatgagatggcaacccgaaaggccaagatgcacaaagagtgtcgaagccggagtggttctgatcctcaagacattaatgaacaagaagaatcagaggtgaatgccatcgctaaccctccaaaccccctcccttccagaagagcccactctttgaccacagctgggtcccccaacttggctgccgggacgtcatctcccatcaggccagtgtcctcccctgtgctgtcttcttcaaacaagagcccatccagtgcttggagcagtagtagctggcacgggcggatcaaaggcggcatgaagggatttcagagcttcatggtttcagatagcaacatgagttttgttgaatttgttgagctgttcaaatcattcagtgtcaggagccgcaaggacctgaaggatctgtttgatgtctatgcagtgccctgcaaccgatctggctccgagtcagccccactctacaccaacctgacaattgatgaaaacaccagcgatcttcagcctgacctagatctgttgaccagaaatgtctcggatttggggttgttcattaagagtaaacagcagctatcggacaaccagaggcagatatctgatgccattgctgctgcaagcattgtgacaaatggcactgggattgagagcacatctctgggcatttttggggtgggcatacttcagctcaacgatttcctcgtgaattgccaaggagaacactgcacttatgatgaaatcctcagcatcatccagaagttcgagcctagcatcagtatgtgtcatcagggactaatgtcatttgaagggtttgccaggtttctgatggataaagaaaattttgcctcaaaaaatgatgagtcacaggagaacattaaagaactgcagctacccctctcatactattacatcgaatcttcgcacaatacctacctcacgggccatcagctcaaaggagaatcctcggtagaactctacagccaggtccttttgcaaggctgtcgaagtgtagaattggactgctgggacggagacgatgggatgcccatcatttatcatggacatacgctgacaaccaagatccccttcaaggaagtggttgaagccattgatcgcagtgccttcatcaactctgacctgccaatcatcatatcgattgagaaccactgttcattgcctcagcaacgaaaaatggcagaaattttcaagactgtgtttggagaaaagctggtgactaaattcttatttgagactgatttctcagatgatccaatgcttccttcacctgaccaactcagaaagaaagttcttcttaaaaacaagaagctaaaagcccatcagacgccagtggatatcttaaagcaaaaggctcatcagttagcatctatgcaagtgcaggcttataatggtgggaatgccaacccccgacctgccaataatgaggaagaggaagatgaggaggacgaatatgattatgactatgaatccctttctgatgacaacattctggaagacagacctgaaaataaatcatgtaatgacaagcttcagtttgaatataatgaagaaatcccaaagaggataaagaaagcagataactctgcttgcaacaaaggaaaggtttatgatatggaactgggagaagaattttatcttgatcagaataaaaaggaaagcagacagattgcaccagagctttctgaccttgtaatctattgtcaagcagtaaaatttccaggactgtcaactctaaatgcatctggctctagcagaggaaaagaaaggaaaagcaggaagtccatttttggcaacaatccgggcagaatgagcccaggggagacagcatcatttaacaaaacatctggaaaaagttcctgtgaaggcattcgacagacctgggaggaatcttcttcccctctcaacccaaccacgtccctcagtgctatcattagaactcccaaatgttatcatatctcgtcgctgaatgaaaatgccgccaaacgtctgtgtcgcaggtattctcagaaactgacccagcacaccgcctgtcagctgctgagaacttaccctgctgccacccgcatcgactcttccaacccgaaccccctcatgttctggctccatgggatacagcttgtggcactcaactaccagactgatgatctccctttacatttaaatgctgcaatgtttgaggcaaatggtggttgtggttatgtattgaaacctccagttctgtgggacaagaactgccccatgtatcagaagttttctccactagaaagagatctggacagcatggatcctgcagtctattctttaactattgtctctggtcagaatgtgtgccccagtaatagcatgggaagcccgtgcattgaagtcgacgtcctgggcatgcctctggacagctgccatttccgcacaaagcccatccatcgaaacaccctgaaccccatgtggaacgagcagtttctgttccacgttcacttcgaagatcttgtatttcttcgttttgcagttgtggaaaacaatagttcagcggtaactgctcagagaatcattccactgaaagctttaaaacgaggatatcgacatcttcagctgcgaaaccttcacaatgaagtcttggagatttctagtttattcattaacagcagaaggatggaagaaaattcctctggcaataccatgtcagcctcttcgatgtttaatacagaagaaagaaaatgtttgcagactcacagagtcacggtgcatggggtcccagggccagagccctttaccgttttcactattaatggaggcaccaaggcaaagcagcttctgcagcaaattctgacaaatgaacaagacatcaaacctgttaccacagactattttttgatggaagaaaaatattttatatctaaagaaaagaatgaatgtaggaaacaaccattccagagagccattggtccagaagaggagatcatgcaaattttaagcagctggtttccagaagagggatacatgggcaggattgtcttaaaaacccagcaggaaaacctagaagagaaaaacattgttcaagatgacaaagaggtgatcttgagctcagaggaggagagtttctttgtccaagtgcatgatgtttctccagagcaacctcgaacagtcatcaaagcaccccgcgtcagcactgcacaggatgtcattcagcagaccttatgcaaagccaaatattcctacagcatcctgagcaaccccaatccaagcgactatgtgcttttggaagaggtggtgaaagacactaccaacaagaagactaccacaccaaagtcctctcagcgggtccttctggatcaggagtgtgtgtttcaagcccaaagcaagtggaaaggtgcaggaaaattcatccttaagctaaaggagcaggtgcaggcatctcgagaagataaaaagaaaggcatttctttcgcaagtgaactcaagaagctcaccaagtcaactaaacagccccgaggacttacatcaccttctcagctcttgacctcagaaagtatccaaaccaaggaggagaaacctgtgggtggcttgtcctccagtgacacaatggattaccgacagtgactaagggcagcatgtttaacccaggtgaagatctttaagcaagaagttaaagagtgaacatggtggaaaaaatataattattttcatcagacttaaactggaaattgatgatttctgaactgaagccttcacacatgtgagatccatgctgaggagaagcaaaatggcacagggctagttgccaccaaccaatttactgatgaatgaagcccaggggactgccattttataaatgtcagcagttggaaaaatcgtcacgaattgacttagagcaagggtcagcaagcttgtctgtaaagggccaaacagtaaatattttagggctgggggccataaaatatgttgcaaccacccaattctgccattgtagtgcaaaagcagccatagacaacacatacatgaacgaacgtggctgtattccaataaaactttatttatggacactgaaa

SEQ ID NO: 1685 - DNA, 5202 bp, Homo sapiens
gagccgccgccgggtcccgctcgtctgccgcctcagcctcagccccaacctcagccgccgccgttgcgcttgctcccgggcggtcctggcctgtgccgccgccgcccccagcgtcggagccatggcgggcgccgcgtccccttgcgccaacggctgcgggcccggcgcgccctcggacgccgaggtgctgcacctctgccgcagcctcgaggtgggcaccgtcatgactttgttctactccaagaagtcgcagcgacccgagcggaagaccttccaggtcaagctggagacgcgccagatcacgtggagccggggcgccgacaagatcgagggggccattgacattcgtgaaattaaggagatccgcccagggaagacctcacgggactttgatcgctatcaagaggacccagctttccggccggaccagtcacattgctttgtcattctctatggaatggaatttcgcctgaaaacgctgagcctgcaagccacatctgaggatgaagtgaacatgtggatcaagggcttaacttggctgatggaggatacattgcaggcacccacacccctgcagattgagaggtggctccggaagcagttttactcagtggatcggaatcgtgaggatcgtatatcagccaaggacctgaagaacatgctgtcccaggtcaactaccgggtccccaacatgcgcttcctccgagagcggctgacggacctggagcagcgcagcggggacatcacctacgggcagtttgctcagctgtaccgcagcctcatgtacagcgcccagaagacgatggacctccccttcttggaagccagtactctgagggctggggagcggccggagctttgccgagtgtcccttcctgagttccagcagttccttcttgactaccagggggagctgtgggctgttgatcgcctccaggtgcaggagttcatgctcagcttcctccgagaccccttacgagagatcgaggagccatacttcttcctggatgagtttgtcaccttcctgttctccaaagagaacagtgtgtggaactcgcagctggatgcagtatgcccggacaccatgaacaaccctctttcccactactggatctcctcctcgcacaacacgtacctgaccggggaccagttctccagtgagtcctccttggaagcctatgctcgctgcctgcggatgggctgtcgctgcattgagttggactgctgggacggcccggatgggatgccagttatttaccatgggcacacccttaccaccaagatcaagttctcagatgtcctgcacaccatcaaggagcatgcctttgtggcctcagagtacccagtcatcctgtccattgaggaccactgcagcattgcccagcagagaaacatggcccaatacttcaagaaggtgctgggggacacactcctcaccaagcccgtggagatctctgccgacgggctcccctcacccaaccagcttaagaggaagatcctcatcaagcacaagaagctggctgagggcagtgcctacgaggaggtgcctacatccatgatgtactctgagaacgacatcagcaactctatcaagaatggcatcctctacctggaggaccctgtgaaccacgaatggtatccccactactttgttctgaccagcagcaagatctactactctgaggagaccagcagtgaccagggcaacgaggatgaggaggagcccaaggaggtcagcagcagcacagagctgcactccaatgagaagtggttccatgggaagctaggggcagggcgtgacgggcgtcacatcgctgagcgcctgcttactgagtactgcatcgagaccggagcccctgacggctccttcctcgtgcgagagagtgagaccttcgtgggcgactacacgctctctttctggcggaacgggaaagtccagcactgccgtatccactcccggcaagatgctgggacccccaagttcttcttgacagacaacctcgtctttgactccctctatgacctcatcacgcactaccagcaggtgcccctgcgctgtaatgagtttgagatgcgactttcagagcctgtcccacagaccaacgcccacgagagcaaagagtggtaccacgcgagcctgaccagagcacaggctgagcacatgctaatgcgcgtccctcgtgatggggccttcctggtgcggaagcggaatgaacccaactcatatgccatctctttccgggctgagggcaagatcaagcattgccgtgtccagcaagagggccagacagtgatgctagggaactcggagttcgacagccttgttgacctcatcagctactatgagaaacacccgctataccgcaagatgaagctgcgctatcccatcaacgaggaggcactggagaagattggcacagctgagcctgactacggggccctgtatgagggacgcaaccctggcttctatgtagaggcaaaccctatgccaactttcaagtgtgcagtcaaagccctctttgactacaaggcccagagggaggacgagctgaccttcatcaagagcgccatcatccagaatgtggagaagcaagagggaggctggtggcgaggggactacggagggaagaagcagctgtggttcccatcaaactacgtggaagagatggtcaaccccgtggccctggagccggagagggagcacttggacgagaacagccccctaggggacttgctgcggggggtcttggatgtgccggcttgtcagattgccatccgtcctgagggcaagaacaaccggctcttcgtcttctccatcagcatggcgtcggtggcccactggtccctggatgttgctgccgactcacaggaggagctgcaggactgggtgaaaaagatccgtgaagtggcccagacagcagacgccaggctcactgaagggaagataatggaacggaggaagaagattgccctggagctctctgaacttgtcgtctactgccggcctgttccctttgatgaagagaagattggcacagaacgtgcttgctaccgggacatgtcatccttcccggaaaccaaggctgagaaatacgtgaacaaggccaaaggcaagaagttccttcagtacaatcgactgcagctctcccgcatctaccccaagggccagcgactggattcctccaactacgatcctttgcccatgtggatctgtggcagtcagcttgtggccctcaacttccagacccctgacaagcctatgcagatgaaccaggccctcttcatgacgggcaggcactgtggctacgtgctgcagccaagcaccatgcgggatgaggccttcgacccctttgacaagagcagcctccgcgggctggagccatgtgccatctctattgaggtgctgggggcccgacatctgccaaagaatggccgaggcattgtgtgtccttttgtggagattgaggtggctggagctgagtatgacagcaccaagcagaagacagagtttgtggtggacaatggactcaaccctgtatggccagccaagcccttccacttccagatcagtaaccctgaatttgcctttctgcgcttcgtggtgtatgaggaagacatgtttagtgaccagaatttcctggctcaggctactttcccagtaaaaggcctgaagacaggatacagagcagtgcctttgaagaacaactacagtgaggacctggagttggcctccctgctgatcaagattgacattttccctgccaaggagaatggtgacctcagtcccttcagtggtacgtccctgcgggagcggggctcagatgcctcaggccagctgtttcatggccgagcccgggaaggctcctttgaatcccgctaccagcagccgtttgaggacttccgcatctcccaggagcatctcgcagaccattttgacagtcgagaacgaagggccccaagaaggactcgggtcaatggagacaaccgcctctagttgtaccccagcctcgttggagagcagcaggtgctgtgcgccttgtagaatgccgcgaactgggttctttggaagcagccccctgtggcggccttccgggtctcgcagcctgaagcctggattccagcagtgaatgctagacagaaaccaagccattaatgagatgttattactgttttgggcctccatgccccagctctggatgaaggcaaaaactgtactgtgtttcgcattaagcacacacatctggccctgacttctggagatggatccttccatcttgtggggccaggaccatggccgaagccccttggagagagaggctgcctcagccagtggcacaggagactccaaggagctactgacattcctaagagtggaggaggaggaggagccttgctgggccagggaaacaaagtttacattgtcctgtagctttaaaaccacagctgggcagggtgagaagctagatgcccctgcagtttggccctggagccagggcagaggaatgtagggcctgcatggagaagggttctgccctgcctgaggaggaggacacagcacaagggcacattgcccatggctgggaacatgacccagcctgaaagatacaggggatcatgttaaaaatagcagtattatttttcgtctcaatggtattgtaactaagttatttactcctcctgctcctcacccctgtagggaaaccttggagaggagagtggcaggtgggctgcctgctgtgttaagaggacttagtttgtgatgtaaggcactgtcaggaatggggggcgggccagggtgggaagagaagaaatagcagagcctattttggtgaggttttttgtttttaagtcaaagaagactcagtatgctttccctgaggaatgaaaaagggattgaggagttgcctgactcctgggtgggtggggtacaggcagttaggtgctgaatgaagctgccatccttgctgcagcttctaactggtaaaaagatccagggatggagatgggaaggttagaaaggcagccctcacctctgaggacagaggccggggtccaggcccgtgggcgcaaaggtgcctcatagcatagccagcattcagcacacacaaacctactgcccacatttgggctcagggttggccatttgctagttctgctgccctcttaagatctgactgccaaataaatcatcctcatgtcctt

SEQ ID NO: 1686 - DNA, 5205 bp, Homo sapiens
gagccgccgccgggtcccgctcgtctgccgcctcagcctcagccccaacctcagccgccgccgttgcgcttgctcccgggcggtcctggcctgtgccgccgccgcccccagcgtcggagccatggcgggcgccgcgtccccttgcgccaacggctgcgggcccggcgcgccctcggacgccgaggtgctgcacctctgccgcagcctcgaggtgggcaccgtcatgactttgttctactccaagaagtcgcagcgacccgagcggaagaccttccaggtcaagctggagacgcgccagatcacgtggagccggggcgccgacaagatcgagggggccattgacattcgtgaaattaaggagatccgcccagggaagacctcacgggactttgatcgctatcaagaggacccagctttccggccggaccagtcacattgctttgtcattctctatggaatggaatttcgcctgaaaacgctgagcctgcaagccacatctgaggatgaagtgaacatgtggatcaagggcttaacttggctgatggaggatacattgcaggcacccacacccctgcagattgagaggtggctccggaagcagttttactcagtggatcggaatcgtgaggatcgtatatcagccaaggacctgaagaacatgctgtcccaggtcaactaccgggtccccaacatgcgcttcctccgagagcggctgacggacctggagcagcgcagcggggacatcacctacgggcagtttgctcagctgtaccgcagcctcatgtacagcgcccagaagacgatggacctccccttcttggaagccagtactctgagggctggggagcggccggagctttgccgagtgtcccttcctgagttccagcagttccttcttgactaccagggggagctgtgggctgttgatcgcctccaggtgcaggagttcatgctcagcttcctccgagaccccttacgagagatcgaggagccatacttcttcctggatgagtttgtcaccttcctgttctccaaagagaacagtgtgtggaactcgcagctggatgcagtatgcccggacaccatgaacaaccctctttcccactactggatctcctcctcgcacaacacgtacctgaccggggaccagttctccagtgagtcctccttggaagcctatgctcgctgcctgcggatgggctgtcgctgcattgagttggactgctgggacggcccggatgggatgccagttatttaccatgggcacacccttaccaccaagatcaagttctcagatgtcctgcacaccatcaaggagcatgcctttgtggcctcagagtacccagtcatcctgtccattgaggaccactgcagcattgcccagcagagaaacatggcccaatacttcaagaaggtgctgggggacacactcctcaccaagcccgtggagatctctgccgacgggctcccctcacccaaccagcttaagaggaagatcctcatcaagcacaagaagctggctgagggcagtgcctacgaggaggtgcctacatccatgatgtactctgagaacgacatcagcaactctatcaagaatggcatcctctacctggaggaccctgtgaaccacgaatggtatccccactactttgttctgaccagcagcaagatctactactctgaggagaccagcagtgaccagggcaacgaggatgaggaggagcccaaggaggtcagcagcagcacagagctgcactccaatgagaagtggttccatgggaagctaggggcagggcgtgacgggcgtcacatcgctgagcgcctgcttactgagtactgcatcgagaccggagcccctgacggctccttcctcgtgcgagagagtgagaccttcgtgggcgactacacgctctctttctggcggaacgggaaagtccagcactgccgtatccactcccggcaagatgctgggacccccaagttcttcttgacagacaacctcgtctttgactccctctatgacctcatcacgcactaccagcaggtgcccctgcgctgtaatgagtttgagatgcgactttcagagcctgtcccacagaccaacgcccacgagagcaaagagtggtaccacgcgagcctgaccagagcacaggctgagcacatgctaatgcgcgtccctcgtgatggggccttcctggtgcggaagcggaatgaacccaactcatatgccatctctttccgggctgagggcaagatcaagcattgccgtgtccagcaagagggccagacagtgatgctagggaactcggagttcgacagccttgttgacctcatcagctactatgagaaacacccgctataccgcaagatgaagctgcgctatcccatcaacgaggaggcactggagaagattggcacagctgagcctgactacggggccctgtatgagggacgcaaccctggcttctatgtagaggcaaaccctatgccaactttcaagtgtgcagtcaaagccctctttgactacaaggcccagagggaggacgagctgaccttcatcaagagcgccatcatccagaatgtggagaagcaagagggaggctggtggcgaggggactacggagggaagaagcagctgtggttcccatcaaactacgtggaagagatggtcaaccccgtggccctggagccggagagggagcacttggacgagaacagccccctaggggacttgctgcggggggtcttggatgtgccggcttgtcagattgccatccgtcctgagggcaagaacaaccggctcttcgtcttctccatcagcatggcgtcggtggcccactggtccctggatgttgctgccgactcacaggaggagctgcaggactgggtgaaaaagatccgtgaagtggcccagacagcagacgccaggctcactgaagggaagataatggaacggaggaagaagattgccctggagctctctgaacttgtcgtctactgccggcctgttccctttgatgaagagaagattggcacagaacgtgcttgctaccgggacatgtcatccttcccggaaaccaaggctgagaaatacgtgaacaaggccaaaggcaagaagttccttcagtacaatcgactgcagctctcccgcatctaccccaagggccagcgactggattcctccaactacgatcctttgcccatgtggatctgtggcagtcagcttgtggccctcaacttccagacccctgacaagcctatgcagatgaaccaggccctcttcatgacgggcaggcactgtggctacgtgctgcagccaagcaccatgcgggatgaggccttcgacccctttgacaagagcagcctccgcgggctggagccatgtgccatctctattgaggtgctgggggcccgacatctgccaaagaatggccgaggcattgtgtgtccttttgtggagattgaggtggctggagctgagtatgacagcaccaagcagaagacagagtttgtggtggacaatggactcaaccctgtatggccagccaagcccttccacttccagatcagtaaccctgaatttgcctttctgcgcttcgtggtgtatgaggaagacatgtttagtgaccagaatttcctggctcaggctactttcccagtaaaaggcctgaagacaggatacagagcagtgcctttgaagaacaactacagtgaggacctggagttggcctccctgctgatcaagattgacattttccctgccaagcaggagaatggtgacctcagtcccttcagtggtacgtccctgcgggagcggggctcagatgcctcaggccagctgtttcatggccgagcccgggaaggctcctttgaatcccgctaccagcagccgtttgaggacttccgcatctcccaggagcatctcgcagaccattttgacagtcgagaacgaagggccccaagaaggactcgggtcaatggagacaaccgcctctagttgtaccccagcctcgttggagagcagcaggtgctgtgcgccttgtagaatgccgcgaactgggttctttggaagcagccccctgtggcggccttccgggtctcgcagcctgaagcctggattccagcagtgaatgctagacagaaaccaagccattaatgagatgttattactgttttgggcctccatgccccagctctggatgaaggcaaaaactgtactgtgtttcgcattaagcacacacatctggccctgacttctggagatggatccttccatcttgtggggccaggaccatggccgaagccccttggagagagaggctgcctcagccagtggcacaggagactccaaggagctactgacattcctaagagtggaggaggaggaggagccttgctgggccagggaaacaaagtttacattgtcctgtagctttaaaaccacagctgggcagggtgagaagctagatgcccctgcagtttggccctggagccagggcagaggaatgtagggcctgcatggagaagggttctgccctgcctgaggaggaggacacagcacaagggcacattgcccatggctgggaacatgacccagcctgaaagatacaggggatcatgttaaaaatagcagtattatttttcgtctcaatggtattgtaactaagttatttactcctcctgctcctcacccctgtagggaaaccttggagaggagagtggcaggtgggctgcctgctgtgttaagaggacttagtttgtgatgtaaggcactgtcaggaatggggggcgggccagggtgggaagagaagaaatagcagagcctattttggtgaggttttttgtttttaagtcaaagaagactcagtatgctttccctgaggaatgaaaaagggattgaggagttgcctgactcctgggtgggtggggtacaggcagttaggtgctgaatgaagctgccatccttgctgcagcttctaactggtaaaaagatccagggatggagatgggaaggttagaaaggcagccctcacctctgaggacagaggccggggtccaggcccgtgggcgcaaaggtgcctcatagcatagccagcattcagcacacacaaacctactgcccacatttgggctcagggttggccatttgctagttctgctgccctcttaagatctgactgccaaataaatcatcctcatgtcctt

SEQ ID NO: 1687 - DNA, 4263 bp, Homo sapiens
gaattcggcgctgagtgacccgagtcgggacgcgggctgcgcgcgcgggaccccggagcccaaacccggggcaggcgggcagctgtgcccgggcggcacggccagcttcctgatttctcccgattccttccttctccctggagcggccgacaatgtccaccacggtcaatgtagattcccttgcggaatatgagaagagccagatcaagagagccctggagctggggacggtgatgactgtgttcagcttccgcaagtccacccccgagcggagaaccgtccaggtgatcatggagacgcggcaggtggcctggagcaagaccgccgacaagatcgagggcttcttggatatcatggaaataaaagaaatccgcccagggaagaactccaaagatttcgagcgagcaaaagcagttcgccagaaagaagactgctgcttcaccatcctatatggcactcagttcgtcctcagcacgctcagcttggcagctgactctaaagaggatgcagttaactggctctctggcttgaaaatcttacaccaggaagcgatgaatgcgtccacgcccaccattatcgagagttggctgagaaagcagatatattctgtggatcaaaccagaagaaacagcatcagtctccgagagttgaagaccatcttgcccctgatcaactttaaagtgagcagtgccaagttccttaaagataagtttgtggaaataggagcacacaaagatgagctcagctttgaacagttccatctcttctataaaaaacttatgtttgaacagcaaaaatcgattctcgatgaattcaaaaaggattcgtccgtgttcatcctggggaacactgacaggccggatgcctctgctgtttacctgcatgacttccagaggtttctcatacatgaacagcaggagcattgggctcaggatctgaacaaagtccgtgagcggatgacaaagttcattgatgacaccatgcgtgaaactgctgagcctttcttgtttgtggatgagttcctcacgtacctgttttcacgagaaaacagcatctgggatgagaagtatgacgcggtggacatgcaggacatgaacaaccccctgtctcattactggatctcctcgtcacataacacgtaccttacaggtgaccagctgcggagcgagtcgtccccagaagcttacatccgctgcctgcgcatgggctgtcgctgcattgaactggactgctgggacgggcccgatgggaagccggtcatctaccatggctggacgcggactaccaagatcaagtttgacgacgtcgtgcaggccatcaaagaccacgcctttgttacctcgagcttcccagtgatcctgtccatcgaggagcactgcagcgtggagcaacagcgtcacatggccaaggccttcaaggaagtatttggcgacctgctgttgacgaagcccacggaggccagtgctgaccagctgccctcgcccagccagctgcgggagaagatcatcatcaagcataagaagctgggcccccgaggcgatgtggatgtcaacatggaggacaagaaggacgaacacaagcaacagggggagctgtacatgtgggattccattgaccagaaatggactcggcactactgcgccattgccgatgccaagctgtccttcagtgatgacattgaacagactatggaggaggaagtgccccaggatataccccctacagaactacattttggggagaaatggttccacaagaaggtggagaagaggacgagtgccgagaagttgctgcaggaatactgcatggagacggggggcaaggatggcaccttcctggttcgggagagcgagaccttccccaatgactacaccctgtccttctggcggtcaggccgggtccagcactgccggatccgctccaccatggagggcgggaccctgaaatactacttgactgacaacctcaccttcagcagcatctatgccctcatccagcactaccgcgagacgcacctgcgctgcgccgagttcgagctgcggctcacggaccctgtgcccaaccccaacccccacgagtccaagccgtggtactatgacagcctgagccgcggagaggcagaggacatgctgatgaggattccccgggacggggccttcctgatccggaagcgagaggggagcgactcctatgccatcaccttcagggctaggggcaaggtaaagcattgtcgcatcaaccgggacggccggcactttgtgctggggacctccgcctattttgagagtctggtggagctcgtcagttactacgagaagcattcactctaccgaaagatgagactgcgctaccccgtgacccccgagctcctggagcgctacaatatggaaagagatataaactccctctacgacgtcagcagaatgtatgtggatcccagtgaaatcaatccgtccatgcctcagagaaccgtgaaagctctgtatgactacaaagccaagcgaagcgatgagctgagcttctgccgtggtgccctcatccacaatgtctccaaggagcccgggggctggtggaaaggagactatggaaccaggatccagcagtacttcccatccaactacgtcgaggacatctcaactgcagacttcgaggagctagaaaagcagattattgaagacaatcccttagggtctctttgcagaggaatattggacctcaatacctataacgtcgtgaaagcccctcagggaaaaaaccagaagtcctttgtcttcatcctggagcccaagcagcagggcgatcctccggtggagtttgccacagacagggtggaggagctctttgagtggtttcagagcatccgagagatcacctggaagattgacaccaaggagaacaacatgaagtactgggagaagaaccagtccatcgccatcgagctctctgacctggttgtctactgcaaaccaaccagcaaaaccaaggacaacttagaaaatcctgacttccgagaaatccgctcctttgtggagacgaaggctgacagcatcatcagacagaagcccgtcgacctcctgaagtacaatcaaaagggcctgacccgcgtctacccaaagggacaaagagttgactcttcaaactacgaccccttccgcctctggctgtgcggttctcagatggtggcactcaatttccagacggcagataagtacatgcagatgaatcacgcattgttttctctcaatgggcgcacgggctacgttctgcagcctgagagcatgaggacagagaaatatgacccgatgccacccgagtcccagaggaagatcctgatgacgctgacagtcaaggttctcggtgctcgccatctccccaaacttggacgaagtattgcctgtccctttgtagaagtggagatctgtggagccgagtatgacaacaacaagttcaagacgacggttgtgaatgataatggcctcagccctatctgggctccaacacaggagaaggtgacatttgaaatttatgacccaaacctggcatttctgcgctttgtggtttatgaagaagatatgttcagcgatcccaactttcttgctcatgccacttaccccattaaagcagtcaaatcaggattcaggtccgttcctctgaagaatgggtacagcgaggacatagagctggcttccctcctggttttctgtgagatgcggccagtcctggagagcgaagaggaactttactcctcctgtcgccagctgaggaggcggcaagaagaactgaacaaccagctctttctgtatgacacacaccagaacttgcgcaatgccaaccgggatgccctggttaaagagttcagtgttaatgagaaccagctccagctgtaccaggagaaatgcaacaagaggttaagagagaagagagtcagcaacagcaagttttactcatagaagctggggtatgtgtgtaagggtattgtgtgtgtgcgcatgtgtgtttgcatgtaggagaacgtgccctattcacactctgggaagacgctaatctgtgacatcttttcttcaagcctgccatcaaggacatttcttaagacccaactggcatgagttggggtaatttcctattattttcatcttggacaactttcttaacttatattctttatagaggattccccaaaatgtgctcctcatttttggcctctcatgttccaaacctcattgaataaaagcaatgaaaaccttgaaaaaaaaaaaaaaaaaa

SEQ ID NO: 1688 - DNA, 4608 bp, Homo sapiens
gcacatagattctctctttgaacaatgcagctgctgcaggggatggggaagggatggcactggcaattcaagactgcctttcctacttcttcagtgcctctttcaccaatatgaagttaaaaccaggatccttcaaaccaaaaatgtggtggaagaaagaaaaccgtgtctttcagcagcatgccatcggaaaagaaaattagcagtgcaaatgactgcatcagcttcatgcaagctggctgtgagttgaagaaagtccggccaaattctcgcatttacaaccgttttttcactctggacacagaccttcaagctcttcgctgggaaccttcaaagaaagacctcgagaaagccaagcttgatatttctgccataaaagagatcagactggggaaaaacacggaaacatttagaaacaatggccttgctgaccagatctgtgaggactgtgccttttccatactccacggggaaaactatgagtctctggacctagttgccaattcagcagatgtggcaaacatctgggtgtctgggttacggtacctggtttctcgaagtaagcagcctcttgattttatggagggcaaccagaacacaccacggttcatgtggttgaaaacagtgtttgaagcagcagatgttgatgggaatgggattatgttggaagacacctctgtagagttaataaaacaactcaaccctactctgaaggaagccaagatcaggttaaagtttaaagaaatccagaagagcaaggaaaaactaaccacccgcgtgaccgaagaggaattttgtgaagctttttgtgaactttgcaccaggccagaagtgtatttcttacttgtacagatatctaaaaacaaagaatatttggatgccaatgatctcatgctctttttagaagctgagcaaggagtcacccatatcaccgaggatatatgcttagacatcataaggagatacgaactttctgaagagggacgtcaaaaagggtttcttgcaattgatggctttacccagtatttattgtcatcagaatgtgacatttttgatcctgagcaaaagaaggttgcccaagatatgacccagccattatctcactactatatcaatgcctctcataacacctatctaatagaagaccagttcagggggccagctgacatcaatgggtacattagagctttgaaaatgggctgtcgaagcgttgaactcgatgtaagtgatggttcagataatgaaccaatcctttgtaatcgaaataacatgacaacccatgtttcctttcgaagtgtcatagaggtaataaataaatttgcctttgttgcttctgaatacccactcattctttgcttgggaaatcactgctccttgccgcagcagaaggtaatggctcaacagatgaaaaaggtctttggcaataaactctatactgaagcacctttgccctcagaatcctacctcccatcaccagaaaaattaaaaagaatgatcattgtgaaaggaaagaagttgccttctgatccagatgtgttagaaggagaagtaacagatgaagatgaagaagctgaaatgtctcgaaggatgtcggtagattacaatggtgagcagaagcaaatccgactctgtagggagctctctgatttggtgtctatttgtaaatctgttcaatacagggattttgaactatctatgaaaagccaaaactattgggaaatgtgttcatttagtgaaacagaggccagccgcattgcaaatgagtacccagaggattttgttaattataataagaagttcttatcaagaatctatccaagtgccatgaggatcgattccagtaacttgaatccacaggacttttggaattgtggctgtcagattgtagcaatgaattttcagactccgggtccaatgatggaccttcacacgggctggtttcttcaaaacgggggatgtggttatgttctaaggccgtctataatgcgagatgaagtttcttacttcagcgcaaatacaaagggcattctacctggggtgtctcctctagctcttcatatcaagatcatcagtggtcagaatttcccaaagcccaagggagcttgtgccaaaggggatgtcatagatccctatgtttgtatagagatacacggaattccagcggattgttcggaacaaagaactaaaactgtacagcaaaacagtgataatcctatttttgatgaaacttttgagttccaagtaaacctacctgagctggccatgatccgttttgttgttctggatgatgactacattggggatgagtttatagggcaatatacgataccatttgaatgtttgcagcctggatatcggcatgttcccctgcgttcttttgtgggtgacatcatggagcacgtaaccctttttgtccacatagcaataactaatcgaagtggaggaggaaaggcacagaagcgcagtctttcagtgagaatggggaagaaagttcgggaatataccatgctcaggaatatcggtcttaaaaccattgatgacatctttaaaatagcggttcatccattacgagaagccatagatatgagagaaaatatgcagaatgcaatcgtgtctattaaggaactatgtggactccctccaattgccagtctgaagcagtgcctgttaactctgtcatctcggctcatcaccagtgacaatactccttcagtctcacttgtgatgaaagacagctttccttacctggagcctctgggtgcaattccagatgtgcagaaaaagatgctgactgcttatgatctgatgattcaagagagccggtttctcatagaaatggcggacacagtccaggaaaagattgtacagtgtcagaaagcagggatggagttccatgaagaacttcataatttgggggcaaaagaaggcttgaagggaagaaaactcaacaaagcaactgagagctttgcttggaacattacagtattgaagggccaaggagatctgttgaagaatgccaagaatgaagctatagaaaacatgaagcagatccagctggcatgcctgtcctgtggactgagtaaagcccccagcagcagtgctgaggccaagagcaagcgcagcctggaagccatagaggagaaggaaagtagtgaggagaatgggaagctgtgactctgggcattatcgacacgttcacccatcttatcaaggactctggtttctcattcttgttttctttctttaaatgttttataagttcacaaaatggtgccctatatggggtattggacatagatattttcacaatgtcagtatttcagtgtagttaatttatctaaattaaagcctttagtatcagtgttttaaattctgagacatgtgtcaacacccctgtgtggatgcctgtggaagagtgtgtgtgtgtgtgtgtgtgtgtgtgtgtggcagagagagagaaagagagagagagagagaaattctgttaaaatctattctgtgttgcattattcatttagtgagttattccttgatcattttgggacaattgttttaatctgaaattctaaagagcacttactgtaacctgttgctgtgtttaatttgacttctctgcctttgacatttaatttagtgatcttagcatagcttattattgaaggaagccaaatttatcaaagcatagatgttttggtagattaaatatagattagaaaaattcctaagaatcagagtagaaataaaagtgaatgaaagattaaacagatgatgagaatttctaaaaagattagcaaggtcatttcttcagtcagaaaactttaaaaaatatttattaaataaaatcaatttttaggaagttttctgtagtcatttactaaacatatgatttcactagaaaagctgatcataagtgaatttatacctacctgtgtggtactctgaaacacactgaaagctctgttgcaattaggattttgatgtgacaataatattgttgtataatttcgagatttgtaggaaggtctcattcttccaagctgagagtctagcactcattttctataacagatatggcagcttagaggtgttggctttgtttggatgtaatttagggtactaaatttaaatttaaagatattgttcaaacaatatcatatcatcacattgagctgatataaattctgtgggtccgataatatctttgtgataatttaagagctaaccagttaccacacatctatgatataaccctaacacacacagaaaagcatacatgcaaaaagaaatgactaattagggtacatttataattgcatctaggtaatttttaccctaatgtcttcataaagtacttgagtgtaatgtttgttacctccaacagaactaaatgttctatggttatgaaagaatatatttatttaaagcattgcttttattttgaaaagcttcttaattaatttgattaacaaatatgctaatttggggaaacctagagaagataattgttgaaattttgcaaatataaacatctcctatagcttctgtgttatttctgacttcttaacactattatgtttatgttgcacattactgaaagagtaaagatat

SEQ ID NO: 1689 - DNA, 3959 bp, Homo sapiens
acgggcgggcgcgctatgacagcggcggggtttccaacggagactgcagcctcggcgtgtccggggacgaagcccgggctagccctaccaggggaccccgcggcgttgcgctcgccccgacccccagcgcggtcgtctgtaccctcccccgggagagcaagccgggcggcctgccccgccggagcagcatcatcaaggatggtacaaaacagaagagggaacggaaaaagacagtctcattcagcagcatgccaacagagaagaagatcagcagtgcaagtgattgtattaattcaatggttgagggttcagaactcaaaaaggttcgctccaactctagaatttatcataggtactttttactggatgctgacatgcagagcctaaggtgggagccatctaagaaggattctgagaaagccaagattgacattaaatccatcaaggaagtgagaacaggaaaaaacacagacatattccgcagcaatggcatttctgaccagatatctgaagattgtgcgttttccgtcatatatggagagaattatgagtcactggatttggttgccaactccgcagatgttgcaaacatctgggttacaggactgcggtacctaatttcttatggaaaacatacacttgatatgttagaaagtagccaagataacatgaggacttcttgggtttcacaaatgtttagtgaaattgatgtagataaccttggacatataactctgtgtaatgctgtgcaatgtatcagaaacctcaatcctggtttaaaaacgagcaaaattgagcttaagttcaaagaattgcataaatcaaaggacaaagctggtaccgaggtcacaaaggaagaatttattgaggtttttcatgagctttgtactagacctgaaatttatttccttttagttcagttttcaagcaataaagaattccttgataccaaggaccttatgatgtttcttgaggcagaacagggtgtggcacatataaatgaggaaataagccttgaaattattcacaaatatgaaccatccaaagagggtcaggaaaagggctggctctccatagacgggttcactaattaccttatgtcacctgactgttatatattcgatccagaacataagaaggtctgtcaggatatgaagcaacctctgtctcattactttataaactcatctcataatacatacttaatagaggatcagttccgaggtccctccgacatcacaggatatattcgagctcttaaaatgggttgccggagtgttgaattagatgtatgggatgggccggacaatgaacctgtaatttacacaggccacaccatgacctctcagatagttttccgcagtgtcattgatattattaacaagtatgcattctttgcttcagagtatcctcttatcttgtgtttagaaaaccactgttccattaaacaacagaaggtaatggttcagcacatgaagaaacttttaggagacaagctctatacaacatcacccaatgttgaggaatcttatctaccatccccagatgtcctgaaagggaaaatactaattaaagcaaagaagctgtcctcaaattgctctggggtagaaggagatgttactgacgaagatgaaggagcagaaatgtctcagaggatgggaaaagagaacatggagcaacccaataatgtgcctgtgaagcgatttcagctttgtaaagaactgtctgaactggtcagcatctgcaaatcagttcagttcaaagaatttcaggtgtcgtttcaggttcagaagtactgggaagtctgttcctttaatgaagtgcttgccagcaagtacgccaatgaaaatccaggggactttgtaaattacaacaaacgttttcttgctagggtttttcccagtccaatgagaattgattccagtaacatgaatcctcaagatttttggaaatgtggttgccaaattgtagccatgaactttcagacaccaggactgatgatggacctgaatattggctggtttaggcagaacggaaactgtggctatgtcctccggccagccatcatgagggaggaggtctccttcttcagcgccaatacaaaagactctgtcccaggggtctcacctcaacttcttcacattaaaatcatcagtgggcagaactttcccaagcccaaaggatcaggtgccaaaggtgatgtggtagatccttatgtctatgttgaaatccatggaatccctgctgattgtgcagaacaaaggacaaaaacagtgcaccagaatggagacgctcccatttttgatgaaagctttgaatttcaaatcaacctgcctgaactggccatggtgcgctttgtagtgctggatgatgactacattggggatgaattcatcggccagtacacaattccctttgaatgtttacagacgggctaccgccatgtccccctgcagtccttaactggagaggtccttgcacatgcttctttatttgtccacgtggctattactaaccgaagaggaggaggaaagcctcataaaaggggcctttctgtgagaaaagggaagaaatccagggaatatgcatctttgagaacactgtggattaaaaccgtggatgaggtattcaagaatgcccagccccctatacgggatgccacagatctgagagaaaacatgcagaatgcggtggtgtcattcaaggagctgtgtggcctctcctctgtggccaatctcatgcagtgcatgttggcggtgtctccccgctttctggggcccgataacacacccctagtggtcctaaatctcagcgagcagtaccccacaatggagctgcagggaattgtgccggaggttctgaagaagatcgtaacaacttatgacatgatgattcagtccctcaaggcgttgattgaaaatgcagatgctgtatatgaaaagatcgtacattgtcagaaggcagccatggaattccatgaacacttgcacagcataggcaccaaggaaggtttgaaggaaagaaaactacaaaaagcagtggagagctttacctggaatattaccatcttaaagggacaagcagatcttttgaaatatgctaagaatgagacattggagaacctgaaacaaatccattttgctgctgtttcatgtggactgaataaaccaggcaccgaaaatgctgatgtccagaagccacgccggagcttggaagtcatacccgaaaaagcaaacgatgaaactggagaatgaggaaacttacaataaaccattatggagtttataactctaggaccaattgtagtcagatgggacatttgctttgcactcactaatgagaataatattcgggattttaaagcacaactggaatagctaattacagtctattaaaactgtgaatgtatgtagcaatcctgcgtgtgaaggcaaataaactctttaacaggcaattatattgctggccaaaatatgctatatttgtatacaaagacattctaactcagttccagtatgaagaaagattattcactctagctccactgagaaacattttcctaagtgaaaacaatttcttaagatggaaatggattggattgtcaaattattatttattggagaaaaaaacctgatctacacatttttacttatatggggttgccagagtctctgggttctagatgattttggtggcatgcttgctgagccataattactaaagagaatgtaagtggacgggttccctgaatccccggggtccttggagagccatcgaggagaatgtgcaattggactgaagctccctggctgaagatacatgccgagtcagcacatgggtagagatgatgtaaaagcagccaatctggaaacaatacattgtaaatagtttttcattgtatgaagtagtgttcacattaaaaagatgttttatgatatttctccaataaaaaaaaaaaa

SEQ ID NO: 1690 - DNA, 2866 bp, Homo sapiens
gaggggaagaggatgtgatcatgcgaccgccagcagaagggaaattgtgaaagcgacctgctgtagaaaaggcggcccacagccacctcagcatgcagaggaggcccagctgctgagaggagttgcctgagagtgacctttgcatctgcctgtccagccagcatggaaccaaagcggatcagagagggctaccttgtgaagaaggggagcgtgttcaatacgtggaaacccatgtgggttgtattgttagaagatggaattgaattctataagaagaaaagtgacaacagccccaaaggaatgatcccgctgaaagggagcactctgactagcccttgtcaagactttggcaaaaggatgtttgtgtttaagatcactacgaccaaacagcaggaccacttcttccaggcagccttcctggaggagagagatgcctgggttcgggatatcaagaaggccattaaatgcattgaaggaggccagaaatttgccaggaaatctaccaggaggtccattcgactgccagaaaccattgacttaggtgccttatatttgtccatgaaagacactgaaaaaggaataaaagaactgaatctagagaaggacaagaagatttttaatcactgcttcacaggtaactgcgtcattgattggctggtatccaaccagtctgttaggaatcgccaggaaggcctcatgattgcttcatcgctgctcaatgaggggtatctgcagcctgctggagacatgtccaagagtgcagtggatggaactgctgaaaaccctttcctggacaaccctgatgccttctactactttccagacagtgggttcttctgtgaagagaattccagtgatgatgatgtgattctgaaagaagaattcagaggggtcattatcaagcagggatgtttactgaagcaggggcatagaaggaaaaactggaaagtgaggaagttcatcttgagagaagaccctgcctacctgcactactatgaccctgctggggcagaagatcccctgggagcaattcacttgagaggctgtgtggtgacttcagtggagagcaactcaaatggcaggaagagtgaggaagagaacctttttgagatcatcacagcagatgaagtgcactatttcttgcaagcagccacccccaaggagcgcacagagtggatcagagccatccagatggcctcccgaactgggaagtaaagagactcctgcattcctcctcccctcctgagggaagcccatggacaagctcagtccaggacctgtccacttctgtgacaaatcaacgggaaacagcccaggggtgggaagttttcatttgcaggggggtctgaatgtaactcaccatgtggtgtgcaaggttcccctgcattgtattgctcactgcagcccctctgcccctatccatgacccccaagcagatataacaagctgtgcagcctcagtaggctgcttgccctctccaggcctcagggcctcttctggaaaatgaagaaattcaactagtagattcctgaggtccccctagcttaaaaaaaaaaaaaatctgccccatgattctaacactcgcagtagtgatagtgtatctagttgttctgctggtgtccttccttggctaagtcttggccttcagttatcttcaaatgtaccagaacctgagccaacgcctccctgtgaaactgttgctgatctgtagtacagtaccaggaagaaacctcttttgttctctttagacatcttctacttgctcttggccttgagatcgtgtaacaaaatgaaggagggctctcttctttcttcctcatcctactcaaaaacttcccgagagcagtggtggttttgagggttttgacttctattacttttggcagcctggaaagttgtgtcttctgggaaagagacctggggaggccaggagtagctgagggtcctttctgtgcccttaaaccgcccagaggagccctattccactctggttttaggctgatctgagagggtctccctttgttcctttctggagcatttctctaacgtttattacaattaggagggggaccccacatctgtgagattctgtttcatttgaggtttacagaaaaaaaaaagtggccagatgtgttccccccatgggtgagaggcctgggcaactgcctggtgaatgtgtcttgcggcagctgcagcaagtggaggggctgaactactggccagctcactggatgatgggttaatacaacaactgcactgtaaggactcagagccacacagaacttctgagaggggctgttagcattgcgcagcatcttcagttctccagtaaatgatattgcgttcgtgcctcagctttaagcacaagtagcagcagctcctgcttgagttctgagggcatcatggccctatgattaaccagagtgatctaacctagactaaaattgggaacttatttgcaatttttgaccctgaccactaactagtgattcttctccaaaattgagaaagacagcacccattgaagcagatatgtgtgtgaaagtatatttttcaattccagatttttaattttaaggctccaggaaagaaaggagagtagaacatttttcctcattttatcaaatcctctcttgccctccctcaattcccctgtaacattcctgaagctgttcccactcccagatggttttatcaatagcctagaggtaaagaactgtctttttctctgattctttaataaattatctttatagaatatgcacaagtttttctacactcagtgttaaagtatttattaatgggaagtcaacttaatgttttgaaataaatatatgactctgtttaatgcaaaaaaaaaaaaaaa

SEQ ID NO: 1691 - DNA, 7642 bp, Homo sapiens
gaattaggggaactcagaaatccatcccccaccccacggccctacctagaagacttaggaatgtgggtccccagcgccgccatctgagactccagagtcgaggctcctagcatcccctacgtagaacactgagaaattccgactgcgggaccccagtctccgagagaccccagattctattcctggagcctgagagcccgaagttcacgcccctgagtctgggctccgcacctccctggggaccgcgtcggggtcgcgcaggagccgggctgcctcgagccggggctggaggctccccgggaggactctgctgggccgctcagccatgcctgagggagcccaaggactgagcctctccaaacctagcccaagcctcgggtgtggccgaagaggtgaagtgtgtgactgtggcaccgtgtgtgagactcggacagctcctgcagcccccaccatggcctccccccgaggttctgggagctccacatccctgagcacagtgggctctgagggggatccagcccctgggcccactccagcctgctcagcctccaggccagagccccttccagggcctcccatccgcctacatctctctccggtggggatcccaggttcagccagaccctcaaggctggagcgtgtggcccgggagatcgtggagacagaacgggcctatgtcagggacctccgcagcatcgtggaggactacctgggccctctgctggacggcggggtcctggggctgagcgtggagcaggtgggcacgctgtttgccaacattgaggacatctacgagttcagcagcgagctcctggaggacttggagaacagcagcagcgccgggggtattgccgagtgcttcgtgcagaggagcgaggattttgacatctacacattgtactgcatgaactacccgagctccctggccctgctccgggagctgtcgttgtctccgccagcagccctgtggctgcaggagcgccaggcccagcttcgccactcgctgcccctgcagagcttcctgctgaaacctgtccagcgcattctcaagtaccatctgctgctgcaggaactagggaagcactgggcggagggcccaggcactgggggtcgcgagatggtggaggaagctattgtgtccatgacagcggttgcctggtacatcaacgacatgaagcgcaagcaggagcatgcagcgcgcctccaggaagtgcagcggcggctgggtggctggaccggaccagagctcagtgcttttggggaactggtgttggagggcgcgttccgaggaggcggagggggtggcccccggctacgagggggtgagcggctgctcttcctgttctctcggatgctgctggtggccaagcgcagggggctggagtacacctacaaaggccacatcttctgctgcaacctgagcgtgagcgagagtccccgagaccctctagggttcaaggtgtctgatctgaccattcccaagcacagacacctgctccaggccaagaaccaagaagagaagaggctgtggattcactgtctccagcgcctcttctttgagaaccaccctgcctccatccctgccaaggcaaagcaagttctccttgaaaacagcctgcattgtgcccccaaaagtaagcctgtcctagagcccctgacacccccacttgggtctcctcgacctcgagatgctagaagttttacccctgggcgaaggaacacagctccatctcctgggccctctgtgattcgccgaggccgcaggcagtctgagccggtgaaggacccttatgtcatgttcccacagaacgctaagcctggattcaagcacgctggcagcgaaggggaactctaccctccagaatctcagccaccagtttcaggctctgcaccccctgaggacctggaggatgctggacccccaacactggacccctctgggacctcaatcactgaagaaatcctggaactgctgaatcagcgaggccttcgagatccagggccgtccacccatgacattcccaagttccccggagactcccaggtgcctggcgacagcgaaaccctcacattccaagccctgcccagccgggactcttcagaagaggaggaggaggaagaggaagggctggagatggatgaacgggggccttccccactccacgtcctggaagggctcgaaagttccattgcagctgaaatgcccagcattccctgccttaccaaaattcctgacgtgcccaaccttcctgaaattcccagccgctgtgaaattcccgaaggttctcgccttcctagtctctctgacatttccgatgtttttgagatgccctgccttccagccatacctagtgtccccaacacccccagtctgtctagcactcccaccctctcctgtgactcctggctccaagggcctctgcaggaaccagctgaggctccagccaccaggagagaactgttttctgggagcaatcctgggaaactgggagagccgccttcaggaggcaaggcagggccagaggaggatgaagaaggggtatcattcacagacttccagccccaggatgtcacccaacatcagggattcccagatgagctggcattccgctcttgctcagaaatccggagcgcctggcaggcattggaacagggacagctggcccggccaggcttcccagagccactgctgatcctggaggattcggatctgggtggagacagcgggagcgggaaggcaggagccccgagttcagaaaggacggcgtcccgagtgcgagagctggcccggctttacagcgagcggatccagcagatgcagcgggcggagactcgggcatcagccaatgccccgcgccgccggcctcgggttctggcccaaccccagccatccccctgtctgccccaggagcaggcagagccagggctcctgcctgcctttggacacgtgctggtatgtgagctggccttcccactgacatgtgcccaggagtctgtccccctgggtcctgctgtctgggttcaagctgccatacctttgtcaaagcagggaggcagcccggatggccagggtctacatgtttccaatttgcctaagcaagaccttccgggcatccacgtttcagctgctacccttttgcctgagcaaggaggttcccggcatgtccaggctccagccgccacacctttgcccaagcaagaaggccccctgcacctccaggtgccggctcttacaactttctctgatcaaggccacccagaaatccaagttccagccaccactcctttgcctgagcatagaagtcacatggttataccagctccatccaccgccttttgtcctgagcagggacactgtgcggacatccacgttcccaccactccagctttgcccaaggagatttgttctgatttcacagtttcagtcaccacccctgtgcccaagcaagaaggtcacctagacagcgagagcccaaccaatatcccactgacaaagcaaggaggttccagggatgttcagggcccagaccctgtctgcagtcaacccatccagcctttgtcttggcatggaagcagcctggatccccagggcccaggcgacaccctaccacccttgccatgtcacctcccagaccttcagattccaggtacctcacctttgcctgcacatggaagccacctggaccatcggatcccagccaacgccccactgtctttgtcccaggagctcccagacactcaggttccagctaccacacctttgcccctgccacaagtcctcacagacatctgggtccaagccctcccaacttcacccaagcagggaagcctcccagacatccagggtccagcggctgcacctccacttccggagccaagccttacagatacacaggtccaaaaactcacaccttcgttggagcagaagagcctcatagatgcccatgttccagctgccacacctttacctgagagaggaggctctctagacattcagggcctctcacccaccccagttcagaccaccatggttttgtccaaaccaggaggctccttagcctctcacgttgccaggttggagtcttcagacttgacgccacctcatagtcccccaccttccagccgtcagctcctgggccccaatgcagctgccctctccagatacctggcagcctcatatatcagccagagcctggctcggcggcaggggcctgggggaggggcccccgcagcctcccggggctcctggtcctctgctcccacgtcacgggcatcttcgccgcccccccagccccagccaccacctcccccagccaggcggctcagctatgccacgacggttaacatccacgtgggcgggggtgggcggctgcggccagccaaggcccaggtccggttgaaccaccctgctctcttggcctccacacaggaatctatgggccttcacagggcccagggggctcctgatgcccccttccacatgtgagccaggacatgaggcttccctgaagcaaggatttcagccagatgccatagaccctcagaacttgacctggaagtccagacactgaacgcaggcctcaaaactgctgcggccttccaactcctggtatctgcatcggcgaatggcccttcttgccttgatccacagggatggggaagggaggaatgtcattaatgttttgttaatactgattctttcatgcaatgatgtgtattttcccattctggaggctgtgggagatgacaagacaatgaatgggaaggtctgacacagaacaaatcagcggttctgaaagcttggggaatctcagactcctttgagaattattggaaaatggacccactataacttggcgtgtgtgtgaactgcttgatgcccatccaggaaagccaagttaagaagctttgcttcaagtagacactagaaatccattcccttggcaatttatacagttcacgtctcccaccatccgttcatctcacccaccctgccatctctccacctatccatctggctattgctccatctagctttcccgctccatctacccatcttccaatccatcatctcacgtatctgccttgcttatccaactgtctgccttattcacccacccatccctttatcattctaaccccatctggcattccatccctccatttatccatcttcccacttacccatcttctccatccagcactccgttcatcagtccgtctctccctccatatttccatctgtccattcatccactcattttgccatccatacatattcacccagccatctcccaatccatcgacataccccatccctccctcactggactctccggggtcttagtactatgatacttcagagacaattccatgctgatacgggggagatcaattttggggctctgggataagtctgtcccacatctgtctgatttcccttggcatccttcccgtcagttcctcttgaatatcccagttcttgtacccactcacatacctcagatcccttcactcctccccgcagtttgcagcctctacaattcatccacatgctccctcccccagcaaaataattcaggtcgtggagacaaaaggcttttatgttaggttctgtctgcccccttgttccagcagtggtatgcccagtgagaggcacaatttaaacggtttctttggtgatgatattagctactttcatcaaatacttagcctcttgtgctttagcacattatttatgtaagctcccctaggattctctgaagcaccctggtgtcctggctgtgaattcaagtcccatctttacttatttggtgtgggtcctccctctgagccggttttctcatctacaaaatgaagacaacagtacttccctcctgggatcattgaaagatttagggagcatatccttccacttcccaaacatatttgaacctctgacttgcttaggagcatcattcaaatcacagatcccccagtatctagtcccaacctattgaatcaggatccccagggaaggaggagcttgggaatctgatttttttttttttttttagataaagtctcactctgtcacccaggcttgagtgcagtggcaaaatcttggctcattgcaacctccacctcctgggttcaagcaattctcatgcctcagcttcccgacatagctgggattataggcgtgcaccaccatgcccagctaatttttcgttgttgttgttgttgttttgtttttgagacagagtctcgctctgttgcccaggctggagtacagtggcacgatcttggctcactgcaagctccgcttcccgggttcacgccattctcctgcctcagcctcccgagtagctgggaccacaggtgcccgccaccacgcccggctaatttttttggtatttttagtagagacggggttttaccatgttagccaggatggtctcgatctcctgacctcgtgatcctcccgcctcggcctcccaaagtgctggcattacaggcgtgagccatcattcctggctgggaatccgaatttttttttttttttagacggagtttcgctcttgttgcccaggctggagttcaatagcatgatctcggctcactgcaacctctgcctcccaggttcaagtgattctcctgcctctagctgggattgcaggcgcccacgaccacgcccagctaatttttgtattttgtagtagagacgggatttcgccatattggccaggccatagtggtcttggactcctgacctcaggtgatccgcccacctcggcctcccaaagtgttgggtttacaggcgtgagctaccataccctgcccaggaatctgaatttttagcaatcagttagcagcaaataagctgagatttcctgggtactaagcacatactatgagcattacagccgctttatataagctcgttcactgtcctcattacattcctaatatgcaagtgagcatgttttttaatcctcagtctagaggtgaggaaactgaggcaggcacagagaggctaagggatttgcctagtcgcacagctaggaaggtgcagcactgagactcgaatccacacagcttggcttaagtctaccattaaatttgcctgtcctggccaggtgcggtggctcacgcctgtaatcccaacacttcgtgaggccaaggcaggtggatcacttgaagtgaggagttcgagaccacaccagcctggccaacatggtgaaatcccgtctttactaaaaatacaaaaaattagctgggcgtggtggtgggtgccggtaatcctagctactcaggaggctgaggcaggagaatcacttgaacctgggaggtggaggttgcagtgaaccgagattgcgccactagactccagcctgggagacgagcaaaactgtctcaaaaaaataaaatgaaatacataaataaatgtgcctatcctgtgccgggtgctgttcttgccagtggggatacatgagagaacactgccttgcccgcatgaggcttgtggcctggtactgtgcacacctcaggggattctgataattagctgagcacagttgccagcacagggcctggctcaataaatattagctgctggcttctgctcaaaaaaaaaaaaaaaaaaaaaaaaaaaaaaaaaaaa

SEQ ID NO: 1692 - DNA, 4209 bp, Homo sapiens
atggcctgctattcaacagcagagaagaatcccaaagcttgttggttcctgccgccgccgccgccgcggcgcacagcccgcggcctccttccccgccggccgcgctccggagcctccgggccgcggtggagcgagggcccaggcgaggcgagggccgggcggcgggcgccgggccccgcggccggcacgacggagcccccgtacggccggcggcagcggttggcggcggcccccggcccccggcgcgggaagcggcggcggggcggcggcggcggtggcggtggcggtggcggcgacggtggcagcgccatggagccgggggaggtgaaggaccggatcctggagaacatctcgctgtcggtgaagaagttgcagagctattttgctgcatgtgaggatgagatccctgccatccggaaccatgacaaggtcctacagcgtctgtgtgagcacctggaccacgccctgctgtacggactgcaagacctctcctctggctactgggtgctcgtggtgcattttactcggagagaggccatcaagcagatcgaggtgctgcagcacgtggccaccaacctggggcgcagccgtgcctggctgtacctggccctcaacgagaactccttggagagctacctgcggttgttccaggagaacctgggcctgctgcataagtactacgtcaagaatgccctggtctgcagccacgatcacctgacgctcttcctgaccttggtgtccgggctagagttcattcgtttcgagctggatctggatgccccttacctagacctggccccctacatgcccgactactacaaacctcagtacctgctggactttgaagaccgccttcccagctcggtccacggctcagacagtctgtccctcaactctttcaactccgtcacctccaccaacctggagtgggatgacagtgcgattgccccatctagtgaggattatgattttggagatgtgtttccagcagtgccgtctgtacccagcacagactgggaagatggagacctcacagacacggtcagtggtccccgctccacagcctccgacctgaccagcagcaaggcctccaccaggagccccacccagcgccagaaccccttcaacgaggagccggcagagactgtgtcctcctctgacaccacccccgtgcacaccacctctcaggagaaggaggaggcccaggccctggacccgccggatgcctgcacggagctcgaggtcatcagggtcaccaagaagaagaaaattggcaagaagaaaaagagcagatcagatgaggaggcaagtccactccaccccgcctgcagccagaagaaatgtgccaagcagggggacggtgacagccgcaacggcagcccaagccttgggcgggactcgccagacactatgcttgcctccccccaggaggagggagaggggccgagcagcaccacggagagcagcgagcgctccgagccgggcctgctgatccctgagatgaaggacacctccatggagcgcttggggcagcccctgagcaaggttatcgaccagctcaacgggcagctggaccccagcacctggtgctcccgtgctgagcccccagaccagtcctttcggaccggctctcccggggatgccccggagaggccgccgctttgcgactttagtgaggggctttcagccccaatggacttctaccgctttaccgtcgagagtccaagcactgttacatcaggtggcggccaccatgaccctgcagggcttggccaaccgctgcatgttcctagtagccctgaggctgctggccaagaagaagagggaggaggaggagagggacagacgcctcggcccctagaggataccacgagggaggctcaggagctggaggcccagctgtccctggtcagggaggggcctgtgtctgagccagagcctgggacccaggaggttctctgccagctcaagcgagaccagcccagcccgtgtctgagtagcgctgaggattctggggtggatgagggacaggggagcccttcggagatggtccattcctcggagttcagagtagacaacaatcacctgctcctgctcatgatccacgtgttccgagaaaacgaagagcagctgttcaaaatgatccggatgagcaccgggcacatggagggcaacctgcagctgctgtacgtgctgctcacagactgctatgtctacctgctccggaaaggggccacagagaagccatacctggtggaagaggccgtttcttacaatgaacttgactatgtgtcggttggccttgaccagcagacggtgaagctggtgtgcaccaaccgcaggaagcagtttctgctggacacggctgatgtggcgctggctgagttctttttggcttctttgaagtcagccatgatcaaaggctgtcgagaacctccctaccccagcatcctgacggatgccaccatggagaagctggcactggccaaatttgtggcccaagaatcgaagtgtgaggcatctgctgtcaccgtgcgcttctacggccttgtgcactgggaggaccccacagacgagtccctgggccccacgccctgccactgctcaccccccgagggcaccatcaccaaagaaggcatgctgcactacaaggcgggcacctcctacctgggcaaggaacactggaagacgtgcttcgtggtgctcagcaacgggatcctctaccagtacccggaccgcaccgacgtcatccctctgctctcggtgaacatggggggggagcagtgcggtggctgccggagagccaacaccacggatcggccccacgccttccaggtcattctctccgaccggccctgcctggagctaagtgccgagagcgaggccgagatggccgagtggatgcagcatctctgccaggctgtgtccaaaggggtcatcccccagggcgtagctcccagcccctgcataccctgctgcctggtcctcacggatgaccgcctctttacgtgccatgaggattgccagaccagcttcttccgctctttgggcacagccaagctgggcgacatcagcgccgtctccaccgagccgggcaaggagtactgcgtcttggagttctcccaggacagccagcagctcctcccgccctgggtcatctacctgagctgcacttctgaactggaccgattgctgtctgcactgaactctgggtggaaaaccatctatcaggtggacctcccccacacggcgatccaggaagcctccaacaagaagaaattcgaggatgccttgagcctcatccacagcgcctggcagcggagcgacagtctctgccgcggccgagcctcccgagacccctggtgctgaggcagagctggttggcgtccctggtgggcaggaaaggaaggcacgccagccggcaggcacactgtcacggctgttgtcatgctgtcgggagcctacagtccacccctgccctgggcggcagaaccaccgagtgtggcttaagacagggtccctccactccagggatccagatcaggtgcccggcacccctgggcatcctgcccgacaggtagcgaatggaggtcgctgggggcagagggtccgagccctgtgggctctgcggatgcacgccctcctcccgggcctccgcctcagtctgcagaatttctgccgagtggcaccgagaacaccatccatctaaggacgaacaaaagaaccaggagggcgggacccccctcttcctctcctgggttgggggctggggccctgagtgcccagccatccttgttcgtgtttgaacactctcctggccacgtggggaagcgggaacacggggtgtctgcgcatgtttcctcctcctagctccatcactgcgcacacagctgcctgcctcgccagatgcaggggggcgggcagccctccctggctgccaggaggctctgcatgcccacagtcctgccctgcctgtcccctcaacccggcagtgcctgtagcaccgaggagcaaagggggtggatggggggcttggagaagggcggagcccaccagcctggcatccatgttgacatcttctgactgtcccctgcttggctggagccaggcccttccctagagtttcgtcaagagcctcctggggaaggggtcaggtggtttgggttttgttttttaaaataaaatagacatgttatattgccaaggctt

SEQ ID NO: 1693 - DNA, 744 bp, Homo sapiens
ctgtgaggaccccgcacagccaagatggcggcgtccgtgcgacaggcacgcagcctactaggtgtggcggcgaccctggccccgggttcccgtggctaccgggcgcggccgcccccgcgccgcaggccgggaccccggtggccagaccccgaggacctcctgaccccgcggtggcagctgggaccgcgctacgcggctaagcagttcgcgcgttacggcgccgcctccggggtggtccccggttcgttatggccgtcgccggagcagctgcgggagctggaggccgaagaacgcgaatggtacccgagcctggcgaccatgcaggagtcgctgcgggtgaagcagctggccgaagagcagaagcgtcgggagagggagcagcacatcgcagagtgcatggccaagatgccacagatgattgtgaactggcagcagcagcagcgggagaactgggagaaggcccaggctgacaaggagaggagggcccgactgcaggctgaggcccaggagctcctgggctaccaggtggacccaaggagtgcccgcttccaggagctgctccaggacctagagaagaaggagcgcaagcgcctcaaggaggaaaaacagaaacggaagaaggaggcgcgagctgctgcattggctgcagctgtggctcaagacccagcagcctctggggcacccagctcctgaggctttgtcccttcccaataaagcctgctacctggcagtacccctgaagaa

SEQ ID NO: 1694 - DNA, 2204 bp, Homo sapiens; identical to SEQ ID NO: 642

SEQ ID NO: 1695 - DNA, 2795 bp, Homo sapiens
gcacaagtggaccggggtgttgggtgctagtcggcaccagaggcaagggtgcgaggaccacggccggctcggacgtgtgaccgcgcctagggggtggcagcgggcagtgcggggcggcaaggcgaccatggagcttttgcggactatcacctaccagccagccgccagcaccaaaatgtgcgagcaggcgctgggcaagggttgcggagcggactcgaagaagaagcggccgccgcagccccccgaggaatcgcagccacctcagtcccaggcgcaagtgcccccggcggcccctcaccaccatcaccaccattcgcactcggggccggagatctcgcggattatcgtcgaccccacgactgggaagcgctactgccggggcaaagtgctgggaaagggtggctttgcaaaatgttacgagatgacagatttgacaaataacaaagtctacgccgcaaaaattattcctcacagcagagtagctaaacctcatcaaagggaaaagattgacaaagaaatagagcttcacagaattcttcatcataagcatgtagtgcagttttaccactacttcgaggacaaagaaaacatttacattctcttggaatactgcagtagaaggtcaatggctcatattttgaaagcaagaaaggtgttgacagagccagaagttcgatactacctcaggcagattgtgtctggactgaaataccttcatgaacaagaaatcttgcacagagatctcaaactagggaacttttttattaatgaagccatggaactaaaagttggggacttcggtctggcagccaggctagaacccttggaacacagaaggagaacgatatgtggtaccccaaattatctctctcctgaagtcctcaacaaacaaggacatggctgtgaatcagacatttgggccctgggctgtgtaatgtatacaatgttactagggaggcccccatttgaaactacaaatctcaaagaaacttataggtgcataagggaagcaaggtatacaatgccgtcctcattgctggctcctgccaagcacttaattgctagtatgttgtccaaaaacccagaggatcgtcccagtttggatgacatcattcgacatgacttttttttgcagggcttcactccggacagactgtcttctagctgttgtcatacagttccagatttccacttatcaagcccagctaagaatttctttaagaaagcagctgctgctctttttggtggcaaaaaagacaaagcaagatatattgacacacataatagagtgtctaaagaagatgaagacatctacaagcttaggcatgatttgaaaaagacttcaataactcagcaacccagcaaacacaggacagatgaggagctccagccacctaccaccacagttgccaggtctggaacacccgcagtagaaaacaagcagcagattggggatgctattcggatgatagtcagagggactcttggcagctgtagcagcagcagtgaatgccttgaagacagtaccatgggaagtgttgcagacacagtggcaagggttcttcggggatgtctggaaaacatgccggaagctgattgcattcccaaagagcagctgagcacatcatttcagtgggtcaccaaatgggttgattactctaacaaatatggctttgggtaccagctctcagaccacaccgtcggtgtccttttcaacaatggtgctcacatgagcctccttccagacaaaaaaacagttcactattacgcagagcttggccaatgctcagttttcccagcaacagatgctcctgagcaatttattagtcaagtgacggtgctgaaatacttttctcattacatggaggagaacctcatggatggtggagatctgcctagtgttactgatattcgaagacctcggctctacctccttcagtggctaaaatctgataaggccctaatgatgctctttaatgatggcacctttcaggtgaatttctaccatgatcatacaaaaatcatcatctgtagccaaaatgaagaataccttctcacctacatcaatgaggataggatatctacaactttcaggctgacaactctgctgatgtctggctgttcatcagaattaaaaaatcgaatggaatatgccctgaacatgctcttacaaagatgtaactgaaagacttttcgaatggaccctatgggactcctcttttccactgtgagatctacagggaagccaaaagaatgatctagagtatgttgaagaagatggacatgtggtggtacgaaaacaattcccctgtggcctgctggactggttggaaccagaacaggctaaggcatacagttcttgactttggacaatccaagagtgaaccagaatgcagttttccttgagatacctgttttaaaaggtttttcagacaattttgcagaaaggtgcattgattcttaaattctctctgttgagagcatttcagccagaggactttggaactgtgaatatacttcctgaaggggagggagaagggaggaagctcccatgttgtttaaaggctgtaattggagcagcttttggctgcgtaactgtgaactatggccatatataattttttttcattaatttttgaagatacttgtggctggaaaagtgcattccttgttaataaactttttatttattacagcccaaagagcagtatttattatcaaaatgtctttttttttatgttgaccattttaaaccgttggcaataaagagtatgaaaacgcagaaaaaaaaaaaa

SEQ ID NO: 1696 - DNA, 3830 bp, Homo sapiens
gtcaccaccagcctagctcggacggcaagcggcgggagattttcaaaatgggagcccagaggcaccgcccaggcctcggaaggtgtcagggagaactttccgtggtttcagcgtcgtcgcctggagcggcggtttagagagccgagcctgatgggcgccaaggccggctggctgcttggagcgctgcctcgaagggactgcgtgaaggaagctaatccggagaacccaggccagagcctggaaatatggcgacctgcatcggggagaagatcgaggattttaaagttggaaatctgcttggtaaaggatcatttgctggtgtctacagagctgagtccattcacactggtttggaagttgcaatcaaaatgatagataagaaagccatgtacaaagcaggaatggtacagagagtccaaaatgaggtgaaaatacattgccaattgaaacatccttctatcttggagctttataactattttgaagatagcaattatgtgtatctggtattagaaatgtgccataatggagaaatgaacaggtatctaaagaatagagtgaaacccttctcagaaaatgaagctcgacacttcatgcaccagatcatcacagggatgttgtatcttcattctcatggtatactacaccgggacctcacactttctaacctcctactgactcgtaatatgaacatcaagattgctgattttgggctggcaactcaactgaaaatgccacatgaaaagcactatacattatgtggaactcctaactacatttcaccagaaattgccactcgaagtgcacatggccttgaatctgatgtttggtccctgggctgtatgttttatacattacttatcgggagaccacccttcgacactgacacagtcaagaacacattaaataaagtagtattggcagattatgaaatgccatcttttttgtcaatagaggccaaggaccttattcaccagttacttcgtagaaatccagcagatcgtttaagtctgtcttcagtattggaccatccttttatgtcccgaaattcttcaacaaaaagtaaagatttaggaactgtggaagactcaattgatagtgggcatgccacaatttctactgcaattacagcttcttccagtaccagtataagtggtagtttatttgacaaaagaagacttttgattggtcagccactcccaaataaaatgactgtatttccaaagaataaaagttcaactgatttttcttcttcaggagatggaaacagtttttatactcagtggggaaatcaagaaaccagtaatagtggaaggggaagagtaattcaagatgcagaagaaaggccacattctcgataccttcgtagagcttattcctctgatagatctggcacttctaatagtcagtctcaagcaaaaacatatacaatggaacgatgtcactcagcagaaatgctttcagtgtccaaaagatcaggaggaggtgaaaatgaagagaggtactcacccacagacaacaatgccaacatttttaacttctttaaagaaaagacatccagtagttctggatcttttgaaagacctgataacaatcaagcactctccaatcatctttgtccaggaaaaactccttttccatttgcagacccgacacctcagactgaaaccgtacaacagtggtttgggaatctgcaaataaatgctcatttaagaaaaactactgaatatgacagcatcagcccaaaccgggacttccagggccatccagatttgcagaaggacacatcaaaaaatgcctggactgatacaaaagtcaaaaagaactctgatgcttctgataatgcacattctgtaaaacagcaaaataccatgaaatatatgactgcacttcacagtaaacctgagataatccaacaagaatgtgtttttggctcagatcctctttctgaacagagcaagactaggggtatggagccaccatggggttatcagaatcgtacattaagaagcattacatctccgttggttgctcacaggttaaaaccaatcagacagaaaaccaaaaaggctgtggtgagcatacttgattcagaggaggtgtgtgtggagcttgtaaaggagtatgcatctcaagaatatgtgaaagaagttcttcagatatctagtgatggaaatacgatcactatttattatccaaatggtggtagaggttttcctcttgctgatagaccaccctcacctactgacaacatcagtaggtacagctttgacaatttaccagaaaaatactggcgaaaatatcaatatgcttccaggtttgtacagcttgtaagatctaaatctcccaaaatcacttattttacaagatatgctaaatgcattttgatggagaattctcctggtgctgattttgaggtttggttttatgatggggtaaaaatacacaaaacagaagatttcattcaggtgattgaaaagacagggaagtcttacactttaaaaagtgaaagtgaagttaatagcttgaaagaggagataaaaatgtatatggaccatgctaatgagggtcatcgtatttgtttagcactggaatccataatttcagaagaggaaaggaaaactaggagtgctccctttttcccaataatcataggaagaaaacctggtagtactagttcacctaaggccttatcacctcctccttctgtggattcaaattacccaacgagagagagagcatctttcaacagaatggtcatgcatagtgctgcttctccaacacaggcaccaatccttaatccctctatggttacaaatgaaggacttggtcttacaactacagcttctggaacagacatctcttctaatagtctaaaagattgtcttcctaaatcagcacaacttttgaaatctgtttttgtgaaaaatgttggttgggctacacagttaactagtggagctgtgtgggttcagtttaatgatgggtcccagttggttgtgcaggcaggagtgtcttctatcagttatacctcaccaaatggtcaaacaactaggtatggagaaaatgaaaaattaccagactacatcaaacagaaattacagtgtctgtcttccatccttttgatgttttctaatccgactcctaattttcattgattaaaactcctttcagacatataagtttaataaataacttttttgttgactttcaagtaaagtgattttttttaatttaacataaagtcttcagaaagcctttctatgaaagaattttaacctataatgtaaaggatgtattctgagagaacaaagcagaatgaaacttgagtcacttactaaatatagtggatataaaatagaacacctgactttgctcttagaccataacccccgaacttactatgttcatatatttgtattgaacaatcttttaaaagcaaaaatgtaaatgatgtgtagtttatttgtgcttttattgttttccctgcgtctcagacatgttgagaatcatggacaaaacctgctggaattttggaatttttgaagatgtaaataatgtgtatttatgttataagtaacatatgtaaacatgtatatttgttttatatttatttttgtaacaccagtgtctgatgaaacatttttgcaaatgcattttataaaaaaataaatatagtgataagttacattatcttttgattcatttaattaaatacttatttttaaataacttaccagtaaactcactttttaaattttgttgcctgttgaggagccaattaaattttaaatattaattttgcaaatgttaaaaaaaaaaaaaaaaaa

SEQ ID NO: 1697 - DNA, 945 bp, Homo sapiens
ctgggtgtacagcgtcctcgaaaccacgagcaagtgagcagatcctccgaggcaccagggactccagcccatgccatggcggattctgagcgcctctcggctcctggctgctgggccgcctgcaccaacttctcgcgcactcgaaagggaatcctcctgtttgctgagattatattatgcctggtgatcctgatctgcttcagtgcctccacaccaggctactcctccctgtcggtgattgagatgatccttgctgctattttctttgttgtctacatgtgtgacctgcacaccaagataccattcatcaactggccctggagtgatttcttccgaaccctcatagcggcaatcctctacctgatcacctccattgttgtccttgttgagagaggaaaccactccaaaatcgtcgcaggggtactgggcctaatcgctacgtgcctctttggctatgacgcctatgtcaccttccccgttcggcagccaagacatacagcagcccccactgaccccgcagatggcccggtgtaggcgaacttccctcatttctctctgcaatctgcaaataactcctccattgaaataactcctccccaccccaacaacaacattcccagcagaccaactcccaccccctctttgaggtaaaagtgcctttattgggagacttttgtcttccagcctgccaatcaaccctcctgggtgtggccaccatatgtgtgtgcctaggtcctccttctgcacgatccaataggagacaccagttctgactgaaccatgcccccacctaagtcacaaaatgagggaagtggggagttagatttcagagtccaggccctaggttgggacccactccaaataatctcctcggtgtgggtggtggttctatagagggataaatgaataataaacattgttaaaatataaaaaaaaaaaaaaaaa

SEQ ID NO: 1698 - DNA, 1797 bp, Homo sapiens
ggcgggtactgcgttagtgattagagtttcttccctgccggaggtgggatacacggtagcatcatggtcgaggaggtacagaaacattctgtacacacccttgtgttcaggtcgttgaagaggacccatgacatgtttgtagctgataatggaaaacctgtgcctttagatgaagagagtcacaaacgaaaaatggcaatcaagcttcgtaatgagtatggtcctgtgttgcatatgcctacttcaaaagaaaatcttaaagagaagggtcctcagaatgcaacggattcatatgttcataaacagtaccctgccaatcaaggacaagaagttgaatactttgtggcaggtacacatccatacccaccaggacctggggttgctttgacagcagatactaagatccagagaatgccaagtgaatcagctgcacagtccttagcggtggcattacctttgcagaccaaggctgatgcaaatcgtactgcccctagtggaagtgaataccgacatcctggggcttctgaccgtccacagcctacagcgatgaattcaattgtcatggagactggcaataccaagaactctgcactgatggctaaaaaagcccctacaatgccaaaaccccagtggcacccaccgtggaaactctacagggttatcagtgggcatcttggctgggttcgatgtattgctgtggaacctggaaatcagtggtttgttactggatctgctgacagaactataaagatctgggacttggctagtggcaaattaaaactgtcattgactgggcatattagtactgtgcggggcgtgatagtaagcacaaggagcccatatctgttctcttgtggagaagacaaacaagtgaaatgctgggatctcgaatacaataaggttatacggcattatcatggacatttaagtgcagtgtatggtttggatttgcacccgacaatcgatgtgttggtaacctgtagtcgagattcaactgcacggatttgggatgtgagaactaaagccagtgtacacacattatctggacatacaaatgcagttgctacagtgagatgtcaggctgcagaaccacaaattattacaggaagccatgatactacaattcgattatgggatctggtggctggaaaaacaagagtgacattaacaaatcacaaaaaatcagttagggctgtggttttacatccaagacattacacatttgcatctggttctccagataacataaagcagtggaaattccctgatggaagtttcattcaaaatctttccggtcataatgctattattaacacattgacggtaaattctgatggagtgcttgtatctggagctgacaatggcaccatgcatctttgggactggagaactggctacaattttcagagagttcacgcagctgtgcaacctgggtctttggacagtgaatcaggaatatttgcttgtgcttttgatcagtctgaaagtcgattactaacagctgaagctgataaaaccattaaagtatacagagaggatgacacagccacagaagaaactcatccagtcagctggaaaccagaaattatcaagagaaagagattttaatgaatgtggaattttttctctctctttttttttctttttaattaaaaaaaaaaaagcttggcgttcatgaggatatccagtcattttgtgctctggctgggaatataaaggagaaattcacttgcttcaatcattgctgcttcatattttacaataaactgtcccctgtcccctaaaaaaaaaaaaaaa

SEQ ID NO: 1699 - DNA, 1746 bp, Homo sapiens
ctgtgagctgccgagtgctaggcacccgggctcttctgggggctccagtcagaggcgccgcccaagagaccctgggccggcgccgggcgcagctgcctctccgtctttgtgtctgtctctgtgtctgtctggctatctccgagtttgcctccgcttccagaactaagccacccagacaccatcatctcgaaaaccccagcccttctcccatggcaggctacttgccccccaaaggctacgccccttcgcccccacctccctaccctgtcacccctgggtacccggagccggcgctacatcctgggcccgggcaggcgccagtgcccgcccaggtacctgccccagctcccggcttcgccctcttcccctcgcctggccccgtggccttggggtctgctgcccccttcttgccactgccaggggtgccttctggcctcgaattcctggtgcagattgatcagattttgattcaccagaaggctgagcgagtggaaacgttcctaggctgggagacctgtaatcggtatgaactgcgctctggggccgggcagcccctgggtcaggcggccgaggagagcaactgctgcgcccgtctgtgctgtggcgcccgccggccgctgcgtgtccgcctggccgaccccggggaccgtgaggtgctgcgtttgctccgcccgctgcactgtggctgcagctgctgcccctgtggcctccaggagatggaagtacaggctccaccaggcaccaccattggccacgtgctacagacctggcatcccttcctccccaagttctccatccaggatgccgatcgccagacagtcttgcgagtggtggggccctgctggacctgtggctgtggcacagacaccaactttgaggtgaagactcgggatgaatcccgcagtgtgggccgcatcagcaagcagtgggggggcctggtccgagaagccctcacagatgcagatgactttggcctacagttcccgctggacctggatgtgagggtgaaggctgtgctgctgggagccacattcctcattgactacatgttctttgagaagcgaggaggcgctgggccctctgccgtcaccagttagaggccaccatggtgtgaggagaccatcacctcgaccagaactccagatggtcacctgccctggcccctcctctgggcagcccctttcctccatgtacactgcaggggacagaaggggggccccatccctaccctactccctggccgcctgcccctgtggttcccaaggaggggtatgtatgagagccgctctcctgctacctcccaccactgtcccagcagtccctcggcacacaggcatatcagctttcacactttccccatgcactctctcccacccccttccagggcctctgctccaaaggaggcctctggaacccaggactctggggttttacaagagggctggggtgtggaagggcaagctgcaccaaagacggtggatatagccaccgcccccccgccgctgcctagcatctgcttggccaattagttcagcctcagaccatggcactttgagggggtctctacctccccatcaacagctgcagggggaccccagtgccaacttcctctcccactagggccctgccttcagctggtgcttgctgcgattcctgtgccttatgtaactgcccttccttcccttgccctaggaaaaaggctgcatctttatatgttacattcatataaactttgtaactttttgg

SEQ ID NO: 1700 - DNA, 1589 bp, Homo sapiens
ccgtcgcccggatcccctgagctgcccgccatcccacgtgaccgcgccgccccccagctccaccgctgagcccgctcgccatggccctcttcggggccctcttcctagcgctgctggcaggcgcacatgcagagttcccaggctgcaagatccgcgtcacctccaaggcgctggagctggtgaagcaggaggggctgcgctttctggagcaagagctggagactatcaccattccggacctgcggggcaaagaaggccacttctactacaacatctctgaggtgaaggtcacagagctgcaactgacatcttccgagctcgatttccagccacagcaggagctgatgcttcaaatcaccaatgcctccttggggctgcgcttccggagacagctgctctactggttcttgaaggtgtatgattttctctccacgttcatcacctcagggatgcgcttcctcctcaaccagcagatctgccctgtcctctaccacgcagggacggtcctgctcaactccctcctggacaccgtgcctgtgcgcagttctgtggacgagcttgttggcattgactattccctcatgaaggatcctgtggcttccaccagcaacctggacatggacttccggggggccttcttccccctgactgagaggaactggagcctccccaaccgggcagtggagccccagctgcaggaggaagagcggatggtgtatgtggccttctctgagttcttcttcgactctgccatggagagctacttccgggcgggggccctgcagctgttgctggtgggggacaaggtgccccacgacctggacatgctgctgagggccacctactttgggagcattgtcctgctgagcccagcagtgattgactccccattgaagctggagctgcgggtcctggccccaccgcgctgcaccatcaagccctctggcaccaccatctctgtcactgctagcgtcaccattgccctggtcccaccagaccagcctgaggtccagctgtccagcatgactatggacgcccgtctcagcgccaagatggctctccgggggaaggccctgcgcacgcagctggacctgcgcaggttccgaatctattccaaccattctgcactggagtcgctggctctgatcccattacaggcccctctgaagaccatgctgcagattggggtgatgcccatgctcaatgagcggacctggcgtggggtgcagatcccactacctgagggcatcaactttgtgcatgaggtggtgacgaaccatgcgggattcctcaccatcggggctgatctccactttgccaaagggctgcgagaggtgattgagaagaaccggcctgctgatgtcagggcgtccactgcccccacaccgtccacagcagctgtctgagccctcaatccccaagctggcagctgtcattcaggaccccaacccctctcagcccctcttttcccacattcatagcctgtagtgccccctctaacccccagtgccacagagaagacgggatttgaagctgtacccaatttaattccataatcaatctatcaattacagtccgtccaccacctc

SEQ ID NO: 1701 - DNA, 1745 bp, Homo sapiens
ccgtcgcccggatcccctgagctgcccgccatcccacgtgaccgcgccgccccccagctccaccgctgagcccgctcgccatggccctcttcggggccctcttcctagcgctgctggcaggcgcacatgcagagttcccaggctgcaagatccgcgtcacctccaaggcgctggagctggtgaagcaggaggggctgcgctttctggagcaagagctggagactatcaccattccggacctgcggggcaaagaaggccacttctactacaacatctctgaggtgaaggtcacagagctgcaactgacatcttccgagctcgatttccagccacagcaggagctgatgcttcaaatcaccaatgcctccttggggctgcgcttccggagacagctgctctactggttcttctatgatgggggctacatcaacgcctcagctgagggtgtgtccatccgcactggtctggagctctcccgggatcccgctggacggatgaaagtgtccaatgtctcctgccaggcctctgtctccagaatgcacgcggccttcgggggaaccttcaagaaggtgtatgattttctctccacgttcatcacctcagggatgcgcttcctcctcaaccagcagatctgccctgtcctctaccacgcagggacggtcctgctcaactccctcctggacaccgtgcctgtgcgcagttctgtggacgagcttgttggcattgactattccctcatgaaggatcctgtggcttccaccagcaacctggacatggacttccggggggccttcttccccctgactgagaggaactggagcctccccaaccgggcagtggagccccagctgcaggaggaagagcggatggtgtatgtggccttctctgagttcttcttcgactctgccatggagagctacttccgggcgggggccctgcagctgttgctggtgggggacaaggtgccccacgacctggacatgctgctgagggccacctactttgggagcattgtcctgctgagcccagcagtgattgactccccattgaagctggagctgcgggtcctggccccaccgcgctgcaccatcaagccctctggcaccaccatctctgtcactgctagcgtcaccattgccctggtcccaccagaccagcctgaggtccagctgtccagcatgactatggacgcccgtctcagcgccaagatggctctccgggggaaggccctgcgcacgcagctggacctgcgcaggttccgaatctattccaaccattctgcactggagtcgctggctctgatcccattacaggcccctctgaagaccatgctgcagattggggtgatgcccatgctcaatgagcggacctggcgtggggtgcagatcccactacctgagggcatcaactttgtgcatgaggtggtgacgaaccatgcgggattcctcaccatcggggctgatctccactttgccaaagggctgcgagaggtgattgagaagaaccggcctgctgatgtcagggcgtccactgcccccacaccgtccacagcagctgtctgagccctcaatccccaagctggcagctgtcattcaggaccccaacccctctcagcccctcttttcccacattcatagcctgtagtgccccctctaacccccagtgccacagagaagacgggatttgaagctgtacccaatttaattccataatcaatctatcaattacagtccgtccaccacctc

SEQ ID NO: 1702 - DNA, 9040 bp, Homo sapiens
gggcatgtgggctgaggcaggcttgcccagggcaggcgggggttcacagccccccttccgcaccttctcggccagcgactggggcctcacccacctagtggtgcatgagcagacaggcgaggtgtatgtgggcgcagtgaaccgcatctataagctgtcggggaacctgacactgctgcgggcccacgtcacgggccctgtggaggacaacgagaagtgctacccgccgcccagcgtgcagtcctgcccccacggcctgggcagtactgacaacgtcaacaagctgctgctgctggactatgccgctaaccgcctgctggcctgtggcagcgcctcccagggcatctgccagttcctgcgtctggacgatctcttcaaactgggtgagccacaccaccgtaaggagcactacctgtccagcgtgcaggaggcaggcagcatggcgggcgtgctcattgccgggccaccgggccagggccaggccaagctcttcgtgggcacacccatcgatggcaagtccgagtacttccccacactgtccagccgtcggctcatggccaacgaggaggatgccgacatgttcggcttcgtgtaccaggatgagtttgtgtcatcacagctcaagatcccttcggacacgctgtccaagttcccggcctttgacatctactatgtgtacagcttccgcagcgagcagtttgtctactacctcacgctgcagctagacacacagctgacctcgcctgatgccgccggcgagcacttcttcacgtccaagatcgtgcggctctgtgtggacgaccccaaattctactcgtacgttgagttccccattggctgcgagcaggcgggtgtggagtaccgcctggtgcaggatgcctacctgagccggcccggccgtgccctggcccaccagctgggcctggctgaggacgaggacgtgctgttcactgtgttcgcccagggccagaagaaccgcgtgaagccaccaaaggagtcagcactgtgcctgttcacgctcagggccatcaaggagaagattaaggagcgcatccagtcctgctaccgtggtgagggcaagctctccctgccgtggctgctcaacaaggagctgggctgcatcaactcgcccctgcagatcgatgacgacttctgcgggcaggacttcaaccagcccctggggggcacagtcaccattgaggggacgcccctgttcgtggacaaggatgatggcctgaccgccgtggctgcctatgactatcggggccgcactgtggtattcgccggcacgcgaagtggccgcatccgcaagatcctggtggacctctcaaaccccggtggccggcctgccctggcctacgagagcgtcgtggcccaggagggcagccccatcctgcgagacctcgtcctcagccccaaccaccagtacctctacgccatgaccgagaagcaggtgacgcgggtgcctgtggagagctgtgtgcagtacacgtcctgtgagctgtgtctggggtcacgggacccccactgtggctggtgtgtcctgcacagcatctgctcgcggcgggacgcctgtgagcgagcagacgagccccagcgctttgctgcggacctgctgcagtgtgtgcagctgactgtgcagccccgcaatgtgtctgtcaccatgtcccaggtcccacttgtgctgcaggcctggaacgtgcctgacctctcagctggcgtcaactgctccttcgaggacttcacggaatctgagagcgtcctggaggatggccggatccactgccgctcaccctccgcccgggaggtggcgcccatcacgcggggccagggagaccagcgggtggtgaaactctacctaaagtccaaggagacagggaagaagtttgcgtctgtggacttcgtcttctacaactgcagcgtccaccagtcctgcctgtcctgtgtcaacggctcctttccctgccactggtgcaaataccgccacgtgtgcacacacaacgtggctgactgcgccttcctggagggccgtgtcaacgtgtctgaggactgcccacagatcctgccctccacgcagatctacgtgccagtgggagtggtaaaacccatcaccctggccgcacggaacctgccacagccacagtcaggccagcgtggatatgagtgcctcttccacatcccgggcagcccggcccgtgtcaccgccctgcgcttcaacagctccagcctgcagtgccagaattcctcgtactcctacgaggggaacgatgtcagcgacctgccagtgaacctgtcagtcgtgtggaacggcaactttgtcattgacaacccacagaacatccaggcgcacctctacaagtgcccggccctgcgcgagagctgcggcctctgcctcaaggccgacccgcgcttcgagtgcggatggtgcgtggccgagcgccgctgctccctgcgacaccactgcgctgccgacacacctgcatcgtggatgcacgcgcgtcacggcagcagtcgctgcaccgaccccaagatcctcaagctgtcccccgagacgggcccgaggcagggcggcacgcggctcactatcacaggcgagaacctgggcctgcgattcgaagacgtgcgtctgggcgtgcgcgtgggcaaggtgctgtgcagccctgtggagagcgagtacatcagtgcggagcagatcgtctgtgagatcggggacgccagctccgtgcgtgcccatgacgccctggtggaggtgtgtgtgcgggactgctcaccacactaccgcgccctgtcacccaagcgcttcaccttcgtgacaccaaccttctaccgtgtgagcccctcccgtgggcctctgtcagggggcacctggattggcatcgagggaagccacctgaacgcaggcagtgatgtggctgtgtcggtcggtggccggccctgctccttctcctggaggaactcccgtgagatccggtgcctgacaccccccgggcagagccctggcagcgctcccatcatcatcaacatcaaccgcgcccagctcaccaaccctgaggtgaagtacaactacaccgaggaccccaccatcctgaggatcgaccccgagtggagcatcaacagcggtgggaccctcctgacggtcacaggcaccaacctggccactgtccgtgaaccccgaatccgggccaagtatggaggcattgagagggagaacggctgcctggtgtacaatgacaccaccatggtatgccgcgccccgtctgtggccaaccctgtgcgcagcccaccagagctgggggagcggccggatgagctgggcttcgtcatggacaacgtgcgctccctgcttgtgctcaactccacctccttcctctactaccctgaccccgtactggagccactcagccccactggcctgctggagctgaagcccagctccccactcatcctcaagggccggaacctcttgccacctgcacccggcaactcccgactcaactacacggtgctcatcggctccacaccctgtaccctcaccgtgtcggagacgcaactgctgtgcgaggcgcccaacctcactgggcagcacaaggtcacggtgcgggcaggtggcttcgagttctcgccagggacactgcaggtgtactcggacagcctgctgacgctgcctgccattgtgggcattggcggaggcgggggtctcctgctgctggtcatcgtggctgtgctcatcgcctacaagcgcaagtcacgagatgctgaccgcacactcaagcggctgcagctccagatggacaacctggagtcccgcgtggccctcgaatgcaaggaagcctttgcagagctgcagacagacatccacgagctgaccaatgacctggacggtgccggcatccccttccttgactaccggacatatgccatgcgggtgctctttcctgggatcgaggaccaccctgtgctcaaggagatggaggtgcaggccaatgtggagaagtcgctgacactgttcgggcagctgctgaccaagaagcacttcctgctgaccttcatccgcacgctggaggcacagcgcagcttctccatgcgcgaccgcgggaatgtggcctcgctcatcatgacggccctgcagggcgagatggaatacgccacaggcgtgctcaagcagctgctttccgacctcatcgagaagaacctggagagcaagaaccaccccaagctgctactgcgccggactgagtcggtggcagagaagatgctaactaactggttcaccttcctcttgtataagttcctcaaggagtgcgctggggagccgctgttcatgctgtactgcgccatcaagcagcagatggagaagggccccattgacgccatcacgggtgaggcacgctactccctgagtgaggacaagctcatccggcagcagattgactacaagacactgaccctgaactgtgtgaaccctgagaatgagaatgcacctgaggtgccggtgaaggggctggactgtgacacggtcacccaggccaaggagaagctgctggacgctgcctacaagggcgtgccctactcccagcggcccaaggccgcggacatggacctggagtggcgccagggccgcatggcgcgcatcatcctgcaggacgaggacgtcaccaccaagattgacaacgattggaagaggctgaacacactggctcactaccaggtgacagacgggtcctcggtggcactggtgcccaagcagacgtccgcctacaacatctccaactcctccaccttcaccaagtccctcagcagatacgagagcatgctgcgcacggccagcagccccgacagcctgcgctcgcgcacgcccatgatcacgcccgacctggagagcggcaccaagctgtggcacctggtgaagaaccacgaccacctggaccagcgtgagggtgaccgcggcagcaagatggtctcggagatctacttgacacggctactggccaccaagggcacactgcagaagtttgtggacgacctgtttgagaccatcttcagcacggcacaccggggctcagccctgccgctggccatcaagtacatgttcgacttcctggatgagcaggccgacaagcaccagatccacgatgctgacgtgcgccacacctggaagagcaactgcctgcccctgcgcttctgggtgaacgtgatcaagaacccacagtttgtgttcgacattcacaagaacagcatcacggacgcctgcttgtcggtggtggcccagaccttcatggactcctgctccacctctgagcacaagctgggcaaggactcaccctccaacaagctgctctacgccaaggacatccccaactacaagagctgggtggagaggtactatgcagacatcgccaagatgccagccatcagcgaccaggacatgagtgcgtatctggctgagcagtcccgcctgcacctgagccagttcaacagcatgagcgccttgcacgagatctactcctacatcaccaagtacaaggatgagatcctggcagccctggagaaggatgagcaggcgcggcggcagcggctgcggagcaagctggagcaggtggtggacacgatggccctgagcagctgagccccagctgtgatcatccagcatgatgcagcgtgaggacagctgagcagggaccgggacagccctcaccgcatgcgtgtggagtgtccggtggtgctcgggccgccgcagtgcagcgactgcccggccctccctcccctgcctcacccggtcgggtcccggctcttcctgtgtggaggtgatggtacctgccacaccacagctgcgcacacagctgcttgctcaggggccgggacagcactgggtgctcaggctggccaaggaccttcattgcctggcaagagctgcccagtggccttcatgggagaagggctgacctctgaggggctgaggggtgaggccagggccctccagggggaggggtagccagcttgggctgtccccttgagaccaggacaagaggctgggggtgtcagcattcccagctttccaagctgcccccaggcggcagagtctgagggtcccggggcccggttggcagctggagaaagaggcaaaaagcccgtagccgggcaagaggagctcaagtcggtctgggcccgttgccaccgactcccacctccagcacccatgcccgctgcaccgctgccatcctcagattcaccgcgtgctctgcgcggccgaggccggagcaccacatccacctcgccccagagaggctctgctccctcctatggaggggctgtgggccaggctgctcagactcctgggtggcttccagacggaccgggcagcccctctccgtcctcagggctgtgcctctgggagccactgggccaggggccccgggtcgcagagagcacgttcccgttatttattcccctccgcgtcctacacaggctgccctggcagctgtcttcaagggtaggctgagctccccaccctggagcccctgagggcggcccctgagcactcctctctctccactctctctgtccctgccccagcggcttccagtgtggcatctcagcagtgtcctggcccctccagagcagtgggacatctggggactgtttttgtgtttaggggaaaaaattctgctgcactctgcttgggccttgaggtctgtggcagggctcctctggcccgcagtggcctggatctatctgggccatgagtgacgggcagtgaccagagggactggaggccagcggtgtccacccttgccctcagcaagagagaatgcattcttaaaagaaagctgtacatgtatatatatgcatatatatatatgtggctctagcctcaggctccagccccagtggggtactgtacagttaactgaagaagaattttaaagacgatttgaacaagaaaatgaaggcagtgggaaagcaatgccaaatggttgtggagaaagtggccggagcctccctggagtggagcagccctgaagcctgtgccccccgacctgcgggccgctgttttggtttgacatgacaaggaaaggacttcctgctgaccctgagagcctctggggtgccgcggcaccacggggcatgcatgattgtgctagcgtttagtctgagttgatctttttaaaactgcaagtgttgaatactagaggttgttagacccttttttatgttttttaattaatcagtcacttgtaaaagcaaacaagcggtccatccccttttcaaggtcacttttttgatggtaccgaagatcccatggacattaagggacagctaactgtggccagactcagccccatgtccttggccaggcccaaggagaggactcggccccatggggtgtgccagtcttgcagtccgccccagctgagtagcgtgagccagatgacgccacagagacccgcctcttccctgaacgcgggtcggtgtggagtcagtgactgctgactcagggagctccttggccccgtgggcactgtgccagggctggggccttctgctgctgccacacccagctcaggcctgggccagcccctgcccccagcccactgagggggtgggcttactccctgggcagtcttgggggccagagctgaggccagtccatattacagtggctgggctgtttttttcagtagcccctagcattggctgggattcctgttcctgggtgcgcctccacctcccttctgatgtttcctggctatggtggggtgggaacctcagtttcccccaaagtcttccctggatgctggcttcaggttgaagtccctggttcttccagttcctcacgggttaggtaggggctcctgcatcaccttcagaatccagttccaacccccactctccttaggccttgtgctctgctctgccctgccaggctgcccttgtccatgtgagtagcatgggcgggtggtggggacggcagtggtgatgaagggggtgcaccacaggcctcatgaagcagttcccacatgggcgtgtggctggggcgtggccaccacagagcacatggctgtgtctaggcgcaagcactttagcagtatctgtttacatgcgcaaggatcaagccgactacctgtgctgtctactgggacagcagtctccgagctactccgtacctccctctgccaggtcgtggagttaggccccagtccctacttgtcactggttcccactgtgctcctaactgtgcagcacctgggagctctggcctggggctggaggccctggtaggagctgcagttggaggccgttctgtgcccagcagcggtgagcggctcccatgggccctgtgtctgcagggagccagggctgcggcacatgtgctgtgaaactggcacccacctggcgtgctgctgccgccacttgcttcctgcagcacctcctaccctgctccgtgtcctccctctccccgcgcctggctcaggagtgctggaaaagctcacgcctcggcctgggagcctggcctcttgatatacctcgagcttcccctgtgctccccagccccaggaccactggccccttggcctgaggggctgggggccccacgacctgcagcgtcgagtccgggagagagcccggagcggcgtgccatctcggctcggccttgctgagagcctccgccctggctttctccctgtctggattcagtggctcacgttggtgctacacagctagaatagatatatttagagagagagatatttttaagacaaagcccacaattagctgtcctttaacaccgcagaaccccctcccagaagaagagcgatccctcggacggtccgggcgggcaccctcagccgggctctttgcagaagcagcaccgctgactgtgggcccggccctcagatgtgtacatatacggctatttcctattttactgttcttcagatttagtacttgtaaataaacacacacattaaggagagattaaacatttttgctaaaaaaaaaaaaaaaaaaaaaaaaaaaaaaaaaaaaaaaaaaaaaa

SEQ ID NO: 1703 - DNA, 3239 bp, Homo sapiens
ctcgctgccagcggattggctgcgagcagcgccaatctcacgttgcccccgggcgaggcgggactcagtgccgcgctctctgcacccgctctgccgcgcgcgtgcgtgctgggtgcgggtgcgggtgcggggttgggcctgcgcatcgggtgagacgctggctgcttgcggctagtggatggtaattgcctgcctcgcgctagcaggaagctgctctgttaaaagcgaaaatgaaacaattgcctgcggcaacagttcgactcctttcaagttctcagatcatcacttcggtggtcagtgttgtaaaagagcttattgaaaactccttggatgctggtgccacaagcgtagatgttaaactggagaactatggatttgataaaattgaggtgcgagataacggggagggtatcaaggctgttgatgcacctgtaatggcaatgaagtactacacctcaaaaataaatagtcatgaagatcttgaaaatttgacaacttacggttttcgtggagaagccttggggtcaatttgttgtatagctgaggttttaattacaacaagaacggctgctgataattttagcacccagtatgttttagatggcagtggccacatactttctcagaaaccttcacatcttggtcaaggtacaactgtaactgctttaagattatttaagaatctacctgtaagaaagcagttttactcaactgcaaaaaaatgtaaagatgaaataaaaaagatccaagatctcctcatgagctttggtatccttaaacctgacttaaggattgtctttgtacataacaaggcagttatttggcagaaaagcagagtatcagatcacaagatggctctcatgtcagttctggggactgctgttatgaacaatatggaatcctttcagtaccactctgaagaatctcagatttatctcagtggatttcttccaaagtgtgatgcagaccactctttcactagtctttcaacaccagaaagaagtttcatcttcataaacagtcgaccagtacatcaaaaagatatcttaaagttaatccgacatcattacaatctgaaatgcctaaaggaatctactcgtttgtatcctgttttctttctgaaaatcgatgttcctacagctgatgttgatgtaaatttaacaccagataaaagccaagtattattacaaaataaggaatctgttttaattgctcttgaaaatctgatgacgacttgttatggaccattacctagtacaaattcttatgaaaataataaaacagatgtttccgcagctgacatcgttcttagtaaaacagcagaaacagatgtgctttttaataaagtggaatcatctggaaagaattattcaaatgttgatacttcagtcattccattccaaaatgatatgcataatgatgaatctggaaaaaacactgatgattgtttaaatcaccagataagtattggtgactttggttatggtcattgtagtagtgaaatttctaacattgataaaaacactaagaatgcatttcaggacatttcaatgagtaatgtatcatgggagaactctcagacggaatatagtaaaacttgttttataagttccgttaagcacacccagtcagaaaatggcaataaagaccatatagatgagagtggggaaaatgaggaagaagcaggtcttgaaaactcttcggaaatttctgcagatgagtggagcaggggaaatatacttaaaaattcagtgggagagaatattgaacctgtgaaaattttagtgcctgaaaaaagtttaccatgtaaagtaagtaataataattatccaatccctgaacaaatgaatcttaatgaagattcatgtaacaaaaaatcaaatgtaatagataataaatctggaaaagttacagcttatgatttacttagcaatcgagtaatcaagaaacccatgtcagcaagtgctctttttgttcaagatcatcgtcctcagtttctcatagaaaatcctaagactagtttagaggatgcaacactacaaattgaagaactgtggaagacattgagtgaagaggaaaaactgaaatatgaagagaaggctactaaagacttggaacgatacaatagtcaaatgaagagagccattgaacaggagtcacaaatgtcactaaaagatggcagaaaaaagataaaacccaccagcgcatggaatttggcccagaagcacaagttaaaaacctcattatctaatcaaccaaaacttgatgaactccttcagtcccaaattgaaaaaagaaggagtcaaaatattaaaatggtacagatccccttttctatgaaaaacttaaaaataaattttaagaaacaaaacaaagttgacttagaagagaaggatgaaccttgcttgatccacaatctcaggtttcctgatgcatggctaatgacatccaaaacagaggtaatgttattaaatccatatagagtagaagaagccctgctatttaaaagacttcttgagaatcataaacttcctgcagagccactggaaaagccaattatgttaacagagagtctttttaatggatctcattatttagacgttttatataaaatgacagcagatgaccaaagatacagtggatcaacttacctgtctgatcctcgtcttacagcgaatggtttcaagataaaattgataccaggagtttcaattactgaaaattacttggaaatagaaggaatggctaattgtctcccattctatggagtagcagatttaaaagaaattcttaatgctatattaaacagaaatgcaaaggaagtttatgaatgtagacctcgcaaagtgataagttatttagagggagaagcagtgcgtctatccagacaattacccatgtacttatcaaaagaggacatccaagacattatctacagaatgaagcaccagtttggaaatgaaattaaagagtgtgttcatggtcgcccattttttcatcatttaacctatcttccagaaactacatgattaaatatgtttaagaagattagttaccattgaaattggttctgtcataaaacagcatgagtctggttttaaattatctttgtattatgtgtcacatggttattttttaaatgaggattcactgacttgtttttatattgaaaaaagttccacgtattgtagaaaacgtaaataaactaatatagactattcaaaaaaaaaaaaaaaaaa

SEQ ID NO: 1704 - DNA, 3437 bp, Homo sapiens
agcttggttgggcgactggcaaatccttccttccccggggtagaagtccagggtgagaaattggttccgaactcaaaggaacccagtgccgggccacagccgggtcacgtggccggcggccccccatgacgtgctggctgcggggcgtcacggcgacgttcgggcgacctgccgagtggccaggctacctcagtcacctgtgtggtcgcagtgctgccatggacctgggacccatgcgcaagagttaccgcggggaccgagaggcatttgaggagactcatctgacctcccttgacccagtgaaacagtttgctgcctggtttgaggaggctgttcagtgtcctgacataggggaagccaatgccatgtgtctggctacctgcaccagagatggaaaaccctctgctcgcatgttgctgctgaagggcttcgggaaagatggcttccgcttcttcactaacttcgagagtcgaaaaggaaaagagctggactctaatccctttgcttcccttgtcttctactgggagccacttaaccgtcaggtgcgtgtggaaggccctgtgaagaaactgcctgaggaggaggctgagtgctacttccactcccgccccaagagcagccagattggggctgtggtcagccaccagagttctgtgatccctgatcgggagtatctgagaaagaaaaatgaggaactggaacagctctaccaggatcaagaggtgcccaagccaaaatcctggggtggctatgtcctgtaccctcaggtgatggagttctggcaaggtcaaaccaaccgcctgcatgaccggatagtctttcggcggggcctacccacaggagattcccctttggggcccatgacccaccgcggggaggaagactggctctatgagagacttgcaccttaactctgggacctgctggcccagagtggagctagggctaggtgtcaagagagggtgtgggattgggacccaggcccttctttctaaactcaacccatttccctccctaccccttatcttcaggactcttcagagctaatcctctaagttctctgtactcagttggttctcagttagctggtcaagtggagtgtaatggtggcgtagagaatcacaaatggaaaataattccataattatttttttgaccttgcctatgattgattaggatagctccctctaggggtagcagccggtgtgactccctttctggtgacagacagggccccagcagccctgtctgttaccatgtgagtcatactggccaaagcttagtcctagcatatgcacctgagccaacctggccaatcagattgttttgtcaataatttgaaatttgaactggagagatccagaaccttgggagtcattaaagccaagtcattcatagcagccaggaaacaataggaaccaaaagcctctgcctgctgctattgcaattcccaggatctctccttccctggatccctccctcccaggtctgggctgtgcagttcctccccctgccttaaaacaccccactatctctgtaaagtctctctctctcttttttttttttttacttaatctagctagaatctatttctgttgattacaacttaactaactcatttacggataggacttttttttttctttttttcttttttcttttcttttttttttttgagatggagtctcactctgtcacccaggctggagtgcagtggtgtgatcttggctcactgcaacctctgcctcccaggttcaagcaattctcctgcctcagcctcccaagtagctgggactacaggcacacgccaccacacccaactaatttttgtatttttagtagagatggggtttcaccatgttggccaggattgtctccatctcttgaccttgtgatccacccacctcagcctcccaaagtgctgggattacaggcatgagccaccacacccagcgagacggggtttcattatgttggccaggctggtctccaactcctgacctaaagtgatctgcccgccttggcctcccaaagtgctgggattacagacatgagccaccacgcttggccgggatagtatatttttatagcacttcccctactgattgctgccttctctgtggctacaagggacccacagaattacagggaagttacagggaagcaggtttcatctcaatattgggagagatttcaaacaatcacacctgcctgagaaggagtgggctgtcactaggaatttttattcccagtccgtcaggaattttgtagaagggcttcatgtgctggtaccaataggacaggaagattttaatcagctttactatctatgtttttttatggaaactgtgtgtatgtatacatacattttccaaaaagaaaaattaaatgattatagagattatgtttttcagactactcacgtatctgcttttcttactccccacctctgctgataattcctagttcattggtttttcccccacactggaattacctggggagcttaaaaaaccctgatgcctgggtcccaccctcagagatgattgaaccagcctggccagcatggcaaaaccctgtctctactatgatatgaatgcagcctgggcactgggaaatttaaaaactccccagataattctgtgcagccaaggttgagacctcctagtctagagctttgctatacacagggtggtccacaagccaggagcatcagcatcacttggcagcgccttagagattcagaccccagacccactgaatctgaccctgcattttcactagaccccaggtgatcagctgcactagactcaacctctaaaccaagacctcccaccctcacagtctatgatcctttagtgaccctcagctgagtcctgtgctgaactgtgtttgttctccttgagcacatgcccgctaaccagggacagactggatgagcaagcaacctgctggctatggagaagagccaggctgggtaaatgtttgctgtgactaagccaggatcaaagaactgcctgttgcttgcactggctggcactgagcttgccactctgtgaactgtgcttccttcccctgcatggacctgtgcctcagtcactattatccgcaggccttctccaagggcagccctctccttgtttatccctcttaagcctgcgtgcaggaaggcacattaaccctgtggccccctgcaggcaggagggtgttgggtgcccttacctaccttgccctttttcttgtaccgtaggctgtgccgtttatgagtaagtgatgtgtgtctgtgtgtgtgtctagaagtgctgcactcaccttgtgttattggaggttgtgtaaccccctagctttgagcctggtctcagatgttccttttccgttctctgtccagccgttaccgcccccagtctgtaataaaagcctatcagccgtgcacttta

SEQ ID NO: 1705 - DNA, 2061 bp, Homo sapiens
tgttccgcgatcttctcaggctctcctagcagcatccatcgccgccaccctatcttcactggcttcaccttctccttctctcttcgttgctgagcgacaagcttcctagcgctatgactgtcgtctccgtcccgcagcgggagccgctcgtcctgggtggccgccttgcgccgcttggcttttcctcccgaggttactttggggccctcccgatggtgaccacggctccgcctcctttaccccggatcccggacccccgggcactgcccccgaccctcttcctccctcatttcctagggggagatggcccgtgtctgaccccccagcctcgcgctccagcagctctgcccaaccgcagcctcgccgtggcgggaggcactcctcgggcagcgccgaagaagcggcgaaagaagaaggtgcgggccagccccgcagggcagctgcccagccgcttccaccagtaccagcagcaccggccgagtctggagggcggccggagccccgcgaccggcccgagcggagcgcaggaggtcccgggcccggccgccgccttggccccgagtcctgcagccgcagccggcacggagggagccagccccgaccttgccccgctgcggcccgcggctcccggccaaacccccctcaggaaagaggttttaaaatcaaagatgggaaaatcggagaaaattgcccttccccatggccagcttgttcatggtatacacttgtatgagcaaccaaagataaacagacagaaaagcaaatataacttgccactaaccaagatcacctctgcaaaaagaaatgaaaacaacttttggcaggattctgtttcatctgacagaattcagaagcaggaaaaaaagccttttaaaaataccgagaacattaaaaattcgcatttgaagaaatcagcatttctaactgaagtgagccaaaaggaaaattatgctggggcaaagtttagtgatccaccttctcctagtgttcttccaaagcctcctagtcactggatgggaagcactgttgaaaattccaaccaaaacagggagctgatggcagtacacttaaaaaccctcctcaaagttcaaacttagatttcagatttcagtatgtgtgtaaaacataatttttcccatatccctggactcttgagaaaattggtacagaaatggaaatttgccttgttgcaacatacaattgcaaaagatgagtttaaaaaattacatacaaacagcttgtattatattttatattttgtaaatactgtataccatgtattatgtgtatattgttcatacttgagaggtatattatagttttgttatgaaagtatgtattttgccctgcccacattgcaggtgttttgtatatatacaatggataaattttaagtgtgtgctaaggcacatggaagaccgattttatttgcacaaggtactgagatttttttcaagaaacagctgtcaaatctcaaggtgaagatctaaatgtgaacagtttactaatgcactactgaagtttaaatctgtggcacaatcaatgtaagcatggggtttgtttctctaaattgatttgtaatctgaaattactgaacaactcctattcccatttttgctaaactcaatttctggttttggtatatatccattccagcttaatgcctctaattttaatgccaacaaaattggttgtaatcaaattttaaaataataataatttggcccccccttttaaaatagtcttgactctttgtgtgtgactgtttctcatgtttgaatgtgtgactaggagatgattttgtgtggttggatttttttgacttctactttactggctgagtgtgagccgccatgcctggccataatctacattttcttaccaggagcagcattgaggtttttgagcatagtacttgactactctagaggctgagacgggagcatctcttgagcctgagaagtggagattgcaattgagctaggatcaggccactgcactccagcctgggtaacagacgctgtctcaaaaaaaaggccaagagaaagtaagggagacaga

SEQ ID NO: 1706 - DNA, 1767 bp, Homo sapiens
gaaaggagcaagccaggaagccagacaacaacagcatcaaaacaaggctgtttctgtgtgtgaggaactttgcctgggagataaaattagacctagagctttctgacagggagtctgaagcgtgggacatggaccgttcactgggatggcaagggaattctgtccctgaggacaggactgaagctgggatcaagcgtttcctggaggacaccacggatgatggagaactgagcaagttcgtgaaggatttctcaggaaatgcgagctgccacccaccagaggctaagacctgggcatccaggccccaagtcccggagccaaggccccaggccccggacctctatgatgatgacctggagttcagacccccctcgcggccccagtcctctgacaaccagcagtacttctgtgccccagcccctctcagcccatctgccaggccccgcagcccatggggcaagcttgatccctatgattcctctgaggatgacaaggagtatgtgggctttgcaaccctccccaaccaagtccaccgaaagtccgtgaagaaaggctttgactttaccctcatggtggcaggagagtctggcctgggcaaatccacacttgtcaatagcctcttcctcactgatctgtaccgggaccggaaacttcttggtgctgaagagaggatcatgcaaactgtggagatcactaagcatgcagtggacatagaagagaagggtgtgaggctgcggctcaccattgtggacacaccaggttttggggatgcagtcaacaacacagagtgctggaagcctgtggcagaatacattgatcagcagtttgagcagtatttccgagacgagagtggcctgaaccgaaagaacatccaagacaacagggtgcactgctgcctgtacttcatctcacccttcggccatgggctccggccattggatgttgaattcatgaaggccctgcatcagcgggtcaacatcgtgcctatcctggctaaggcagacacactgacacctcccgaagtggaccacaagaaacgcaaaatccgggaggagattgagcattttggaatcaagatctatcaattcccagactgtgactctgatgaggatgaggacttcaaattgcaggaccaagccctaaaggaaagcatcccatttgcagtaattggcagcaacactgtagtagaggccagagggcggcgagttcggggtcgactctacccctggggcatcgtggaagtggaaaacccagggcactgcgactttgtgaagctgaggacaatgctggtacgtacccacatgcaggacctgaaggatgtgacacgggagacacattatgagaactaccgggcacagtgcatccagagcatgacccgcctggtggtgaaggaacggaatcgcaacaaactgactcgggaaagtggtaccgacttccccatccctgctgtcccaccagggacagatccagaaactgagaagcttatccgagagaaagatgaggagctgcggcggatgcaggagatgctacacaaaatacaaaaacagatgaaggagaactattaactggctttcagccctggatatttaaatctcctcctcttcttcctgtccatgccggcccctcccagcaccagctctgctcaggccccttcagctactgccacttcgccttacatccctgctgactgcccagagactcagaggaaataaagtttaataaatctgtaggtggctaaaaaaaaaaaaaaaaaaaaaaaaaaaaaaa

SEQ ID NO: 1707 - DNA, 1669 bp, Homo sapiens
cggcggtgctgcgaggtcggcgcgcagctccgccgcgggtcgctcgggcgctgtccaggcggagccggccccgcccgggctgcagccatgatcaagcgtttcctggaggacaccacggatgatggagaactgagcaagttcgtgaaggatttctcaggaaatgcgagctgccacccaccagaggctaagacctgggcatccaggccccaagtcccggagccaaggccccaggccccggacctctatgatgatgacctggagttcagacccccctcgcggccccagtcctctgacaaccagcagtacttctgtgccccagcccctctcagcccatctgccaggccccgcagcccatggggcaagcttgatccctatgattcctctgaggatgacaaggagtatgtgggctttgcaaccctccccaaccaagtccaccgaaagtccgtgaagaaaggctttgactttaccctcatggtggcaggagagtctggcctgggcaaatccacacttgtcaatagcctcttcctcactgatctgtaccgggaccggaaacttcttggtgctgaagagaggatcatgcaaactgtggagatcactaagcatgcagtggacatagaagagaagggtgtgaggctgcggctcaccattgtggacacaccaggttttggggatgcagtcaacaacacagagtgctggaagcctgtggcagaatacattgatcagcagtttgagcagtatttccgagacgagagtggcctgaaccgaaagaacatccaagacaacagggtgcactgctgcctgtacttcatctcacccttcggccatgggctccggccattggatgttgaattcatgaaggccctgcatcagcgggtcaacatcgtgcctatcctggctaaggcagacacactgacacctcccgaagtggaccacaagaaacgcaaaatccgggaggagattgagcattttggaatcaagatctatcaattcccagactgtgactctgatgaggatgaggacttcaaattgcaggaccaagccctaaaggaaagcatcccatttgcagtaattggcagcaacactgtagtagaggccagagggcggcgagttcggggtcgactctacccctggggcatcgtggaagtggaaaacccagggcactgcgactttgtgaagctgaggacaatgctggtacgtacccacatgcaggacctgaaggatgtgacgcgggagacacattatgagaactaccgggcacagtgcatccagagcatgacccgcctggtggtgaaggaacggaatcgcaacaaactgactcgggaaagtggtaccgacttccccatccctgctgtcccaccagggacagatccagaaactgagaagcttatccgagagaaagatgaggagctgcggcggatgcaggagatgctacacaaaatacaaaaacagatgaaggagaactattaactggctttcagccctggatatttaaatctcctcctcttcttcctgtccatgccggcccctcccagcaccagctctgctcaggccccttcagctactgccacttcgccttacatccctgctgactgcccagagactcagaggaaataaagtttaataaatctgtaggtggctaaaaaaaaaaaaaaaaaaaaaaaaaaaaaaa

SEQ ID NO: 1708 - DNA, 3019 bp, Homo sapiens
gacttgaatggaaggagcccgagcccgcggagcgcagctgagactgggggagcgcgttcggcctgtggggcgccgctcggcgccggggcgcagcaggttccgtcagccctggcgcccaggcgcatctgactcggcaccccctgcaggcaccatggcccagagccgggtgctgctgctcctgctgctgctgccgccacagctgcacctgggacctgtgcttgccgtgagggccccaggatttggccgaagtggcggccacagcctgagccccgaagagaacgaatttgcggaggaggagccggtgctggtactgagccctgaggagcccgggcctggcccagccgcggtcagctgcccccgagactgtgcctgttcccaggagggcgtcgtggactgtggcggtattgacctgcgtgagttcccgggggacctgcctgagcacaccaaccacctatctctgcagaacaaccagctggaaaagatctaccctgaggagctctcccggctgcaccggctggagacgctgaacctgcaaaacaaccgcctgacttcccgagggctcccagagaaggcgtttgagcatctgaccaacctcaattacctgtacttggccaataacaagctgaccttggcaccccgcttcctgccaaacgccctgatcagtgtggactttgctgccaactatctcaccaagatctatgggctcacctttggccagaagccaaacttgaggtctgtgtacctgcacaacaacaagctggcagacgccgggctgccggacaacatgttcaacggctccagcaacgtcgaggtcctcatcctgtccagcaacttcctgcgccacgtgcccaagcacctgccgcctgccctgtacaagctgcacctcaagaacaacaagctggagaagatccccccgggggccttcagcgagctgagcagcctgcgcgagctatacctgcagaacaactacctgactgacgagggcctggacaacgagaccttctggaagctctccagcctggagtacctggatctgtccagcaacaacctgtctcgggtcccagctgggctgccgcgcagcctggtgctgctgcacttggagaagaacgccatccggagcgtggacgcgaatgtgctgacccccatccgcagcctggagtacctgctgctgcacagcaaccagctgcgggagcagggcatccacccactggccttccagggcctcaagcggttgcacacggtgcacctgtacaacaacgcgctggagcgcgtgcccagtggcctgcctcgccgcgtgcgcaccctcatgatcctgcacaaccagatcacaggcattggccgcgaagactttgccaccacctacttcctggaggagctcaacctcagctacaaccgcatcaccagcccgcaggtgcaccgcgacgccttccgcaagctgcgcctgctgcgctcgctggacctgtcgggcaaccggctgcacacgctgccacctgggctgcctcgaaatgtccatgtgctgaaggtcaagcgcaatgagctggctgccttggcacgaggggcgctggtgggcatggctcagctgcgtgagctgtacctcaccagcaaccgactgcgcagccgagccctgggcccccgtgcctgggtggacctcgcccatctgcagctgctggacatcgccgggaatcagctcacagagatccccgaggggctccccgagtcacttgagtacctgtacctgcagaacaacaagattagtgcggtgcccgccaatgccttcgactccacgcccaacctcaaggggatctttctcaggtttaacaagctggctgtgggctccgtggtggacagtgccttccggaggctgaagcacctgcaggtcttggacattgaaggcaacttagagtttggtgacatttccaaggaccgtggccgcttggggaaggaaaaggaggaggaggaagaggaggaggaggaggaagaggaaacaagatagtgacaaggtgatgcagatgtgacctaggacgatggaccgccggactcttttctgcagcacacgcctgtgtgctgtgagccccccactctgccgtgctcacacagacacacccagctgcacacatgaggcatcccacatgacacgggctgacacagtctcatatccccaccccttcccacggcgtgtcccacggccagacacatgcacacacatcacaccctcaaacacccagctcagccacacacaactaccctccaaaccaccacagtctctgtcacacccccactaccgctgccacgccctctgaatcatgcagggaagggtctgcccctgccctggcacacacaggcacccattccctccccctgctgacatgtgtatgcgtatgcatacacaccacacacacacacatgcacaagtcatgtgcgaacagccctccaaagcctatgccacagacagctcttgccccagccagaatcagccatagcagctcgccgtctgccctgtccatctgtccgtccgttccctggagaagacacaagggtatccatgctctgtggccaggtgcctgccaccctctggaactcacaaaagctggcttttattcctttcccatcctatggggacaggagccttcaggactgctggcctggcctggcccaccctgctcctccaggtgctgggcagtcactctgctaagagtccctccctgccacgccctggcaggacacaggcacttttccaatgggcaagcccagtggaggcaggatgggagagccccctgggtgctgctggggccttggggcaggagtgaagcagaggtgatggggctgggctgagccagggaggaaggacccagctgcacctaggagacacctttgttcttcaggcctgtgggggaagttccgggtgcctttattttttattcttttctaaggaaaaaaatgataaaaatctcaaagctgatttttcttgttatagaaaaactaatataaaagcattatccctatccctgcaaaaaaaaaa

SEQ ID NO: 1709 - DNA, 3852 bp, Homo sapiens
cgctccctcccgaggggccgcgcgcacgggaggacggagaggcggaaaggatggcgctgtgacagccgggccggagccctcgcgtccccaccccgcgccctggccgctgggcccggcgagatggagtccacagcctaccctctcaatttgagcctgaaagaagaggaagaggaagaagagattcagagccgggaactagaggacggcccggcagacatgcagaaagtacgaatctgctctgagggcggatgggtaccggccctatttgatgaggtggccatatatttttccgatgaggaatgggaagttttgacggagcaacaaaaggccctctaccgggaagtcatgaggatgaattatgaaactgtcctgtccctggaattcccattccctaagccagacatgatcacccgtttggaaggggaggaggagtctcagaattctgacgagtggcagctccaaggaggcacctctgcagaaaatgaagaatctgacgtaaagcctccagactggccaaacccaatgaatgctacctcccagtttcctcagcctcagcactttgacagctttggcctccgtctgcctcgggatatcacagagctgcccgagtggagtgaggggtaccccttctacatggccatgggcttcccagggtatgacctctcggctgatgacatagctgggaagtttcagttcagccggggcatgcgccgcagttacgacgcagggttcaagctgatggtagtggaatatgctgagagtaccaacaactgccaggctgccaagcagtttggagtattggaaaaaaacgttcgagactggcgcaaagtgaagccacagcttcaaaacgcccacgccatgcggcgggcattccgaggccccaagaatgggaggtttgctctggtggaccagcgtgtggccgaatatgtcagatacatgcaggccaaaggggaccccatcacccgggaggcgatgcagctgaaagctctcgaaatcgcccaggaaatgaacattccagagaaagggttcaaggcaagcttgggttggtgtcgaagaatgatgagaaggtatgacctgtctctgaggcataaagtgcccgtgccccagcacctgccggaagacctgactgagaaactcgtcacttaccagcgcagtgtcctggctctgcgcagggcgcatgactatgaggtagctcagatggggaatgcagatgagacgcccatttgtttagaggtgccatcacgggtaactgttgataaccagggcgaaaagcctgtcttggtcaagacaccaggcagggaaaaactgaaaatcacagcaatgcttggtgtcttggctgatgggaggaagttaccaccgtacatcattttgaggggaacatatatccccccggggaagtttcccagtgggatggaaattcgctgccaccggtatgggtggatgactgaagacttgatgcaggactggttggaagtggtgtggagacggaggacaggagcagtgcccaagcagcgagggatgctgatcttgaatggcttccggggccatgccacagattccgtgaagaactccatggaaagcatgaacactgacatggtgatcatcccagggggtctgacctcacagcttcaggtgctggatgtcgtggtctacaagccactgaatgacagtgtgcgggcccagtactccaactggcttctggctgggaacctggcgctgagcccaaccgggaatgctaagaagccacccctgggcctctttctggagtgggtcatggtcgcgtggaatagcatctcaagtgagtccatcgtccaagggttcaagaagtgccatatctccagcaacttggaggaggaagacgatgtcctgtgggaaatcgagagtgagttgccaggaggaggagaaccaccaaaagattgtgacaccgaaagcatggctgagagcaactgaagggaaagggaaagcaaatggaactctgatttaaacagctggggatgaaattcctcaagatgattattcctgaaagtgtggatgcgctggatgcgcagggaacatcaggaaaaggccacggggctctgaacagccccggtccagacagcagcctgtacatccatcccaggacacagcccagcccctccccacaccatacaaggtatcagaaaagtctaggacctatcatttcatcagagacatgatcagaaaagaaactgcttctgccccatttcttgttttggagattactccatctgtccatcaaaagaaacctgtaaatatgaaagaacaaaggttatttcctggagaaaagacaatttattcaacaccaacgagggactcatcatatgggcacaactctggtgtccttctatggagaaaacctcaagtaaagttttattctgcctttgaaaatgcttccaaaagtagaccctgtccccacacaggtcaagactacagagaaggctttgtagaaatgtgtcacctatgtacacctgctacttacacatttcctcttttggaaaaatgagatacttagaataacaagaaaattaagacatactggcctggtgccagcagatggcttttctatagacaaactaggttagtgtggaagatataggttaaaataaactatgctgttttatttatcttcccaacctgattggcagctagacttttttagggtctcatttaatggccctgtttttttcattattatatttaatgatagggcaggatttcgtatgcaagctcttgtttctcaggctgcctgcagaagaagtcgctataaattatctgttgtctacatggtacaaggcccattgactcatctgatgcttgttttgttaatttctttaatatttttatcacggggcagtgggagggcttgggcttttagccacagctgttttaagacttctgatctcctgccctgcaggaataggtgggaagtcattgaatttttacactatagtaatttgcattcccacataagtttgagtgttacgaaaacattcctttaaagggatctgtgctacacaaaatatgccaggacctcacagacaaagccattgctagaaatgtcattccaatgatcagatctggaaacaggctgccataaccacttttccttcttgtagactcagctcacctgtatatttaaactgttcttggcatcttgaaacacctatttctactcaggtactcattgtcctgttactgattcacctttctgatccttttcaaccagttttcccccaaggggggaaattttacttaacctctagtatttgaacaactcaatatttgaattgttgccccatttgcttttacctgtactgtattcttggtcatctcaaatggcgtctaaacccagctactttgcattccagaagtttccattccctccaattccacctaatttttcatctgtcctagttactggctctttcttcatgtcttatttctcttgctttgggagcttaaaagattttacaagacctaattttgggttccttccttggagccatagttaccctgccaagaagagtagaaaatgggttcaactcctgtttcgctccaccaacacctctgtgagtctcatcatcagctgagcgatgatgccttacaggttgcatagcactggaactttcctagagtaacggctctgctgccagggtttctctgggctcattcttccactgacttaattatgatctatgcctaacagagccccagtacaactattttgcagaatggctgttaccctagaattactatagcacatattgagatatagttgtactccctagtagataggaactgaccccaacaataaactttgataataaagacaat

SEQ ID NO: 1710 - DNA, 5448 bp, Homo sapiens
gcggaatcgggagattcgggaccatggcacctgtgcacggcgacgactctctgtcagattcagggagttttgtatcttctcgagcccggcgagaaaaaaaatcaaagaaggggcgccaagaagccctagaaagactgaaaaaggctaaagctggtgagaagtataaatatgaagtcgaggacttcacaggtgtttatgaagaagttgatgaagaacagtattcgaagctggttcaggcacgccaggatgatgactggattgtggatgatgatggtattggctatgtggaagatggccgagagatttttgatgatgaccttgaagatgatgcccttgatgctgatgagaaaggaaaagatggtaaagcacgcaataaagacaagaggaatgtaaagaagctcgcagtgacaaaaccgaacaacattaagtcaatgttcattgcttgtgctggaaagaaaactgcagataaagctgtagacttgtccaaggatggtctgctaggtgacattctacaggatcttaacactgagacacctcaaataactccaccacctgtaatgatactgaagaagaaaagatccattggagcttcaccgaatcctttctctgtgcacaccgccacggcagttccttcaggaaaaattgcttcccctgtctccagaaaggagcctccattaactcctgttcctcttaaacgtgctgaatttgctggcgatgatgtacaggtcgagagtacagaagaagagcaggagtcaggggcaatggagtttgaagatggtgactttgatgagcccatggaagttgaagaggtggacctggagcctatggctgccaaggcttgggacaaagagagtgagccagcagaggaagtgaaacaagaggcggattctgggaaagggaccgtgtcctacttaggaagttttctcccggatgtctcttgttgggacattgatcaagaaggtgatagcagtttctcagtgcaagaagttcaagtggattccagtcacctcccattggtaaaaggggcagatgaggaacaagtattccacttttattggttggatgcttatgaggatcagtacaaccaaccaggtgtggtatttctgtttgggaaagtttggattgaatcagccgagacccatgtgagctgttgtgtcatggtgaaaaatatcgagcgaacgctttacttccttccccgtgaaatgaaaattgatctaaatacggggaaagaaacaggaactccaatttcaatgaaggatgtttatgaggaatttgatgagaaaatagcaacaaaatataaaattatgaagttcaagtctaagccagtggaaaagaactatgcttttgagatacctgatgttccagaaaaatctgagtacttggaagttaaatactcggctgaaatgccacagcttcctcaagatttgaaaggagaaactttttctcatgtatttgggaccaacacatctagcctggaactgttcttgatgaacagaaagatcaaaggaccttgttggcttgaagtaaaaagtccacagctcttgaatcagccagtcagttggtgtaaagttgaggcaatggctttgaaaccagacctggtgaatgtaattaaggatgtcagtccaccaccgcttgtcgtgatggctttcagcatgaagacaatgcagaatgcaaagaaccatcaaaatgagattattgctatggcagctttggtccatcacagttttgcattggataaagcagccccaaagcctccctttcagtcacacttctgtgttgtgtctaaaccaaaggactgtatttttccatatgctttcaaagaagtcattgagaaaaagaatgtgaaggttgaggttgctgcaacagaaagaacactgctaggttttttccttgcaaaagttcacaaaattgatcctgatatcattgtgggtcataatatttatgggtttgaactggaagtactactgcagagaattaatgtgtgcaaagctcctcactggtccaagataggtcgactgaagcgatccaacatgccaaagcttgggggccggagtggatttggtgaaagaaatgctacctgtggtcgaatgatctgtgatgtggaaatttcagcaaaggaattgattcgttgtaaaagctaccatctgtctgaacttgttcagcagattctaaaaactgaaagggttgtaatcccaatggaaaatatacaaaatatgtacagtgaatcttctcaactgttatacctgttggaacacacctggaaagatgccaagttcattttgcagatcatgtgtgagctaaatgttcttccattagcattgcagatcactaacatcgctgggaacattatgtccaggacgctgatgggtggacgatccgagcgtaacgagttcttgttgcttcatgcattttacgaaaacaactatattgtgcctgacaagcagattttcagaaagcctcagcaaaaactgggagatgaagatgaagaaattgatggagataccaataaatacaagaaaggacgtaagaaagcagcttatgctggaggcttggttttggaccccaaagttggtttttatgataagttcattttgcttctggacttcaacagtctatatccttccatcattcaggaatttaacatttgttttacaacagtacaaagagttgcttcagaggcacagaaagttacagaggatggagaacaagaacagatccctgagttgccagatccaagcttagaaatgggcattttgcccagagagatccggaaactggtagaacggagaaaacaagtcaaacagctaatgaaacagcaagacttaaatccagaccttattcttcagtatgacattcgacagaaggctttgaagctcacagcgaacagtatgtatggttgcctgggattttcctatagcagattttacgccaaaccactggctgccttggtgacatacaaaggaagggagattttgatgcatacgaaagagatggtacaaaagatgaatcttgaagttatttatggagatacagattcaattatgataaacaccaatagcaccaatctggaagaagtatttaagttgggaaacaaggtaaaaagtgaagtgaataagttgtacaaactgcttgaaatagacattgatggggttttcaagtctctgctactgctgaaaaaaaagaagtacgctgctctggttgttgagccaacgtcggatgggaattatgtcaccaaacaggagctcaaaggattagatatagttagaagagattggtgtgatcttgctaaagacactggaaactttgtgattggccagattctttctgatcaaagccgggacactatagtggaaaacattcagaagaggctgatagaaattggagaaaatgtgctaaatggcagtgtcccagtgagccagtttgaaattaacaaggcattgacaaaggatccccaggattaccctgataaaaaaagcctacctcatgtacatgttgccctctggataaattctcaaggaggcagaaaggtgaaagctggagatactgtgtcatatgtcatctgtcaggatggatcaaacctcactgcaagtcagagggcctatgcgcctgagcagctgcagaaacaggataatctaaccattgacacccagtactacctggcccagcagatccacccagtcgtggctcggatctgtgaaccaatagacggaattgatgctgtcctcattgcaacgtggttgggacttgaccccacccaatttagagttcatcattatcataaagatgaagagaatgatgctctacttggtggcccagcacagctcactgatgaagagaaatacagggactgtgaaagattcaaatgtccatgccctacatgtggaactgagaatatttatgataatgtctttgatggttcgggaacagatatggagcccagcttgtatcgttgcagtaacatcgattgtaaggcttcacctctgacctttacagtacaactgagcaacaaattgatcatggacattagacgtttcattaaaaagtactatgatggctggttgatatgtgaagagccaacctgtcgcaatcgaactcgtcaccttccccttcaattctcccgaactgggcctctttgcccagcctgcatgaaagctacacttcaaccagagtattctgacaagtccctgtacacccagctgtgcttttaccggtacatttttgatgcggagtgtgcactggagaaacttactaccgatcatgagaaagataaattgaagaagcaattttttacccccaaagttctgcaggactacagaaaactcaagaacacagcagagcaattcttgtcccgaagtggctactccgaagtgaatctgagcaaactcttcgctggttgtgccgtgaaatcctaagggaatcccaggagtaaccaaggagggggtagttgaaaaatcccagcttcctctgtgcctccactctggccctaaatgctcctccagcatctgtttctcccttgggactgtgtctcatgtttgtgtgaatgtagaccaggaaagggggctgcaaaaatgttgagtctaatgttcgtaagcatcatagaaattcctgtcttcatattaagatgtactgctttaaaacacaactccagagcccctccccaagctcccctccccaagctcctgaagacccggtttctgagggagggaaattgctacttggattgagagtagctggaatgtaagtgaccccaggctttgcctcagggcctttagcctatgtcccccccacataaagagagcttctcagagcctgactgaagagctgacgttttgctttttcatatgccaattaaacccggtctaaatccaaatgcttctccagccatccaggagtggctgtccttttcagtcttgtcttttatataggtagctgagggggaagatttagaagccttgcactcactaaatagattaaacagagcaggcttgtttgttgaattgctccaaagtccaacagacacacactgagcaggtgttttacactcacattccctttttgccccttaaatagaaagtgcaggtaaaggtttatacaacaagaaagcacattgaaaataatttgatactctaacaatccattaacatgtgtaggggttacggtgaggatcactgtgttgtattcagaaaaacggggagagggatgcttaattggccctggcgcttgctatttttttctcatttcttcacaataggaccgtctttggcagcagcaaaatgtatttcagtatggcagtctttcctctcttacattattggtaagattatactaacaaaatgtttccccttgtacaattatgctgtgtttttaaaaaacattgacctgtgtgtttttataaaagaaaaagtatgttgtgccttcttcttaagaataaagttttctaaagggaaa

SEQ ID NO: 1711 - DNA, 1259 bp, Homo sapiens
ccggagctgggttgctcctgctcccgtctccaagtcctggtacctccttcaagctgggagagggctctagtccctggttctgaacactctggggttctcgggtgcaggccgccatgagcaaacggaaggcgccgcaggagactctcaacgggggaatcaccgacatgctcacagaactcgcaaactttgagaagaacgtgagccaagctatccacaagtacaatgcttacagaaaagcagcatctgttatagcaaaatacccacacaaaataaagagtggagctgaagctaagaaattgcctggagtaggaacaaaaattgctgaaaagattgatgagtttttagcaactggaaaattacgtaaactggaaaagattcggcaggatgatacgagttcatccatcaatttcctgactcgagttagtggcattggtccatctgctgcaaggaagtttgtagatgaaggaattaaaacactagaagatctcagaaaaaatgaagataaattgaaccatcatcagcgaattgggctgaaatattttggggactttgaaaaaagaattcctcgtgaagagatgttacaaatgcaagatattgtactaaatgaagttaaaaaagtggattctgaatacattgctacagtctgtggcagtttcagaagaggtgcagagtccagtggtgacatggatgttctcctgacccatcccagcttcacttcagaatcaaccaaacagccaaaactgttacatcaggttgtggagcagttacaaaaggttcattttatcacagataccctgtcaaagggtgagacaaagttcatgggtgtttgccagcttcccagtaaaaatgatgaaaaagaatatccacacagaagaattgatatcaggttgatacccaaagatcagtattactgtggtgttctctatttcactgggagtgatattttcaataagaatatgagggctcatgccctagaaaagggtttcacaatcaatgagtacaccatccgtcccttgggagtcactggagttgcaggagaacccctgccagtggatagtgaaaaagacatctttgattacatccagtggaaataccgggaacccaaggaccggagcgaatgaggcctgtatcctccctggcagacacaacccaataggagtcttaatttatttcttaacctttgctatgtaagggtctttggtgtttttaaatgattgtttcttcttcatgcttttgcttgcaatgtagtcaataaaacc

SEQ ID NO: 1712 - DNA, 7859 bp, Homo sapiens
cgccaaatttctcccctgaagcagaggtggtagccaacggctccatgtctctgaggagcggcgggcggcggcgcgcggacccaggcgcggatggcgaggccagcagggatgatggcgccacttcctcagtttcggcactcaagcgcctggaacggagtcagtggacggataagatggatttgcggtttggttttgagcggctgaaggagcctggtgagaagacaggctggctcattaacatgcatcctaccgagattttagatgaagataagcgcttaggcagtgcagtggattactactttattcaagatgacggaagcagatttaaggtggctttgccctataaaccgtatttctacattgcgaccagaaagggttgtgagcgagaagtttcatcttttctctccaagaagtttcagggcaaaattgcaaaagtggagactgtccccaaagaggatctggacttgccaaatcacttggtgggtttgaagcgaaattacatcaggctgtccttccacactgtggaggatcttgtcaaagtgaggaaggagatctcccctgccgtgaagaagaacagggagcaggatcacgccagcgacgcgtacacagctctgctttccagtgttctgcagaggggcggtgtcattactgatgaagaggaaacctctaagaagatagctgaccagttggacaacattgtggacatgcgcgagtacgatgttccctaccacatccgcctctccattgacctgaagatccacgtggctcattggtacaatgtcagataccgaggaaatgcttttccggtagaaatcacccgccgagatgaccttgttgaacgacctgaccctgtggttttggcatttgacattgagacgaccaaactgcccctcaagtttcctgatgctgagacagaccagattatgatgatttcctacatgatcgatggccagggctacctcatcaccaacagggagattgtttcagaagatattgaagattttgagttcacccccaagccagaatatgaaggccccttttgtgtcttcaatgaacccgatgaggctcatctgatccaaaggtggtttgaacacgtccaggagaccaaacccaccatcatggtcacctacaacggggacttttttgactggccatttgtggaggcccgggcagcagtccacggtctgagcatgcagcaggagataggcttccagaaggacagccagggggagtacaaggcgccccagtgcatccacatggactgcctcaggtgggtgaagagggacagttaccttcctgtgggcagtcataatctcaaggcggccgccaaggccaagctaggctatgatcccgtggagctagacccggaggacatgtgccggatggccacggagcagccccagactctggccacgtattctgtgtcagatgctgtcgccacttactacctgtacatgaagtacgtccacccattcatctttgctctgtgcaccattattcccatggagcccgacgaggtgctgcggaagggctctggcactctgtgtgaggccttgctgatggtgcaggccttccacgccaacatcatcttccccaacaagcaagagcaggagttcaataagctgacggacgacggacacgtgctggactctgagacctacgtcgggggccacgtggaggccctcgagtctggggttttccgcagcgatatcccttgccggtttaggatgaatcctgccgcctttgacttcctgctgcagcgggttgagaagaccttgcgccacgcccttgaggaagaggagaaagtgcctgtggagcaagtcaccaactttgaagaggtgtgtgatgagattaagagcaagcttgcctccctgaaggacgttcccagccgcatcgagtgtccactcatctaccacctggacgtgggggccatgtaccccaacatcatcctgaccaaccgcctgcagccctctgccatggtggacgaagccacctgtgctgcctgtgacttcaataagcctggagcaaactgccagcggaagatggcctggcagtggaggggcgagttcatgccagccagtcgcagcgaataccatcggatccagcaccagctggagtcagagaagttcccccccttgttcccagaggggccagctcgggcctttcatgaactgtcccgcgaggaacaggcgaaatacgagaagagaaggctggcggattactgccggaaagcctacaagaagatccacatcaccaaggtggaagagcgtctcaccaccatctgccagcgggaaaactccttctacgtggacaccgtgcgtgccttccgggacaggcgttacgagttcaaagggctccacaaggtgtggaaaaagaagctctcggcggccgtggaggtgggcgacgcggctgaggtgaagcgctgcaagaacatggaggtgctgtatgactcgctgcagctggcccacaagtgcatcctgaactccttctatggctatgtcatgcgcaagggggctcgctggtactccatggagatggctggcatcgtctgcttcacaggggccaacatcatcacccaggcacgggagctgatcgagcagattgggaggcccttagagctggacacagatggtatatggtgcgtcctgcccaacagcttcccagaaaattttgtcttcaagacgaccaatgtgaagaagcccaaagtgaccatctcctacccaggcgccatgttgaacatcatggtcaaggaaggcttcaccaatgaccagtaccaggagctggctgagccgtcctcactcacctacgtcacccgctcagagaacagcatcttttttgaggttgatgggccctaccttgccatgattcttccagcctccaaggaagaaggcaagaaattgaagaagaggtatgctgtgttcaatgaagacggttctctggctgagctcaagggctttgaggtcaaacgccgcggggaactgcagctgattaagatcttccaatcctcggtgtttgaggccttcctcaagggcagcacgctggaagaggtgtatggctctgtagccaaggtggctgactactggctggacgtgctgtacagcaaggcagccaacatgcctgactctgagctattcgagctcatctctgagaaccgttccatgtctcggaagctggaagattacggggagcagaagtctacgtccatcagcacagcaaagcgcctggccgagttcctgggagaccagatggtcaaggatgcagggctgagttgccgctacatcatctcccgcaagcccgagggctcccctgtcacggagagggccatcccacttgccattttccaagcagagcccacggtgaggaagcactttctccggaaatggctcaagagctcttcccttcaagactttgatattcgagcaattctggattgggactactacattgagcggctgggaagcgccatccagaagatcatcaccatccctgcggccctgcagcaggtaaagaacccagtgccacgtgtcaaacaccccgactggctgcacaaaaaactgctggagaagaatgatgtctacaagcagaagaagatcagtgagctcttcaccctggagggcaggagacaggtcacgatggccgaggcctcagaagacagtccgaggccaagtgctcctgacatggaggacttcggcctcgtaaagctgcctcacccagcagcccctgtcactgtgaagaggaagcgagttctttgggagagccaggaggagtcccaggacctcacgccgactgtgccctggcaggaaatcttggggcagcctcccgccctgggaaccagccaggaggaatggcttgtctggctccggttccacaagaagaagtggcagctgcaggcccggcagcgcctcgcccgcaggaagaggcagcgtctggagtcggcagagggtgtgctcaggcccggggccatccgggatggtcctgccacggggctggggagcttcttgcgaagaactgcccgcagcatcctggaccttccgtggcagattgtgcagatcagcgagaccagccaggccggcctgttcaggctgtgggcgctcgttggcagtgacttgcactgcatcaggctgagcatcccccgtgtgttctacgtgaaccagcgagtcgctaaagcggaggagggtgcttcgtatcgcaaggtaaatcgggtccttcctcgctccaacatggtctacaatctctatgagtattcagtgccagaggacatgtaccaggaacacatcaacgagatcaacgctgagctgtcagcgccagacatcgagggcgtatatgagactcaggttccgttactgttccgggccctggtgcacctgggctgtgtgtgtgtggtcaataaacagctggtgaggcacctttcaggctgggaagcagagacctttgctcttgagcacctggagatgcgctctctggcccagttcagctacctggaaccagggagtatccgccatatctacctgtaccaccacgcacaggcccacaaagcgctcttcgggatcttcatcccctcacagcgcagggcatccgtctttgtgctggacactgtgcgcagcaaccagatgcccagccttggcgccctgtactcagcagagcacggcctcctcctggagaaggtgggccctgagctcctgccaccccccaaacacaccttcgaagttcgggcagaaactgacctgaagaccatctgcagagccatccagcgattcctgctcgcctacaaggaggagcgccgggggcccacactcatcgctgttcagtccagctgggagctgaagaggctggccagtgaaattcctgtcttggaggaattcccactggtgcctatctgtgtggctgacaagatcaactatggggtcctggactggcagcgccatggagcccggcgcatgatccgtcactacctcaacctggacacctgcctgtcgcaggccttcgagatgagcaggtactttcacattcccattgggaacctaccagaggacatctccacattcggctccgacctcttctttgcccgccacctccagcgccacaaccacctgctctggctgtcccctacagcccgccctgacctgggtggaaaggaggctgatgacaactgtcttgtcatggagttcgatgaccaagccactgttgagatcaacagttcaggctgttactccacagtgtgtgtggagctggaccttcagaacctggccgtcaacaccattctccagtctcaccatgtcaacgacatggagggggccgacagcatggggatcagcttcgacgtgatccagcaggcctccctggaggacatgatcacgggtggtcaggctgccagtgccccggccagctacgatgagacagccctgtgctctaacaccttcaggatcctgaagagcatggtcgtgggctgggtgaaggagatcacccagtaccacaacatctatgcagacaaccaggtgatgcacttctaccgctggcttcggtcgccatcctctctgcttcatgaccctgccctgcaccgcacactccacaacatgatgaagaagctcttcctgcagctcatcgctgagttcaagcgcctggggtcatcagtcatctacgccaacttcaaccgcatcatcctctgtacaaagaagcgccgtgtggaagatgccatcgcttacgtggagtacatcaccagcagcatccattcaaaggagaccttccattctctgacaatttctttctctcgatgctgggaatttcttctctggatggatccatctaactatggcggaatcaaaggaaaagtttcatctcgtattcactgtggactgcaagactcccagaaagcagggggagcagaggatgagcaggaaaatgaggacgatgaggaggaaagagatggggaggaggaggaagaggcggaggaatccaacgtggaggatttactggaaaacaactggaacattttgcagtttttgccacaggcagcctcctgccagaactacttcctcatgattgtttcagcgtacatcgtggccgtgtaccactgcatgaaggacgggctgaggcgcagtgctccagggagcacccccgtgaggaggaggggggccagccagctctcccaggaggccgagggggcggtcggagcccttcccggaatgatcaccttctctcaggattatgtcgcaaatgagctcactcagagcttcttcaccatcactcagaagattcagaagaaagtcacaggctctcggaactccactgagctctcagagatgtttcctgtcctccccggttcccacttgctgctcaataaccctgccctggagttcatcaaatacgtgtgcaaggtgctgtccctggacaccaacatcacaaaccaggtgaataagctgaaccgagacctgcttcgcctggtggatgtcggcgagttctccgaggaggcccagttccgagacccctgccgctcctacgtgcttcctgaggtcatctgccgcagctgtaacttctgccgcgacctggacctgtgtaaagactcttccttctcagaggatggggcggtcctgcctcagtggctctgctccaactgtcaggcgccctacgactcctctgccatcgagatgacgctggtggaagttctacagaagaagctgatggccttcaccctgcaggacctggtctgcctgaagtgccgcggggtgaaggagaccagcatgcctgtgtactgcagctgcgcgggagacttcgccctcaccatccacacccaggtcttcatggaacagatcggaatattccggaacattgcccagcactacggcatgtcgtacctcctggagaccctggagtggctgctgcagaagaacccacagctgggccattagccagccccgggccccgggtgcctctgcgtccgtgccaggcctcctgatgccaaggccacatccccgtgcttccagtgaccagaccactgaccaccctgactgtccaaacctgtgaccccaggccagggaacggggaggaaaccaaagaaaaccattttcagggagctcagacgtcacaggagggagcgggagcaggatgtggccctggcctcgccagagcacctgaagaagcaggccgtgagcgaggctgcgagtgccctgggcgccgtttctcacgcagtgaatgcttttccaggcctctgttgcttcctgcaccacacctggtggggtgggagcgtcctctaggtgcccctagttctttgtcctgcctcccagagggaggaaaagcccctgggggcttctggctccctgagattgggctctgagacgagacgggttcccaaggccctggtggggctggagtctcacctgtttgcatggagaaatgggctggccccacagcctcacaggagcagtttgtgggctggtttccccaggaatccagaccctaacccgtgagaatctggattttggcttgtgagccctgcttatttggagccgggtctagagggaaccctctatcagcctcaggaaaacaagacctctgtgcacctcacttttggctcactgcagcccttgtccttcacctccacacaggaccagctggaagcagaaagaagaaaggccaatttcacagggcaccaaacaagtatgaaatgtaaatcagaaatgcagacaccccagacgagagcctcacaggagggagggggccccacaggctccccaggaggctcgtgtctttggcccagagccagccttagtttgtccctgccatctactgtctgaggccatcgctgctacactttgtttttatttgtatttcatactgaagtttcaaaaaaaaaaaaaaaaaaa

SEQ ID NO: 1713 - DNA, 1690 bp, Homo sapiens
gccaaatcgcaaatatggcgccggagcggctgcggagccgggcgctctccgccttcaagttgcggggcttgctgctccgtggtgaagctattaagtacctcacagaagctcttcagtctatcagtgaattagagcttgaagataaactggaaaagataattaatgcagttgagaagcaacccttgtcatcaaacatgattgaacgatctgtggtggaagcagcagtccaggaatgcagtcagtctgttgatgaaactatagagcacgttttcaatatcataggagcatttgatattccacgctttgtgtacaattcagaaagaaaaaaatttcttcctctgttaatgaccaaccaccctgcaccaaatttatttggaacaccaagagataaagcagagatgtttcgtgagcgatataccattttgcaccagaggacccacaggcatgaattatttactcctccggtgataggttctcaccctgatgaaagcggaagcaaattccagcttaaaacaatagaaaccttattgggtagtacaaccaaaatcggagatgcgattgttcttggaatgataacgcagttaaaagagggaaaattttttctggaagatcctactggaacagtccaactagaccttagtaaagctcagttccatagtggtttatacacagaggcatgctttgtcttagcagaaggttggtttgaagatcaagtgtttcatgtcaatgcctttggatttccacccactgagccctctagtactactagggcatactatggaaatattaatttttttggaggtccttctaatacatctgtgaagacttctgcaaaactaaaacagctagaagaggagaataaagatgctatgtttgtgtttttatctgatgtttggttggaccaggtggaagtattggaaaaacttcgcataatgtttgctggttattcaccagcacctccaacctgctttattctgtgtggtaatttttcatctgcaccatatggaaaaaatcaagttcaagctttgaaagattccctaaaaactttggcagatataatatgtgaatacccagatattcaccaaagtagtcgttttgtgtttgtacctggtccagaggatcctggatttggttccatcttaccaaggccaccacttgctgaaagcatcactaatgaattcagacaaagggtaccattttcagtttttactactaatccttgcagaattcagtactgtacacaggaaattactgtcttccgtgaagacttagtaaataaaatgtgcagaaactgcgtccgttttcctagcagcaatttggctattcctaatcactttgtaaagactatcttatcccaaggacatctgactcccctacctctttatgtctgcccagtgtattgggcatatgactatgctttgagagtgtatcctgtgcccgatctacttgtcattgcagacaaatatgatcctttcactacgacaaataccgaatgcctctgcataaaccctggctcttttccaagaagtggattttcattcaaagttttttatccttctaataagacagtagaagatagcaaacttcaaggcttttgagattcttaaagatcatctgaagaaaattcatcagttttctgcttaactctatatcttatgtgattctgatattacaataaaattatggtaaa

SEQ ID NO: 1714 - DNA, 5968 bp, Homo sapiens
gactttggccggatgactccccagggtcggcatcagcgtgggactgggaacaggtgaagggaaacagaagagagcctgagaagaccgctctcctccgatcctaattgactgagccaatgagagccaaagaggtcacatgctcaactgggcggggagcgggtttccacctgcggcatctttcgcgagcggggagatgagtggggcggaatatgggagaaagggagggcccgccacgctctggctggacacggccttaatcggcccgttcactcgacgtttttggttctacgttgaccccgagaaaccgaaaccgcagggcctagggcgggtggaacgagagggaactacatttcccagcaggctgcggaaacgggactgcggccactacttccggcgtgtaccgagagactggcgtccggcgtgtaccgagagactggcgtccggtgtgcaggtggccacatggatcctggcagccggtggcggaacctgcccagcgggcctagcctaaagcacttgactgacccctcttatggaatcccgcgggaacagcaaaaggcagcgttgcaggagctgacgcgggcgcacgtggagtccttcaactacgctgtgcacgagggtctcggcctcgcggtgcaggctatacctccctttgaatttgctttcaaagatgagcgtatctcttttactattctggatgctgttatcagtccacctacagttccaaaagggaccatctgcaaagaggccaatgtttatccagcagaatgccggggccgaaggagtacctaccgtgggaagttgacagctgatatcaactgggcagtgaatggaatctcaaaaggaatcattaagcagtttcttggctatgttcccatcatggtgaaatccaagctttgcaacttacgtaaccttcccccacaagccctcattgagcaccatgaggaggcagaggaaatggggggctattttataatcaatggcattgaaaaagtcatccgaatgttgattatgcctcggagaaattttcccattgcaatgataagaccaaaatggaaaaccagagggcctggttatactcagtatggagtttcaatgcactgtgtgagggaagaacattccgctgtcaatatgaacctccactacttggaaaatggcacagttatgttgaactttatttaccgaaaagaactgttctttcttcctttgggatttgcacttaaggcacttgtcagcttttctgattatcagatctttcaggagctcatcaaaggaaaagaggatgattctttccttaggaactctgtttctcagatgttaaggattgtaatggaagagggttgttcgacacaaaaacaggtccttaactacctaggtgaatgcttcagagtaaaactcaatgttcctgactggtacccaaatgagcaagctgcggagttcctgtttaaccagtgcatctgtatccacttgaaatccaatactgaaaagttttatatgctttgtctcatgacgcgaaagctctttgctttagccaaaggagagtgcatggaggacaatcctgatagtttggtgaaccaggaagtcctcacaccgggtcagctcttccttatgttcctgaaggaaaaactggaaggttggttagtgtctattaaaatagcttttgataagaaggctcagaagaccagtgtttccatgaacactgacaatttgatgaggatttttacaatgggcatagaccttacaaaaccatttgaatacctttttgctactgggaatctgcgttctaaaacaggtcttggcctcctacaagattctggactttgtgttgtggctgacaagctgaacttcatacgctacctctcccatttccgctgcgtgcacagaggggctgattttgccaagatgaggaccaccacagtacgcaggctgctgccagagtcctggggcttcctttgtcccgtgcataccccagacggggagccctgtggcctgatgaaccacctaactgccgtatgtgaggttgtcacacagtttgtgtatacggcatctattccagctttactgtgcaacttgggggtcactcccattgatggagctccccaccgatcatacagtgagtgctaccctgtcctgctggacggtgtcatggttggctgggtggataaggatcttgctccaggcatcgcagattctcttcgtcattttaaggtgttgagagagaaaagaattcctccctggatggaagtggtccttatacccatgacaggaaaaccaagtctgtacccaggattgttcctttttaccactccttgtagactggtacggcctgtgcagaacttagcattgggcaaagaagagctaattggaactatggaacagatcttcatgaatgtcgctatctttgaggatgaagtttttgctggagttaccacacaccaggaactctttccacacagcctgctgagtgtgattgccaacttcatccctttctctgatcacaaccagagtccacggaacatgtaccaatgccagatgggtaagcaaactatgggctttccacttctcacttatcaagaccgatcggataacaaactgtatcgtcttcagactcctcagagtcccttggtgagaccctccatgtatgattattatgacatggataactatccaattgggaccaatgccatcgttgctgtgatttcttacactggctatgatatggaagatgccatgattgtgaataaggcctcttgggaacgaggctttgcccatggaagtgtctacaagtctgagttcatagacctctctgaaaaaattaaacaaggagatagtagcctggtgtttggcatcaaacctggtgacccacgcgttctgcagaagttagatgacgatggattgccgtttataggagcaaaactgcagtacggagatccgtattacagctacctcaacctcaacaccggggaaagttttgtgatgtactataagagtaaagaaaattgtgttgtggataacatcaaagtgtgcagtaatgacactgggagtggaaaattcaagtgtgtttgcatcactatgagagtgcctcggaacccaactatcggagataaatttgccagtcgccatgggcagaagggcattttaagcagattgtggccggctgaggacatgccttttactgagagtgggatggtcccagacattctgttcaatccccatggttttccatcccgcatgaccattgggatgttaattgagagtatggccgggaagtctgcagctttgcatggtctctgccatgatgctacacccttcatcttctcagaggagaactcggccttagaatactttggtgagatgttaaaggctgctggctacaatttctatggcaccgagaggttatatagtggcatcagtgggctagaactggaagcagacatcttcataggagtggtttattatcagcgcttacgccatatggtctcagacaaatttcaagtaaggacaactggagcccgagacagagtcaccaaccagcctattgggggaagaaatgtccagggtggaatccgttttggggagatggaacgggatgcgcttttagctcatggtacatcttttctccttcatgaccgcctcttcaactgctcagatcggtcggtagcccatgtgtgtgtgaagtgtggcagtttactctctccactgttggagaagccacccccttcttggtctgccatgcgcaacagaaaatacaactgtactctgtgtagtcgcagtgacactatcgatactgtttctgtgccttatgtttttcggtattttgtagctgaactggcagctatgaacatcaaagtgaaactggatgttgtttaacttgatgttgaccttttggattaagaggactatcagattaaagcaaaatgtaattttaattcaatgaagatatcattaccaggttactcttgagatttttcaacggtgttagaactctcaaccaagacctgaaaaccaagtatgcaaggtttctgaatctctctggtagattaactattgacaatgattttctgttatctttgttcaaaaagttcatgtcttctcaaaatatgaaatattgataaatggaagagcatacggtgacaagtctcctttccaaccccaggttccctacaccctgctctcagcaggcagtgagtgtcacacacctgttaatccatcttgagcaggacagtactatacaaatagaatgcaagctgtaatgtaattttatattttcttatagccacgttgaagtaaaaacaaacaggtacagtgttttttaccagctttatagaagtacagttgttacatatttaatgaatacaatttgatgggtctgactatatgcacacacctttgataccatcaccacaatcagggtaataaacatacctgtcatctccacaagtttcctcctgcccctttgttttttgctttttggttgctgttgagtttttgttttgtcttctgtggtaagaacacttaactcaagacctaccctcttaacaaatctttaagtgcacgatatagtattgttaattccaggcaccatgttgtacaacagatctttagaccttacttgtcttgcataactgaagctttatacctgttgaacaactctccatttccctggcccctagcaaccacccttctaccctgtttctatgagtttgactattacagatatctcatatagtgggatcatgcaatatttgtcctgtgactggcttatttcacttagcatagtgaaataagattcatccattttggaagccaggcatggtgctgtgcatctatagtccctgctatttgagaggctgaggtgggaggatcatttgagtgcaggagttcaaggacagcctgggtaatataggaagaccctgtcttgaagaccctgacctcaagtgatccacccacctcggcctccgaaagtgctaggattacaggtgtgagccactgtgcctggcctccggtgagtattttatatttagtctacacttccatacttggcttttttctgcttttatattgatctgctttcatagcagtgtgtagagtgccacttatgttttctttcttgtgtacagtattttattgtatggatttaccatcccctgtgtatttaagttgttccattctttggccattataacttttttctgcaaatattctggtgacttatctttggccattataaactgttgataatagatcatcttgtatatacttctgcaattataagatgttttttgatgatgaaagctttcctaaggtaattctttcctgagtttggttcagatggtctgtcactaattataaggcagataggaacagacagaaaaatctatcatttcaagataggcttagcaggatgggcgcagtggctcacgccactaatcccaacattttaggaggcctaggcaggagcaatcacttgtgcctgggagttctagactagcctgggcgagacttcatctctacaaaaaaagcaacaacgacaaaaaaattagccaagcatagtggcacacccctgtagtcccagctacttgggaggctgaggtgggaggattgcttgaacccaagaggtcgaggctgcagtgagccaagattgtgccactgcactccagcctgggtgacagagcaggaccctgtctctattttataaattaaaaagggctgggtgtggtggctcacacccataatcccaacactttggctcagcagattgcttgaacccaggaattcaagtccaatctgggcaacatggggaaaccccagctctacaaaaaaaattagcctggtgtggtggcacatgcctgtagttccagctactcaggaggctgaggtgggagaatctcctgagcctggaaggtccaggcagtgagccaagattgtgccaccacactccagcctgggcgacagaatgagaccctgtctc

SEQ ID NO: 1715 - DNA, 6732 bp, Homo sapiens
gagagcgcggccgggacggttggagaagaaggcggctccccggaagggggagagacaaactgccgtaacctctgccgttcaggaacccggttacttatttattcgttaccctttttcttcttcctcccccaaaaaccttttccttttcccttctttttttttcctttttgggagctgaaaaatttccggtaagggaaagaagggctcctttcgctccttatttcgccgcctccttccctccgccaccttcccctcctccggctttttcctcccaactcggggaggtccttcccggtggccgccctgacgaggtctgagcacctaggcggaggcggcgcaggctttttgtagtgaggtttgcgcctgcgcaggcgcctgcctccgccatgcacgggggtggccccccctcgggggacagcgcatgcccgctgcgcaccatcaagagagtccagttcggagtcctgagtccggatgaactgaagcgaatgtctgtgacggagggtggcatcaaatacccagagacgactgagggaggccgccccaagcttggggggctgatggacccgaggcagggggtgattgagcggactggccgctgccaaacatgtgcaggaaacatgacagagtgtcctggccactttggccacattgaactggccaagcctgtgtttcacgtgggcttcctggtgaagacaatgaaagttttgcgctgtgtctgcttcttctgctccaaactgcttgtggactctaacaacccaaagatcaaggatatcctggctaagtccaagggacagcccaagaagcggctcacacatgtctacgacctttgcaagggcaaaaacatatgcgagggtggggaggagatggacaacaagttcggtgtggaacaacctgagggtgacgaggatctgaccaaagaaaagggccatggtggctgtgggcggtaccagcccaggatccggcgttctggcctagagctgtatgcggaatggaagcacgttaatgaggactctcaggagaagaagatcctgctgagtccagagcgagtgcatgagatcttcaaacgcatctcagatgaggagtgttttgtgctgggcatggagccccgctatgcacggccagagtggatgattgtcacagtgctgcctgtgcccccgctctccgtgcggcctgctgttgtgatgcagggctctgcccgtaaccaggatgacctgactcacaaactggctgacatcgtgaagatcaacaatcagctgcggcgcaatgagcagaacggcgcagcggcccatgtcattgcagaggatgtgaagctcctccagttccatgtggccaccatggtggacaatgagctgcctggcttgccccgtgccatgcagaagtctgggcgtcccctcaagtccctgaagcagcggttgaagggcaaggaaggccgggtgcgagggaacctgatgggcaaaagagtggacttctcggcccgtactgtcatcacccccgaccccaacctctccattgaccaggttggcgtgccccgctccattgctgccaacatgacctttgcggagattgtcacccccttcaacattgacagacttcaagaactagtgcgcagggggaacagtcagtacccaggcgccaagtacatcatccgagacaatggtgatcgcattgacttgcgtttccaccccaagcccagtgaccttcacctgcagaccggctataaggtggaacggcacatgtgtgatggggacattgttatcttcaaccggcagccaactctgcacaaaatgtccatgatggggcatcgggtccgcattctcccatggtctacctttcgcttgaatcttagcgtgacaactccgtacaatgcagactttgacggggatgagatgaacttgcacctgccacagtctctggagacgcgagcagagatccaggagctggccatggttcctcgcatgattgtcaccccccagagcaatcggcctgtcatgggtattgtgcaggacacactcacagcagtgcgcaaattcaccaagagagacgtcttcctggagcggggtgaagtgatgaacctcctgatgttcctgtcgacgtgggatgggaaggtcccacagccggccatcctaaagccccggcccctgtggacaggcaagcaaatcttctccctcatcatacctggtcacatcaattgtatccgtacccacagcacccatcccgatgatgaagacagtggcccttacaagcacatctctcctggggacaccaaggtggtggtggagaatggggagctgatcatgggcatcctgtgtaagaagtctctgggcacgtcagctggctccctggtccacatctcctacctagagatgggtcatgacatcactcgcctcttctactccaacattcagactgtcattaacaactggctcctcatcgagggtcatactattggcattggggactccattgctgattctaagacttaccaggacattcagaacactattaagaaggccaagcaggacgtaatagaggtcatcgagaaggcacacaacaatgagctggagcccaccccagggaacactctgcggcagacgtttgagaatcaggtgaaccgcattcttaacgatgcccgagacaagactggctcctctgctcagaaatccctgtctgaatacaacaacttcaagtctatggtcgtgtccggagctaaaggttccaagattaacatctcccaggtcattgctgtcgttggacagcagaacgtcgagggcaagcggattccatttggcttcaagcaccggactctgcctcacttcatcaaggatgactacgggcctgagagccgtggctttgtggagaactcctacctagccggcctcacacccactgagttctttttccacgccatggggggtcgtgaggggctcattgacacggctgtcaagactgctgagactggatacatccagcggcggctgatcaagtccatggagtcagtgatggtgaagtacgacgcgactgtgcggaactccatcaaccaggtggtgcagctgcgctacggcgaagacggcctggcaggcgagagcgttgagttccagaacctggctacgcttaagccttccaacaaggcttttgagaagaagttccgctttgattataccaatgagagggccctgcggcgcactctgcaggaggacctggtgaaggacgtgctgagcaacgcacacatccagaacgagttggagcgggaatttgagcggatgcgggaggatcgggaggtgctcagggtcatcttcccaactggagacagcaaggtcgtcctcccctgtaacctgctgcggatgatctggaatgctcagaaaatcttccacatcaacccacgccttccctccgacctgcaccccatcaaagtggtggagggagtcaaggaattgagcaagaagctggtgattgtgaatggggatgacccactaagtcgacaggcccaggaaaatgccacgctgctcttcaacatccacctgcggtccacgttgtgttcccgccgcatggcagaggagtttcggctcagtggggaggccttcgactggctgcttggggagattgagtccaagttcaaccaagccattgcgcatcccggggaaatggtgggggctctggctgcgcagtcccttggagaacctgccacccagatgaccttgaataccttccactatgctggtgtgtctgccaagaatgtgacgctgggtgtgccccgacttaaggagctcatcaacatttccaagaagccaaagactccttcgcttactgtcttcctgttgggccagtccgctcgagatgctgagagagccaaggatattctgtgccgtctggagcatacaacgttgaggaaggtgactgccaacacagccatctactatgaccccaacccccagagcacggtggtggcagaggatcaggaatgggtgaatgtctactatgaaatgcctgactttgatgtggcccgaatctccccctggctgttgcgggtggagctggatcggaagcacatgactgaccggaagctcaccatggagcagattgctgaaaagatcaatgctggttttggtgacgacttgaactgcatctttaatgatgacaatgcagagaagctggtgctccgtattcgcatcatgaacagcgatgagaacaagatgcaagaggaggaagaggtggtggacaagatggatgatgatgtcttcctgcgctgcatcgagtccaacatgctgacagatatgaccctgcagggcatcgagcagatcagcaaggtgtacatgcacttgccacagacagacaacaagaagaagatcatcatcacggaggatggggaattcaaggccctgcaggagtggatcctggagacggacggcgtgagcttgatgcgggtgctgagtgagaaggacgtggaccccgtacgcaccacgtccaatgacattgtggagatcttcacggtgctgggcattgaagccgtgcggaaggccctggagcgggagctgtaccacgtcatctcctttgatggctcctatgtcaattaccgacacttggctctcttgtgtgataccatgacctgtcgtggccacttgatggccatcacccgacacggagtcaaccgccaggacacaggaccactcatgaagtgttcctttgaggaaacggtggacgtgcttatggaagcagccgcacacggtgagagtgaccccatgaagggggtctctgagaatatcatgctgggccagctggctccggccggcactggctgctttgacctcctgcttgatgcagagaagtgcaagtatggcatggagatccccaccaatatccccggcctgggggctgctggacccaccggcatgttctttggttcagcacccagtcccatgggtggaatctctcctgccatgacaccttggaaccagggtgcaacccctgcctatggcgcctggtcccccagtgttgggagtggaatgaccccaggggcagccggcttctctcccagtgctgcgtcagatgccagcggcttcagcccaggttactcccctgcctggtctcccacaccgggctccccggggtccccaggtccctcaagcccctacatcccttcaccaggtggtgccatgtctcccagctactcgccaacgtcacctgcctacgagccccgctctcctgggggctacacaccccagagtccctcttattcccccacttcaccctcctactcccctacctctccatcctattctccaaccagtcccaactatagtcccacatcacccagctattcgccaacgtcacccagctactcaccgacctctcccagctactcacccacctctcccagctactcgcccacctctcccagctattcgcccacctctcccagctactcacccacttcccctagctattcgcccacttcccctagctactcgccaacgtctcccagctactcgccgacatctcccagctactcgccaacttcacccagctattctcccacttctcccagctactcacctacctctccaagctattcacccacctcccccagctactcacccacttccccaagttactcacccaccagcccgaactattctccaaccagtcccaattacaccccaacatcacccagctacagcccgacatcacccagctattcccctactagtcccaactacacacctaccagccctaactacagcccaacctctccaagctactctccaacatcacccagctattccccgacctcaccaagttactccccttccagcccacgatacacaccacagtctccaacctataccccaagctcacccagctacagccccagttcgcccagctacagcccaacctcacccaagtacaccccaaccagtccttcttatagtcccagctccccagagtataccccaacctctcccaagtactcacctaccagtcccaaatattcacccacctctcccaagtactcgcctaccagtcccacctattcacccaccaccccaaaatactccccaacatctcctacttattccccaacctctccagtctacaccccaacctctcccaagtactcacctactagccccacttactcgcccacttcccccaagtactcgcccaccagccccacctactcgcccacctcccccaaaggctcaacctactctcccacttcccctggttactcgcccaccagccccacctacagtctcacaagcccggctatcagcccggatgacagtgacgaggagaactgagggcacgtggggtgcggcagcgggctagggcccagggcagcttgcccgtgctgccgtgcagttcttgcctccctcacggggcgtcacccccagcccagctccgttgtacataaataccttgtgacagagctcccggtgaacttctggatcccgtttctgatgcagattcttgtcttgttctccacttgtgctgttagaactcactggcccagtggtgttctacctcctaccccacccaccccctgcctgtccccaaattgaagatccttccttgcctgtggcttgatgcggggcgggtaaagggtattttaacttaggggtagttcctgctgtgagtggttacagctgatcctcgggaagaacaaagctaaagctgccttttgtctgttattttatttttttgaagtttaaataaagtttactaattttgacc

SEQ ID NO: 1716 - DNA, 3748 bp, Homo sapiens
cttttgatttcaagagttaggagctcgagaaccgtttggcaatatgtacgacgcggatgaggatatgcaatatgatgaggatgatgatgaaatcaccccggatttgtggcaagaagcatgctggattgtaatcagttcctattttgacgagaaaggcttggttagacaacagctggattcttttgatgagtttattcagatgtctgttcaaagaattgtggaagacgctcctcctatagacctacaggctgaagctcagcatgctagtggagaagttgaagaaccgccacgatatttgctgaagtttgaacaaatttatctttccaagcctacccattgggaaagagatggtgctccttcaccaatgatgcccaatgaagctagattaaggaatctcacgtattctgctccgctttatgttgatataacaaaaacagtcattaaagaaggtgaagaacaacttcagactcagcatcagaaaacttttataggaaaaattccaattatgttgcggtcaacttactgccttttgaatggcttgacagatcgtgatctttgtgagttaaatgaatgccctttggatcctggtggctatttcattattaatggatcagaaaaggttctgattgcccaagagaaaatggcaacaaacacagtttatgtgtttgccaaaaaggattctaaatatgcctacacaggagagtgtagatcatgtcttgagaattcttcccgacccaccagtactatatgggttagcatgctggcaagaggaggacagggtgccaagaagagtgctattggtcagcgcattgtggcaactctaccatatatcaagcaagaagttcccatcattattgtgttcagagcattaggttttgtgtccgacagagatattttagaacatattatttatgattttgaagatccagagatgatggaaatggttaaaccttctctcgatgaagcttttgtcatccaagaacagaatgttgcactaaatttcattggttcacgaggagcaaagcctggtgttactaaagagaaaagaattaaatatgcaaaggaagttttacaaaaagaaatgctccctcatgttggtgtcagtgatttttgtgagaccaaaaaagcctatttcttgggatacatggttcataggttacttctggcagctttgggtagaagagaactagatgacagagatcactatggaaacaagagattggatcttgctgggccgctgcttgcattcttatttagaggtatgtttaagaatttgcttaaagaagtgcggatctatgcacagaaatttattgatcgaggaaaggattttaacttggagttggcaattaaaacacggatcatatctgatggcctaaaatactctttagctactggaaactggggtgatcaaaagaaagctcatcaagccagagctggagtatctcaggtgttaaaccgcctgacttttgcgtctactctttctcacctgcgtcgtttaaattctcctattggtagagacggcaagctagcaaaaccaagacagttgcataatacgttgtggggaatggtgtgtcctgccgagaccccagagggccatgctgtaggacttgtgaagaatttagccttgatggcgtatatttcagttggatctcaaccatctccaattctggaatttttagaagaatggagtatggaaaatttagaagaaatttctcctgcagctattgctgatgcaaccaagatttttgttaatggctgctgggttggaatacataaagatcccgaacaacttatgaacaccctaaggaaattgagacgtcagatggacatcattgtgtctgaagtttctatgatcagagatattcgagagagggagattcggatctatacggatgcaggccgtatttgtagaccacttctgattgtggaaaaacaaaagctacttttgaagaagaggcatattgaccaattgaaagagagagaatataacaactatagttggcaggatcttgtggccagtggggtagtggagtatattgataccctggaagaagaaacagtgatgcttgcaatgactccagatgatttacaggagaaagaagtagcttattgttccacatatacacactgtgagattcatccctcaatgatccttggtgtctgtgcatctattattccctttcctgatcataaccagtcccctagaaacacataccagtctgctatgggtaagcaggctatgggagtttacatcaccaacttccatgttcgcatggacacattggcccatgttctctattatcctcaaaagccacttgtgactacacggtctatggaatatctacgatttagagagctgccagcaggcatcaactcaattgtggccattgcatcatacactggatataatcaggaagactctgttatcatgaatcgttcagctgtagaccgcggcttcttcaggtctgttttctatcgctcatacaaagaacaggagtctaaaaaaggatttgatcaagaagaagtttttgagaagcctacacgtgaaacatgccagggcatgaggcatgccatttacgacaagctggatgatgatggtttgatagctccaggggttcgtgtatcaggagatgatgttattataggcaaaacagtcaccttgcctgaaaatgaagatgaattggagagcaccaatagacgctataccaagagagactgtagcacttttctcagaactagtgagacgggcattgtggatcaggttatggtaactctcaatcaggaaggatataaattttgtaaaataagggtacgctctgttaggattccacagattggagacaaatttgctagtcgacatggtcaaaagggtacttgtggtattcagtatagacaagaggatatgcctttcacctgtgaaggtatcacccctgatatcatcatcaatccccatgccatcccctctcgtatgactattggtcacttaattgaatgccttcaagggaaggtatcggctaacaagggtgaaattggtgatgccactccatttaatgatgctgttaacgtgcagaagatttctaatcttttatctgattatggctatcatctcagaggaaatgaggtcctgtacaatgggttcactggtcgaaaaatcacatcacaaatatttattggccccacttattaccagcgtttgaagcatatggtggatgataagattcactctcgtgctaggggacctattcagatcctcaatagacagcccatggagggtagatctcgtgatggtggcctgcgttttggagaaatggaacgagattgtcagattgcccatggagcagcccagtttttaagggaaagattgtttgaggcatcagatccatatcaggttcatgtttgcaatctttgtggaataatggcgattgccaacaccaggacccatacatatgaatgcaggggctgccgcaataaaacccagatttctttggtgcgaatgccttacgcatgcaaactattgtttcaggaacttatgtctatgagtattgcaccgcgaatgatgagtgtttagctattttacaggagtcaacaagataattaaatatcttggtgtcttgtttctattgtgtggctttataaaaatgacaaatatgtactgtgttgtgataaaaagtattttatttgtttaatgatatgcatgcttttcttctgtaaatatataataaatttttgtagatagtcttgatgtgtg

SEQ ID NO: 1717 - DNA, 1822 bp, Homo sapiens
ggcctcgctgactgacttccggtgttggcggtggcgccgcgcagtcaccgcggagcagacgcggaggctggtggcccctgggcgagatgccgtacgccaaccagcctaccgtgcggatcacggagctcactgacgagaatgtcaagttcatcatcgagaacaccgacctggcggtggccaattcgattcggagggtcttcatcgctgaggttcccataatagccattgactgggttcagattgatgccaattcctcagttcttcatgatgaattcattgctcacaggcttggattaattcccctcattagtgatgacattgtggacaagctgcagtactctcgggactgcacatgtgaggagttctgccccgagtgctcggtggagttcaccctcgatgtgcggtgcaatgaagaccagacgcgacatgtcacgtctcgagacctcatctccaacagcccccgggtcattccggtgacatcccggaaccgagataatgaccccaatgactacgtggagcaggatgacatcctcatcgtcaagttgagaaagggccaggagctgagacttcgagcctatgccaaaaagggctttggcaaggagcatgccaagtggaaccctactgcaggggtggcttttgaatacgatccagacaatgccctgaggcacacagtgtaccccaagcccgaggaatggccaaagagtgagtactcggagctggatgaggatgagtcgcaggctccctatgaccccaacggcaagccagaaaggttttactacaatgtggagtcctgtggctctctgcgtcctgaaaccattgtcctgtcagccctctcaggattgaagaagaaactgagtgatttacaaactcaattaagccacgagatccagagtgatgtgctaaccataaattaactgcagcttgcctgcttcagcaaaaacggagattcaggccagcagctggatatgggggtctctcttcagactcttctcgtttctgagaatctagtctactgttggttgagcttcttggcaggacatcagtaccaactagaagtgggtcatagatagattaccagggatgcagtggtgtttaggcaggataggtctttactggccctgactgctgttaataattggcagcagtgctccccagatcccagaaggtccctgctggagtgtttccagtgcacctgtagggaaccaactagacttctctcctggttagtccagctctttactctaaaccctttctgtccaaaatgagtcattttcagttgtaccttagatgtctggtgttgaggatcaagtgccatagcctttattcagggggcctataaacccttccagttcttgccccagggctggcctgctagcgcttcaaattcccaggtgtccctaatttgagaagtaaccttttggaatagcattagaccctggctgtcccctccccaccaaataaacatgatatttcattctctgtccagcagtcatgaaccccttcacctccaatgacctgatcatttagtttggtgggggtgggggtgggggtgggggtggaagcagccgcaggagcaagggcccctcccacatacacaggaggagtatttcatttctccttaatgaaggctctggccctaacccctcagcactgtctccagataggaacatgcacaaagcagttaattaggcagcctggagaaaaccagagatccagtacagaaaggaaaggatatttattgattaacagaagttgtctttttaaaagtgtttatttttggcaataaagagcacaacataatctcaaaaaaaaaaaaaaaaaa

SEQ ID NO: 1718 - DNA, 1909 bp, Homo sapiens
gctggtggtggcgcgcggcgcggcgcggcgatggcggcgggtggcagcgatccgcgggctggcgacgtagaggaggacgcctcacagctcatctttcctaaagagtttgaaacagctgagacacttctaaattcagaagttcatatgcttctggaacatcgaaagcagcagaatgagagtgcagaggacgaacaggagctctcagaagtcttcatgaaaacattaaactacacagcccgtttcagtcgtttcaaaaacagagagaccattgccagtgttcgtagcttgctactccagaaaaagcttcataagtttgagttggcctgtttggccaacctttgcccagagactgctgaggagtccaaggctctaatcccaagcttggagggacggtttgaagatgaggagctgcagcagattcttgatgatatccagacaaagcgcagctttcagtattaatctccaaacatcactgctgctcggagaaaccacatccccaggcataacaccaccttcccactgtctggggctgacttgcacagaaattctgttgaagacagttgagaattcctttggagaaaacagcccagcttggcgtggggttaggttgctgtttcaaataactcacaggcccaggtgacatggaatcttggagcagccttgtgcagtggcagccagtggcttcctgaacgtgcctctgcgaagtgtgagatgaggggtcacataaccacactgttgactacctcattcctggtttttggcctccacatcatcttttttcttaatatttcatgttttaatttcagggtgtttatactttttgaaactagaccagaagatagtagactttatagagaaagaccagttttacctagatactaaaggaagaattaaaccgctgttagtttgaaatgctttttttttttttttttaaatggagatagggtcttaactcttgtccaggctggaggagtgcagtcgtacagtcatggctcactgaagtcttgaccccgctgcctcagcctcccaaataactggggccacaggtgtgcaccacaactctcagctaatttttaaaattttttatagaggtggggttttactatgctgtccagactggtcttaaactcctgggctcaagtgatccccctgccttggcctcccaaactggtgagattacaggcatgagccaccacaactggcctgaaattcttaaaggatgggagtgtcgatgacagcaccttggcatcgttgtgcctaacctgggagacggaagaagcacgccatgggaagtgtttacacttgggggacaagtgctaagtattgtggagcccatagccccttgagatagatggctactttgcctttcttcttgaactgtcttgcagaatgtggatttggggtaagtggtcttgaaggattcatttagtcaccctcaaattaagatttttacttcatctttcttgggcctgcacctccaagataacaaagaagaagcaatggtcgtgccaaagaggtccacaaccaggtgtgcactgttcactgcagcccatttgctgtatgaactgtggttgttgtgtgcccaatgacaaggctactaagaaattcatcatttgaaacgtagaggccgcagcagtcagcgatgtttctgaaatgagcatccttgacgcctgtgtacttcccaggctggatgtgaagctacattaccatgtgagttgtgccattcacagcacagtggtgaggaattgagctcatgaagcaggcaaggaccgaacacctccaccccaacgtagacctgcaggtgctgccccatgacctccaccaaagcccatataaggagcggagttgttaaggactgaagaaaaacttctctggagaaaaataaaattgcaattctacttaaaaaaaa

SEQ ID NO: 1719 - DNA, 2866 bp, Homo sapiens
ggattcggcgcaggcgcagtccgcgcgggttctcgcgcggagaaggggtgcgagcggcggcggcggcggaggctgccatggacgacgaggaggagacgtaccggctctggaaaatccgcaagaccatcatgcagctgtgccacgaccgtggctatctggtgacccaggacgagcttgaccagaccctggaggagttcaaagcccaatttggggacaagccgagtgaggggcggccgcggcgcacggacctcaccgtgctggtggcccacaacgatgaccccaccgaccagatgtttgtgttctttccagaggagcccaaggtgggcatcaagaccatcaaggtgtactgccagcgcatgcaggaggagaacatcacacgggctctcatcgtggtgcagcagggcatgacaccctccgccaagcagtccctggtcgacatggcccccaagtacatcctggagcagtttctgcagcaggagctgctcatcaacatcacggagcacgagctagtccctgagcacgtcgtcatgaccaaggaggaggtgacagagctgctggcccgatataagctccgagagaaccagctgcccaggatccaggcgggggaccctgtggcgcgctactttgggataaagcgtgggcaggtggtgaagatcatccggcccagtgagacggctggcaggtacatcacctaccggctggtgcagtagctaccgcctgacagcccctagaggcggacacacagcgacccccatccctgcaggacaaacgcccctgccctgccagaatccggcccccacagctctcacggctgctgctcctctggactccccaaggcaggtggcctccacccacgttctcccgtcctggggtgaggcttcctgtggcccagcccgccccattcacctgtggatttgtgcgagatgcagcctcagaaggaacaaggcccccagagggaggtcacctgggggcagctggtgccgggtcttcacccagaccacgctgggtcccctctgttgggggtttggggtccgggtctcccaccagccactgcttcctcctgggccctcggccttccacccctcgtcttccctccctcgggggccctgatgcgtggcggcccccgcccggcctcggctctttactccattcacagccatgcacgcgctcaagccaccagggtgcgagatgccagctctggagttctcggttgttgtaggaggttgggtgttttcaaatggtaaagatgttttgagcaaataaatttgcttgatacagaaaccaggccgactaacaaggtttccagcaggtggccttgcctcaccccaagcacacgaggtcagcctggcaggtgtgccctcctcgcgctggcttcaggggtcagtgtctccccaggccctcgccctgccctcccacttcgtgctcctgggtaaggcgtgagcgtgtctgtctcttcccttcccgtgagggtgtggagttgttctctggcttgtgcagctgtggtttgcggccagttcctcttacagacgtttgggatctggctctacttccccgtttgcttactgtctgatttcagaaggcctcgcctgcccaagtttaacctagccacgtggttctctcacagtagctttattaagatgtaattcaccctcgggcggtcggtggtctgtaacgcgcccactgttctgtgcagcagggtccccagatccccaggccgcggactgtgtgtgtgatggggacagtgcttccccttctctccaaatgtacttttttcaaaattgtcttggccaaagcaagccagacccaaagggacaaacactgatgtcactcctaggaggtcactagagtcgtcagagactggaagtaggatgggggttcccgggactggggagttgggtggggatgggggttcccagggctggggaggagggaggggacagagtgtgtcatgtgcacagttttagtttgggaagatgagaaaattctggaggtggccgggcgcggtggctcacgcctgtaatcccagcactttgggaggccgaggtgggcggatcacctgaggtcgggagttcgagaccagcctgaccaacatggcaaaatcccatcactgcaaaaaatacaaaaattacctgggcgtggtggtgcatgcctgtaatcccagctacttgggagctaaggcaggagaatcacttgaacccaggaagtggaggatcgcttgagctcaggagttaaaagaccagcccgggcaacacagagaaaccccccacctctacaaaaaactttaagattacctgggcacagtggctcacacctgtaatcccaacactttgggaggctgaggcgggaggatcatttgagcccaggaggccgaggctgcagtgagctacgattgtgctcctgtactccagcctgggccacagggtcacaccctgtctcaaaaaaaaaaaaaaatgcagttccacaggcgcatgggccacgtttccagtgcttggtggccatgtggggctgacgtgcgaaaccttagagccgggggatacgtccgtcatcgagaacgttttcctggactgccctgggctgcaggtggacgtgacgaggtcattcgatgcctgaccgtctgcacagcctgtggtgaagaccacccgggctcccacctcgcggggccccgtggcggggggttcccttcctcacacatccctcccctagggggaggcccagggccacgccacggggctctctctgtcccctccctggccccttcttctaagcttgcagctgccacagaaaatcttctaagcttgcagctgccacagaaaacacccgattaaaaactttttatttcagcaaaataaacgtgcctgtgaaagaa

SEQ ID NO: 1720 - DNA, 927 bp, Homo sapiens
agtctgggacgcgccgccgccatgatcatccctgtacgctgcttcacttgtggcaagatcgtcggcaacaagtgggaggcttacctggggctgctgcaggccgagtacaccgagggggacgcgctggatgccctgggcctgaagcgctactgctgccgccggatgctgctggcccacgtggacctgatcgagaagctgctcaattatgcacccctggagaagtgaccacgctgaaacccacccacccgctgtgctgaccatgggccctgagcgtcctaccccgaattcacgaggctgaggcatccgggagctggcgtaatgcctggccgcagtgtgtgtgtatcccataccccactctggaaggaaccatccagtaaaggtctttcagaaccactaaggtcccagccctcactaggatgtcaggagccaggtctaggcccagctttcacactgtggcagcccagtgaagcagactgggccatgaactctcctagccctggggccagcctgttccacaggcacccctgcaggaggcgctgccaggagagccttccatctcggggctctttgaggttccctccttctgggtgttcttcaggctgagcagagaggctcctgtaccctctctctcggaatctgaagagccagatttaggccgggcaaaggggctcacccctataatcccaggactttgggaggccaaggcaggaggatcacttgagtccagaaattcaagacccgcctgggcatcataatgagaccccatctctacaacaaaatttaataaattagctgggcacagtgttcacacctgtagtcccggccactcagggggctgaggcaggaggatcactggaacctgggaggttgccactgcaaaaaaaaaaaaaaaaaaaaaaaaaaaaaaaaaaaaaaaaaaaaaaaaaa

SEQ ID NO: 1721 - DNA, 3861 bp, Homo sapiens
gcggccgctctcagcggagggggcggccccggggcccaggcgccgcggcccggcaccccgtggaagagccgcgcgtacagcccgggcatccagggactacatgaggaaataattgacttttataacttcatgtccccttgtcctgaagaagcagctatgagaagagaggtggtgaaacggatcgaaactgtggtgaaagacctttggccgacggctgatgtacagatatttggcagctttagtacaggtctttatcttccaactagcgacatagacctggtggtcttcgggaaatgggagcgtcctcctttacagctgctggagcaagccctgcggaagcacaacgtggctgagccgtgttccatcaaagtccttgacaaggctacggtaccaataataaagctcacagatcaggagactgaagtgaaagttgacatcagctttaacatggagacgggcgtccgggcagcggagttcatcaagaattacatgaagaaatattcattgctgccttacttgattttagtattgaaacagttccttctgcagagggacctgaatgaagtttttacaggtggaattagctcatacagcctaattttaatggccattagctttctacagttgcatccaagaattgatgcccggagagctgatgaaaaccttggaatgcttcttgtagaattttttgaactctatgggagaaattttaattacttgaaaaccggtattagaatcaaagaaggaggtgcctatatcgccaaagaggagatcatgaaagccatgaccagcgggtacagaccgtcgatgctgtgcattgaggaccccctgctgccagggaatgacgttggccggagctcctatggcgccatgcaggtgaagcaggtcttcgattatgcctacatagtgctcagccatgctgtgtcaccgctggccaggtcctatccaaacagagacgccgaaagtactttaggaagaatcatcaaagtaactcaggaggtgattgactaccggaggtggatcaaagagaagtggggcagcaaagcccacccgtcgccaggcatggacagcaggatcaagatcaaagagcgaatagccacatgcaatggggagcagacgcagaaccgagagcccgagtctccctatggccagcgcttgactttgtcgctgtccagcccccagctcctgtcttcaggctcctcggcctcttctgtgtcttcactttctgggagtgacgttgattcagacacaccgccctgcacaacgcccagtgtttaccagttcagtctgcaagcgccagctcctctcatggccggcttacccaccgccttgccaatgcccagtggcaaacctcagcccaccacttccagaacactgatcatgacaaccaacaatcagaccaggtttactatacctccaccgaccctaggggttgctcctgttccttgcagacaagctggtgtagaaggaactgcgtctttgaaagccgtccaccacatgtcttccccggccattccctcagcgtcccccaacccgctctcgagccctcatctgtatcataagcagcacaacggcatgaaactgtccatgaagggctctcacggccacacccaaggcggcggctacagctctgtgggtagcggaggtgtgcggccccctgtgggcaacaggggacaccaccagtataaccgcaccggctggaggaggaaaaaacacacacacacacgggacagtctgcccgtgagcctcagcagataatggctcctggctgcgtcagcctcccccacccctctgcagactgccccgcggcctcggccaccggcaggggaaccgagaccagcaccccgcacgtcagccgggctcgcggcacgcccgccgctgatcactctgcatgtttcttcgtgtggtggtcgcgtccatcttcaagaacagctcgttgtgctcatctgtgaagccttattaaacgtggacgttgttttctgccttcccaggattcttccttcagtgctgaggcaggtcgggctcaggaactgcagggacgtgaacatgcgcttgcggtttgaggtagccgtgtctgttccttcgcggtttgctattttcatttcctgttcgtcaaagcagcagaggagatcaaaccccgttcgtgtgtctttcctccacggataagcttgggaggtcattgttttactgccctcacattttgtttgaaatttcagaactgtttttctatgtaaatattgaaaacttatgatttgtgcaataactcagatattttttatttaatttcctattttcacataagttatatttaagggaggagggaattttttttaaacaagcttaggtcctttcccgagctgcattttctaagttgggtcatcgtgtcggctggttgtctgacgagcatcgttacaaacaccatgatgaggggtttggggttttattttgatgtcttttcttttggtcggaagtgagtgaaggagccaggtcgccctgaaggttttccaaagggcttggctccagagccacctggcagactgcccgtggccctgctgtcgggccccaggccgttgtcctgctctgaccacagagttttaatgttttggttttcacttcttttaaactggacaacaaatccagcatttcaagtgccagaagtataactttctaaggagagaagggttgtcacattataaaatctttaggaaaatgtgaactggaaaacgcttcggtcagttttagtgacatagcctgtgatgatgggtctggtgactattattgcggaccgtggtacccagttttaggaatgtggagaaaggaattctgttgattccgttgaggaatctgtagcgtatgcattcgttctgttaagagcaaatctaggagaagtgcttcagctgcccagtgcgccgtggggagtgttttaacggatcgtgtcgcaggagagcacagcccagcgttggggccgggaccgctggcgcccgacgtcggaagcatacaggtatactatgcaagtgtattctgccacaacaaccactgtctttgttacctttttttgaacaagaatatatccatcctgcctaaccctgagtttttggagcaccacagttgtcctgggagttggttgcatcttgtaggccatctgacttcctgtttttaaaacgggggtctggtcttgctaaacactacaggtaggttggtctttgaagtccactagtggagaatgtcaagacaagatacttattaccatgacatctgatgcatgtgcagcagtggggagttctagattgatctctgaatgtgatcgacgcccagcaaggacaagctttaaaatgtctgcggtctgcccttttgaagcaggactggctcactctgtcattgggagctgtcagctgcgactgcaggttctctaggaggcattccagaatagagtagcacactgtgtctgcagttctcgatgaccgaaagttatcaaaaatatttaaaatatttaaattgtgaacctattgataaagaatatttataaaaactgatctgtaggcctgtactaatctctacgcattagcaatattgactgtaaacccacattaaggaaaccactacgggtctggcagtgcgtgtcccgtggggtgtgcattttaaaactcgattcatagacacaggtaccatgttccatttccgtcatggtgaagcaaatgaattggcctggctaccactgtggtcgcgtgctacaggtttgacaaaaagatatcatgtttcgatttttttgtgtgtggacaacaatatggaagctaaaattgacatatttttatgtaaagtttttctattctttgatttttaataaactttggaaaccagttt

SEQ ID NO: 1722 - DNA, 1667 bp, Homo sapiens
cttctaggaaaggtggagtcggtagtgagaagccggaggtgagaagacccctgagcggatggattcattcattttctgaatttcctatgtgaggacagtattagagcccagtgaggctttgagaggccccaaagatgagcgccaacagcagcagagtgggccagcttctcttgcagggttcagcgtgcattaggtggaagcaggatgtggaaggggctgtctaccacctagccaactgcctcttactcctgggcttcatggggggcagtggggtgtatggatgcttctatctttttggcttcctgagtgcaggttacctgtgctgcgtgctgtggggctggttcagtgcctgtggcctggacattgttctttggagcttcctgctggctgtggtctgcctgctccagctggcacacctggtataccgcctgcgtgaggacaccctccctgaggagtttgacctcctctacaagacgctgtgcctgcccttgcaggtgcccctacagacatacaaggagattgttcactgctgcgaggagcaggtcttaactctggccactgaacagacctatgctgtggagggtgagacacccatcaaccgcctgtccctgctgctctctggccgggttcgtgtgagccaggatgggcagtttctgcactacatctttccataccagttcatggactctcctgagtgggaatcactacagccttctgaggagggggtgttccaggtcactctgactgctgagacctcatgtagctacatttcctggccccggaaaagtctccatcttcttctgaccaaagagcgatacatctcctgcctcttctcggctctgctgggatatgacatctcagagaagctctacactctcaatgacaagctctttgctaagtttgggctgcgctttgacatccgccttcccagcctctaccatgtcctgggtcccactgctgcagatgctggaccagagtccgagaagggtgatgaggaagtctgtgagccagctgtgtcccctcctcaggccacacccacctctctccagcaaacacccccttgttctacccctccagctaccaccaactttcctgcacctcctacccgggccaggttgtccaggccagacagtggcatactggcttctagaattcctctccagagctactctcaagttatatccaggggacaggcccctttggctccaacccacacgcctgaactttaaggatcattggactatcttctctgtggccagcgcagctctcttctgtgttcacagaatggccactgataggcatgcctcttttcccacccactggaaggctcacaggcaaggtgagagaggacacagaaggtgccaacactgtcgctacagtaaggacctgaagtgactttgagaaattcaccctcacaaaccttccttcaggagcaggcattggtagtgcagaggcacagattccgtcctttaccagctgcagaatcttgggcaagttacatagcctctgtgagcctcatcggtaaacagtgggggttatgaaacccacctcacagggttgttgtgaggatccaatgagttgatttaggtaagcacctagcacatgccgtggcaccaagtaagcactcaataaatcactcaactcttaaaaaaaaaaaaaaaaaaaaa

SEQ ID NO: 1723 - DNA, 801 bp, Homo sapiens
tgcacgccggaccggagagcgcggaggcagccatggtgcggttcaagcacaggtacctgctctgcgaactggtgtctgacgacccccgctgccgcctaagcctcgatgaccgagttctgagcagcctcgtacgggacacgatcgccagggtgcacggaactttcggcgcagccgcctgctccatcggcttcgcggttcgatatctcaatgcctatactggaatagtgctacttcgatgcagaaaagaattctatcagcttgtgtggtcagctcttcccttcatcacatacttggagaacaaaggacaccgttacccatgctttttcaacacattacatgtgggaggtacaataagaacatgtcagaagttcctaattcagtacaacaggagacagctgttgatcttgttgcagaactgcactgatgaaggagagcgggaagctatccagaagtctgtgacaagaagctgcttattagaggaggaggaggagtcaggtgaggaggctgcagaagcaatggagtgaacctctgctccccacacagctggctacactgctcaggcttcaggcccacttgttgaacagaacaatctgggtagcaacagcatcttccacagttttccaaactggatagctgccaaccagcagacattacccacttgaaatggagtactcagttaaactgaagttgcctttacctagcattccctggtgaagtgttgcaggttgtgaactctgtagacatctttattgcttggctaagagtagatttaataaatgtatctggtttccgtggcaaaaa

SEQ ID NO: 1724 - DNA, 660 bp, Homo sapiens
ggtttgcacgccggaccggagagcgcggaggcagccatggtgcggttcaagcacaggtacctgctctgcgaactggtgtctgacgacccccgctgccgcctaagcctcgatgaccgagttctgagcagcctcgtacgggacacgatcgccagggtgcacggaactttcggcgcagccgcctgctccatcggcttcgcgggtacaataagaacatgtcagaagttcctaattcagtacaacaggagacagctgttgatcttgttgcagaactgcactgatgaaggagagcgggaagctatccagaagtctgtgacaagaagctgcttattagaggaggaggaggagtcaggtgaggaggctgcagaagcaatggagtgaacctctgctccccacacagctggctacactgctcaggcttcaggcccacttgttgaacagaacaatctgggtagcaacagcatcttccacagttttccaaactggatagctgccaaccagcagacattacccacttgaaatggagtactcagttaaactgaagttgcctttacctagcattccctggtgaagtgttgcaggttgtgaactctgtagacatctttattgcttggctaagagtagatttaataaatgtatctggtttccgtggcaaaaaaaaaa

SEQ ID NO: 1725 - DNA, 1854 bp, Homo sapiens
gcccgctgcggtcacgctgcgcccggcgccgcagggtgggcggcgaggcactcacgagggggacgctgagggcttccgcgcgggccacccgggtcaagcgcgctccgccgggaaacttctgcgggcgccgggctgaagctccgggcagggctgggaaggaaaggaaataccaaaatatttgcagactggatccaaatcaggagcccagatgaacttaaagaagcgagcatgggattcttagtttttcaagatccgtacacacgaagcctttaatcagcatcaactccagtgtccgttttctctggttttgtgaagactgcacaaaactctcatgatggagaaccaaaggacttagttacctgtttcagtgtcatctaaagtcaactgaaaagtgaagcaggcagtaatacagccatggaaagaaattcaagtttatggaagaacctaatagatgaacacccagtctgcacaacctggaagcaagaggccgaaggagccatttatcatcttgccagtattttatttgtagtaggtttcatgggtggcagtggattcttcgggctcctttatgtcttcagtttgctggggttgggttttctctgttctgctgtctgggcttgggtagatgtctgtgcagctgacatattttcctggaattttgtactgtttgtcatctgcttcatgcaatttgttcatattgcatatcaagttcgcagcataacctttgcccgagaattccaagtgttgtacagctcccttttccagcccctggggatctctttgcctgtcttcagaacgattgctttgagctctgaagtggttactttggaaaaggaacactgttatgccatgcaggggaaaacttccattgataaactctccttgcttgtttcaggaaggatcagagtgacagttgatggcgaatttctgcattacattttcccccttcagttcctggattctcctgagtgggattcactgagacccacagaggaaggcatttttcaggtaaccctcactgcagaaactgattgtcgatatgtgtcttggaggagaaagaaattatatctgctctttgctcagcatcgctacatctcccgccttttttcagtgctaattggcagtgacattgcagataaactctatgccttgaatgacagggtatatataggaaaaagatatcactatgatattcggctacccaacttctatcaaatgtcaactccagaaatacgcagatcacccctgacacaacattttcagaattccagacgatactgtgataaatgacatcaaagtctgaaatttataagtataaaaaaagactctctcttcatcattccccagtgaaatagcaaaatacaaaaaaagagctccctaatgtttttataaatcaaattcagaagcgagatgccattgccaactgttttattcctttcaacaactgcattgtgaataaactttacaaatttttcttgtatttctcattgttataattggggagggggtggataactatgggcagtttgcccttttctgcatcaaaactgggagaatgaaattccactttctcaattcttttctcacatttactcaaatgcattgtcttgccctatggactcaggagttgcttctcaagaaacagccagcaagtattctcagcctgagggtgggttgctactgtccacataggcatttccggaattcacttttttgctacaacctccagtgaaagcaattattttaaatgtgcagttacttgatgtgactaaaaagtagaataaatgcaagagataataatatgtgaatcttgaagcctattttattgctacaaataaaataacatttaaaaag

SEQ ID NO: 1726 - DNA, 4172 bp, Homo sapiens
agtaatagcaggagcagcaacagaaggcgtcggagcgggcgtcggagctgcccgctgtgggagagagaggagacagaaagagcgagcgaggagagggagcccgaggcgaaaaagtaactgtcaaatgcgcggctcctttaaccggagcgctcagtccggctccgagagtcatggcgaccgcagcgtctaaccactacagcctgctcacctccagcgcctccatcgtgcacgccgagccgcccggcggcatgcagcagggcgcggggggctaccgcgaagcgcagagcctggtgcagggcgactacggcgctctgcagagcaacggacacccgctcagccacgctcaccagtggatcaccgcgctgtcccacggcggcggcggcgggggcggtggcggcggcggggggggcgggggcggcggcgggggcggcggcgacggctccccgtggtccaccagccccctgggccagccggacatcaagccctcggtggtggtgcagcagggcggccgcggagacgagctgcacgggccaggcgccctgcagcagcagcatcagcagcagcaacagcaacagcagcagcaacagcagcaacagcagcagcagcagcagcaacagcggccgccgcatctggtgcaccacgccgctaaccaccacccgggacccggggcatggcggagcgcggcggctgcagcgcacctcccaccctccatgggagcgtccaacggcggcttgctctactcgcagcccagcttcacggtgaacggcatgctgggcgccggcgggcagccggccgggctgcaccaccacggcctgcgggacgcgcacgacgagccacaccatgccgaccaccacccgcacccgcactcgcacccacaccagcagccgccgcccccgccgcccccgcagggtccgcctggccacccaggcgcgcaccacgacccgcactcggacgaggacacgccgacctcggacgacctggagcagttcgccaagcagttcaagcagcggcggatcaaactgggatttacccaagcggacgtggggctggctctgggcaccctgtatggcaacgtgttctcgcagaccaccatctgcaggtttgaggccctgcagctgagcttcaagaacatgtgcaagctgaagcctttgttgaacaagtggttggaggaggcggactcgtcctcgggcagccccacgagcatagacaagatcgcagcgcaagggcgcaagcggaaaaagcggacctccatcgaggtgagcgtcaagggggctctggagagccatttcctcaaatgccccaagccctcggcccaggagatcacctccctcgcggacagcttacagctggagaaggaggtggtgagagtttggttttgtaacaggagacagaaagagaaaaggatgacccctcccggagggactctgccgggcgccgaggatgtgtacggggggagtagggacactccaccacaccacggggtgcagacgcccgtccagtgaactcgagctgggggaggggcagagcgcggggctccccctccccttcggtccttggccctttcccggccctcttgttccctctctaacttctgattgttcttttatttttaattattatttccccgtcccttaaaaagacaaaaaaaataaggcaaaaggaaagcaactaagacactggactatcctttaaaggtagcaggtgtaatgatgtgttttgacctttgcaggcgagtaaccaggcaatggagtggagtgtctcctggagagagtgaggagagtgtgtgatagctagaaagagagagagacagagagatggcaagcactgagataaatacctggcaaaactaaataaattaccaaaaaggaaaaaaaatccaccaaaccatgataaacacaaaatgcagcttcctgatgcttagagttggcacatgctgctgtgtttatttattgtggattcccatcaggaaagaggaaaaaatacacatgttctttcatataggcaaaatttaaccacataaatttgcactgcaagaaaattgaagtttacgtgaacaaattcatgagcatattttctctttctccccaccgttaatttgggagttgccgttttgggggattttgttttgctttgctttattcatcggagagagttgaagccagctcttggccactctccatttctaatgttcttgtgttgccccttcttcgtactgtttgtgaactttggttaccttcacattccccttacgagggtgtaacatctatttgttcctcttaccaaagcaaaaggattggcttcatacaaaatagacaattctctgatttcaggaaatgtgcatggtctacccgctttatcgaaggcaagaatccggtttggaatataaaaataagcattggttgttcttaccagccacaaagtaaacttcattttcaggcagtgtttctgggggaggttatggagggaagaaaaaagaaaaatcgatagtgagtgactgattgcttcattttatcaggcgggcccattgtgaaagagctcaggggaaatgtggaggttaaatatatttccagagttgtccagcagaaagaaagtggcactttgaagagaactagggaagtacatatcttcagatatccctatatagttctctaccttcagttttagtaacaattatgaagaattatttgtgctgacagcagcagttaaactttgtttctctaatagctttttttttacataaaaaaagacccaggaacttaatagtgtatgcataagactgtgttttttagcacacagatacccacagcatacactgacgatctccacgcagtagacaggttttgtcttcactagctcatttgtttatcaagtcatatttagggtcccacaccctcttttcctgtaatttattgcagaatacaccactttgacttggacagctttctgccccctctttcactaaggaaggcaaatgaagtgaaaaaaaaaaatgccattttcaatccttcctttctcccctttgttaatagttttaagtgaatttttgaccttatcttaatggaaaacggttaactccaaacacaaaagactctactggaaagtgtaggtgaaaaaacttgtaactgtattgaaaataaataccattaaactgtgatcagttaaaatttaaaagaaaaatcagcacaaaagggcgctaaaagggaaaacactttttattaatcttaaaagtttgggggtttttttccagttaggtattagataaatttttattttaaaaaatgaaagtctcactaccataaaattatggttcagcatcagattagcattgcactcagtagtctttaaggttttaggaaatatgctttatattgtcttttcaaacacctgtgattgtttcattttccatgtttttgcaagataaatggtgacttataatgggcatatttatttgcctgtatttcatttcccccaatgaatgtcacaaggagatgggcacggagctgcttcgggtgcatcacgctgctcgttcctgaggtatgggaactggcctttagtgaagctatccagagcagggcaaatagccactggtaaagggaggaaatgaatttccagatacttattaccaagtaggtaaggtcagaagctggagttcagagaatgtgtctacagcttctctgactcttataggtttactaagatgaaagttaccactgaaccttaccactatgtatatatgtttaatatctgtcttttgaaatgcagaaatagtttaaatgtttctttgtctatttttctttttttttaatgctacccagggaaatattttcatatcatttttaagtggcctgcctcaatgtatatttatttcttttgaaacaaaaaggttctggaaactgtttttctgtagctttaaatgaataggtgagcaaaatctatatgggatgtaatttttttgttcagtctcttaaaaaatactttgttttggtacatttggttgtgcttgtggggaaaataaaaacgcagagatccttatatatttatgttaaagtaatattttattatctacataaaacagaaatgcacaataaaaaaaaaaaaaaaaaaaaaaaaaaaaaaaaaaaaaaaaaaaaaaaaaaaaaaaaaaaaaaaaaaaaaaaaaaaaaaaaaaaaaa

SEQ ID NO: 1727 - DNA, 2375 bp, Homo sapiens
gggcgcggagccccagccgagcctagccctgcccggccccggaggacttgcaacactccgaggccaggaacgctccgtctggaacggcgcaggtcccagcagctggggttccccctcagcccgtgagcagccatgtccaaccccagcgccccaccaccatatgaagaccgcaaccccctgtacccaggccctccgccccctgggggctatgggcagccatctgtcctgccaggagggtatcctgcctaccctggctacccgcagcctggctacggtcaccctgctggctacccacagcccatgccccccacccacccgatgcccatgaactacggcccaggccatggctatgatggggaggagagagcggtgagtgatagcttcgggcctggagagtgggatgaccggaaagtgcgacacacttttatccgaaaggtttactccatcatctccgtgcagctgctcatcactgtggccatcattgctatcttcacctttgtggaacctgtcagcgcctttgtgaggagaaatgtggctgtctactacgtgtcctatgctgtcttcgttgtcacctacctgatccttgcctgctgccagggacccagacgccgtttcccatggaacatcattctgctgaccctttttacttttgccatgggcttcatgacgggcaccatttccagtatgtaccaaaccaaagccgtcatcattgcaatgatcatcactgcggtggtatccatttcagtcaccatcttctgctttcagaccaaggtggacttcacctcgtgcacaggcctcttctgtgtcctgggaattgtgctcctggtgactgggattgtcactagcattgtgctctacttccaatacgtttactggctccacatgctctatgctgctctgggggccatttgtttcaccctgttcctggcttacgacacacagctggtcctggggaaccggaagcacaccatcagccccgaggactacatcactggcgccctgcagatttacacagacatcatctacatcttcacctttgtgctgcagctgatgggggatcgcaattaaggagcaagcccccattttcacccgatcctgggctctcccttccaagctagagggctgggccctatgactgtggtctgggctttaggcccctttccttccccttgagtaacatgcccagtttcctttctgtcctggagacaggtggcctctctggctatggatgtgtgggtacttggtggggacggaggagctagggactaactgttgctcttggtgggcttggcagggactaggctgaagatgtgtcttctccccgccacctactgtatgacaccacattcttcctaacagctggggttgtgaggaatatgaaaagagcctattcgatagctagaagggaatatgaaaggtagaagtgacttcaaggtcacgaggttcccctcccacctctgtcacaggcttcttgactacgtagttggagctatttcttcccccagcaaagccagagagctttgtccccggcctcctggacacataggccattatcctgtattcctttggcttggcatcttttagctcaggaaggtagaagagatctgtgcccatgggtctccttgcttcaatcccttcttgtttcagtgacatatgtattgtttatctgggttagggatgggggacagataatagaacgagcaaagtaacctatacaggccagcatggaacagcatctcccctgggcttgctcctggcttgtgacgctataagacagagcaggccacatgtggccatctgctccccattcttgaaagctgctggggcctccttgcaggcttctggatctctggtcagagtgaactcttgcttcctgtattcaggcagctcagagcagaaagtaaggggcagagtcatacgtgtggccaggaagtagccagggtgaagagagactcggtgcgggcagggagaatgcctgggggtccctcacctggctagggagataccgaagcctactgtggtactgaagacttctgggttctttccttctgctaacccagggagggtcctaagaggaaggtgacttctctctgtttgtcttaagttgcactgggggatttctgacttgaggcccatctctccagccagccactgccttctttgtaatattaagtgccttgagctggaatggggaagggggacaagggtcagtctgtcgggtgggggcagaaatcaaatcagcccaaggatatagttaggattaattacttaatagagaaatcctaactatatcacacaaagggatacaactataaatgtaataaagtttatgtctagaagttaaaacccaaaaaaaaaaaaaaaaaaaaaaaaaa

SEQ ID NO: 1728 - DNA, 1885 bp, Homo sapiens
ggtggcggcgcggagccttgggcccggctgcggcccggcggcggccccggcgcggtgcgggcgttcgcggcgccccgggagctgcaggggccccgggcggcggcgaggccggagaggggcgggcccgggacaccggcacccggcgccctcggagccaaaggcgcgcggcggacacggcggggccctcgcgcgcctggagacgatgccaaagctgcagggcttcgagttctggagccgcaccctgcgaggggcccgccacgtcgtggcccccatggtggaccagagcgagctggcctggaggctgctgagccggcgccacggggcacagctctgctacacgcccatgctgcatgcccaggtctttgtccgcgacgccaactaccggaaggagaacctgtactgcgaggtgtgccccgaggaccggcccctcatcgtgcagttctgtgccaatgacccggaggtgtttgttcaggcggctctcctggctcaggattactgtgacgccattgacctgaacttgggctgcccacagatgatagccaagagaggtcactatggcgcctttctgcaggacgagtgggacctgctccaaagaatgattttgctggcccacgagaaactctctgttcctgtcacgtgcaaaatccgtgtcttcccggagattgacaagaccgtgaggtacgcccagatgctggagaaggccggctgccagttgctgacggtgcacggacgcaccaaggagcagaaggggcccctgtcgggtgcagcgtcctgggagcatatcaaggctgtgcggaaggctgtggccatccctgtgtttgctaacgggaacatccagtgcctgcaggacgtggagcgctgcctccgggacacgggtgtgcagggcgtcatgagcgcagagggcaacctgcacaaccccgccctgttcgagggccggagccctgccgtgtgggagctggccgaggagtatctggacatcgtgcgggagcacccctgccccctgtcctacgtccgggcccacctcttcaagctgtggcaccacacgctgcaggtgcaccaggagctgcgagaggagctggccaaggtgaagaccctggagggcatcgctgctgtgagccaggagctgaagctgcggtgtcaggaggagatatccaggcaggagggagcgaagcccaccggcgacttgcccttccactggatctgccagccctacatccggccggggcccagggaggggagcaaggagaaggcaggtgcgcgcagcaagcgggccctggaggaagaggagggtggcacggaggtcctgtccaagaacaagcaaaagaagcagctgaggaacccccacaagaccttcgacccctctctgaagccaaaatatgcaaagtgtgaccagtgtggaaacccaaagggcaacagatgtgtgttcagcctgtgccgcggctgctgcaagaagcgagcctccaaagagactgcagactgcccaggtcacggattgctttttaaaaccaaattggagaagtctctggcctggaaagaggcccagcctgagctgcaggagcctcagccagcagcacctggaacaccaggtggcttctccgaagtcatgggcagtgccctggcctgaaggcccacaacccccacccccaggactgctgctggagcctggacacgtcctacttaagaaaatgccttttactcagggaatctcctgctacttaatgtggaaagacacgcccatgtcccccttcggcccactctgggggcctggaaatgctgcagtggggagcaggccccaggctggacctgccctgtcctcagcacgcgtgtgcaaaagtgaacaataaatcatttcaaagatgcgagaaaaaaaaaaaaaaaaaaaaaa

SEQ ID NO: 1729 - DNA, 1327 bp, Homo sapiens
ctcctctccgcgcggggcgggctccgcgccacgtgactccgcggccgggccgggacgcgacgggacgcgctgggaccggcgtcgggggtcgcggggaccatgcagcggaggtgggtcttcgtgctgctcgacgtgctgtgcttactggtcgcctccctgcccttcgctatcctgacgctggtgaacgccccgtacaagcgaggattttactgcggggatgactccatccggtacccctaccgtccagataccatcacccacgggctcatggctggggtcaccatcacggccaccgtcatccttgtctcggccggggaagcctacctggtgtacacagaccggctctattctcgctcggacttcaacaactacgtggctgctgtatacaaggtgctggggaccttcctgtttggggctgccgtgagccagtctctgacagacctggccaagtacatgattgggcgtctgaggcccaacttcctagccgtctgcgaccccgactggagccgggtcaactgctcggtctatgtgcagctggagaaggtgtgcaggggaaaccctgctgatgtcaccgaggccaggttgtctttctactcgggacactcttcctttgggatgtactgcatggtgttcttggcgctgtatgtgcaggcacgactctgttggaagtgggcacggctgctgcgacccacagtccagttcttcctggtggcctttgccctctacgtgggctacacccgcgtgtctgattacaaacaccactggagcgatgtccttgttggcctcctgcagggggcactggtggctgccctcactgtctgctacatctcagacttcttcaaagcccgacccccacagcactgtctgaaggaggaggagctggaacggaagcccagcctgtcactgacgttgaccctgggcgaggctgaccacaaccactatggatacccgcactcctcctcctgaggccggaccccgcccaggcagggagctgctgtgagtccagctgaggcccacccaggtggtccctccagccctggttaggcactgagggctctggacgggctccaggaaccctgggctgatgggagcagtgagcgggctccgctgccccctgccctgcactggaccaggagtctggagatgcctgggtagccctcagcatttggaggggaacctgttcccgtcggtccccaaatatccccttctttttatggggttaaggaagggaccgagagatcagatagttgctgttttgtaaaatgtaatgtatatgtggtttttagtaaaatagggcacctgtttcacaaaaaaaaaaaaaaaaaaa

SEQ ID NO: 1730 - DNA, 1286 bp, Homo sapiens
ctcctctccgcgcggggcgggctccgcgccacgtgactccgcggccgggccgggacgcgacgggacgcgctgggaccggcgtcgggggtcgcggggaccatgcagcggagcctccctgcccttcgctatcctgacgctggtgaacgccccgtacaagcgaggattttactgcggggatgactccatccggtacccctaccgtccagataccatcacccacgggctcatggctggggtcaccatcacggccaccgtcatccttgtctcggccggggaagcctacctggtgtacacagaccggctctattctcgctcggacttcaacaactacgtggctgctgtatacaaggtgctggggaccttcctgtttggggctgccgtgagccagtctctgacagacctggccaagtacatgattgggcgtctgaggcccaacttcctagccgtctgcgaccccgactggagccgggtcaactgctcggtctatgtgcagctggagaaggtgtgcaggggaaaccctgctgatgtcaccgaggccaggttgtctttctactcgggacactcttcctttgggatgtactgcatggtgttcttggcgctgtatgtgcaggcacgactctgttggaagtgggcacggctgctgcgacccacagtccagttcttcctggtggcctttgccctctacgtgggctacacccgcgtgtctgattacaaacaccactggagcgatgtccttgttggcctcctgcagggggcactggtggctgccctcactgtctgctacatctcagacttcttcaaagcccgacccccacagcactgtctgaaggaggaggagctggaacggaagcccagcctgtcactgacgttgaccctgggcgaggctgaccacaaccactatggatacccgcactcctcctcctgaggccggaccccgcccaggcagggagctgctgtgagtccagctgaggcccacccaggtggtccctccagccctggttaggcactgagggctctggacgggctccaggaaccctgggctgatgggagcagtgagcgggctccgctgccccctgccctgcactggaccaggagtctggagatgcctgggtagccctcagcatttggaggggaacctgttcccgtcggtccccaaatatccccttctttttatggggttaaggaagggaccgagagatcagatagttgctgttttgtaaaatgtaatgtatatgtggtttttagtaaaatagggcacctgtttcacaaaaaaaaaaaaaaaaaaa

SEQ ID NO: 1731 - DNA, 3756 bp, Homo sapiens
gactcggagggggaggagcagggctgagctggccacgccacctagggacagcgcgcgccgccgcagtagctggggccaccctcgggaaggaagagcctgtcgcgagcgcgagcttctgagctcgacgggccgagctggcagctggttggtgcttacaccttggccgcagcggcaggtccttccacgtgctttcggcggcgacatggagctggaggagttggggatccgagaggaatgtggcgtgttcgggtgcatcgcctcaggagagtggcccacgcagctggatgtaccgcatgtgatcactctgggactcgtggggctgcagcaccggggtcaggagagtgctggtattgtgactagtgatgggagttcggtgccaacattcaaatcacacaagggaatgggtcttgtaaatcacgtctttactgaagacaatttgaaaaaattatatgtttcaaatcttggaattggacacaccaggtatgccaccacaggaaaatgtgaactagaaaattgtcagcccttcgttgttgaaacacttcatgggaagatagctgtggcacataatggcgaattggtaaatgctgctcgattaaggaaaaagcttctgcgtcatggtattggtctgtctacaagttctgatagtgaaatgattacccagttactggcgtatacccctcctcaggaacaagatgacaccccagactgggtagccaggattaaaaacttgatgaaggaagcacccacagcatactccctgcttataatgcacagagatgttatttatgcagtacgagatccttatggaaatcgtcccttatgcattggtcgtcttattccagtgtctgatataaatgacaaagagaaaaaaacatcagaaacagaaggatgggtggtgtcttcagaatcttgtagcttcttatctattggtgcaagatattaccgtgaagtcttgcctggagaaattgtggaaatatccagacacaatgtccaaactcttgatattatatcaaggtctgaaggaaacccagtggctttttgtatctttgaatatgtttattttgcaagaccagacagtatgttcgaagaccaaatggtttatacagtaagataccgttgtggccagcagctagcgattgaagcacctgtggatgcagatttggttagcactgttccagaatctgctacgcctgctgctcttgcttacgcaggaaagtgtggacttccatatgtggaggtgctgtgtaaaaaccggtatgtagggagaaccttcattcagccaaacatgaggttaagacaacttggtgttgcaaaaaaatttggagtattgtcagacaactttaaaggcaaaagaattgttcttgtagatgattcaattgtcagaggcaataccatctcacctataataaaactgctcaaagaatctggtgcaaaagaggtacacattcgagtagcttcaccaccaattaaatatccatgcttcatgggaataaacattcctacaaaagaagagctcattgccaataaaccagaatttgatcaccttgcagaatatctaggagcaaacagtgttgtgtatctgtcagtagaaggactggtttcatctgtacaagaagggataaagtttaaaaaacagaaagagaaaaagcacgatattatgatccaagaaaatggaaatggtctggaatgttttgaaaagagtggtcattgtacagcttgtctcactggaaaatatcctgtagaattagaatggtagctggtagggttggatgtgtgtagtttcaagatagaaagttggtcaagaagttatagtggtcacacctcatctatttactgttactcagttggtacaatgtaaaatgccatgcttatgtttataagttttgagattttttttttttctgaaaaggataccaaagtgcgataactgaacatttccaattgcatataatacaacaatatgtggtgttcttttttttacacaagcattggctagcctttttaacctggtcagagaaggcaggtggtcactgacatttcccaagtccatgctttaaagggtttgcaagaagttagggttaaggagaggtgatgccaacaagacaggtgagttaaatataccatttcacacaaagtttgaatagaatacattatacctcataggtgtctagcctctacagttctggctgtagttatgaccttggcttccctgtctaactgtagacaaatctttaaaaaaaaataataataatctggtgcctcagtttccccacatgtgcaatgggatacttattaaataattaataagaatgtgaataagtgtcatacttttgtgatttgagccatcatttcacttctgattttaagacaactcatgattgttagctttcagaaagctaatgattgttaactttttgaaattagtttacaattaattaagatttcattatgatggaaggagacataattggcagatctttgccatctctctttgagatgtcctaaaaagggttgtaaaaatctgtgaaaaagtttttcctacatttgactagaaaatgtgatccatagtatttagtgccctgatactataagctcagcaagtaacctggtacatttgaaataaaaaccaaatttttagattcaaacaatccctttatccttaatttaattaattatcatatgctttttttaatgaagtgcttgatcacttgcaaacatatatacatgtagatgtacatatacatgtacacatacacataaatattattgcaattaagtgatcaagtacagacacaataggggccagttttgtttaaggatcaaagagacaaccactttggggaattagtatcaacttacaatccaagtccaagtatcatcttataatcacttttttctactatattaagatctaatgaatttgatttcttttttgaagttttttcttgtaacatctgagattagaagtttaagatgacttgaccccaaacctttgtttatgtaagaatttttaaacataaaagtgtttgtttctgttatgttaccataatttgatgtatatagtgtccagatccatttagaaatttaatatttattaataactgaaactgtttgtcttcctttggtatatagtctcgcatattatattatagcaggccaagataaaattttgacagctctttaagcccacatgcagcagtgggtcagataaccctgtggcagtgacacgggcaaattggcatttgaataaagccctgggaccacctcaacatgcgtagcctcttgtcttaaatgtactccccatggcagcatggaggaggcaagacctgtgggtcaattttgaactggccttactttgatttttaaaacaagagactcagggaaagtactaaaccaaaatctctgattttactttgcgttttctgtagtttttgttttactgagatgcttttgtaaaggaaaataatactgtgacagtttagtaattctacagattcttaatatttctccatcatggccttttacttcacaattttctgaagtctgaattcaattacaatttttttttaccaatttaatctcaaatgttgtttaactgctttaaattcatatacgtagagtattataaactgcagagatgaaaaatgtgttttcacgggatttatattgtgaactaaactaagcctactttttgtgacttatttgtgatgccttgttgataaatatgtgtaataagtatgtttaaaaaaaaaaaaa

SEQ ID NO: 1732 - DNA, 3945 bp, Homo sapiens
gctcctcctccgctccgccagtgtccggccgcgggccggccttagtgactggggcggcgggccccggggccgcggcgtggggcgggcaggcggacgccggccgcgggctgctttcgtcggctcccaagctctcccggagcgagcagccgcccgcgagccgccgcggagcctcctcgcccgctcccgccggcgagcaagatgatgtgcgaggtgatgccgaccatcagcgaagcagaaggcccccctggaggaggtggaggccatggttccggctccccttcacagccagatgcagattcacattttgaacagttgatggtctccatgctagaagaaagggaccgccttcttgatacactgagagagactcaagaaacgctggccttaacccaggggaagttacacgaggttggtcatgaaagagattccttgcagagacagctcaacacggcacttccacaggagttcgcagcacttactaaagaactcaatgtatgcagggaacagctccttgaaagggaagaagaaattgctgaactgaaagcagaaaggaataacaccaggctgctgttagagcatttggaatgccttgtctccaggcatgagcggtctcttaggatgaccgtggtgaagagacaagcgcagtctccagcaggcgtgtccagcgaagtggaagtgctgaaagcactgaagtccttatttgaacaccacaaagctctggatgaaaaggtgagagagcgattacgagtagcacttgaaagatgtagtttgttagaagaggaattaggtgccacacacaaagagctaatgattcttaaagaacagaataatcagaaaaaaactctaacagatggagtgctggacataaaccatgaacaagaaaatacaccaagcacgagtggaaagagatcttctgatggttctttaagccacgaggaagaccttgctaaagtaattgagctccaagaaatcataagtaagcagtcaagggaacagagccaaatgaaagaacgcctggcttccctttccagtcatgtgacagaactggaagaggatctggacacggctagaaaagatctcatcaaatctgaagaaatgaacacaaaattgcaacgagatgtccgtgaagccatggcccaaaaggaagatatggaagagagaatcactactcttgaaaaacgctacctcgctgcacagcgtgaagccacatctgtgcatgacctcaatgataaacttgaaaatgaaattgcaaataaagattctatgcatcgacagactgaagataaaaaccgccagttacaggagcgcttggaattggcagagcaaaagctgcaacagacactgaggaaggcagagacgctcccggaggtggaggcggagctggcccagagggtggcagcgctttccaaggctgaagagagacacggcaacattgaagaaaggttacgacagatggaagcacagttggaggagaagaatcaagaactgcagcgggcaaggcaaagagaaaaaatgaacgaagaacataataaacgtttatcagacactgttgacaagctgctttcagaatctaatgagaggcttcaacttcatcttaaagagagaatggctgctttggaagataagaactctcttttaagagaagttgaaagtgcaaaaaagcagttagaagaaacacaacacgataaggatcagcttgtcctaaacattgaagcactgagggctgaactagaccacatgagactaagaggtgcttcacttcatcatggccgaccccacttgggcagtgtcccagatttcaggttccccatggcagacggccacacagactcctacagcaccagtgcagtgctgcggcgcccacagaaaggccggctggcagccctgcgagatgagccttccaaggtacaaactcttaatgagcaggattgggaacgtgcccagcaagctagtgtcttggcaaatgtagcacaagcattcgagagtgatgctgacgtgtctgatggtgaagatgacagggacactctcctcagctcagttgacctgctatcgcccagcgggcaggccgacgcgcacacactagccatgatgcttcaggagcagctggacgccatcaacaaagagatcaggttgattcaggaagaaaaagaaaatacagagcagcgggcagaggagattgaaagtcgagttggcagtggaagtctagacaatcttggtcgttttagatcaatgagctccattcccccctaccctgcttcctcgcttgctagctcctcccctccgggcagtgggcgctccaccccacgaaggatccctcacagcccagctcgggaagtggacagactgggcgtcatgacccttttgccaccttccagagaagaggtacgagatgacaagacaaccataaagtgtgaaacctccccgccttcctccccgagagcccttcggttagaccggctgcacaaaggggcgctgcacaccgtcagccacgaggacatcagggacataaggaactccacaggctcccaggatggtcccgtgagcaaccccagcagtagcaacagtagccaggactcgctccacaaagccccaaagaagaaaggcattaagtcctccattggccgcttgtttggcaagaaagaaaagggccgacctggacaaactggcaaagaagcattaggacaagctggtgtttccgagacggataactcatctcaggatgccttgggacttagcaaattggggggacaggctgaaaaaaatcgtaaacttcaaaaaaagcatgaattgctggaggaagcccggagacaaggtttaccttttgcccaatgggacgggccaacggttgtggtctggctagagctctgggttgggatgccagcctggtatgtggctgcctgccgagcaaacgtgaaaagcggggccatcatgtcggccctgtccgacacagagatccagcgtgagattggcatcagcaaccccctgcacaggctgaagctgaggctggccatccaggagatcatgtcgctgaccagcccgtctgccccgcccacatctagaacgacactcgcctatggggacatgaaccacgagtggatcggcaacgagtggctccccagcctgggcctcccccagtaccgcagctacttcatggagtgccttgtagacgccaggatgctggaccacttgaccaagaaagaccttcgagggcagctgaaaatggtcgacagttttcacagaaacagtttccagtgtggaattatgtgcctgagaaggttaaattatgaccggaaagaactggaaagaaaaagagaagaaagtcagagtgaaataaaagacgtgcttgtttggagcaatgatcgagtgattcgctggatcctgtcaattggccttaaagaatatgcaaacaatcttatagagagtggtgttcacggagcacttctggccttagatgaaaccttcgacttcagtgcactggcactgctgttacagatcccgacgcagaacacacaggctcgtgctgtcttggaaagagaatttaacaaccttttggtcatggggactgatagaaggtttgatgaagatgatgataaaagctttaggagagcaccttcatggagaaaaaagtttagaccaaaggacattcgtggcttagctgctgggtcagcagagactctccctgcaaacttccgggtgacttcttctatgtcttccccctctatgcagccaaagaagatgcagatggacggtatgtgatgggtcacactaacctgtcacttgttgggagcatgagcagctttctgtctggaacattaataatgatctaaaacggcctatttaatatgttacaaggcacttgagtatggttgcatgtccaaatataaatgtttttaaattaactctaacatttgtttataaaagtttaaccataataatagaattttt

SEQ ID NO: 1733 - DNA, 6076 bp, Homo sapiens
gattcctgcagggagggaggagagaagggcggcagtgggagggggaggtacctggaactgggagtgatgtcagctcccagctcggtgcctgcccggattcctgacatggtgtagtgcaggcagggtggggaaaggacggggaaggactcgtgtgctgcgagctggcggccgggccggagtgctggggctttgaactccgagaggaggtggaccagaacttttggaactagtgccggcggctctccaccccccagtataaaagaacgtgtggatcactttgctgagtacatccaagatttgaagaactgaaataaatcagctttaaacctgctttttaaaaatatctgggttggaatttgcccctgacaaataataaaatgatgagtgatgcaagtgacatgttggctgcagcgttggagcagatggatggtatcatagcaggttctaaggctctggaatattccaatgggatttttgattgccaatctcccacctctccattcatgggaagtttgcgagctctgcaccttgtggaagacctgcgtggattgttagagatgatggaaacagatgagaaagaaggcttgagatgccagatcccagattcaacagcagaaacgcttgttgaatggcttcagagtcaaatgacaaatggacacctaccagggaacggagatgtgtatcaagaaaggctggcacgtttagaaaatgataaagaatccctcgttcttcaggtaagtgtgttaacagaccaggtggaggctcagggagagaagattcgagatttggagttttgtcttgaagagcacagagagaaggtgaatgccacagaagaaatgctgcagcaggagcttctaagtaggacatccttagaaactcagaagttggatctgatggctgaaatatctaacttgaagttgaaactgacagctgtagagaaggacagattggattatgaagataagttcagagacacagaggggctgattcaggagatcaatgatttgaggttaaaagttagtgaaatggacagtgagagacttcagtatgaaaaaaagcttaaatcaaccaaagatgaactggcatctttaaaagaacaactagaagaaaaggaatctgaagtaaaaaggctacaagaaaaattggtttgcaagatgaaaggagaaggggttgaaattgttgatagagatgaaaattttaaaaagaagctcaaagaaaaaaacatcgaagtacaaaaaatgaaaaaagctgtggagtccttgatggcagcaaatgaagaaaaggatcggaaaatagaagatcttcgacagtgcctgaacaggtacaagaaaatgcaagacacggtggtactggcccaaggtaaaaaaggcaaagatggagaatatgaagagctgctcaattccagttccatctcctctttgctggatgcacagggtttcagtgatctggagaaaagtccatcacccactccagtaatgggatctcccagttgtgacccatttaacacaagtgttcccgaagagttccatactaccatcttgcaagtttccatcccttcattattgccagcaactgtaagcatggaaacttctgaaaaatcaaagttgactcctaagccagagacttcatttgaagaaaatgatggaaacataatccttggtgccactgttgatacccaactgtgtgataaacttttaacttcaagtctgcagaagtccagcagcctgggcaatctgaagaaagagacatctgatggggaaaaggaaactattcagaagacttcagaggacagagctccggcagaaagcaggccatttgggacccttcctcccaggcccccagggcaggacacctccatggatgacaaccccttcggcactcgaaaagtcagatcttcctttggccggggcttttttaaaatcaaaagtaacaagagaacagcaagtgcaccaaacttagatcgtaaacgaagtgccagtgcacccaccctagctgaaacagaaaaagagacagcagagcacctagatctggctggtgcttcttctcggccaaaagattcacagaggaacagtcccttccagataccgcctccatctccagattccaaaaagaaatccagaggtatcatgaaactctttggaaaacttaggagaagtcaatcaactacattcaacccagatgacatgtctgagcctgaattcaaaagaggagggacaagggcaaccgcggggccccgattaggttggtctcgagacttgggacagtctaacagtgacttggatatgccatttgccaagtggaccaaggagcaggtttgcaattggctgatggaacagggcttgggctcgtacctgaattctggcaagcactggattgcatctggccaaacgcttttgcaggcttctcaacaagatctagagaaggaacttggaatcaagcattcacttcatcgaaagaaactccagctagcactccaagccctgggatctgaagaagaaaccaatcatgggaagctggatttcaactgggtcactagatggttggatgacattggcctccctcaatataagacccagtttgatgaaggacgggttgatggtcgaatgctacattacatgactgttgatgacttactgtctctgaaggttgtaagtgtgctacaccatctcagtatcaaaagggccatccaggtcctgaggatcaataactttgaaccaaactgtctacggaggcggccatctgatgagaataccatcgccccatcagaagttcagaagtggactaaccatcgagtgatggagtggctgcgctccgtggacttggcagaatatgcgcccaatctcagaggcagtggtgtccatggtgggctcatggttctagagcctcgttttaacgtagaaacaatggctcagttattgaacatcccacccaataagactttgctgcgaagacatttggccactcatttcaaccttctgattggggctgaggcacagcaccagaagcgagatgccatggagctgccggattatgtacttctaacagctactgccaaagtgaagccaaagaaacttgcctttagcaattttgggaatttgagaaagaagaaacaggaagatggtgaagaatatgtttgtccaatggaattgggacaggcatcaggaagtgcatctaagaaaggatttaaacctggtttggatatgcgcctgtatgaggaagatgatttggaccggttagagcagatggaagattcagaagggacagtgagacagataggtgcattctctgaaggcatcaacaatctgacgcacatgttaaaagaagatgacatgtttaaagattttgctgcccgttcccccagtgccagcattacagatgaagactcaaacgtttgaccgtagcacctggatgaacattaggagtgcttagtcttttttctacttgcttttccaaacactcacagtatatacaacaggcagcggattgtctattgtttgttgttccaacttctgctgtcgagaagtttaaacagaaagcaggagtaatgtgccgattctgaagttgccacaaaaaataagacactggtgaatgagagtataattgtttttcttctatttaatgtaaaaatctgtgatatattatatttaaagtgttgcatttaagatgagtattttaccagagtgtttccattcatatccgcggtatggaggatttgaggaacagtaaccaggatgtgaatgattttgttacatcagtgttcactgtagccacctaagtaggacattatatgatttcagaatcaatatgtggaacttctttaagcattcagtgtgcccactaaatgccagccacacctccacttgcctcttattgtcttatttttatatatttttctaaatatatgtatatatacagtacatagaaaatagaacttttattttgtgacctaaggacgatggtgaaaagatcacgttttcaaaacaatctggtgatcagaatgttcatataccagctggtttctgaagaggtcagaatgatctttctccatactgacttttaacaatgttgatcattgaggctaaattaatatatatgaaatattcctttttgatgacaccacaaaattgttgaacagtttaagaatttcaaccttaatcttggatccctttacctcatatggaagaacttgagggacattagtatacttttttttaagatggagtcttgctctgtcacccaggttggagtgccatggcatgatcttggctcactgcaacctccacctcctgggtcaagccattctgcttcagccccaagtaggtgggactccaggcatgcaccaccatgcctggctaatttttgcatttttagtagagacagggtttcaccatattggccaggctgggactcgaactcctgaccttgtgatctgcccgcctcagcctcccaaagtactgggattataggcatgagccaccacgcccagcctgttatttttttattattattgtttttttttagtgacagagtctcattctgttgcccatgctggagtgcagtggcgtgatcatagctcactgcagccttgaattcctaggctccagtgatcctctcacctcagcttccctaatagctaggattacaggtgtgtggcctcccaccccaccccacccttcacacctggctgatttttcaaaaagtttttttgtagaaacagggtctcaccatgttgtccagcctggtctcaaactcctgtcctcaagtgatcctcccacctcagcctttcaaagtgctggaattacaggtgtgagccactctgcctggcctaccactaacttgaatacattcagaatcacctcctctccccaaaatttgtagaaatagtttttgaggaagccaaaagcaaagcagaaacctttacagtattgtttcttttctctttgttaactgtgtcattacagcaaaatactagcagtctgcctaaacatgttcattgtacatttctcaggctatcaatgaatggaggtttttaaaaagttgaatatttgtctgaacattttatttcaaagttcaaaaaaacagaggctgcaaaattcattttataatggctattttgtgacgataagatgtagttcatgtttttctgtagcactgggcccaaatattctttgtaaagaaaatcgctgcagcaaaaactgttactgtgtttattatatttgtagaagtattagaaaaatattctattttttattcagtgctgcgtaattacccatggtagccaaccctacaaaagacaggttttcacaaattgaggtggaggtgggcggttcagtatctgccactggacttgattataaactgtatttgaatatcagtggtattatcttttaagttgtcagcaagttaccaaggtattcattaaagaacttgtaatatcaaattactatttattcataacaattgatttgatgctaataataattttctttaaactctaccattcattatgtggtaactgtattgaacttactttatttggattttattttaatgtgactagatgtcaccacttcaaaaaatcaatttgttcttagaacctggttgaaaataccaggaaactgttacagacgccattttttttttttttgagacggagtcttgctctgttgcccaggctggagtgcagtggcacaatctcagctcactgcaagctccgcctcctgggttcacgccattctcccacctcagcttcccaagcagctgggactacaggtacctgccaccacgcctggctaattttgtttttgtatttttagtagagacggggtttcaccgtgttagccaggaaggtctcaatctcctgacctcgtgaatcgcccccctcggtctcccaaagtgctgggattacaggcgtgagccaccatgcccggcccaaatattttttattcaggatggtataacctaactgataataggtaataaggttaaatttttttatgacgtattttatttacaaatatcatacactgctggtgttaccatatgaaaggaaataaagtcaattgataattgcctc

SEQ ID NO: 1734 - DNA, 971 bp, Homo sapiens
gattcctgcagggagggaggagagaagggcggcagtgggagggggaggtacctggaactgggagtgatgtcagctcccagctcggtgcctgcccggattcctgacatggtgtagtgcaggcagggtggggaaaggacggggaaggactcgtgtgctgcgagctggcggccgggccggagtgctggggctttgaactccgagaggaggtggaccagaacttttggaactagtgccggcggctctccaccccccagtataaaagaacgtgtggatcactttgctgagtacatccaagatttgaagaactgaaataaatcagctttaaacctgctttttaaaaatatctgggttggaatttgcccctgacaaataataaaatgatgagtgatgcaagtgacatgttggctgcagcgttggagcagatggatggtatcatagcaggttctaaggctctggaatattccaatgggatttttgattgccaatctcccacctctccattcatgggaagtttgcgagctctgcaccttgtggaagacctgcgtggattgttagagatgatggaaacagatgagaaagaaggcttgagatgccagatcccagattcaacagcagaaacgcttgttgaatggcttcagagtcaaatgacaaatggacacctaccagggaacggagatgtgtatcaagaaaggctggcacgtttagaaaatgataaagaatccctcgttcttcaggtaagtgtgttaacagaccaggtggaggctcagggagagaagattcgagatttggagttttgtcttgaagagcacagagagaaggtgaatgccacagaagaaatgctgcagcaggtatgtgcagaggccagaaccaagatgggatttccctgctgaactatgtgagatgctgcatttctatgttgtgtttgctctgatgcagcagtaagtttcttgattcatttagaccagcacatt

SEQ ID NO: 1735 - DNA, 2276 bp, Homo sapiens
gaacgtggtataaaaggggcgggaggccaggctcgtgccgttttgcagacgccaccgccgaggaaaaccgtgtactattagccatggtcaaccccaccgtgttcttcgacattgccgtcgacggcgagcccttgggccgcgtctcctttgagctgtttgcagacaaggtcccaaagacagcagaaaattttcgtgctctgagcactggagagaaaggatttggttataagggttcctgctttcacagaattattccagggtttatgtgtcagggtggtgacttcacacgccataatggcactggtggcaagtccatctatggggagaaatttgaagatgagaacttcatcctaaagcatacgggtcctggcatcttgtccatggcaaatgctggacccaacacaaatggttcccagtttttcatctgcactgccaagactgagtggttggatggcaagcatgtggtgtttggcaaagtgaaagaaggcatgaatattgtggaggccatggagcgctttgggtccaggaatggcaagaccagcaagaagatcaccattgctgactgtggacaactcgaataagtttgacttgtgttttatcttaaccaccagatcattccttctgtagctcaggagagcacccctccaccccatttgctcgcagtatcctagaatctttgtgctctcgctgcagttccctttgggttccatgttttccttgttccctcccatgcctagctggattgcagagttaagtttatgattatgaaataaaaactaaataacaattgtcctcgtttgagttaagagtgttgatgtaggctttattttaagcagtaatgggttacttctgaaacatcacttgtttgcttaattctacacagtacttagattttttttactttccagtcccaggaagtgtcaatgtttgttgagtggaatattgaaaatgtaggcagcaactgggcatggtggctcactgtctgtaatgtattacctgaggcagaagaccacctgagggtaggagtcaagatcagcctgggcaacatagtgagacgctgtctctacaaaaaataattagcctggcctggtggtgcatgcctagtcctagctgatctggaggctgacgtgggaggattgcttgagcctagagtgagctattatcatgccactgtacagcctgggtgttcacagatcttgtgtctcaaaggtaggcagaggcaggaaaagcaaggagccagaattaagaggttgggtcagtctgcagtgagttcatgcatttagaggtgttcttcaagatgactaatgtcaaaaattgagacatctgttgcggttttttttttttttttttcccctggaatgcagtggcgtgatctcagctcactgcagcctccgcctcctgggttcaagtgattctagtgcctcagcctcctgagtagctgggataatgggcgtgtgccaccatgcccagctaatttttgtatttttagtatagatggggtttcatcattttgaccaggctggtctcaaactcttgacctcagctgatgcgcctgccttggcctcccaaactgctgagattacagatgtgagccaccgcaccctacctcattttctgtaacaaagctaagcttgaacactgttgatgttcttgagggaagcatattgggctttaggctgtaggtcaagtttatacatcttaattatggtggaattcctatgtagagtctaaaaagccaggtacttggtgctacagtcagtctccctgcagagggttaaggcgcagactacctgcagtgaggaggtactgcttgtagcatatagagcctctccctagctttggttatggaggctttgaggttttgcaaacctgaccaatttaagccataagatctggtcaaagggatacccttcccactaaggacttggtttctcaggaaattatatgtacagtgcttgctggcagttagatgtcaggacaatctaagctgagaaaaccccttctctgcccaccttaacagacctctagggttcttaacccagcaatcaagtttgcctatcctagaggtggcggatttgatcatttggtgtgttgggcaatttttgttttactgtctggttccttctgcgtgaattaccaccaccaccacttgtgcatctcagtcttgtgtgttgtctggttacgtattccctgggtgataccattcaatgtcttaatgtacttgtggctcagacctgagtgcaaggtggaaataaacatcaaacatcttttcatta

SEQ ID NO: 1736 - DNA, 1045 bp, Homo sapiens
actatccggcgccgagccggaggggggaaacggcgcccgccgcccgcccggagcccgcgagcaaccccagtcccccccacccgcgcgtggcggcgccggctccctagccaccgcggccccaccctcttccggcctcagctgtccgggctgctttcgcctccgcctgtggatgctgcgcctctccgaacgcaacatgaaggtgctccttgccgccgccctcatcgcggggtccgtcttcttcctgctgctgccgggaccttctgcggccgatgagaagaagaaggggcccaaagtcaccgtcaaggtgtattttgacctacgaattggagatgaagatgtaggccgggtgatctttggtctcttcggaaagactgttccaaaaacagtggataattttgtggccttagctacaggagagaaaggatttggctacaaaaacagcaaattccatcgtgtaatcaaggacttcatgatccagggcggagacttcaccaggggagatggcacaggaggaaagagcatctacggtgagcgcttccccgatgagaacttcaaactgaagcactacgggcctggctgggtgagcatggccaacgcaggcaaagacaccaacggctcccagttcttcatcacgacagtcaagacagcctggctagatggcaagcatgtggtgtttggcaaagttctagagggcatggaggtggtgcggaaggtggagagcaccaagacagacagccgggataaacccctgaaggatgtgatcatcgcagactgcggcaagatcgaggtggagaagccctttgccatcgccaaggagtagggcacagggacatctttctttgagtgaccgtctgtgcaggccctgtagtccgccacagggctctgagctgcactggccccggtgctggcatctggtggagcggacccactcccctcacattccacaggcccatggactcacttttgtaacaaactcctaccaacactgaccaataaaaaaaaatgtgggtttttttttttttaatataaaaaaaaaaaaaaaaaa

SEQ ID NO: 1737 - DNA, 813 bp, Homo sapiens
gaaatccgcggaccgggctttaggttcgccggaatcccacgctcccgacttctgcttccgggtcggagccatggcggtggcaaattcaagtcctgttaaccccgtggtgttctttgatgtcagtattggcggtcaggaagttggccgcatgaagatcgagctctttgcagacgttgtgcctaagacggccgagaactttaggcagttctgcaccggagaattcaggaaagatggggttccaataggatacaaaggaagcaccttccacagggtcataaaggatttcatgattcagggtggagattttgttaatggagatggtactggagtcgccagtatttaccgggggccatttgcagatgaaaattttaaacttagacactcagctccaggcctgctttccatggcgaacagtggtccaagtacaaatggctgtcagttctttatcacctgctctaagtgcgattggctggatgggaagcatgtggtgtttggaaaaatcatcgatggacttctagtgatgagaaagattgagaatgttcccacaggccccaacaataagcccaagctacctgtggtgatctcgcagtgtggggagatgtagtccagacaaagactgaatcaggccttcccttcttcttggtggtgttcttgagtaagataatctggactggcccccgtctttgcttccctgcctgctgctgccccatttgatcaagagaccatggaagtgtcagagattcagaatccaagattgtctttaagttttcaactgtaaataaagtttttttgtatgcgtaaaaaaaaaaaaaa

SEQ ID NO: 1738 - DNA, 1049 bp, Homo sapiens
aaccaccgctgccagctgcgcgctcgggggaaaagacgttgcgcccccgccgactgccggtttcccgggcgcgagcccggatccaggtggtcagtcccggtacgcaaccacggcgagaacccggccctgctaagggagaagggaagccgtttcccgcgggcttcatacagacacggtgctaagacagcccgagtcgcggaccagtccaacaggcaggcagatcagtgggcagcccgcgtgcgcgaggaccccgatggcggcgccgggtggcgggaaggaggaagtttcaaagccagcttgacgtggttgtggccgttgggcgagatgaagctacactgtgaggtggaggtgatcagccggcacttgcccgccttggggcttaggaaccggggcaagggcgtccgagccgtgttgagcctctgtcagcagacttccaggagtcagccgccggtccgagccttcctgctcatctccaccctgaaggacaagcgcgggacccgctatgagctaagggagaacattgagcaattcttcaccaaatttgtagatgaggggaaagccactgttcggttaaaggagcctcctgtggatatctgtctaagtaaggattccatatggctctcatatcattccattccatctctgccaagatttggataccgcaaaaatttgtgtttgtggaagattctgtctgaactctttcattcaaggaactactaccatgaatctgcattctgttgcccacactgtggtcttagtagataatttgggtggtactgaagcacctattatctcttatttctgttctctaggctgttatgttaattcctctgatatgttaaagtaatgggtgagaccagaaaaagaaatttcaataacagatcagtttggggtgcatgtatgattttgcagcgtcaaattggagtaagggaagatttctgtatacttgctggagaggaggaatgtgtatagttactcatttagatgactccaaaacttttattaaaaccaattttagttttaaaaaaaaaaaaaaaaaaaaaaaaaaa

SEQ ID NO: 1739 - DNA, 1760 bp, Homo sapiens
aaccaccgctgccagctgcgcgctcgggggaaaagacgttgcgcccccgccgactgccggtttcccgggcgcgagcccggatccaggtggtcagtcccggtacgcaaccacggcgagaacccggccctgctaagggagaagggaagccgtttcccgcgggcttcatacagacacggtgctaagacagcccgagtcgcggaccagtccaacaggcaggcagatcagtgggcagcccgcgtgcgcgaggaccccgatggcggcgccgggtggcgggaaggaggaagtttcaaagccagcttgacgtggttgtggccgttgggcgagatgaagctacactgtgaggtggaggtgatcagccggcacttgcccgccttggggcttaggaaccggggcaagggcgtccgagccgtgttgagcctctgtcagcagacttccaggagtcagccgccggtccgagccttcctgctcatctccaccctgaaggacaagcgcgggacccgctatgagctaagggagaacattgagcaattcttcaccaaatttgtagatgaggggaaagccactgttcggttaaaggagcctcctgtggatatctgtctaagtaaggccatttccagcagtttaaaaggtttcctttcagctatgagactggctcatagaggctgtaatgttgatacaccagtttcaacgctcacaccagtgaagacttcagaatttgaaaactttaaaactaaaatggttatcacatccaaaaaagactatcctctaagtaagaattttccatattccttggaacatcttcagacttcttactgtgggcttgtccgagttgatatgcgtatgctttgcttaaaaagccttaggaaattagacttgagtcacaaccatataaaaaagcttccagctacaattggagacctcatacaccttcaagaacttaacctgaatgacaatcacttggagtcatttagtgtagccttgtgtcattctacactccagaagtcacttcggagtttggacctcagcaagaacaaaatcaaggcactccctgtgcagttttgccagctccaggaacttaagaatttaaaacttgacgataatgaattgattcaatttccttgcaagataggacaactaataaaccttcgctttttgtcagcagctcgaaataagcttccatttttgcctagtgaatttagaaatttatcccttgaatacttggatctttttggaaatacttttgaacaaccaaaagtccttccagtaataaagctgcaagcaccattaactttattggaatcttctgcacgaaccatattacataataggattccatatggctctcatatcattccattccatctctgccaagatttggataccgcaaaaatttgtgtttgtggaagattctgtctgaactctttcattcaaggaactactaccatgaatctgcattctgttgcccacactgtggtcttagtagataatttgggtggtactgaagcacctattatctcttatttctgttctctaggctgttatgttaattcctctgatatgttaaagtaatgggtgagaccagaaaaagaaatttcaataacagatcagtttggggtgcatgtatgattttgcagcgtcaaattggagtaagggaagatttctgtatacttgctggagaggaggaatgtgtatagttactcatttagatgactccaaaacttttattaaaaccaattttagttttaaaaaaaaaaaaaaaa

SEQ ID NO: 1740 - DNA, 1108 bp, Homo sapiens
aaccaccgctgccagctgcgcgctcgggggaaaagacgttgcgcccccgccgactgccggtttcccgggcgcgagcccggatccaggtggtcagtcccggtacgcaaccacggcgagaacccggccctgctaagggagaagggaagccgtttcccgcgggcttcatacagacacggtgctaagacagcccgagtcgcggaccagtccaacaggcaggcagatcagtgggcagcccgcgtgcgcgaggaccccgatggcggcgccgggtggcgggaaggaggaagtttcaaagccagcttgacgtggttgtggccgttgggcgagatgaagctacactgtgaggtggaggtgatcagccggcacttgcccgccttggggcttaggaaccggggcaagggcgtccgagccgtgttgagcctctgtcagcagacttccaggagtcagccgccggtccgagccttcctgctcatctccaccctgaaggacaagcgcgggacccgctatgagctaagggagaacattgagcaattcttcaccaaatttgtagatgaggggaaagccactgttcggttaaaggagcctcctgtggatatctgtctaagtaagatggagtctcattctgtcacccaggttggagtgcagtgggaagagcttggttcactgcaacccacaggattccatatggctctcatatcattccattccatctctgccaagatttggataccgcaaaaatttgtgtttgtggaagattctgtctgaactctttcattcaaggaactactaccatgaatctgcattctgttgcccacactgtggtcttagtagataatttgggtggtactgaagcacctattatctcttatttctgttctctaggctgttatgttaattcctctgatatgttaaagtaatgggtgagaccagaaaaagaaatttcaataacagatcagtttggggtgcatgtatgattttgcagcgtcaaattggagtaagggaagatttctgtatacttgctggagaggaggaatgtgtatagttactcatttagatgactccaaaacttttattaaaaccaattttagttttaaaaaaaaaaaaaaaaaaa

SEQ ID NO: 1741 - DNA, 1703 bp, Homo sapiens
gcgcgtgccgcgagaacagagtggacggagcgtaggagagaccgaaaaggctgggggtgggagtagcggatttgaagcacttgttggcctacagaggtgtggcaagcagagcacctcagaactcaggcgtactgcccgccgcccgagccctgcgagggccgatagcgagggtgtggcccttatctgcacccagcagagcgccggcggggtttccgcatgggccggaccgtggtcgtgctgggcggaggcatcagcggcttggccgccagttaccacctgagccgggccccctgcccccctaaggtggtcctagtggagagcagtgagcgtctgggaggctggattcgctccgttcgaggccctaatggtgctatctttgagcttggacctcggggaattaggccagcgggagccctaggggcccggaccttgctcctggtttctgagcttggcttggattcagaagtgctgcctgtccggggagaccacccagctgcccagaacaggttcctctacgtgggcggtgccctgcatgccctacccactggcctcagggggctactccgcccttcaccccccttctccaaacctctgttttgggctgggctgagggagctgaccaagccccggggcaaagagcctgatgagactgtgcacagttttgcccagcgccgccttggacctgaggtggcgtctctagccatggacagtctctgccgtggagtgtttgcaggcaacagccgtgagctcagcatcaggtcctgctttcccagtctcttccaagctgagcaaacccatcgttccatattactgggcctgctgctgggggcagggcggaccccacagccagactcagcactcattcgccaggccttggctgagcgctggagccagtggtcacttcgtggaggtctagagatgttgcctcaggcccttgaaacccacctgactagtaggggggtcagtgttctcagaggccagccggtctgtgggctcagcctccaggcagaagggcgctggaaggtatctctaagggacagcagtctggaggctgaccacgttattagtgccattccagcttcagtgctcagtgagctgctccctgctgaggctgcccctctggctcgtgccctgagtgccatcactgcagtgtctgtagctgtggtgaatctgcagtaccaaggagcccatctgcctgtccagggatttggacatttggtgccatcttcagaagatccaggagtcctgggaatcgtgtatgactcagttgctttccctgagcaggacgggagcccccctggcctcagagtgactgtgatgctgggaggttcctggttacagacactggaggctagtggctgtgtcttatctcaggagctgtttcaacagcgggcccaggaagcagctgctacacaattaggactgaaggagatgccgagccactgcttggtccatctacacaagaactgcattccccagtatacactaggtcactggcaaaaactagagtcagctaggcaattcctgactgctcacaggttgcccctgactctggctggagcctcctatgagggagttgctgttaatgactgtatagagagtgggcgccaggcagcagtcagtgtcctgggcacagaacctaacagctgatccccaactctcattcatgaaaataaaaattgctggagcttggcaaaaaaaaa

SEQ ID NO: 1742 - DNA, 4786 bp, Homo sapiens
gctgcgtgacgcggcggcgcgcaagggacgtgcggagtgagtggcgctgcgggtggggccgtcggcggcgctggtgagagaacgccgagccgtcgccgcagcctccgccgccgagaagcccttgttcccgctgctgggaaggagagtctgtgccgacaagatggcggacggggagctgaacgtggacagcctcatcacccggctgctggaggtacgaggatgtcgtccaggaaagattgtgcagatgactgaagcagaagttcgaggcttatgtatcaagtctcgggagatctttctcagccagcctattcttttggaattggaagcaccgctgaaaatttgtggagatattcatggacaatatacagatttactgagattatttgaatatggaggtttcccaccagaagccaactatcttttcttaggagattatgtggacagaggaaagcagtctttggaaaccatttgtttgctattggcttataaaatcaaatatccagagaacttctttctcttaagaggaaaccatgagtgtgctagcatcaatcgcatttatggattctatgatgaatgcaaacgaagatttaatattaaattgtggaagaccttcactgattgttttaactgtctgcctatagcagccattgtggatgagaagatcttctgttgtcatggaggattgtcaccagacctgcaatctatggagcagattcggagaattatgagacctactgatgtccctgatacaggtttgctctgtgatttgctatggtctgatccagataaggatgtgcaaggctggggagaaaatgatcgtggtgtttcctttacttttggagctgatgtagtcagtaaatttctgaatcgtcatgatttagatttgatttgtcgagctcatcaggtggtggaagatggatatgaattttttgctaaacgacagttggtaaccttattttcagccccaaattactgtggcgagtttgataatgctggtggaatgatgagtgtggatgaaactttgatgtgttcatttcagatattgaaaccatctgaaaagaaagctaaataccagtatggtggactgaattctggacgtcctgtcactccacctcgaacagctaatccgccgaagaaaaggtgaagaaaggaattctgtaaagaaaccatcagatttgttaaggacatacttcataatatataagtgtgcactgtaaaaccatccagccatttgacaccctttatgatgtcacacctttaacttaaggagacgggtaaaggatcttaaatttttttctaatagaaagatgtgctacactgtattgtaataagtatactctgttatagtcaacaaagttaaatccaaattcaaaattatccattaaagttacatcttcatgtatcacaatttttaaagttgaaaagcatcccagttaaactagatgtgatagttaaaccagatgaaagcatgatgatccatctgtgtaatgtggttttagtgttgcttggttgtttaattattttgagcttgttttgtttttgtttgttttcactagaataatggcaaatacttctaatttttttccctaaacatttttaaaagtgaaatatgggaagagctttacagacattcaccaactattattttcccttgtttatctacttagatatctgtttaatcttactaagaaaactttcgcctcattacattaaaaaggaattttagagattgattgttttaaaaaaaaatacgcacattgtccaatccagtgattttaatcatacagtttgactgggcaaactttacagctgatagtgaatattttgctttatacaggaattgacactgatttggatttgtgcactctaatttttaacttattgatgctctattgtgcagtagcatttcatttaagataaggctcatatagtattacccaactagttggtaatgtgattatgtggtaccttggctttaggttttcattcgcacggaacaccttttggcatgcttaacttcctggtaacaccttcacctgcattggttttctttttcttttttctttctttttttttttttttttttttttgagttgttgtttgtttttagatccacagtacatgagaatccttttttgacaagccttggaaagctgacactgtctctttttcctccctctatacgaaggatgtatttaaatgaatgctggtcagtgggacattttgtcaactatgggtattgggtgcttaactgtctaatattgccatgtgaatgttgtatacgattgtaaggcttatgtcactaaagatttttattctgattttttcataatcaaaggtcatatgatactgtatagacaagctttgtagtgaagtatagtagcaataatttctgtacctgatcaagtttattgcagcctttcttttcctatttcttttttttaagggttagtattaacaaatggcaatgagtagaaaagttaacatgaagattttagaaggagagaacttacaggacacagatttgtgattctttgactgtgacactattggatgtgattctaaaagcttttattgagcattgtcaaatttgtaagcttcatagggatggacatcatatctataatgcccttctatatgtgctaccatagatgtgacatttttgaccttaatatcgtctttgaaaatgttaaattgagaaacctgttaacttacattttatgaattggcacattgtattacttactgcaagagatatttcattttcagcacagtgcaaaagttctttaaaatgcatatgtctttttttctaattccgttttgttttaaagcacattttaaatgtagttttctcatttagtaaaagttgtctaattgatatgaagcctgactgattttttttttccttacagtgagacatttaagcacacattttattcacatagatactatgtccttgacatattgaaatgattcttttctgaaagtattcatgatctgcatatgatgtattaggttaggtcacaaaggttttatctgaggtgatttaaataacttcctgattggagtgtgtaagctgagcgatttctaataaaattttagttgtacacttttagtagtcatagtgaagcaggtctagaaaataagcctttggcagggaaaaagggcaatgttgattaatctcagtattaaaccacattaatctgtatcccattgtctggcttttgtaaattcatccaggtcaagactaagtatgttggttaataggaatccttttttttttttttaaagactaaatgtgaaaaaataatcactacttaagctaattaatattggtcattaaatttaaaggatggaaatttatcatgtttaaaaattattcaagcactcttaaaaccacttaaacagcctccagtcataaaaatgtgttctttacaaatatttgcttggcaacacgacttgaaataaataaaactttgtttcttaggagaaaatgattctgtaattccagtgtcactaatttatattgttctttcctctgatttttttcaggttagtgatttttttgtatacaatttaatccaaatgttatgacattcagaaatcatgaaacacagtagatatctgttataatgtggtgtatcacatggattataaagcaaagttatggtcgatttctattcttgaaagaatcaactacagtgaatcctttgcatttgaagccttaacatgcattgctttaattttgcccagggacaaattttaataatcagcaagactggtttgtgcaaagcgttgagtcatcaggtatttagagcctagccagctacccagtatccatgctgccatatcccttcattgtaaaaagtacctaaacattcgtgaaatgattttttttagctgaaaaatgctggcaagaagaattttaaagcttaaaataggtggtaaatttgaagtatgagtgtgttcacgagaaacataggcttttcaaaaaaatttttattcaaggcaaagcaaggaacatcttgagatatgtctcaagaatataaagatgtattattttaagccaaggagctgaaatatatctcagtttataaattcaggtatattctttttgtctccatggcaaccataacttttgaaccaaaaaaaattgtttttacatctttatgctgaaaatgtgtttagattaggaatatggtcgggctgaatttgctgttgctccctaaccaaatccacctcttgttttccttgtgagtccatggctaaatcaaagctgcccctgagaagagacttaatccaagcctgattgtactagtggcatcacttagaagtaggctttccctcttcctagtagatctcaatgttttataattccttaaaacagctgaaaattgggacaacatactttacgcaatgaacagtagttaaataggaaataaactagttccatataagtatacacctagagttttaattacctttataatgtttcttaaaagtgaaacttagatacaattgtgattggatacttagatactaagtgaaacttagtgtaacaattttgatctgttaaattggattttacatgtacatttgaatgccagaatttctaaataaatcccctggttaggaaattttaaaagtcaaagcttgttttcttcaaccactaccttctacattggttgacttagaccgtaagctttttaagtttctcattgtaatttaccttctcatgcagattgctgatgttttattaaaccttatttttacaaaaatgaaaaaa

SEQ ID NO: 1743 - DNA, 1209 bp, Homo sapiens
gaatattgggaaaccaaaatgaggcacaatcagatgtgttgtgagacaccacctactgtcactgtttatgtaaaatcagggtcaaatagatcacatcagcctaaaaagcccattactctgaagcgtcctatttgtaaagataattggcaagcatttgaaaaaaatacacataataacaacaaatctaaacgccccaaaggaccttgtctggttatacagcgtcaggatatgactgctttctttaaattatttgatgacgatttaattcaagatttcttgtggatggactgctgctgtaaaattgcagacaagtatcttttggctatgacctttgtttatttcaagagggctaaatttactataagtgagcataccaggataaatttctttattgctctgtatctggctaatacagttgaagaagatgaagaagaaaccaagtacgaaatttttccatgggctttagggaaaaactggagaaaattgttccctaatttcttaaagttaagggaccagctctgggatagaattgactatagggctattgtaagcaggcgatgttgtgaggaggttatggccattgcaccaacccattatatctggcaaagagaacgttctgttcatcacagtggagctgtcagaaactacaacagagatgaagttcagctgccccggggacctagtgccacaccagtagattgttcactctgtggtaaaaaaagaagatatgttagactgggattgtcttcatcatcatctttatccagtcatacagcaggggtgacagaaaaacattctcaggactcatacaactcactgtcaatggacataataggtgatccttctcaagcttatactggttctgaaggtatgatttagtaatatgccagaattagatttatgcatgttgtttactgagctctagtcagtcctttctggcggggatacataataatttatatactccaacaatatgagttaaattaatcttgaaactttctcccctttcagttactttttgtcttgtgtccatatttgttttgtggtgacccacctaaacagatttttaatgtgacctatgttaagttgaaaactaatgcaccataagcctcagtattttaagagcctgaatcatttttttgaaatgtttattttattcaaaagggtttcaagaagaaaataaatttacttgtaatctcaccttccaaa

SEQ ID NO: 1744 - DNA, 4540 bp, Homo sapiens
attctggggttcgtttagaggtttgaattttctcggagaaagacaggccggccacgaggaaaacagaaacaagccgcagcaacatctaagcccttgaaaggatcctgagagaggggggaaagggaaaacagcagccaccagcccaaccacttgtgtcttctgccccttcccacctatcttgcccaccccaccagcccacgctgcttgggacttgaaatctgtggccgaaggaccgtcactacataacttcaaaaataatcaaccaccctcccttcccaaaccacccaaattcactcatccagcgtttacttttttgaatccactcagaacttttttctgcgacccccctccctaaatggagttgggtgggggggaaatgaatactgagttggcctttattttttaaaagactttttgatccaatgaggccccctaaataattgagttttgggtcctggttggttgttttattttttttcctccaaaattttaccccctcccccctgagcccgaggtgctgacgtcgcaaaaaaattggataaaaccaccatcatgggttcgggtcccatagaccccaaagaacttctcaagggcctggacagcttccttaaccgagatggggaagtcaaaagtgtggatgggatttccaagatcttcagtttgatgaaggaagcacgaaagatggtgagtcgatgcacttacttgaacattctcctgcagacccgttcaccagaaatattggtcaaatttattgacgttggcggctacaaacttcttaacaattggctgacgtattcaaagacaaccaacaacattcccctcctccagcaaattctactgaccctgcagcatctaccgctcactgtagaccatctcaagcagaacaacacagctaaactggtgaagcagctgagcaagtcaagtgaggatgaagagctccggaaattggcctcagtccttgtcagcgactggatggctgtcatccgctctcagagcagtacccagcctgctgagaaagataagaagaaacgtaaagatgaaggaaaaagtcgaactacccttcctgagcgacctttgacagaggtgaaggctgagacccgggctgaggaggccccagagaagaagagggagaagcccaagtctcttcgcaccacagcacccagtcatgccaagttccgttccactggactagagctggagacaccatccttggtgcctgtgaagaagaatgccagcacagtggtggtttctgacaagtacaaccttaaacccatccccctcaaacgtcagagcaacgtagctgctccaggagatgccactccccctgcagagaagaaatacaagccactcaacacaacacctaatgccaccaaagagatcaaagtgaagatcatcccgccacagcctatggagggcctgggctttctggatgctcttaattcagcccctgttccaggcatcaaaattaagaagaaaaaaaaagtactgtcacctacggctgccaagccaagcccctttgaagggaaaacgagcacagaaccaagcacagccaaaccttcttccccagaaccagcaccaccttctgaggcaatggacgcagaccgtccaggcaccccggttccccctgttgaagtcccggagctcatggatacagcctctttggagccaggagctctggatgccaagccagtggagagtcctggagatcctaaccaactgacccggaaaggcaggaagaggaaaagtgtgacatggcctgaggaaggcaaactgagagaatatttctattttgaattggatgaaactgaacgagtaaatgtgaataagatcaaggactttggtgaggcggctaagcgagagatactgtcagaccgacatgcatttgagacagcgcggcgtctgagccatgataacatggaggagaaggtgccctgggtgtgcccccggcccctggttctgccctcacctcttgtcacccctggaagcaatagtcaggagcgatatatccaggctgagcgggagaagggaatccttcaggagctcttcctgaacaaggagagtcctcatgagcctgatcctgagccctacgagcccataccccctaaactcatccccctagatgaggagtgttccatggatgagactccgtatgttgagactctggaacctggggggtcaggtggctcacctgatggggcaggaggctccaagttgcctccagttctggccaatcttatgggaagcatgggtgctggaaagggcccccaaggccctggaggaggaggcattaatgtccaagagatcctcacctccatcatgggtagcccaaacagtcatccttcagaggaactactgaaacaaccagactattcggacaagatcaagcagatgctggtgccacatggactcctaggccctggcccaatagccaatggtttcccaccagggggtcctgggggccccaagggcatgcagcactttccccctggacctgggggacctatgccaggtccccatggaggccctggtgggccagtgggtccacgtcttctgggtcctccaccccctccccggggaggtgatcccttctgggatggcccgggcgaccctatgcggggtggcccaatgcgggggggtccaggaccaggtcctggaccataccatagaggccgaggtggccgaggaggaaacgaacctcctcctcctcctcctccattccgaggcgccagaggaggtcgctctggaggaggacccccaaatggacgagggggccctggtgggggcatggttggaggtggtgggcatcgtcctcacgaaggccctggtgggggcatgggcaacagcagtggacatcgtccccacgaaggccctggcggtggcatgggaagtgggcatcgcccccatgaaggccctggtggtagcatgggtgggggtggaggacatcgtccccacgaaggccctggcggtggcatcagtggtggcagtggccatcgtccccatgaaggccctggcggaggaatgggtgccggtggtggacatcgcccccacgaaggccctggcggaagcatgggtggaagtggtggacatcgtccccatgaaggccctggacacggggggccccatggccaccggcctcatgatgtccctggtcaccgaggccatgaccatcgagggccgccacctcatgagcaccgtggccatgatggtcctggccacgggggagggggccaccgagggcacgatggaggccacagccatggaggagacatgtcaaaccgccctgtctgccgacatttcatgatgaagggcaactgccgctatgagaacaactgtgccttctaccacccgggtgtcaatgggccccccctgccctagggaccatttgcctgccctgttcacacaacccctgtggactgcagcctcgctctttccaccctgttatggcttctgtgaggcccattttcccttttccccagctgatgaggagccggccccctcagttcccacttgcttgggttcctgggggttttctgatcactggtgcgcattgatgtacatattttcctccagtctggggaggagagagactggaaacgttcctggactgctgaagaggagacccagttggcttcactttttgagaagattcgccctgtaccccaaacccctttccagtattacccttaatgcttgagaacctaaagctggttatcctggcgaacacccctacccttctattgcgggtccccacatgcacacagaactctgacacaggatcagctgcacttaagaaatcatcccagctaagttcattattcctcatggggtggggagatgctgaaaggggtattgtatatcccactgcactgagagggctcaatcagctggatttgagttctggaacacacatcatccccacccctcccccagcgtgggctcaccattcttagtcctttctcaagtgggaccttcaactttctgtgaacacccagtctgcgtcctgggtctgctaggttcgatgatggcgaactcgtatctgcatccggtgcaagttttagctggcagaggtgagaccggtggtgctggtctgcctttgccaactatagccagtctggagacttgataaaatacttcagtgagaccagcttctcatcaacttgggcccggcgtgctgggcctgaaagtcacactacatgcactgcctttgggagtcagctcactccctgctcccacctggaaccttgccagcgtgaaggaggcttccaggtacttcaccctgtcaaccacctctgaatccccaccaggcgccttcctgggtggattcaacaagatgattttgccctttcccagttctctccttcactttggcatcagttgttttctatgaaaacagtggattggttgggttttgtgcagggtcttgggttagagccaaaatggatttgaggatgagtatttttttttttggttttgtatattttgtacattaataataaacagtggaaagagaagcagcttaaaaaaaaaaaaaaaaaaaaaa

SEQ ID NO: 1745 - DNA, 4613 bp, Homo sapiens
atgaagatggcggacgcgaagcagaagcggaacgagcagctgaaacgctggatcggctccgagacggacctcgagcctccggtggtgaagcgccagaagaccaaggtgaagttcgacgatggcgccgtcttcctggctgcttgctccagcggcgacacggacgaggtcctcaagctgctgcaccgcggcgccgacatcaattacgccaatgtggacggactcactgccctgcaccaggcttgcattgatgacaatgttgatatggtgaagtttctggtagaaaatggagcaaatattaatcaacctgataatgaaggctggataccactacatgcagcagcttcctgtggatatcttgatattgcagagtttttgattggtcaaggagcacatgtaggggctgtcaacagtgaaggagatacacctttagatattgcggaggaggaggcaatggaagagctacttcaaaatgaagttaatcggcaaggggttgatatagaagcagctcgaaaggaagaagaacggatcatgcttagagatgccaggcagtggctaaatagtggtcatataaatgatgtccggcatgcaaaatctggaggtacagcacttcacgttgcagctgctaaaggctatacggaagttttaaaacttttaatacaggcaggctatgatgttaatattaaagactatgatggctggacacctcttcatgctgcagctcattggggtaaagaagaagcatgtcgaattttagtggacaatctgtgtgatatggagatggtcaacaaagtgggccaaacagcctttgatgtagcagatgaagacattttaggatatttagaagagttgcaaaagaaacaaaatctgctccatagtgaaaaacgggacaagaaatctccactaattgaatcaacagcaaatatggacaataatcagtcacagaagacctttaaaaacaaagagacgttgattattgaaccagagaaaaatgcatcccgtattgaatctctggaacaagaaaaggttgatgaagaagaagaaggaaagaaggatgagtctagctgctctagtgaagaagatgaggaagatgactcggaatcagaagctgaaacagataagacaaaacccctggcttctgtaactaatgccaacacttctagtacacaagcagctcctgtagctgttacaacacctactgtgtcatcaggtcaagcaacacctacatcacctattaaaaagtttccaaccacagctacaaaaatttctcccaaagaagaagagagaaaagatgagtctcctgcaacttggaggttaggacttagaaagacgggcagctatggtgcacttgctgaaatcacagcatctaaagagggtcagaaagaaaaagatactgcaggtgttacacgttcagcttcaagtcccagactttcctcctctttggataataaagaaaaggagaaagatagtaaaggaactaggcttgcatatgttgcacctacaataccaagacgactagccagtacatctgacattgaagagaaagaaaacagagattcttcaagtttgcgaacaagtagttcatatacaaggagaaaatgggaagatgatcttaaaaaaaatagctcagttaatgaaggatcaacgtatcataaaagttgctcctttggtagaagacaagatgatttgattagttctagtgttccaagcaccacatcaacaccaacagttacctctgcagctgggcttcagaaaagcctgctttccagcacaagcactactacaaagattacaacgggttcttcctcagcaggcacacaaagcagtacctcaaatcgtttgtgggctgaggatagtactgagaaagaaaaggacagtgttcctacggcagtgaccattcctgttgctccaactgttgtaaatgctgcagcttctaccacaaccctgactacaactactgctggcactgtctcctccacaacagaggtcagggagagacgcagatcatacctcactcctgttagggatgaagagtctgaatcccaaagaaaagcaagatctagacaagcaagacaatctagaagatcaacacagggagtgacattaactgatcttcaagaagctgagaaaacaataggaagaagtcgttctacccgaaccagagaacaagaaaatgaagaaaaagaaaaagaggaaaaagagaaacaagataaagagaaacaagaagaaaagaaggagtcagaaacatctagagaagatgaatataaacaaaagtactccagaacgtatgatgagacttaccagcgttataggccagtatcaacttcaagttcaaccactccatcctcttcactttctactatgagcagttcactgtatgcttcaagtcaactaaacaggccaaatagtcttgtaggcataacttctgcttactccagaggaataacaaaagaaaatgaaagagagggagaaaaaagagaagaggagaaagaaggagaagataaatcacaacctaaatcaatcagagaacgacgacgaccaagagagaaaagaagatctacaggagtttcattttggacacaagatagtgatgaaaatgaacaagaacaacaatcagacacagaagagggatccaataagaaagaaactcagacggattccatttctagatatgaaaccagttctacatcagctggtgatcgatatgattccttgctgggtcgctctggatcatacagttacttagaagaaagaaaaccttacagcagcaggctagaaaaggatgactcaactgactttaaaaagctttatgaacaaattctagctgaaaatgaaaagctgaaggcacagctacatgatacaaatatggaactaacagatcttaaattacagttggaaaaggccacccagagacaagaaagatttgctgatagatcactgttggaaatggaaaaaagggaacgaagagctctagaaagaagaatatctgaaatggaagaagagctcaaaatgttaccagacctaaaagcagacaaccagaggctaaaggatgaaaatggggccttgatcagagttataagcaaactttccaaataaaaaaaaaaaagcagcaagtaatggaattgcacatattagtaacccagtggaccataattggcagtcactggaagtctgggaagaatccttggagactgtcattttcggatatcctgccaaatgccctcttatctagaatttttgtttcattttgtttaattttctggggtgtttttgttgttgttggtttgttttttgtttttttttttaatcaagaccattgtttcatgttaatgcagctgctgagaagatttttttttaatgactgagaaaacttgtttacagctccagcatataaggaaagtgttcaaggccagatatgcctcagatatttaaccagtaagccttagttgtacataaatacttttgtgtcaacaaaaactttcagctctcacagaagacagttactcaacattttttgatgtgccacagtttcgagtttttcgatatttaaattttttggcttttcatctaagtttgggtttgtattttttccttctaaactcttcatgtggcagagtcttctatgttttcacggctttttcattacagaaaagaacacttgctcttctgtgattattgtcatgtattaggctaatgctgtgttgtctcccacctggaactgaattgcttggtggaacatatgctttcactgtttgtgcaatatgcatttatttcttatatgaatgctttaaagtcatttgaggttagatcttttaattcctattttctgcttcattggtcactttttttttattgtagtataagatgttagattctgtaatcttcacattcattttagcaggtactgagtgatgctgtatatacaaataagtgtattgttttgatttttagaccaccacatggcatgcttgactatttcttatttcaaatgtctgctaatgcagagtaggctactccatgatagtgttaaaaaacaaaatttgctaacaatgtgatataaagactttaaaagttacacattatgtggagccctatctttacaaaagtttcctactgtaaagtgcttttattttcagttttcatttgatagtactcaaccataattaaagttgcataagataattgctttacatttcacatacctatatttatctgagtgctgtctaaaactgttgtgctagccaaagtaatgctatgaaatcatttgcagaattaacccgtgagttaatgttaaatgcactgttattgccatgtgaagaggcatcgactttgataccaccatcatgttcagaccattttatacatttcagtggcctttttttttttaaggaaaaaaaagcgcaaaaccaagtacatagtgacgatggcttttatttggacaaatagcttttatattttcattaaaccatgcaaaaaatactacatctttctggcacataactgtctccttaaccactggaacagttcagccatttgaataaattgtacattgtaaagcttatagtagctgattgtattattgattgtattgtatactatattaaatgtgaatttgt

SEQ ID NO: 1746 - DNA, 5264 bp, Homo sapiens
agccggcctacccagtccttccggtatcgcgttgctcaggggcttttcaaccctctgtcagtcggaaaaccatcgccgaggccgtggggggactcctatccatggtgttgaagcgtcgagccgactagggaacctccttccccgccaggatggaagtcgcatcagtcgccgcctattgcgcgggctgttcttccctgtgttctgccgcccgctgccgcattcgctgccctctgtggcttttctgctggctcgaagatcggcctggagcagcgacgccaccgctgggcaaggccgagactctgtaggcttcctccgaatcccgtcgacctccagccgctgagcgccgcggccctacctgagagactgtcaagaaaaaggagatggagccggggacaggcggatcgcggaaacggcttggccctcgggcgggcttccggttctggccaccctttttccctcggcgatcgcaagcaggctcttctaagttcccgacgcctcttggcccggaaaactccgggaaccccacactgctttcctctgcccagcccgagactcgggtcagttactggacgaaactgctctcccagctccttgcgccgctccccggattgcttcagaaggtgctaatttggagccaacttttcggtggaatgtttccgaccagatggctagattttgctggagtctacagcgccctgagagccctgaagggacgggagaaaccagccgcccccacagcgcagaaatctttgagttcgctgcagctcgactcctcagacccctcggtcaccagtccccttgattggctagaggaggggatccactggcaatactcgcccccagacctaaaattggagcttaaggccaagggaagtgctttggaccctgcagcacaggcttttctcttagagcagcagctgtggggagtggagctgttgcccagtagccttcaatcccgtctgtactctaaccgggaacttggctcttcgccctctgggcctctaaacattcaacgcatagacaatttcagtgtggtatcctatttgctgaacccttcctacctggactgctttcctaggctagaagtcagctatcagaacagtgatggaaatagcgaggtagtcggcttccagacactaaccccagagagcagctgcctgagagaggaccattgtcatccccagccgctgagtgcagaactcattccggcctcgtggcagggatgtccacctctttctacggaaggcctaccagaaattcaccatcttcgcatgaaacggctggaattccttcaacaggctagcaaggggcaagatttacccacccctgaccaggataatggctaccacagcctggaggaggaacacagccttctccggatggatccaaaacactgcagagataacccaacacagtttgttcctgctgctggagacattcctggaaacacccaggaatccactgaagaaaaaatagaattattaactacagaggttccacttgctttggaagaagagagcccttctgagggctgtccatctagtgagatacctatggaaaaggagcctggagagggccgaataagtgtagttgattactcatacctagaaggtgaccttcccatttctgccagaccagcttgtagtaacaaactgatagattatattttgggaggtgcatccagtgacctggaaacaagttctgatccagaaggtgaggattgggatgaggaagctgaggatgatggttttgatagtgatagctcactgtcagactcagaccttgaacaagaccctgaagggcttcacctttggaactctttctgcagtgtagatccttataatccccagaactttacagcaacaattcagactgctgccagaattgttcctgaagagccttctgattcagagaaggatttgtctggcaagtctgatctagagaattcctcccagtctggaagccttcctgagacccctgagcatagttctggggaggaagatgactgggaatctagtgcagatgaagcagagagtctcaaactgtggaactcattctgtaattctgatgacccctacaaccctttaaattttaaggctccttttcaaacatcaggggaaaatgagaaaggctgtcgtgactcagagaccccatctgagtccattgtggccatttctgagtgtcacaccttactttcttgtaaggtgcagctgttggggagccaagaaagtgaatgtccagactcggtacagcgtgacgttctttctggaggaagacacacacatgtcaaaagaaaaaaggtaaccttccttgaagaagttactgagtattatataagtggtgatgaggatcgcaaaggaccatgggaagaatttgcaagggatggatgcaggttccagaaacgaattcaagaaacagaagatgctattggatattgcttgacatttgaacacagagaaagaatgtttaatagactccagggaacatgcttcaaaggacttaatgttctcaagcaatgttgagttggcagcctgtagtcctagctagcatacactacctcttacctgagaggtgtcttttaaaaacaaatcttggcagctgtcctttgacatttttttttttagaggaaatgtaacttggatctagtttaatttttttttttgcaacatatcccactcagaaacattcaggtttgaagccagccctgataatgaaggatgaactagtgtgatttctaatcctcccttttttgatttagttggatgtgcttttaaatgtcctttgcctgcatgaggtggaaaggggacctttttgagttgtcattttgcactttcaaaacttattttcttggaaaacaatatttatagggcttaaagcccattttcatttctaatctaaattatgtgtgcctatctgaaaactttgggctctttcttgtttctttcccaaaattcagaagttaatgggcttttatgtttttctatattttttttatttcaatgatttggcctgtctatgttaggctaaaaaataaccttgtgtatgctaccaacttaaagtgcattattttgtgtcacttttttttttcttgtaaaaatgacttggattgaaaatatgtggtagcctttttatttctacattaagttctacctaggatatttccaaggactgccacaaaacccatatgtgcagtactttactactttgggaaagctgcatctttctaccacattttaacatctaatatatttaatttctttgaagagggttctgtgtacgttattgtagttcccagtttaatatagttctttgtatctcttaacaggttgaagttattgcaaaacactctggaaagtaataattacatcataatcatttatttttttaaacttaaaagcctagaaatttcctagaaagaaaataggagacatctcagagcaatttggttttggtgtatatgttctcaacagaaaaccagtgttaatgaatatcatgcctcagcactgtcacttttaaaacctgtcaggatcccactgtaaaattggaaatgggcagttctgaattttcacgtttgaaatgtaaaatataaacttcagtcaatatccaggtttattgtgtcctactatttaataatgagagaagtaatggcaaggcctttactttcaggaaaggatagaagtatagattaatgactggaaagttttaatatatttagcccaaaggttactttgaattgaagtctttgcattgactgtttgtgtttggtttatttgtttagctttacaaggtacacataagttaggttgaggggttgttaacccttccgtggtctgctttcattccgtgtgcttcctgtcacaggtaatggaaaacataagtagaataggtgacctcttagttttgaacttatttaagtgtggggatgaatttttcatcagaagtgcttacagggttactacctcagtttacaatctacctggtcattattttatttctatccagttctaagaactgcctccactgtttatatattcataattaaacacattgagaatgcaacactataaaagctggtcaaatttttgcagagcccttattctgtgtgttttttgtttttttcttttttttttgagacagagtctcgttcggtcccccagcttggagtgcagtggcgcgatctcggctcactgcaacctccgcctcctgggttcacgcgattctcctgcctcagcctcccgagtagctgggattacaggcacacaccaccacgcccggctaattttttgtgtctttttagtagagacggggtttcgctatgttggccagactggtcttgaactgctgacctcgtgatccgcccgcctcggcctctcaaagtgctgggattctgtgtgttttgtgcacctccactttaggtaatcatagggagcacatttacaggatggtctaataacatgaaaacaggctagtttcaagcaacagcaatgtcggttggaaagcaggcgtcatttgccttgaaaaaagccttttgacaacatacaggcattcttttaaaaccaggctgaaacattttatttccgagacttaacgttgtgtttcctgtttcttaaacctagcacctctgtgtatttgaaaataatgagacatctttcattggattttggaaaattgttccccatgggattctaacctcactaccaaatgagtgaaagcttgattaagagttcttccatatactagcctccttggaagaagtgatcagaaggtgataagaaggacagaaaggactattttaaagttggactgaaggagaaaaaagcaaaattcttgtttcatcccaattctagttagaacaaagttaaacccccgtaatcttaaagagaaaatctttggaggttttaattaaacattttatacatttaaagtcttgttaatggtgctttaagtgtcaatgtagcatgtaaaaggctttgtacagacaggtaaaagttccatttctgagtgatgaaatgtaacacttcttcatctttaacttgaaatcaaaactatcagattttatttttgtataatttaaggaaggtaaagttaggggactagaagactctaaattggcttctacagatcaataatttaaatgtaactagttgggattttatagttaaaattatatttgtgtatataacataactaatctgtaaattgtaataaatatatttgcaattaaaaaaaaaaaaaaaaaaaaaaaaaaaaaaaaaaaaaaaaaa

SEQ ID NO: 1747 - DNA, 1849 bp, Homo sapiens
agagtccccggagccgcgagctgggagcgctgtgccgggagccgggagccgagcgcgccgggctggggccggggccggagcggagcggagagggagcgcgcccgccccagccccgagtcccgccgccttccctcccgccgcagcgcgggcccaccggccgccgccccagccatggagcaagacaacagcccccgaaagatccagttcacggtcccgctgctggagccgcaccttgaccccgaggcggcggagcagattcggaggcgccgccccacccctgccaccctcgtgctgaccagtgaccagtcatccccagagatagatgaagaccggatccccaacccacatctcaagtccactttggcaatgtctccacggcaacggaagaagatgacaaggatcacacccacaatgaaagagctccagatgatggttgaacatcacctggggcaacagcagcaaggagaggaacctgagggggccgctgagagcacaggaacccaggagtcccgcccacctgggatcccagacacagaagtggagtcaaggctgggcacctctgggacagcaaaaaaaactgcagaatgcatccctaaaactcacgagagaggcagtaaggaacccagcacaaaagaaccctcaacccatataccaccactggattccaagggagccaactcggtctgagagaggaggaggtatcttgggatcaagactgcagtttgggaatgcatggacaccggatttgtttcttattccttcacttttggggaaaatctcttgtttttaaaaagtgataaatttggtgttaggtccttggcactttccttcttttccaactgggagaatcctttctccctgccttcttgccctgccctctctgtagcccccaccctcctgccaagctgcctctgggaaggaagaaacaggagctaggcagaagccttgagcagggaagagttcttcccttagccctgactttacttgctgtgggaagagagatgagggtcagataggtgggaggactaacttccagggtgccaagaaggaagaaaagccccaggttctcttttcttattgaggaacgatccgaccacctcacaggcctgccctgcagctggaagactcggcgctctaaggcctgtgccgtgtccagctgtgactgtgcggtgggctccatctgctggacaaaaggggaactgcaccatggcacttggcccatgggaaagagggtatggtggtgtgccgatacctcctcgcctgccctccaagccccagctgccttccttttggattcccaagcttcaggatgtgttccctcttccagctgtgggaccgctgtcccttatttcaacccgttagcaacaatggatagagaacacagtggctattaatgaagaggcccatgctggagactggaagggttcccttgtcctagacattgaggggcccagataagaccaaaaccaagcataagagaagaaactgtctcagatctcacggccaggcctctctcctgctgctgtttttgattttcccaggtagtgggagagaggaaaggagggaaggcaagattctttccccctccctgctgaagcatgtggtacagaggcaagagcagagcctgagaagcgtcaggtcccacttctgccatgcagctactatgagccctcggggcctcctcctgggcctcagcttgcccagatacatacctaaatatatatatatatatatatgagggagaacgcctcacccagattttatcatgctggaaagagtgtatgtatgtgaagatgcttggtcaacttgtacccagtgaacacacacagtcaggaaaaaaaaaaaaaaa

SEQ ID NO: 1748 - DNA, 2941 bp, Homo sapiens
cgccgccgccgccgatatggcgcgtacggcccctgtggagcccccgctgcggcattccgcgcccccctcgccggccgcgggtgagccccgcacctcggtcgaggcggcggtggccccgcggagggtgctgttcgccgacgaggccttggggctgccgctggcgcagttgcgccgctaccggccgtggggcgggcccggggcgggcaagatggcggcggcggccgggcaagatggcggcggcggcggcggggccgacgaggacgacgatggcgaggatggggatgaaggggaggaggaagaggaggcttgccccgagccctcaccgctgtgccccgtccccgctggcggggggttttacctggtccccacattttcgctgccgcccgcgccgggccgtctggagcgcttggggcgcgtcatggtggagctggaggcgctgctgccgcctcccggagcggtccccgggggtgccggggtgtgggtgcctgggggccgcccgccggtgctgcgcgggttggtacgcgtgctgaaccgctccttcgagaaggcggtgcacgtgcgggcctcacacgacggctgggcttccttttgcgaccacccagcgcgctacgtcccgcgcagcccgccgtgggcaggagcgggaggaacaggagcaggagatcccatcctggatccggggctcggcctgggtcccggccaggcatccgcctcctcgcccgacgacggcggccgcaccgaccgctttgccttccagctgccctttgctgagggcgcgggcgatggggcgcgcctcgacttcgtggtgcgctatgagacccctgagggcactttctgggccaacaaccacggccgcaactacacagtcctgctccggatcgcacccgctcccacacccactgatgccgaagggctgccccagcagcagcagctgccgcagctggagccacagcccgagtgccagggtcccgtggaggctgaggccaggcagctgaagagctgcatgaagccggtgaggcgcaggcctgccgaggaggaactgaagacgaagaacatggatgataacacctttgccatggcagagcatcctgatgtccaggagtcagtgggtccactggtagcccccacccctctccgtccatggccccagatgacacttcaggtttctgacgttccgatgactggcaaccccgcagaagaaggtgatgtccccagaagcagtccacctgtggcttttacagaggtcctccaggcaccggccatcaggattcccccctcctcccctctctgtggcctgggtggctcccccagagaccaggcctcagggcccgatgcgagcgagggggccaccgggcctttcctggagcccagtcagcagcaggcagaggccacatggggagtatcgagtgagaatggaggggggctggaggctgtgagtgggtcagaggagctgctcggtgaggacaccatcgaccaggagctggagcagctctacctgtctcacctgagccgcctacgggctgctgtggctgcgggtggggcagggggtggtggggagggctccacagatggagggatgtcccccagccatcccctgggcatactgacggaccgcgacctgatcttgaagtggcctggccctgagcgggccctgaacagcgccctggctgaggagatcacgctgcactatgcccggctggggcgtggcgtggagctcatcaaggacaccgaagaccctgatgatgaaggggagggtgaagaggggctctctgtcacaccctccagcccagaaggggacagccccaaggaatcgcctccagaaatcctctccggggcccgttctgtggtagccacgatgggagatgtgtggctcccatgggcagagggctcaggatgtgacggccctgtggttctgggtacagagggtcagttcattggggatcctgagaaagggatgggcaaggacaccagctctttgcacatgaatagggtgatagctggggtgactgagtccctgggggaggccgggacagaagcccagatagaggtcaccagtgagtgggcaggcagcttggatcccatatctggcaaggagccagcctctcccgtccttctgcaggggcaaaatcccaccctcctcagtcccttgggggccgaagtctgtctctctagtgtagccaggcctcatgtgagctcccaggatgaaaaggatgcaggcccaagccttgaacccccaaagaagtctcccaccctagcagtccctgcagaatgtgtgtgtgcactgcctcctcagctccgggggcccttgacccagactctgggggtcctggccgggctagtggtggtccctgtggctctgaacagcggtgtgtccctcctggtgcttgcgctgtgcctctctctggcttggttctcataggctctgcttgtgggatcagcagaggcttaagatgggatacatggcctgtgcagtgaggggacctgggtcctttgcttctgagaatgctcaactgaaagagaggccttctcatccccaagctctccagtcaacacagggctccctgtggtgacaccagtggagatgagggaacgggtagatggtgtgagtgaggggaacttttagagtggaactgggcatgtcctccgcctaccccccgagcctgtatttatttttgtataattctctggatgagggagagtggtcgtgagctggtcttggggcacaattacccagagatatatttattaacagccaacctgtgcaacctgctggagctttatttttaatttaatttatatagagtacctattattatatgccacaatagagctctatgagaaacagtgtcttgcggtgtagtgttctcctgtttgggcatgagtgtgcagggtggtcactttctgtgggaggatcacagtggggagttgggggtgggacgtggtc

SEQ ID NO: 1749 - DNA, 1299 bp, Homo sapiens
gaattggcagccaacatggcggcggaacgcggcgcggggcagcaacagtcgcaggagatgatggaggttgacaggcgggtcgagtctgaagaatccggcgatgaagaagggaagaaacacagcagtggcatcgtggccgacctcagtgaacagagcctgaaggatggggaggagcggggggaggaggacccagaagaagaacatgagctgcctgtggacatggaaaccatcaacctggacagagatgcagaggatgttgatttgaatcactatcgcatagggaagattgaaggatttgaggtactgaagaaagtgaagactctctgcctccgccaaaatttaattaaatgcattgagaatctggaggagctacagagtcttcgagagctggatctttacgacaaccagatcaagaagattgagaatctggaggcgctaacagagctggagattctagatatttcttttaatctgctgagaaacatcgaaggggttgacaagttgacacgactgaaaaaactcttcttggtcaacaataaaatcagtaaaattgagaacttaagcaacttacatcaactacagatgctagagctgggatctaaccgcatccgggcaatcgaaaatatcgacaccttaaccaacctggagagtttgtttttggggaaaaacaaaattactaaacttcagaacctggatgcgctcaccaacctgacagtcctcagtatgcagagcaaccggctgaccaagatcgagggtctgcagaacctggtgaacctgcgggagctgtaccttagccacaatggcatcgaggtcatcgagggcctggagaacaataacaaactcacgatgttggacattgcatcaaatagaatcaaaaagattgaaaatatcagccatctaacagagctgcaagagttctggatgaacgacaatctccttgagagctggagcgacctcgacgagctgaagggagccaggagcctggagacagtgtacctggagcggaaccccttgcagaaggacccccagtaccggcggaaggtcatgctcgccctcccctccgtgcggcagatcgatgccacgttcgtcaggttctgagtccttcttggctcctcatgtggtccctctcctcggaagaactgcccagccacgggtttttaacccacctgttgctcctgaggtcgtcactatatcaacagtcacaaacccaatggcaataaaggcactgacgatagctggcgcgcgcgacgccacacaccattttcagatgccgttgcaattaaatcttgccacactgtc

SEQ ID NO: 1750 - DNA, 2590 bp, Homo sapiens
cttccagtttcccggcgtgcttagggcgcgccaaatgggagggggagacgcaagatggcggcagccgcgaactccggctctagcctcccgctgttcgactgcccaacctggtgagtggcggggcggccagggctagagtggcccggccggagctagcctgggctggaagggcggctctttttttacttttctgctgcgagccgaacggctcagaaaccccggaatggttgaggaaaaactgtttgctgcaccgggccgggcgacgtgttgaagaaccgagagcctggagcccaggcccaggaactgaagaaacccggggttgggggctcaaaggcgctcacttaggcagcccctttgagcgattagccagtcgccggagcgcttcgaggccttggcccgaacttacgcccaactcttgactgagtgcctggtgctctcgtggagcatcgcatctggccccttcctgtacgtcccgagcgcgctcgagccagccccggccccaaccctacctccaagccccgcatccctctgtggttgctgcatccctcgtgcggcacttgtctgtctgccacagagaatacgaggggcaggtaagccccctcccggtttacatctggatgtagtcaaaggagacaaactaattgagaaactgattattgatgagaagaagtattacttatttgggagaaaccctgatttgtgtgactttaccattgaccaccagtcttgctctcgggtccatgctgcacttgtctaccacaagcatctgaagagagttttcctgatagatctcaacagtaaacctgacagagttcaacactgcccacaacaagcggatttctacccttaccattgaggagggaaatctggacattcaaagaccaaagaggaagaggaagaactcacgggtgacattcagtgaggatgatgagatcatcaacccagaggatgtggatccctcagttggtcgattcaggaacatggtgcaaactgcagtggtcccagtcaagaagaagcgtgtggagggccctggctccctgggcctggaggaatcagggagcaggcgcatgcagaactttgccttcagcggaggactctacgggggcctgccccccacacacagtgaagcaggctcccagccacatggcatccatgggacagcactcatcggtggcttgcccatgccatacccaaaccttgcccctgatgtggacttgactcctgttgtgccgtcagcagtgaacatgaaccctgcaccaaaccctgcagtctataaccctgaagctgtaaatgaacccaagaagaagaaatatgcaaaagaggcttggccaggcaagaagcccacaccttccttgctgatttgatatttttggtcatggagaagggtgggattgggtgggaatggggtggaagggtgatggggagctaatgaactagggagaaaaactttccatgtgtgcggtatcgtctttcagaatgtctcctggcatcctaaccatgtaatatgacaattgggggtggggttgaaatagcccataaagacctgtcttcacaacacttgcattgtagagaaaggcttcttatatccttttcaatagactgccctggctctttcctaggccttccactacctcctttctttctcccactttctaggatcatttttatgtaaagtcacatatcccaggccctcaggttgaatccagagctgtagaggttacagtagcatcaccagccttgggggtccagagcctaatttatattcactatccttccaagtcccgggtagcagaagggttgccatagatctcagtttgatcaaaaagaaggcttagaattctgcagttaagctgaggtttaaactaaaaaatgtttccttgggtcagtggttttgaggtccagtagctaggcttttctcttttgtccttcctgttggaatgaaaacatttcgattttccttcatctgtgactggtgccatagacacaggtttatagttttaacttacagtattgtttgaaatttacctgtttttcttgtcaaacctgagcactcctcctgctgaagtttcttatttaattccagagtactgtcctctactctaaggcattacttttaagtgtattatgaaggcagttttcaaaggatatgaccagttggggtaattcaaattaaaaaggaaaagatttgtttggaagtaactggtgtctctaagaggaatttttagatgtcagtttggaggctctttcccccctcaattgagagctcttgttattcagagctccaagactagacctggctaacaaacataggagacaaagttaggaaacattgatacaagctttgtacagagatttgtacatttgtgtaataggccttttcatgctttatgtgtagctttttacctgtaacctttattacattgtaaattaaacgtaacttttgtcatttgggtgcaggctgtgaatttgtctctcagtcactgattgccactgccatctggaaatgtttgctaaaggcacagtcactgggcttgggaggcaatgctccatccccattatattacaaataaagatgccctaaatgagtgtg

SEQ ID NO: 1751 - DNA, 2336 bp, Homo sapiens
cttccagtttcccggcgtgcttagggcgcgccaaatgggagggggagacgcaagatggcggcagccgcgaactccggctctagcctcccgctgttcgactgcccaacctgggcaggtaagccccctcccggtttacatctggatgtagtcaaaggagacaaactaattgagaaactgattattgatgagaagaagtattacttatttgggagaaaccctgatttgtgtgactttaccattgaccaccagtcttgctctcgggtccatgctgcacttgtctaccacaagcatctgaagagagttttcctgatagatctcaacagtacacacggcactttcttgggtcacattcggttggaacctcacaagcctcagcaaattcccatcgattccacggtctcatttggcgcatccacaagggcatacactctgcgcgagaagcctcagacattgccatcggctgtgaaaggagatgagaagatgggtggagaggatgatgaactcaagggcttactggggcttccagaggaggaaactgagcttgataacctgacagagttcaacactgcccacaacaagcggatttctacccttaccattgaggagggaaatctggacattcaaagaccaaagaggaagaggaagaactcacgggtgacattcagtgaggatgatgagatcatcaacccagaggatgtggatccctcagttggtcgattcaggaacatggtgcaaactgcagtggtcccagtcaagaagaagcgtgtggagggccctggctccctgggcctggaggaatcagggagcaggcgcatgcagaactttgccttcagcggaggactctacgggggcctgccccccacacacagtgaagcaggctcccagccacatggcatccatgggacagcactcatcggtggcttgcccatgccatacccaaaccttgcccctgatgtggacttgactcctgttgtgccgtcagcagtgaacatgaaccctgcaccaaaccctgcagtctataaccctgaagctgtaaatgaacccaagaagaagaaatatgcaaaagaggcttggccaggcaagaagcccacaccttccttgctgatttgatatttttggtcatggagaagggtgggattgggtgggaatggggtggaagggtgatggggagctaatgaactagggagaaaaactttccatgtgtgcggtatcgtctttcagaatgtctcctggcatcctaaccatgtaatatgacaattgggggtggggttgaaatagcccataaagacctgtcttcacaacacttgcattgtagagaaaggcttcttatatccttttcaatagactgccctggctctttcctaggccttccactacctcctttctttctcccactttctaggatcatttttatgtaaagtcacatatcccaggccctcaggttgaatccagagctgtagaggttacagtagcatcaccagccttgggggtccagagcctaatttatattcactatccttccaagtcccgggtagcagaagggttgccatagatctcagtttgatcaaaaagaaggcttagaattctgcagttaagctgaggtttaaactaaaaaatgtttccttgggtcagtggttttgaggtccagtagctaggcttttctcttttgtccttcctgttggaatgaaaacatttcgattttccttcatctgtgactggtgccatagacacaggtttatagttttaacttacagtattgtttgaaatttacctgtttttcttgtcaaacctgagcactcctcctgctgaagtttcttatttaattccagagtactgtcctctactctaaggcattacttttaagtgtattatgaaggcagttttcaaaggatatgaccagttggggtaattcaaattaaaaaggaaaagatttgtttggaagtaactggtgtctctaagaggaatttttagatgtcagtttggaggctctttcccccctcaattgagagctcttgttattcagagctccaagactagacctggctaacaaacataggagacaaagttaggaaacattgatacaagctttgtacagagatttgtacatttgtgtaataggccttttcatgctttatgtgtagctttttacctgtaacctttattacattgtaaattaaacgtaacttttgtcatttgggtgcaggctgtgaatttgtctctcagtcactgattgccactgccatctggaaatgtttgctaaaggcacagtcactgggcttgggaggcaatgctccatccccattatattacaaataaagatgccctaaatgagtgtg

SEQ ID NO: 1752 - DNA, 2691 bp, Homo sapiens
cttccagtttcccggcgtgcttagggcgcgccaaatgggagggggagacgcaagatggcggcagccgcgaactccggctctagcctcccgctgttcgactgcccaacctggtgagtggcggggcggccagggctagagtggcccggccggagctagcctgggctggaagggcggctctttttttacttttctgctgcgagccgaacggctcagaaaccccggaatggttgaggaaaaactgtttgctgcaccgggccgggcgacgtgttgaagaaccgagagcctggagcccaggcccaggaactgaagaaacccggggttgggggctcaaaggcgctcacttaggcagcccctttgagcgattagccagtcgccggagcgcttcgaggccttggcccgaacttacgcccaactcttgactgagtgcctggtgctctcgtggagcatcgcatctggccccttcctggcaggtaagccccctcccggtttacatctggatgtagtcaaaggagacaaactaattgagaaactgattattgatgagaagaagtattacttatttgggagaaaccctgatttgtgtgactttaccattgaccaccagtcttgctctcgggtccatgctgcacttgtctaccacaagcatctgaagagagttttcctgatagatctcaacagtacacacggcactttcttgggtcacattcggttggaacctcacaagcctcagcaaattcccatcgattccacggtctcatttggcgcatccacaagggcatacactctgcgcgagaagcctcagacattgccatcggctgtgaaaggagatgagaagatgggtggagaggatgatgaactcaagggcttactggggcttccagaggaggaaactgagcttgataacctgacagagttcaacactgcccacaacaagcggatttctacccttaccattgaggagggaaatctggacattcaaagaccaaagaggaagaggaagaactcacgggtgacattcagtgaggatgatgagatcatcaacccagaggatgtggatccctcagttggtcgattcaggaacatggtgcaaactgcagtggtcccagtcaagaagaagcgtgtggagggccctggctccctgggcctggaggaatcagggagcaggcgcatgcagaactttgccttcagcggaggactctacgggggcctgccccccacacacagtgaagcaggctcccagccacatggcatccatgggacagcactcatcggtggcttgcccatgccatacccaaaccttgcccctgatgtggacttgactcctgttgtgccgtcagcagtgaacatgaaccctgcaccaaaccctgcagtctataaccctgaagctgtaaatgaacccaagaagaagaaatatgcaaaagaggcttggccaggcaagaagcccacaccttccttgctgatttgatatttttggtcatggagaagggtgggattgggtgggaatggggtggaagggtgatggggagctaatgaactagggagaaaaactttccatgtgtgcggtatcgtctttcagaatgtctcctggcatcctaaccatgtaatatgacaattgggggtggggttgaaatagcccataaagacctgtcttcacaacacttgcattgtagagaaaggcttcttatatccttttcaatagactgccctggctctttcctaggccttccactacctcctttctttctcccactttctaggatcatttttatgtaaagtcacatatcccaggccctcaggttgaatccagagctgtagaggttacagtagcatcaccagccttgggggtccagagcctaatttatattcactatccttccaagtcccgggtagcagaagggttgccatagatctcagtttgatcaaaaagaaggcttagaattctgcagttaagctgaggtttaaactaaaaaatgtttccttgggtcagtggttttgaggtccagtagctaggcttttctcttttgtccttcctgttggaatgaaaacatttcgattttccttcatctgtgactggtgccatagacacaggtttatagttttaacttacagtattgtttgaaatttacctgtttttcttgtcaaacctgagcactcctcctgctgaagtttcttatttaattccagagtactgtcctctactctaaggcattacttttaagtgtattatgaaggcagttttcaaaggatatgaccagttggggtaattcaaattaaaaaggaaaagatttgtttggaagtaactggtgtctctaagaggaatttttagatgtcagtttggaggctctttcccccctcaattgagagctcttgttattcagagctccaagactagacctggctaacaaacataggagacaaagttaggaaacattgatacaagctttgtacagagatttgtacatttgtgtaataggccttttcatgctttatgtgtagctttttacctgtaacctttattacattgtaaattaaacgtaacttttgtcatttgggtgcaggctgtgaatttgtctctcagtcactgattgccactgccatctggaaatgtttgctaaaggcacagtcactgggcttgggaggcaatgctccatccccattatattacaaataaagatgccctaaatgagtgtg

SEQ ID NO: 1753 - DNA, 1807 bp, Homo sapiens
ggaggggagagaaagagcgagagaaggggaaagacaagtcgggagaggccggtaggcgtgaggcgggcctgaagcggcagcgggcggccttcgtccggcgagagctaggccgaggacccgcgccgcgctccccggcacctcaccgcgtccttcaccgactcccgcggcgcgcggccgggcggggaagggcggcggccgggctggggctcgggatccgcatcgggatcgggccgccatggacgacaaggcgttcaccaaggagctggaccagtgggtcgagcagctgaacgagtgtaagcagctgaacgagaaccaagtgcggacgctgtgcgagaaggcaaaggaaattttaacaaaagaatcaaatgtgcaagaggttcgttgccctgttactgtctgtggagatgtgcatggtcaatttcatgatcttatggaactctttagaattggtggaaaatcaccggatacaaactacttattcatgggtgactatgtagacagaggatattattcagtggagactgtgactcttcttgtagcattaaaggtgcgttatccagaacgcattacaatattgagaggaaatcacgaaagccgacaaattacccaagtatatggcttttatgatgaatgtctgcgaaagtatgggaatgccaacgtttggaaatattttacagatctctttgattatcttccacttacagctttagtagatggacagatattctgcctccatggtggcctctctccatccatagacacactggatcatataagagccctggatcgtttacaggaagttccacatgagggcccaatgtgtgatctgttatggtcagatccagatgatcgtggtggatggggtatttcaccacgtggtgctggctacacatttggacaagacatttctgaaacctttaaccatgccaatggtctcacactggtttctcgtgcccaccagcttgtaatggagggatacaattggtgtcatgatcggaatgtggttaccattttcagtgcacccaattactgttatcgttgtgggaaccaggctgctatcatggaattagatgacactttaaaatattccttccttcaatttgacccagcgcctcgtcgtggtgagcctcatgttacacggcgcaccccagactacttcctataaatttctcctgggaaacctgcctttgtatgtggaagtatacctggctttttaaaatatatgtatttaaaaacaaaaagcaacagtaatctatgtgtttctgtaacaaattgggatctgtcttggcattaaaccacatcatggaccaaatgtgccatactaatgatgagcatttagcacaatttgagactgaaatttagtacactatgttctaggtcagtctaacagtttgcctgctgtatttatagtaaccattttcctttggactgttcaagcaaaaaaggtaactaactgcttcatctccttttgcgcttatttggaaattttagttatagtgtttaactggcatggattaatagagttggagttttatttttaagaaaaattcacaagctaacttccactaatccattatcctttattttattgaaatgtataattaacttaactgaagaaaaggttcttcttgggagtatgttgtcataacatttaaagagatttcccttcatttaaactaaattactgttttatgttgatctgcatatttctgtatatttgtcatgacagtgcttgcatcctatttggtgtactcagcaaataaacttttcattttaaacaaaaacattcaaaaaaaaaaaaaaaaaa

SEQ ID NO: 1754 - DNA, 1987 bp, Homo sapiens
ggaggggagagaaagagcgagagaaggggaaagacaagtcgggagaggccggtaggcgtgaggcgggcctgaagcggcagcgggcggccttcgtccggcgagagctaggccgaggacccgcgccgcgctccccggcacctcaccgcgtccttcaccgactcccgcggcgcgcggccgggcggggaagggcgggcgggggtctcctccaggctgcgcgctcggagccgcctgctgggcttgggcggggcgcggggcccgcggccgccctacccggctcagtcctccccctgtgggacctggcgacggcggcggagggagaggggagcggcgcccgggccggggccgggggcgggtggggaggggggagggcggcggccgggctggggctcgggatccgcatcgggatcgggccgccatggacgacaaggcgttcaccaaggagctggaccagtgggtcgagcagctgaacgagtgtaagcagctgaacgagaaccaagtgcggacgctgtgcgagaaggcaaaggaaattttaacaaaagaatcaaatgtgcaagaggttcgttgccctgttactgtctgtggagatgtgcatggtcaatttcatgatcttatggaactctttagaattggtggaaaatcaccggatacaaactacttattcatgggtgactatgtagacagaggatattattcagtggagactgtgactcttcttgtagcattaaaggtgcgttatccagaacgcattacaatattgagaggaaatcacgaaagccgacaaattacccaagtatatggcttttatgatgaatgtctgcgaaagtatgggaatgccaacgtttggaaatattttacagatctctttgattatcttccacttacagctttagtagatggacagatattctgcctccatggtggcctctctccatccatagacacactggatcatataagagccctggatcgtttacaggaagttccacatgagggcccaatgtgtgatctgttatggtcagatccagatgatcgtggtggatggggtatttcaccacgtggtgctggctacacatttggacaagacatttctgaaacctttaaccatgccaatggtctcacactggtttctcgtgcccaccagcttgtaatggagggatacaattggtgtcatgatcggaatgtggttaccattttcagtgcacccaattactgttatcgttgtgggaaccaggctgctatcatggaattagatgacactttaaaatattccttccttcaatttgacccagcgcctcgtcgtggtgagcctcatgttacacggcgcaccccagactacttcctataaatttctcctgggaaacctgcctttgtatgtggaagtatacctggctttttaaaatatatgtatttaaaaacaaaaagcaacagtaatctatgtgtttctgtaacaaattgggatctgtcttggcattaaaccacatcatggaccaaatgtgccatactaatgatgagcatttagcacaatttgagactgaaatttagtacactatgttctaggtcagtctaacagtttgcctgctgtatttatagtaaccattttcctttggactgttcaagcaaaaaaggtaactaactgcttcatctccttttgcgcttatttggaaattttagttatagtgtttaactggcatggattaatagagttggagttttatttttaagaaaaattcacaagctaacttccactaatccattatcctttattttattgaaatgtataattaacttaactgaagaaaaggttcttcttgggagtatgttgtcataacatttaaagagatttcccttcatttaaactaaattactgttttatgttgatctgcatatttctgtatatttgtcatgacagtgcttgcatcctatttggtgtactcagcaaataaacttttcattttaaacaaaaacattcaaaaaaaaaaaaaaaaaa

SEQ ID NO: 1755 - DNA, 2385 bp, Homo sapiens
gcgccattttgaaagtggagtcgcctgcccctgccgctgccgccgccgccgtcgctgtcgtagtcgccgccgccgctgccggagaaagagcacgagcggggaagccccagagtgaaatctagcatcctgccggctggtctgcccgcccctccttccttttccccccggcccccgtcccctccccccgcaggtgccatccgccgccatccgccctctctacccccccatccccaggtgaggggggtgagttcaggaagcggagaccccgaggaacccagcagggtcaccatttgcagcgcaacatggcaggagctggaggagggaatgatattcagtggtgtttttctcaggtgaaaggagcagtagatgatgatgtagcagaagcagatataatttctacagtagaatttaatcattctggagaattactagcaacaggagataaaggtggtagagttgtcatctttcaacaggagcaggagaacaaaatccagtctcatagcagaggagaatataatgtttacagcaccttccagagccatgaaccagagtttgactacttgaaaagtttagaaatagaagaaaagatcaacaaaattaggtggttaccccagaaaaatgctgctcagtttttattgtctaccaatgataaaacaataaaattatggaaaatcagtgaaagggacaaaagaccagaagggtataacttgaaagaggaggatggaaggtatagagatcctactacagttactacactacgagtgccagtctttaggcctatggatctaatggttgaggccagtccacgaagaatatttgccaatgctcatacatatcacatcaactcaatttctattaatagtgattatgaaacatatttatctgcagatgatttgcggattaatctttggcatctggaaattacagacaggagttttaacattgtggatatcaagcctgccaatatggaagagctaacagaggtgattacagcagcagaatttcatccaaacagctgtaacacatttgtatacagcagcagtaaaggaactattcggctatgtgacatgagggcatctgccctctgtgatagacattctaaattgtttgaagaacctgaagatcccagtaacaggtcatttttttccgaaatcatctcctctatttcggatgtaaaattcagccatagtggtcgatatatgatgactagagactatttgtcagtcaaaatttgggacttaaatatggaaaacaggcctgtggaaacataccaggtgcatgaatacctcagaagtaaactctgttcactgtatgaaaatgactgcatatttgacaaatttgaatgttgttggaatggatctgacagtgttgtcatgactggatcttacaataatttcttcagaatgtttgacagaaacacaaagcgagacataaccctagaagcatcgcgggaaaacaataagcctcgcacagttctgaagcctcgcaaagtctgtgcaagtggcaagcgaaagaaagatgaaataagtgttgacagcctagacttcaataagaaaatccttcacacagcctggcaccccaaggaaaatatcattgccgtagctactacaaacaatctgtatatatttcaagacaaagtgaattagggttggcattcctagcagaagaacccacttcctgcttagttgagatagttgaatctagcattcgttcctataaaagagagaggtccattgtggcgcccctttccagtgtttgacagtgtgccattcgacaacacattgttatagctacatggagaaagctctgtggattcatcactgtggtgttctccatgtctgctagccatttaggtaagggtagggcacttttaatttaaatgacttcttgcaccatcttgcctaatggactagattggactgtatcaacattgatttactccactttttatgccttccattgtgatgacgtcaaacacagtgaaagccttcagtcatgctatgggatttaattgtgtatcctcattactgtatcatttgtggggtacaccccttccccctttttttaaattaaatacagctcattcttactgtggcttgtagcattcctcctcttctggcctcctggactgctccccttcatctcttacccttgccccctccacccggtcttggtggtggtatattaaaaaaagaaagaatgaaagcacacaaaatgagtcagtttggggtcagtggtataaagggggtatatgttgcaaacaaatgttttagtaacagttggctgtaatcactcctcgccgtgtctggcactgaaaataaggaaaaaaaacctactactgaataaaagtgacaaagaatggaaaaaaaaaaaaaaaaaaaaaaa

SEQ ID NO: 1756 - DNA, 4438 bp, Homo sapiens
cggcttggtcggcgcagcgcagcgccgcgcgcgtcccctcgccgccgtcgccgcagccaggcgcaccggcaccaggccccgccgccgggcgcacggacgcagcgcgcacgggccggccgggatgcgcgcctgggccccggcccgcccgaacccgcggccgccgcccgcccaccgcgcgctcgcttgaccgcggcgcccgcccccggccgcccccgcccgtccccctgccgcgatgccctcccttcggggccccggcggcccgcgcccctgctaggctgcggcggcatggcccgcgcgcccggcgcgacctctgcggattgcatcggtgtgtggcggcggggcatgcccagagcaccgggcacggccttcaatgggcgaggacacggacacgcggaaaattaaccacagcttcctgcgggaccacagctatgtgactgaagctgacatcatctctaccgttgagttcaaccacacgggagagctgctggccacaggtgacaagggcggccgggtcgtcatcttccagcgggaaccagagagtaaaaatgcgccccacagccagggcgaatacgacgtgtacagcactttccagagccacgagccggagtttgactatctcaagagcctggagatagaggagaagatcaacaagatcaagtggctcccacagcagaacgccgcccactcactcctgtccaccaacgataaaactatcaaattatggaagattaccgaacgagataaaaggcccgaaggatacaacctgaaggatgaagaggggaaacttaaggacctgtccacggtgacgtcactgcaggtgccagtgctgaagcccatggatctgatggtggaggtgagccctcggaggatctttgccaatggccacacctaccacatcaactccatctccgtcaacagtgactgcgagacctacatgtcggcggatgacctgcgcatcaacctctggcacctggccatcaccgacaggagcttcaacatcgtggacatcaagccggccaacatggaggaccttacggaggtgatcacagcatctgagttccatccgcaccactgcaacctcttcgtctacagcagcagcaagggctccctgcggctctgcgacatgcgggcagctgccctgtgtgacaagcattccaagctctttgaagagcctgaggaccccagtaaccgctcattcttctcggaaatcatctcctccgtgtccgacgtgaagttcagccacagcggccgctacatgctcacccgggactaccttacagtcaaggtctgggacctgaacatggaggcaagacccatagagacctaccaggtccatgactaccttcggagcaagctctgttccctgtacgagaacgactgcattttcgacaagtttgaatgtgcctggaacgggagcgacagcgtcatcatgaccggggcctacaacaacttcttccgcatgttcgatcggaacaccaagcgggacgtgaccctggaggcctcgagggaaagcagcaagccccgggctgtgctcaagccacggcgcgtgtgcgtggggggcaagcgccggcgtgatgacatcagtgtggacagcttggacttcaccaagaagatcctgcacacggcctggcacccggctgagaacatcattgccatcgccgccaccaacaacctgtacatcttccaggacaaggtaaactctgacatgcactaggtatgtgcagttcccggcccctgccacccagcctcatgcaagtcatccccgacatgaccttcacgaccgcaatgcaaggaggggaagaaagtcacagcactgatgaggacagctgcagaggtggcagtgtgtggacacaggaagtttgggccccctccctgccccagctttcctaggccagaattgtgtttggcagtaattgtctgtttaaaaaaataaaaaggaaaggaagcgttcaccgccacaaatcataaaatggacatgactgtggagtcttacagttcagggttctttcattcacgtcccttcctgtctcggtctgcggtctttaccacatcaataggactttttatgcgtccgggttaatttttcactccagtgcgtcctgttgcagggaccggagctgatgggagctgcttctcccccatgcctcactggtcccagatcagggctccagggacagatgatgagtctcaaacgagccagccaggggttcttttggttataaatggggcaattcgccctgtctcagagctgatgacctcaccgttgttttttggatggtgaattcatgctgagaatttgcagatgcaagctcctctcctaggtcttctgaatgtcttgaaacatcccaggtcccaggtctggtgcggtttcccgagaggagcggagtggggtttgtcttctgtgtgcctgtgtcctcatctgattcacctgccatttgctgagcctctgctgtgtaccaggcgtggtgctcagccctagaggcagttgacttaccctctgcagccctccctgccgcctcacccttcagcattcactgggcaccttcccggagcggacactgactcccatgcacgattttttggaatcttcctcctgactgtgaggtgggtgttcattcatttcctccataaacaccaacttctcgaagcgtgccaggctctgggctggatgctggggataagcgggaacccttaggatcccctctgtccacgagaagaagctgaggctctgagcggatgcacaggtcacccatggcaggtgccgtgcagtggtgtcaggaacccgtccgggtcttcacacaaggttctctccagtccatctcgtgggcggctcatgttagagcgacattcaaatggaaggtttggaaaggaatgcctctgtcttgtgaagtaggacatggcagacttggcgacgacaagggtccaggagaactgagacgcaggatggaagacagagaagaccccccggagctcctcgctctgcttggtggcttcaggagtgtggccctccccaggactccacttcatcctgggcttgcaccctccttgagccaatgcactgaactgcctttgaaaggaaattgcatgttctgaccattttaggatacctttactttaaggaccacacagtcccagaggacacatccctcgggaactctgcccctctgacaatgagggccacagagaaggtggtgtttccatggtagatgctcctgttctggtgataccaaacctgcccacccctctgagtcgtctttgctcatggacttgcagcagagccacgtagtttggcattttgattcagaaagtggggagcagagacccagccaaatccaaactttttttttggttttgttttgttttgttttttacaagatataacataacccaggaaacagacccagctgaggttattctcagtggattacagtatacttttgtgtgtgtaaaagcacaaagtgcatgtgtactcacttctggccatataacatttacacagggaaatggatcattgatttttttttaatcaacgtgaatgaagaatgtttgtttatatatcactataaaatccagttgacctggacagtattatatgtacatatctattctaattaaatttaacaatcaaaggattggattacttttttcccccttgtaaagaggttcgagaatgtggtcaattgtatagatagcgtgttaaagccaaaacccagctctgagggccttacccattacttggatatttgctacgatccatctccctttgtgagtcaaatgttaagagaagaaacttgtatttgcagctagaggttactgtcacatcatagatttaacatttaccatcttcaaagtacaaatcttacatgtccttcaaaaggaggtcttaatacagttcctagttccttacttctgttttaaactttgggtaccaaaccaaaaagaagaaaaaagaaaggaaaagatcttctttgaagaaaagtatgtctctggatccctggaaaataatgatgtccaaagcaaattgtgaagatcaaatgtgtgttaagaaaaggtgtcgaggggagggacaaaaccagaaacggtggaaggaccagtgtaatagtcacagacttgcatcctggctctgcttacatttcctggtactctcgaatgtacgggcgttcacatagtcattgtgaagttgttggggtttttttggttttgtttttaatttagctcttctctgaggacgaagctgttggtggtggtggtggtgggggtggtggtgtgggatacatggtggtcaagttgtcagccctgatcagtttggactctgtaactcataggtgcattctttttttctttggtgtctcacaaattacccaattgttgaataaaactataaatatgttaataccagctttttccaataaaataacaaatgttacatcaaaaacga

SEQ ID NO: 1757 - DNA, 4092 bp, Homo sapiens
acatgcaaaaagtggggcctggagatggggctgtcttttttctccaaacacttgcccatccaggaaggccagccctgggcattgaagactccagctgacatcatctctaccgttgagttcaaccacacgggagagctgctggccacaggtgacaagggcggccgggtcgtcatcttccagcgggaaccagagagtaaaaatgcgccccacagccagggcgaatacgacgtgtacagcactttccagagccacgagccggagtttgactatctcaagagcctggagatagaggagaagatcaacaagatcaagtggctcccacagcagaacgccgcccactcactcctgtccaccaacgataaaactatcaaattatggaagattaccgaacgagataaaaggcccgaaggatacaacctgaaggatgaagaggggaaacttaaggacctgtccacggtgacgtcactgcaggtgccagtgctgaagcccatggatctgatggtggaggtgagccctcggaggatctttgccaatggccacacctaccacatcaactccatctccgtcaacagtgactgcgagacctacatgtcggcggatgacctgcgcatcaacctctggcacctggccatcaccgacaggagcttcaacatcgtggacatcaagccggccaacatggaggaccttacggaggtgatcacagcatctgagttccatccgcaccactgcaacctcttcgtctacagcagcagcaagggctccctgcggctctgcgacatgcgggcagctgccctgtgtgacaagcattccaagctctttgaagagcctgaggaccccagtaaccgctcattcttctcggaaatcatctcctccgtgtccgacgtgaagttcagccacagcggccgctacatgctcacccgggactaccttacagtcaaggtctgggacctgaacatggaggcaagacccatagagacctaccaggtccatgactaccttcggagcaagctctgttccctgtacgagaacgactgcattttcgacaagtttgaatgtgcctggaacgggagcgacagcgtcatcatgaccggggcctacaacaacttcttccgcatgttcgatcggaacaccaagcgggacgtgaccctggaggcctcgagggaaagcagcaagccccgggctgtgctcaagccacggcgcgtgtgcgtggggggcaagcgccggcgtgatgacatcagtgtggacagcttggacttcaccaagaagatcctgcacacggcctggcacccggctgagaacatcattgccatcgccgccaccaacaacctgtacatcttccaggacaaggtaaactctgacatgcactaggtatgtgcagttcccggcccctgccacccagcctcatgcaagtcatccccgacatgaccttcacgaccgcaatgcaaggaggggaagaaagtcacagcactgatgaggacagctgcagaggtggcagtgtgtggacacaggaagtttgggccccctccctgccccagctttcctaggccagaattgtgtttggcagtaattgtctgtttaaaaaaataaaaaggaaaggaagcgttcaccgccacaaatcataaaatggacatgactgtggagtcttacagttcagggttctttcattcacgtcccttcctgtctcggtctgcggtctttaccacatcaataggactttttatgcgtccgggttaatttttcactccagtgcgtcctgttgcagggaccggagctgatgggagctgcttctcccccatgcctcactggtcccagatcagggctccagggacagatgatgagtctcaaacgagccagccaggggttcttttggttataaatggggcaattcgccctgtctcagagctgatgacctcaccgttgttttttggatggtgaattcatgctgagaatttgcagatgcaagctcctctcctaggtcttctgaatgtcttgaaacatcccaggtcccaggtctggtgcggtttcccgagaggagcggagtggggtttgtcttctgtgtgcctgtgtcctcatctgattcacctgccatttgctgagcctctgctgtgtaccaggcgtggtgctcagccctagaggcagttgacttaccctctgcagccctccctgccgcctcacccttcagcattcactgggcaccttcccggagcggacactgactcccatgcacgattttttggaatcttcctcctgactgtgaggtgggtgttcattcatttcctccataaacaccaacttctcgaagcgtgccaggctctgggctggatgctggggataagcgggaacccttaggatcccctctgtccacgagaagaagctgaggctctgagcggatgcacaggtcacccatggcaggtgccgtgcagtggtgtcaggaacccgtccgggtcttcacacaaggttctctccagtccatctcgtgggcggctcatgttagagcgacattcaaatggaaggtttggaaaggaatgcctctgtcttgtgaagtaggacatggcagacttggcgacgacaagggtccaggagaactgagacgcaggatggaagacagagaagaccccccggagctcctcgctctgcttggtggcttcaggagtgtggccctccccaggactccacttcatcctgggcttgcaccctccttgagccaatgcactgaactgcctttgaaaggaaattgcatgttctgaccattttaggatacctttactttaaggaccacacagtcccagaggacacatccctcgggaactctgcccctctgacaatgagggccacagagaaggtggtgtttccatggtagatgctcctgttctggtgataccaaacctgcccacccctctgagtcgtctttgctcatggacttgcagcagagccacgtagtttggcattttgattcagaaagtggggagcagagacccagccaaatccaaactttttttttggttttgttttgttttgttttttacaagatataacataacccaggaaacagacccagctgaggttattctcagtggattacagtatacttttgtgtgtgtaaaagcacaaagtgcatgtgtactcacttctggccatataacatttacacagggaaatggatcattgatttttttttaatcaacgtgaatgaagaatgtttgtttatatatcactataaaatccagttgacctggacagtattatatgtacatatctattctaattaaatttaacaatcaaaggattggattacttttttcccccttgtaaagaggttcgagaatgtggtcaattgtatagatagcgtgttaaagccaaaacccagctctgagggccttacccattacttggatatttgctacgatccatctccctttgtgagtcaaatgttaagagaagaaacttgtatttgcagctagaggttactgtcacatcatagatttaacatttaccatcttcaaagtacaaatcttacatgtccttcaaaaggaggtcttaatacagttcctagttccttacttctgttttaaactttgggtaccaaaccaaaaagaagaaaaaagaaaggaaaagatcttctttgaagaaaagtatgtctctggatccctggaaaataatgatgtccaaagcaaattgtgaagatcaaatgtgtgttaagaaaaggtgtcgaggggagggacaaaaccagaaacggtggaaggaccagtgtaatagtcacagacttgcatcctggctctgcttacatttcctggtactctcgaatgtacgggcgttcacatagtcattgtgaagttgttggggtttttttggttttgtttttaatttagctcttctctgaggacgaagctgttggtggtggtggtggtgggggtggtggtgtgggatacatggtggtcaagttgtcagccctgatcagtttggactctgtaactcataggtgcattctttttttctttggtgtctcacaaattacccaattgttgaataaaactataaatatgttaataccagctttttccaataaaataacaaatgttacatcaaaaacga

SEQ ID NO: 1758 - DNA, 1429 bp, Homo sapiens
gccacgaaggccggagagccggaaccggagtcgcagcggcggagacccctgtgcggtgcggagggggcggcggccccgactctgacccgcgccgggggtgggccatggcggagatcagcgacctggaccggcagatcgagcagctgcgtcgctgcgagctcatcaaggagagcgaagtcaaggccctgtgcgctaaggccagagagatcttggtagaggagagcaacgtgcagagggtggactcgccagtcacagtgtgcggcgacatccatggacaattctatgacctcaaagagctgttcagagtaggtggcgacgtccctgagaccaactacctcttcatgggggactttgtggaccgtggcttctatagcgtcgaaacgttcctcctgctgctggcacttaaggttcgctatcctgatcgcatcacactgatccggggcaaccatgagagtcgccagatcacgcaggtctatggcttctacgatgagtgcctgcgcaagtacggctcggtgactgtgtggcgctactgcactgagatctttgactacctcagcctgtcagccatcatcgatggcaagatcttctgcgtgcacgggggcctctccccctccatccagaccctggatcagattcggacaatcgaccgaaagcaagaggtgcctcatgatgggcccatgtgtgacctcctctggtctgacccagaagacaccacaggctggggcgtgagcccccgaggagccggctacctatttggcagtgacgtggtggcccagttcaacgcagccaatgacattgacatgatctgccgtgcccaccaactggtgatggaaggttacaagtggcacttcaatgagacggtgctcactgtgtggtcggcacccaactactgctaccgctgtgggaatgtggcagccatcttggagctggacgagcatctccagaaagatttcatcatctttgaggctgctccccaagagacacggggcatcccctccaagaagcccgtggccgactacttcctgtgaccccgcccggcccctgccccctccaacccttctggccctcgcaccactgtgactctgccatcttcctcagacggaggctgggcgtggggggggctgtcctggctctgctgtcccccaagagggtgcttcgagggtgaggacttctctggagaggcctggagacctagctccatgttcctcctcctctctccccacttgaaccatgaagtttccaataatttttttttctttttttccttcttttttctgtttgtttttagataaaaattttgagaaaaaaaatgaaaaaattctaataaaagaagaaaaatgaaaaaaaaaaaaaaaaaaaaaaaaaaaaaaaaaaaaaaaaaaaaaaaaaaaaaaaaaaaaaaaaaaaaaaaaaaaaaaaaaaaaaaaaa

SEQ ID NO: 1759 - DNA, 2325 bp, Homo sapiens
atgcccatcccaagatggcggagatccccctgtactttgtggacttgcaggatgacttagacgactatggatttgaagactatggtacagattgcgacaacatgagagtaacggccttcttggacattccaggccaggataacctgcctccactcactcgcctggagaagtatgctttcagcgagaacaccttcaaccggcagattattgccagagggctgcttgatatcttccgggacttcggtaacaatgaagaagacttcctcacggtaatggagattgtagtcagattgtcagaagatgcagataatctgcaaaatggcttcaatgctgagtaagagtaccgttgaacgcctgctactcccccgattctgtgaactgtgtggtgacaggaagctctttcaagttcggaaggtttgtgctgcaaattttggtgatatttgtcatgctgttggacaagaagccactgagaaatttttgatcccaaagttctttgagctctgctctgatgctgtttggggcatgcggaaagcctgtgcagaatgcttcacggctgtgtcgcacagctcctcccctggggtccgcagaacccagctcttcccgctcttcatcagacttgtcagcgacccctgccgatgggtgcaccaggctgccttccagtccctcggccccttcacttccacctttgcaaacccctccagggctggcctttatcttcgagaggatggcgccctgagcatctggccactcacccaggatttggactctggttttgcctctggctcccctgctcccagcagtggtggtaacacttcccctgccagtttaactcgttcagcaaagcctgtgcggagcgagccagagctacctgtggaagggacctcagcgaaaaccagtgattgcccacacagcagtagctcctctgacggcccagcggaaagccctgtggaaagctgtgtgtcggctggagctgagtggaccagggtttccccagagaccagcgcctgctcaaagctttctgacatgaatgacctccccatcagcagctaccctggatcagattcctgggcctgcccagggaacactgaggatgtgttcagtcattttctttattggtgaactcctctccctgacataagcaaggacttagagctgcttctgagtgaggctgggcctcaggaggacgactgcagcagacctggggttgtgcacaacagctgtgtggcccggagtgagattcagaaagtccttggtagcttgcaggagcatctgatgaatgatccagatgttcaagctcaagttcaggtattatccgctgcactgagagctgcacagctcgactgcgtgaatgaagctgagagcaagccaacagcaggcctaaaggaagtgtccatttcacatcccagctctgcctctgacaatcagatcgctctggcggcctcatcatctcaggatgagctctttgtggccaggatattacaaagcccagatccaggtggacccagaaatggaaccagtgaccatctggagactgaccagaggcaggatcccaccccacttgaagagaataaatctaaattacaggatgtaataactcagccgctgctagatcagtatgtgtccatgactgacccagctcgagcccagactgtcgatactgacatagccaaacactgtgcctacagcctcccaggggtggcactgaccctgggcaggcaaaattggcactgcctgaaagatacatatgaaacactggcttctgatgtacagtggaaggtacggcgagccctagccttctccattcacgagctggctgtgattcttggggatcagttaacagcagctgacctggtgcctatcttcaatggatttttaaaggatctggatgaagtgcgaataggagttcttagacacctgtatgattttctaaagttgcttcatgaagacaagaggagagactatctttatcagcttcaagaatttgtagtgactgataacagcaggaattggaggtttcgatatgaactagcagagtaagtaaaaacatatttggggatatgagaaagcaaactagatggaataaatcttaattttcttaccatataattgatttctaaagcagcagcaatagtgttcttttagataaagagattatgtttttattaaggtataaacagaattccaaaaaccctgagttacaaataccacagtctccggggagacattcattttcagatgaagacagggcttgagtcactttcgaattagagtgttctgctgttctagaaggcaatttatttgaaccaaataaaagatgaatcaccc

SEQ ID NO: 1760 - DNA, 1495 bp, Homo sapiens
ggggggaggcgttccggtccccaagagacccgcggagggaggcggaggctgtgagggactccgggaagccatggacgtcgagaggctccaggaggcgctgaaagattttgagaagagggggaaaaaggaagtttgtcctgtcctggatcagtttctttgtcatgtagccaagactggagaaacaatgattcagtggtcccaatttaaaggctattttattttcaaactggagaaagtgatggatgatttcagaacttcagctcctgagccaagaggtcctcccaaccctaatgtcgaatatattccctttgatgaaatgaaggaaagaatactgaaaattgtcactggatttaatggtatcccttttactattcagcgactatgtgaattgttaacagatccaaggagaaactatacaggaacagacaaatttctcagaggagtagaaaagaatgtgatggttgttagctgtgtttatccttcttcagagaaaaacaattccaatagtttaaatcgaatgaatggtgttatgtttcctggaaattcaccaagctatactgagaggtctaatataaatgggcctgggacacccaggccacttaatcgaccaaaggtttctttgtcagcccccatgacaacaaatgggttgcctgagagcacagacagcaaagaggcaaatttgcagcaaaatgaggagaaaaatcacagtgactcttcgacctctgaatcagaagtttcctcagtgagccctttgaaaaataaacatccagatgaagatgctgtggaagctgaggggcatgaggtaaaaagactcaggtttgacaaagaaggtgaagtcagagaaacagccagtcaaacgacttccagcgaaatttcttcagttatggtaggagaaacagaagcatcatcttcatctcaggataaagacaaagatagccgttgtacccggcagcactgtacagaagaggatgaagaagaggatgaagaggaagaagaagagtcttttatgacatcaagagaaatgatcccagaaagaaaaaatcaagaaaaagaatctgatgatgccttaactgtgaatgaagagacttctgaggaaaataatcaaatggaggaatctgatgtgtctcaagctgagaaagatttgctacattctgaaggtagtgaaaacgaaggccctgtaagtagtagttcttctgactgccgtgaaacagaagaattagtaggatccaattccagtaaaactggagagattctttcagaatcatccatggaaaatgatgacgaagccacagaagtcaccgatgaaccaatggaacaagactaactatttagaaacatttagatgcagtattttacatacagttctggttttaacactgtataaaacttttgtgtaataaaatggacctttagttttacaagagaagcaggttgtaaaataaagtactttatggataattccgcaaaaaaaaaaaaaaaaaaaaaaaaaaaaaaa

SEQ ID NO: 1761 - DNA, 3011 bp, Homo sapiens
gcttcgccccgtggcgcggtttgaaattttgcggggctcaacggctcgcggagcggctacgcggagtgacatcgccggtgtttgcgggtggttgttgctctcggggccgtgtggagtaggtctggacctggactcacggctgcttggagcgtccgccatgaggagaagtgaggtgctggcggaggagtccatagtatgtctgcagaaagccctaaatcaccttcgggaaatatgggagctaattgggattccagaggaccagcggttacaaagaactgaggtggtaaagaagcatatcaaggaactcctggatatgatgattgctgaagaggaaagcctgaaggaaagactcatcaaaagcatatccgtctgtcagaaagagctgaacactctgtgcagcgagttacatgttgagccatttcaggaagaaggagagacgaccatcttgcaactagaaaaagatttgcgcacccaagtggaattgatgcgaaaacagaaaaaggagagaaaacaggaactgaagctacttcaagagcaagatcaagaactgtgcgaaattctttgtatgccccactatgatattgacagtgcctcagtgcccagcttagaagagctgaaccagttcaggcaacatgtgacaactttgagggaaacaaaggcttctaggcgtgaggagtttgtcagtataaagagacagatcatactgtgtatggaagaattagaccacaccccagacacaagctttgaaagagatgtggtgtgtgaagacgaagatgccttttgtttgtctttggagaatattgcaacactacaaaagttgctacggcagctggaaatgcagaaatcacaaaatgaagcagtgtgtgaggggctgcgtactcaaatccgagagctctgggacaggttgcaaatacctgaagaagaaagagaagctgtggccaccattatgtctgggtcaaaggccaaggtccggaaagcgctgcaattagaagtggatcggttggaagaactgaaaatgcaaaacatgaagaaagtgattgaggcaattcgagtggagctggttcagtactgggaccagtgcttttatagccaggagcagagacaagcttttgcccctttctgtgctgaggactacacagaaagtctgctccagctccacgatgctgagattgtgcggttaaaaaactactatgaagttcacaaggaactctttgaaggtgtccagaagtgggaagaaacctggaggcttttcttagagtttgagagaaaagcttcagatccaaatcgatttacaaaccgaggaggaaatcttctaaaagaagaaaaacaacgagccaagctccagaaaatgctgcccaagctggaagaagagttgaaggcacgaattgaattgtgggaacaggaacattcaaaggcatttatggtgaatgggcagaaattcatggagtatgtggcagaacaatgggagatgcatcgattggagaaagagagagccaagcaggaaagacaactgaagaacaaaaaacagacagagacagagatgctgtatggcagcgctcctcgaacacctagcaagcggcgaggactggctcccaatacaccgggcaaagcacgtaagctgaacactaccaccatgtccaatgctacggccaatagtagcattcggcctatctttggagggacagtctaccactcccccgtgtctcgacttcctccttctggcagcaagccagtcgctgcttccacctgttcagggaagaaaacaccccgtactggcaggcatggagccaacaaggagaacctggagctcaacggcagcatcctgagtgcgagaactttcaaaggcttccaaatctgatgctacttctggaatcctcaattcaaccaacatccagtcctgagaagccctgatcagtcaaccagctgtggcttcctgtgcctagactggacctaattatatgggggtgactttagtttttcttcagcttaggcgtgcttgaaaccttggccaggttccatgaccatgggcctaacttaaagatgtgaatgagtgttacagttgaaagcccatcataggtttagtggtcctaggagacttggttttgacttatatacatgaaaagtttatggcaagaagtgcaaattttagcatatggggcctgacttctctaccacataattctacttgctgaagcatgatcaaagcttgttttatttcaccactgtaggaaaatgattgactatgcccatccctgggggtaattttggcatgtatacctgtaactagtaattaacatcttttttgtttaggcatgttcaattaatgctgtagctatcatagctttgctcttacctgaagccttgtccccaccacacaggacagccttcctcctgaagagaatgtctttgtgtgtccgaagttgagatggcctgccctactgccaaagaggtgacaggaaggctgggagcagctttgttaaattgtgttcagttctgttacacagtgcattgccctttgttgggggtatgcatgtatgaacacacatgcttgtcggaacgctttctcggcgtttgtcccttggctctcatctcccccattcctgtgcctactttgcctgagttcttctacccccgcagttgccagccacattgggagtctgtttgttccaatgggttgagctgtctttgtcgtggagatctggaactttgcacatgtcactactggggaggtgttcctgctctagcttccacgatgaggcgccctctttacctatcctctcaatcactactcttcttgaagcactattatttattcttccgctgtctgcctgcagcagtactactgtcaacatagtgtaaatggttctcaaaagcttaccagtgtggacttggtgttagccacgctgtttactcatacagtacgtgtcctgtttttaaaatatacaattattcttaaaaataaattaaaatctgtatacttacatttcaaaaagaaaaaaaaaaaaaaaaaa

SEQ ID NO: 1762 - DNA, 3091 bp, Homo sapiens
gcttcgccccgtggcgcggtttgaaattttgcggggctcaacggctcgcggagcggctacgcggagtgacatcgccggtgtttgcgggtggttgttgctctcggggccgtgtggagtaggtctggacctggactcacggctgcttggagcgtccgccatgaggagaagtgaggtgctggcggaggagtccatagtatgtctgcagaaagccctaaatcaccttcgggaaatatgggagctaattgggattccagaggaccagcggttacaaagaactgaggtggtaaagaagcatatcaaggaactcctggatatgatgattgctgaagaggaaagcctgaaggaaagactcatcaaaagcatatccgtctgtcagaaagagctgaacactctgtgcagcgagttacatgttgagccatttcaggaagaaggagagacgaccatcttgcaactagaaaaagatttgcgcacccaagtggaattgatgcgaaaacagaaaaaggagagaaaacaggaactgaagctacttcaagagcaagatcaagaactgtgcgaaattctttgtatgccccactatgatattgacagtgcctcagtgcccagcttagaagagctgaaccagttcaggcaacatgtgacaactttgagggaaacaaaggcttctaggcgtgaggagtttgtcagtataaagagacagatcatactgtgtatggaagaattagaccacaccccagacacaagctttgaaagagatgtggtgtgtgaagacgaagatgccttttgtttgtctttggagaatattgcaacactacaaaagttgctacggcagctggaaatgcagaaatcacaaaatgaagcagtgtgtgaggggctgcgtactcaaatccgagagctctgggacaggttgcaaatacctgaagaagaaagagaagctgtggccaccattatgtctgggtcaaaggccaaggtccggaaagcgctgcaattagaagtggatcggttggaagaactgaaaatgcaaaacatgaagaaagtgattgaggcaattcgagtggagctggttcagtactgggaccagtgcttttatagccaggagcagagacaagcttttgcccctttctgtgctgaggactacacagaaagtctgctccagctccacgatgctgagattgtgcggttaaaaaactactatgaagttcacaaggaactctttgaaggtgtccagaagtgggaagaaacctggaggcttttcttagagtttgagagaaaagcttcagatccaaatcgatttacaaaccgaggaggaaatcttctaaaagaagaaaaacaacgagccaagctccagaaaatgctgcccaagctggaagaagagttgaaggcacgaattgaattgtgggaacaggaacattcaaaggcatttatggtgaatgggcagaaattcatggagtatgtggcagaacaatgggagatgcatcgattggagaaagagagagccaagcaggaaagacaactgaagaacaaaaaacagacagagacagagatgctgtatggcagcgctcctcgaacacctagcaagcggcgaggactggctcccaatacaccgggcaaagcacgtaagctgaacactaccaccatgtccaatgctacggccaatagtagcattcggcctatctttggagggacagtctaccactcccccgtgtctcgacttcctccttctggcagcaagccagtcgctgcttccacctgttcagggaagaaaacaccccgtactggcaggcatggagccaacaaggagaacctggagctcaacggcagcatcctgagtggtgggtaccctggctcggcccccctccagcgcaacttcagcattaattctgttgccagcacctattctgagtttgcgcgagaactttcaaaggcttccaaatctgatgctacttctggaatcctcaattcaaccaacatccagtcctgagaagccctgatcagtcaaccagctgtggcttcctgtgcctagactggacctaattatatgggggtgactttagtttttcttcagcttaggcgtgcttgaaaccttggccaggttccatgaccatgggcctaacttaaagatgtgaatgagtgttacagttgaaagcccatcataggtttagtggtcctaggagacttggttttgacttatatacatgaaaagtttatggcaagaagtgcaaattttagcatatggggcctgacttctctaccacataattctacttgctgaagcatgatcaaagcttgttttatttcaccactgtaggaaaatgattgactatgcccatccctgggggtaattttggcatgtatacctgtaactagtaattaacatcttttttgtttaggcatgttcaattaatgctgtagctatcatagctttgctcttacctgaagccttgtccccaccacacaggacagccttcctcctgaagagaatgtctttgtgtgtccgaagttgagatggcctgccctactgccaaagaggtgacaggaaggctgggagcagctttgttaaattgtgttcagttctgttacacagtgcattgccctttgttgggggtatgcatgtatgaacacacatgcttgtcggaacgctttctcggcgtttgtcccttggctctcatctcccccattcctgtgcctactttgcctgagttcttctacccccgcagttgccagccacattgggagtctgtttgttccaatgggttgagctgtctttgtcgtggagatctggaactttgcacatgtcactactggggaggtgttcctgctctagcttccacgatgaggcgccctctttacctatcctctcaatcactactcttcttgaagcactattatttattcttccgctgtctgcctgcagcagtactactgtcaacatagtgtaaatggttctcaaaagcttaccagtgtggacttggtgttagccacgctgtttactcatacagtacgtgtcctgtttttaaaatatacaattattcttaaaaataaattaaaatctgtatacttacatttcaaaaagaaaaaaaaaaaaaaaaaaaaa

SEQ ID NO: 1763 - DNA, 2229 bp, Homo sapiens
gtcttgaggaccatctctcccggcagcataccgtgtggcttcacactgctctgcctctctgaacctcggtttcttcatctataaaatgggaataagagtaagccacctcaatggactgtgggaggcttaagtaaattgaagtgccatgcaagtagctagcatgcagttgcagctcaatgaatattatgatggccgcagatacgatggctacagctggggcacccatttcgggtcacaaggtagggttcaatgttgaagatggcagagccaattgcatccctgatgatcgtggagtgccgggcctgcctgagatgctcacctctcttcctttaccagagagagaaagacagaatgaccgagaacatgaaggagtgcttggcccagaccaatgcagccgtgggggatatggtgacggtggtgaagacggaggtctgctcaccactccgagaccaggagtatggccagccctgctctaggagaccggactcctcggccatggaagttgagcccaagaaactgaaggggaagcgcgacctcatcgtgcccaaaagcttccagcaagtggacttctggttctgtgagtcctgccaggagtacttcgtggatgaatgcccaaaccatggccccccggtgtttgtgtctgacacaccggtgcccgtgggcatcccagaccgggcggcgctcaccatcccacagggcatggaggtggtcaaggacactagtggagagagtgacgtgcgatgtgtaaacgaggtcatccccaagggccacatcttcggcccctatgaggggcagatctccacccaggacaaatcagctggcttcttctcctggctgattgtggacaagaacaaccgctataagtccatagatggctcagacgagaccaaagccaactggatgaggtacgtggtcatctcccgggaggagagggagcagaacctgctggcgttccagcacagtgagcgcatctacttccgggcgtgcagggacatccggcctggggagtggctgcgggtctggtacagcgaggactacatgaagcgcctgcacagcatgtcccaggaaaccattcaccgcaacctggccagaggagagaagaggttgcagagggagaagtctgagcaggttctggataacccagaagacctgaggggtcccattcatctctctgtgctgagacagggcaaaagtccctacaagcgtggctttgatgagggggatgtacacccccaagctaagaagaagaaaattgacctgattttcaaggatgttctggaggcctcactggaatctgcgaaggtggaagcccaccagttggccctgagcacctcactggtcatcaggaaagtccccaaataccaggatgacgcctacagtcagtgtgcaacaacaatgacccatggtgtgcagaatataggccagacccagggggagggggactggaaggtcccccagggggtctccaaggagccaggccaattggaggatgaagaagaggagccttcatcattcaaggccgacagtcctgccgaggcctcccttgcatctgaccctcatgaacttcccaccacctctttttgccctaactgtattcgcctaaagaagaaggttcgggagctccaggcagaattagacatgcttaagtctgggaaacttcctgagccccccgtattgccaccacaggtactggagctcccagagttctcggaccctgcaggtaagttggtttggatgagattattgtcggagggcagagtacgcagtgggctgtgtggagggtagcctaaagctctctgtggaaaccaccttccgggagacctgaggagtgtaacgtggaggcggctacctccgtgggtgggagcccaggtcctcagtgtctctggcagacccatcggcagctctgccaggtgctccatgtgttgcccttgtatcctccttgtcaataaaggaagttccgctgcagaaggggtgtgtgctgtgttcttgacccgttgcctttctctggtactggtgtcttaccccaaagcccaatttctaaacccagtctttctctgtccccagtctcaagcagggtgtcccactggagagatctcttggcttccctaacttagtccaggaacacagccttgttcttctcttcctgaatctctgtcctgccacacatggtcccagttccctagcctggagttctagaaggatggagagtgaggggatccaggccattca

SEQ ID NO: 1764 - DNA, 1537 bp, Homo sapiens
ccctgcgtctctgcccgccccgtggcgcccgagtgcactgaagatggcggctgctgtaggacggttgctccgagcgtcggttgcccgacatgtgagtgccattccttggggcatttctgccactgcagccctcaggcctgctgcatgtggaagaacgagcttgacaaatttattgtgttctggttccagtcaagcaccctattttaagggtacagccgttgtcaatggagagttcaaagacctaagccttgatgactttaaggggaaatatttggtgcttttcttctatcctttggatttcacctttgtgtgtcctacagaaattgttgcttttagtgacaaagctaacgaatttcacgacgtgaactgtgaagttgtcgcagtctcagtggattcccactttagccatcttgcctggataaatacaccaaggaagaatggtggtttgggccacatgaacatcgcactcttgtcagacttaactaagcagatttcccgagactacggtgtgctgttagaaggttctggtcttgcactaagaggtctcttcataattgaccccaatggagtcatcaagcatttgagcgtcaacgatctcccagtgggccgaagcgtggaagaaaccctccgcttggtgaaggcgttccagtatgtagaaacacatggagaagtctgcccagcgaactggacaccggattctcctacgatcaagccaagtccagctgcttccaaagagtactttcagaaggtaaatcagtagatcacccatgtgtatctgcaccttctcaactgagagaagaaccacagttgaaacctgcttttatcattttcaagatggttatttgtagaaggcaaggaaccaattatgcttgtattcataagtattactctaaatgttttgtttttgtaattctggctaagaccttttaaacatggttagttgctagtacaaggaatcctttattggtaacatcttggtggctggctagctagtttctacagaacataatttgcctctatagaaggctattcttagatcatgtctcaatggaaacactcttctttcttagccttacttgaatcttgcctataataaagtagagcaacacacattgaaagcttctgatcaacggtcctgaaattttcatcttgaatgtctttgtattaaactgaattttcttttaagctaacaaagatcataattttcaatgattagccgtgtaactcctgcaatgaatgtttatgtgattgaagcaaatgtgaatcgtattattttaaaaagtggcagagtgacttaactgatcatgcatgatccctcatccctgaaattgagtttatgtagtcattttacttattttattcattagctaactttgtctatgtatatttctagatattgattagtgtaatcgattataaaggatatttatcaaatccagggattgcattttgaaattataattattttctttgctgaagtattcattgtaaaacatacaaaataaacatattttaaaacatttgcattttaccacca

SEQ ID NO: 1765 - DNA, 1591 bp, Homo sapiens
ccctgcgtctctgcccgccccgtggcgcccgagtgcactgaagatggcggctgctgtaggacggttgctccgagcgtcggttgcccgacatgtgagtgccattccttggggcatttctgccactgcagccctcaggcctgctgcatgtggaagaacgagcttgacaaatttattgtgttctggttccagtcaagcaaaattattcagcaccagttcctcatgccatgcacctgctgtcacccagcatgcaccctattttaagggtacagccgttgtcaatggagagttcaaagacctaagccttgatgactttaaggggaaatatttggtgcttttcttctatcctttggatttcacctttgtgtgtcctacagaaattgttgcttttagtgacaaagctaacgaatttcacgacgtgaactgtgaagttgtcgcagtctcagtggattcccactttagccatcttgcctggataaatacaccaaggaagaatggtggtttgggccacatgaacatcgcactcttgtcagacttaactaagcagatttcccgagactacggtgtgctgttagaaggttctggtcttgcactaagaggtctcttcataattgaccccaatggagtcatcaagcatttgagcgtcaacgatctcccagtgggccgaagcgtggaagaaaccctccgcttggtgaaggcgttccagtatgtagaaacacatggagaagtctgcccagcgaactggacaccggattctcctacgatcaagccaagtccagctgcttccaaagagtactttcagaaggtaaatcagtagatcacccatgtgtatctgcaccttctcaactgagagaagaaccacagttgaaacctgcttttatcattttcaagatggttatttgtagaaggcaaggaaccaattatgcttgtattcataagtattactctaaatgttttgtttttgtaattctggctaagaccttttaaacatggttagttgctagtacaaggaatcctttattggtaacatcttggtggctggctagctagtttctacagaacataatttgcctctatagaaggctattcttagatcatgtctcaatggaaacactcttctttcttagccttacttgaatcttgcctataataaagtagagcaacacacattgaaagcttctgatcaacggtcctgaaattttcatcttgaatgtctttgtattaaactgaattttcttttaagctaacaaagatcataattttcaatgattagccgtgtaactcctgcaatgaatgtttatgtgattgaagcaaatgtgaatcgtattattttaaaaagtggcagagtgacttaactgatcatgcatgatccctcatccctgaaattgagtttatgtagtcattttacttattttattcattagctaactttgtctatgtatatttctagatattgattagtgtaatcgattataaaggatatttatcaaatccagggattgcattttgaaattataattattttctttgctgaagtattcattgtaaaacatacaaaataaacatattttaaaacatttgcattttaccacca

SEQ ID NO: 1766 - DNA, 6633 bp, Homo sapiens
cggcgccgcgcggccgcgctagaatggaggcgcccagcggcagcgagcccggcggcgacggggccggggactgcgcccacccggacccccgggcccctggcgccgcggcgcccagctccggccccggcccgtgcgcggccgcccgggagtccgagcgccagctgcgcctccgcctctgcgtcctcaacgagatcttgggcaccgagagggactacgtgggcaccttgcgcttcttgcagtcggcattcctgcatcgcatccggcagaacgtggccgactcagtggagaagggcctcacggaggagaatgtcaaggtcctgttctcgaacatcgaagacatcctggaagttcataaggatttcttggccgccttggagtattgtttacacccggagccgcagtctcagcatgaacttgggaatgttttcttaaaattcaaggacaagttctgcgtgtacgaggagtattgcagcaaccatgagaaagccctgaggctgctggtggagctgaacaagatccctaccgtgcgcgccttccttttgagctgcatgcttctgggaggccggaagaccacggacatccctttggaaggctacctgttgtctccgatccagaggatctgcaagtacccgctcctccttaaggagctggccaagaggactcccggcaagcacccagaccaccccgcggtccagagtgccctgcaggccatgaagaccgtttgctccaacatcaatgagaccaagcggcagatggagaagctggaagccctggagcagctgcagtcccacatcgaaggctgggagggttccaacctcacagacatctgcactcagctcctcctgcaagggactttgttaaagatctctgcgggcaacatccaggaaagggccttcttcctcttcgacaaccttctcgtctactgcaagcggaaatccagggtcaccgggagcaagaagtccaccaagaggaccaaatccatcaacggctccctctacatcttcaggggtcgaatcaacactgaagtcatggaggtggagaatgtggaagatgggacagcggattaccatagcaacggctataccgtcaccaacggctggaagatccacaacacggccaagaataagtggtttgtctgcatggccaagacggcagaggagaagcagaagtggctggatgccatcatccgcgagcgggagcagcgcgagagcctgaagctgggcatggagcgtgatgcctacgtcatgattgcggagaagggggagaagctgtaccacatgatgatgaacaagaaggtgaacctcatcaaggaccgccggagaaagctgagcactgtccccaagtgctttcttggcaatgagttcgttgcctggctcctagaaattggtgaaatcagcaagacggaagaaggagtcaacttgggccaagccctgttggagaatggcatcatccaccatgtttccgacaagcaccagttcaagaatgagcaggtgatgtatcgcttccgctacgacgatggcacctacaaggcccgaagtgagctggaggacatcatgtccaagggtgtgaggctttactgccgtcttcacagcctctacaccccggtgatcaaagaccgtgattaccacctgaagacctacaagtcagtgcttcccgggagcaagctggtggactggctgctggctcagggagactgccagactcgggaggaggcagtggcgctcggcgtgggtctgtgcaacaatggcttcatgcaccacgtgctggagaagagcgagttcagggatgagtcccagtacttccgctttcatgctgacgaggagatggaggggaccagcagcaagaacaaacagcttcgcaacgacttcaagctggtggagaacattctggccaagcgcctgctgatcctgccccaggaggaggactatggctttgacatcgaggagaagaacaaggctgtggtggtgaagtccgtccagaggggctcgctggctgaggtggctggcctgcaggtggggaggaagatctactccatcaatgaggacctggtgttcctgcggccgttttcagaggtggagtccatcctcaaccagtccttctgctcccgccgccctctgcgcctcctggtggccacgaaggccaaagagatcatcaaaatccccgaccagccggacacactgtgcttccagattcgtggagctgccccaccgtacgtctatgctgtggggagaggctctgaggccatggctgcagggctctgtgctggtcagtgcattctgaaggtcaatggcagcaacgtgatgaacgatggtgcccctgaggtcctggagcacttccaggcattccggagtcggcgcgaagaggccctgggcctgtaccagtggatctaccacacccatgaggatgcccaggaagcacgagccagtcaggaggcctccactgaggaccccagtggcgagcaggcccaggaggaagaccaggctgattcagccttcccactgctgtccctgggtccccggctgagcctgtgtgaggacagccccatggtcaccctgactgtggacaacgtgcacctggaacacggcgtggtgtatgagtatgtgagcacggcaggcgtcaggtgccatgtgctggagaagatcgtggagccccgcggctgcttcggcctcaccgccaagatcctcgaggcctttgctgccaatgacagcgtcttcgtggagaactgcaggcggctcatggccctgagcagcgccatcgtgaccatgccccactttgagttccgcaacatctgtgacaccaagctggagagcattggccagaggattgcctgctaccaggagtttgcagcccaactgaagagcagggtcagcccacccttcaaacaagcccccctggagccccacccgctgtgtggcctggacttctgccccaccaattgccacatcaacctcatggaagtgtcctaccccaagaccaccccctcagtgggcaggtccttcagcatccgctttggacgcaaaccctccctcatcggccttgacccggagcaaggccacctgaaccccatgtcgtacacccagcactgcatcaccaccatggctgctccctcctggaagtgcttgcctgctgcagagggtgatccccaaggccagggtctccatgatggcagcttcgggccagccagtgggacccttggtcaggaagaccggggcctcagcttcctactcaagcaggaggaccgtgagatccaggatgcctacctgcagctcttcaccaagctggatgtggccctgaaggagatgaagcaatatgtcacccagatcaacaggctgctgtccaccatcacagagcccacctcgggtgggtcctgcgacgcatccttggctgaggaggcctcctccctgcccctggtcagtgaagagagcgagatggacaggagtgaccatgggggcatcaagaaggtgtgcttcaaggtggccgaggaggaccaggaggactcaggccacgacaccatgagttatcgcgactcctacagcgagtgtaacagcaatcgagactcggtcctgtcctacaccagcgtgagaagtaacagctcctacttgggcagcgacgagatggggtctggagatgagctgccctgtgacatgcggatcccatctgacaagcaggacaagcttcatggctgcctggagcacctctttaaccaggtggactccatcaatgctctcctcaaggggccagtcatgagccgggctttcgaagagaccaagcatttccctatgaaccacagcttacaagagtttaaacagaaagaagagtgtacaatccgtggccggagcctgatccagattagcatccaggaggacccctggaacctccccaactccatcaagaccctggtggacaacattcagagatatgtggaagatgggaagaaccagctgctcctggccttgctgaagtgcacagacacggagctgcagctgcgcagagacgcgatcttctgccaggccctggtggccgccgtgtgcaccttctccgagcagctgctggcggccctgggctaccgctacaacaacaatggcgagtacgaggagagcagccgcgacgccagccgcaagtggctggagcaggtggcggccacgggcgtcctgctgcactgccagtccctgctctcgccagccacagtgaaggaggaacggaccatgctggaggacatctgggtgacgctgtcagagctggacaatgtcaccttctcctttaagcagctggacgagaactatgtggccaacaccaacgtcttctaccacattgagggcagccggcaggcgctgaaggtcatcttctacctcgacagctaccacttctccaagctgccctcccgcctggagggtggggccagcctgaggctgcacacagcgctgttcacgaaagtgctggagaacgtggaggggctgccttctccaggcagccaggccgcggaggatttgcagcaggacatcaacgcgcagtccctggagaaagttcagcagtattaccgcaaactcagggcattttacctggagcggtctaacctgcccacggatgccagcaccacggcggtaaagatagaccagctgatccgccccatcaatgccctggatgagctctgccgcctcatgaagtcctttgtccacccaaagcctggtgctgctgggagtgtgggcgccggcctcatccccatctcctcggagctctgctaccgcctgggggcctgccagatggtcatgtgtggcacaggcatgcagaggagcaccctgagcgtgtccctggagcaggcggccatcttggcacggagccacgggttgctgcccaagtgcatcatgcaggccacggacatcatgcggaagcagggcccaagggtggagattctggccaaaaacctgcgagtcaaggaccagatgccccagggtgctccgcgcctctaccgcctctgccagccgccggtggatggggacctctgaacacccaaatgccccacgctgggccgcggcctctggagctgggatttgggaggacacagcaggcagcgctggccttctccagggatggcccaaggcttccgcagccgcccgttccgggacctgcccagcgtcctccctgcctccttccgggacaagcctggccaccctcgctgtgatgacgagctggctgattggccctgggccggcccattcttcacacgcctgccagaagctggaggggtgctggagacccatagagctgatgggagcagctggtgcctggccttcggctcctgcgtccccagaacccaagggaacgtcatggaggccacatggggccacccggctccctcgggatggctccgcctgcacttttgaaaccccggtttccttcaacgtccacattccaggtgaccacacgtgtctcctcctcctcatcttagcttccaggttcaccctaaccctgtactaacctgcttggtggacttggaaaagacttggctctgtcgggaaaggagagacggggcctccatcacgcctgttaccagaggatccccgagagccacaccagctctggacatcaccgcccctggaactggggccaccagccctgggcacgagatttgctctgactttatttatatggcatgaaatctctggtttattttgggattttttgttgttggtgttgtcaaagtttgttttttctaaagttgtgtgattatatatttgacattttacatttcaaagaaaggtatgttgtctaacaggggaccaacagaaggtagtattgacaactgttcctgcttctactaaaaaaaaaagagcacaaaagaaaaactaaattattgaaaaattaaaaaatgtcattgtttcctgtttgttaatattagggttgtaaggtgtcgttttgaggtatcgactgtgattccttcccccaccctccattctccagcggttggccggtgttagaactcgctctctttgagtgactggctacaagggcctgagaggtggccagccagggttggagctggaggggatggagccccacctgaggtgccgtgtcacacgggttagagggtcactgggaaacaccgggcggtggcttctgtgatttattttcttgatggtaacttctcagagcagggcgattgggacatcaccagccagagcacaggaagccaccctgcctgctggggaggagggacccacacaagccccctcggcagtttgtccccccagcttcggtatgccttcagggaaaggtcacagctggggaggaagcggggggacgcctgtcacccctggcaggtggtgagttcaggtgggggctccctgctgcccccaggcctgggagcttgaagccctcccggcatctggcatccgagcctcccgccctccagggtgcgcttccctctcttgccgcagcatacacgagggcaggcagtggccttgtcactgtatcttgcatcagagacaaaggaggacccgctttagccctgctgcgggaaatgggggagggcccagggccagcgcattgtgcactggtttactttaaaatgtacagattcttctcgttaaattcttgatagattttttattattattaaaagtcagtttataatac

SEQ ID NO: 1767 - DNA, 874 bp, Homo sapiens
aggaagcaaagaaggacctgggctttgggaagatctaaagacccaggaaggtctctgggtgggataaagccaagatgaaactccccttacttctggctcttctatttggggcagtttctgctcttcatctaaggtctgagacttccacctttgagacccctttgggtgctaagacgctgcctgaggatgaggagacaccagagcaggagatggaggagaccccttgcagggagctggaggaagaggaggagtggggctctggaagtgaagatgcctccaagaaagatggggctgttgagtctatctcagtgccagatatggtggacaaaaaccttacgtgtcctgaggaagaggacacagtaaaagtggtgggcatccctgggtgccagacctgccgctacctcctggtgagaagtcttcagacgtttagtcaagcttggtttacttgccggaggtgctacaggggcaacctggtttccatccacaacttcaatattaattatcgaatccagtgttctgtcagcgcgctcaaccagggtcaagtctggattggaggcaggatcacaggctcgggtcgctgcagacgctttcagtgggttgacggcagccgctggaactttgcgtactgggctgctcaccagccctggtcccgcggtggtcactgcgtggccctgtgtacccgaggaggccactggcgtcgagcccactgcctcagaagacttcctttcatctgttcctactgagctggtcccagccagcagttcagagctgccctctcctgggcagctgcctcccctcctctgcttgccatccctccctccacctccctgcaataaaatgggttttactgaaatggaaaaaaaaaaaaaaaaaa

SEQ ID NO: 1768 - DNA, 10002 bp, Homo sapiens
agaatcgaaactgagagctcctgggcaggctcggcagggcaggcagctccaggagggcttcgaaccgtggccaacagttccagtggactgcgtggacccgtgagctcaggagcctcagacgcctccctggagagccaagctggtgttcgaggtggcgcctccagggtccaccctgctgcccaacagccccgcggccaccagagggccgtccctggcccggctgtgtgccctggtggacctgtgtctgggctgctcccgctgcacccagcggctcaatgaaagcacctacgtcctccgtagggtggagcatgactgctcccgcgagatcctgctggcccgctttaagcaggccaccaagagcaaggtctggcgcgtggtgggctgccggcccaccttcccaaggcccctgtgctaccaagtctgccactactacagccctgggctcggctgccggcgccaccgaaaccggtgcacctttgcccgcagtcgcgaggaggccctggtctggaccttcgagcgtcagcacaacctccagcgcctatggctgaaggcggaggtgcagggcagcggggcccagggaggggcaggccgggcggccgacgccatccttacggagtttggcggccgcttcgagctgctttgctccctctgcttcaggcgctgtcccccatgcatctgtcgcgtggacccccaggggcagtgccctgagcacggagcctgcccctccctcctggcccacgtgagcgccgagggccgccgcaagcaacagtttgtggtggtgaggccgcggccccgggccggccagcctcctgcctactgcaggtttgtggggcgtgggcagccgtgctggcgtggggagtcccgctgccagtttgcacacagcgccgtggagatggctgtgtgggaggccgagcagctgggtggcctccagcggggggacctgctcacaccccctgcccctgatggcgacgggcgcacggccccccttggccagccccctggggcccagctgtactgcccggcctgcttggtcacctgccactctcaggaggccttcgagaaccactgcgcatcctcggagcacgcacagatggtggccttcgaccaggccctgccctgggagcaccgttccccacccccgggactctccaagttcgagctctgcccaaagcctgacctctgtgagtatggggacgcctgcaccaaggcacactcagcacaggagctgcaggagtgggtccggcgcacgcaggctgtggagctgcgggggcaggcggcctggcaggacgggctggtgccctaccaggagcggctgctggccgagtaccagcgcagcagcagtgaggtccttgtgctggcagagacccttgatggagtgcgtgtcacctgcaaccagcccctgatgtaccaggcccaggagaggaagacccagtacagctggacgtttgccgtccactctgaggagcccctgctacacgtggccctgctgaagcaggagccaggagccgacttctctctggtggctcccggcctcccgccaggccggctctacgcacggggtgagcgcttccgtgtgcccagctccactgccgacttccaggtgggagtgcgtgtgcaggctgcctcgttcggcacctttgagcaatgggtggtcttcgactttggccgccggccggtgctgctacaaaagctggggctgcagctgggccaggggcgtcgcccaggaccctgcaggaatctggcgctcggccaccctgaggagatggagcgctggcacactggcaaccgccacgtggtgcctggcgtggagcggacggccgagcagacggccctgatggccaagtacaagggccctgccctggccctggagttcaaccgcagcagcgtggcctcgggccccatctcaccaaccaactatcggcagaggatgcaccagtttctctatgaggaggaggcggctcagcagcagctggtggccaagctgaccctgcggggccaggtgttcctgaagacggcattgcagacgccagcgctgaacatgctcttcgcgcctccgggagcactgtacgcagaggtccccgtcccctcctccctgatgccagacacagaccagggcttcctgctgggccgggcggtcagcacagccctggtggcccctgtacctgcacccgacaatacggtgttcgaggtgcggctggagaggcgggccagctcagagcaggcgctgtggctgctgcttccggcccgctgctgcttggccctggggctgcagcctgaggcccgcctggtcctggaggtgcagttccagattgacccgatgaccttccgcctctggcaccaggcagtggacacactgcctgaggagcagctggtggtgcccgacttgcccacctgcgccctgcccagaccttggtctgtcccacccttgcggcgtggcaaccgcaagcaggagctggccgtggcgctcatcgcgggctggggccctggggatgggaggcgtgtccccccgctactcatctatggcccctttggcaccggcaagacctacacgctggccatggcctccctggaggtcatccggaggcctgaaaccaaggtgctcatctgcacacacaccaacagtgccgccgacatctacatccgggagtatttccacagccacgtcagcggcggccaccccgaggccactcctctccgtgtgatgtacacggaccggccgctgagccagacggacccagtcacgctgcagtactgttgcctgaccgacgaccgccaggctttccgcccgcccacacgggcagagctggcgcggcaccgcgtggtggtcaccaccacctcccaggcccgtgagctcagggtgccggtcggcttcttctcccacattctcatcgatgaggcggcccagatgctggagtgcgaggccctcaccccgctggcctatgcctcgcacggcacccgcctcgtgctggcgggcgaccacatgcaggtcacaccccggctgttcagtgtggccagggcccgggcggccgagcacacgctgctgcaccgcctcttcctgtgctaccagcaggagactcacgaggtggcgcggcagagccgcctggtcttccacgagaactaccgctgcacggacgccattgtcagcttcatctcgcggcacttctacgtggccaagggcaaccccatccacgccaggggcaaggttccgccccacccccggcactacccgctcatgttctgccacgtggcgggcagcccagaccgggacatgtccatggcgtcctggctgaatctggctgagattgcgcaggtcgtcgagaaggtgcaggaggcctacaacacctggcccagctgctggggcggccgcgagcagaggtgcatctgtgtcgtttcccacggtgcccaggtcagtgcactgaggcaggagctgaggaggcgggacctaggccaggtgtctgtcggcagttttgagatcctgccagggcggcagttccgggtcgtggtgctcagcactgtgcacacctgccagagcctgctcagccctggggcactggcccctgagttcttcaccgacgcccgcgtgctcaacaccgtcctgacccgcgcccagtcccagctggtggtagtgggggacgccgtggccctctgctccttcggggcctgcggcaagctctgggagagcttcatccgtgagtgcgtggagcggcacagtgtctgccccgagggcctgtccatggagcaggtcgagcagggtgtggcgcagagacggcgctggcctccccgaggcacacaggctggggcagcggggaactgggaggctgccccagagccagtaggggacctggccgaggagcaggcggctgtggtgacggccatggtgaaggcagagccgggagatgaggctctgagcccagcatcccgtgacatcacggcaaccacagcgcagacggaggctgcggcagcaccagcaggagacgcagtgaaggaagacgtggtgcccggggcctgtgcggcaggagcggctgctgcagcgggcgtggagtccacggaggctgaggatgcagaggctgacttctggccgtgggacggggagctcaacgctgacgacgccatcctacgggagcttctggacgagagccagaaggtgatggtgaccgtcggggaggacgggctgctggacactgtcgccaggcccgagtccctgcagcaggcccggctgtacgagaacctgcccccggctgcgctacggaagctgctgcacgcggagcccgagcggtaccgccactgctctttcgtgccagagaccttcgagcgggcgtcagccatcccgctggacgatgcctcctcgggccccatccaggtcaggggccgcctggactgtgggatggccttcgccggggatgaggtgctggtgcagctcctttcgggagacaaggcgcccgaggggcggcttcggggccgcgtgctgggcgtgctgaagaggaagaggcacgagctggcgtttgtgtgccgcatggacacgtgggacccgcgcatcatggtccccatcaatggctccgtgaccaagatcttcgtggccgagctgaaggacccatcgcaggtccccatctacagcctccggaagggccggctgcagcgtgtggggcttgagaggctcaccgccgaggcccggcacagccggctcttctgggtccaaattgtcctgtggcggcaaggcttctactacccgctgggcatcgtccgggaggtgctgcctgaggccagcacctgggagcagggcctccgcatcctcggcctggagtacagcttgagggtgcccccgtcggaccaggccaccatcaccaaggtgctgcagaaataccacacggagcttggccgggttgccggccgccgagaggactgccgcgccttcttgaccttcactgtggacccccagggcgcctgcaacctcgatgatgccctcagtgtccgagacctgggtcccaggtgcgaggtggctgtgcacatcactgatgtggccagcttcgtgcccagggacggggtgctggacgtggaggcgcgaaggcagggcgctgcgttctatgcccccggcagggagccagtgcccatgctgccggccagcctctgccaggacgtcctcagcctcctgcctggccgggaccgcctggccatctccctgttcctcaccatggagaaggccagtggccagctgaagagcctgcgctttgcaccctccgtggtccagtctgaccgccagctgtcctacgaggaggcggaggaggtgatcaggcagcacccgggtgccggccgtgagctgccggcccgcctggactccgtggacgcctgcgtcgtggccgcgtgctacttctctcggctgctgcgccggcaccgcctgcggtccgactgcttctatgagcagccggacgaggacggcaccctgggcttccgcgcggcccacatcatggtgaaggagtacatgattcagtttaataggctcgtggctgagttcctggtgggcagcgagtgcacgcggacggtcacgcctctgcggtggcagccagcaccccgcagccagcagctcaaggccctgtgtgagaagcatggggaccgggtgcccctgtcactgcacctcggccaccacctgcacggcggcgggggcagtccccccgacacgcggctgcacctcctggcctccctctggaagcaggtccagtttgctgcccgcacccaggactacgaacagatggtggacttggtcaccacggacgacatgcacccattcctggctcctgcaggccgcgacctccgcaaggccctggagcgctcggcgttcggccgctgcgcccggggccaccagcagcagggcggccactactcgctgcaggtggactggtacacgtgggccacctcgcccatccgcaggtacctggacgtggtgttgcagcggcagatcctgctggcgctgggccatgggggctctgcctactctgccagggacatcgatgggctctgccaggccttcagcctccagcacgcacttgcccagagctatcagcggcgggcgcgcagcctgcacctggccgtgcagctcaaggcccagcctctggacaagctgggcttcgtggtggacgtggaggcgggctcccgctgcttccggctgctcttccccagcaaccgggagacgctgcctgacccctgccccgtcccctacggctccctgcagctggccgagcacccccacgccctggcaggccggccgggcctgcggctcctgtggcggcgccgtgtctactcagcgcagggatccagcccgcccctgccactgcctggcactgtgccggacccacacaccctggccgtggagacggccctgtggaagcagctgctggagctggtggagctgcagcgctggccggaggcggctgctctcatccaggagaagggcgaggcgtcccagcggcgggagctggtgcaggtgcagcggagccactgtggccatttcctggaggtggcccgggagctgggcagtggggacaccctgcaggtgcagctcggcaccagcctgcagcacggcttcctggtaccgagccctcagctctggacggtggcaccgggcttcagcctctgcctggagcacgtggagcggcccggagactgcttctcaggccgtgtgtaccgggccccgagggaccggtaccgcgacgtggatgagtacgcctgcgtgtgggaaccattctgcgccctggagtcggccaccggcgcggttgccgagaatgactccgtcacacttcagcacctgagtgtctcctgggaggcgtcacggacgccgcaggggcagctgcagggcgccttccgcctggaggccgccttcctcgaggagaactgtgccgacatcaacttcagctgctgctacctctgcatccggctcgaggggctgccggctcccacggccagcccacgccctgggcccagcagcctcggccctggcctgaatgttgaccccggcacgtatacctgggtggcccacgggcagacgcaggactgggaccaggagcgccgggcagaccggcaggaggctcccagacgggtgcacctcttcgtccaccacatgggcatggagaaggttccggaagaggtgctgaggccgggcaccctgttcaccgttgagctgctgcccaagcagcttcctgatctccgcaaggaggaagccgtgcgtggactagaggaggcgtccccgctggtcaccagcatcgcactgggccggcctgtcccgcagcccctctgcagagtgatccccagcaggttcctggagcggcagacctacaacatccccggaggccgccacaagctgaaccccagccagaacgtggcggtcagggaggctctggagaagcctttcacggtcattcagggcccaccaggtacagggaagacgatcgtgggcctccacatcgtattctggtttcataaatcaaaccaggagcaggtgcagcccggaggccccccccgtggggagaagcggctggggggtccctgcatcttgtactgcggcccctccaacaagtcggtggatgtcctggcaggactgctcctgagaaggatggagctgaagcccctccgtgtgtacagtgagcaggctgaggccagcgagttcccagtgccgcgtgtgggcagcaggaagctgctcaggaagagcccccgggaggggaggccgaaccagagcctcaggagcatcaccctgcaccaccggatccggcaggcccccaacccttactcgtcggaaatcaaggcctttgacacccggctgcagagaggggagctcttctccagggaggacctggtctggtacaagaaggtcttgtgggaggctcggaagttcgagctggaccggcatgaggtcatcctctgcacctgctcctgtgcagcctctgccagcctcaaaatcctggacgtgaggcagatccttgttgacgaggcaggcatggccacggaacctgaaaccctcatccccctggtgcagttcccacaggccgagaaggtggttcttctcggagaccacaagcagctgcggcctgtggtcaagaatgagcggctgcaaaacctgggtctggaccggtctctgttcgagcggtaccacgaggacgcacatatgctggacactcagtaccgcatgcatgagggcatctgtgccttcccctctgtggcgttctacaagagcaagctgaagacgtggcagggcctgaggaggccgcccagtgtcctgggccacgctggcaaggagagctgccctgtcatctttggccacgtgcagggccacgagcggagcctgctggtgtccacggacgaagggaatgagaactccaaggccaacctggaggaggtggctgaggtggtccgtatcaccaagcagctgaccctggggaggaccgtagagccccaggacatcgccgtcctcacgccctacaacgcgcaggcctctgagatcagcaaggcccttcggcgagagggcatcgccggggtggccgtgtcctccatcaccaagagccaggggagcgagtggcgctatgtgctggtgagcaccgtccgcacctgtgccaagagcgacctggaccagcggcccaccaagagctggctcaagaagtttctgggcttcgttgtggaccccaaccaagtgaatgtggctgtcacgcgggcccaggaggggctctgcctgatcggagaccacctccttctgcgctgctgccccctctggcgtagcctcctggacttctgcgaggctcagcagaccctcgtgcctgccggccaggtgcgcgtctgcaggaggccaactatgccttcctgaagagccctctccacctgcaaggtgccaggactgggagggaaagtccagggcccccccaccctccccaccaccctccgccatcagcctgcctgggccagcctgcctcctggcctcaggatctccctggggcaggaagtgggtggacttggaggaggaacggcaagggccggtccccacactcttgctcctcctgggcatctggggacaggaacacctctcagggtggccaagaggggcttccttgggaccagtgcaaggaagttctgctgtccctgggaagtctcagaaccaggaaggaaaccctgtggaggctgccctttgacctttggacgccacctgtaatcactctggatggtgtctgtggagttcaggtttattttctatttaaatgaactaaaagccagcatcctgccgggcgtggtggctcacgcccataatccagcactttgggaagccgaggcgggcagatcacctgaggtcaggagttcgagaccatcctggccaacatggtgaaaccccgtctccactaaaaatacaaaattagctgggcgtggtggcgggcgcctgtaatcccagctacttgggaggctgaggcaggagaatcgcttgactccaggaggcgcaggctgcagtgagctctgatggtaccactgcactccagcctgggtgacagagcgagaccctgtcttaaaaaaaaaaacaaaacaaaaccagcatctgttactggaacagagacctcagcccaagctcaggacaaggaggcctccctgggagagggggcctttctcccaccatcaccgcctgtgtccttcaggggctgctggagggcagcccaaagccaggggcccaccccgccccaccccaccccaccccaccctctgaaatgtgaaaagcctgcactcttcctgtgggctgcgcagtgggctcgggggttggggggtgccggggcgatgcttccaccctggactgagtgttcggggcagcctgctcggctgtatgtttctcgcacgctcacccgcttcagtgcggctctgtccctgctgccgcctccagtcctgagggaggggcttgccccaccttctacattccaatttttatatctttgaattatgtgattagatattaatttaatgataaaaccactctgaaagctcttctca

SEQ ID NO: 1769 - DNA, 9369 bp, Homo sapiens
ctgtgggtaggcggcggcggcggcggctacgcggagcggcaggcggtggagcgaggccgcgcgcgccgaagatggctgagaagcagaagcacgacgggcgggtgaagatcggacactacgtgctgggcgacacgctgggcgtcggcaccttcggcaaagtgaagattggagaacatcaattaacaggccataaagtggcagttaaaatcttaaatagacagaagattcgcagtttagatgttgttggaaaaataaaacgagaaattcaaaatctaaaactctttcgtcatcctcatattatcaaactataccaggtgatcagcactccaacagatttttttatggtaatggaatatgtgtctggaggtgaattatttgactacatctgtaagcatggacgggttgaagagatggaagccaggcggctctttcagcagattctgtctgctgtggattactgtcataggcatatggttgttcatcgagacctgaaaccagagaatgtcctgttggatgcacacatgaatgccaagatagccgatttcggattatctaatatgatgtcagatggtgaatttctgagaactagttgcggatctccaaattatgcagcacctgaagtcatctcaggcagattgtatgcaggtcctgaagttgatatctggagctgtggtgttatcttgtatgctcttctttgtggcaccctcccatttgatgatgagcatgtacctacgttatttaagaagatccgagggggtgtcttttatatcccagaatatctcaatcgttctgtcgccactctcctgatgcatatgctgcaggttgacccactgaaacgagcaactatcaaagacataagagagcatgaatggtttaaacaagatttgcccagttacttatttcctgaagacccttcctatgatgctaacgtcattgatgatgaggctgtgaaagaagtgtgtgaaaaatttgaatgtacagaatcagaagtaatgaacagtttatatagtggtgaccctcaagaccagcttgcagtggcttatcatcttatcattgacaatcggagaataatgaaccaagccagtgagttctacctcgcctctagtcctccatctggttcttttatggatgatagtgccatgcatattcccccaggcctgaaacctcatccagaaaggatgccacctcttatagcagacagccccaaagcaagatgtccattggatgcactgaatacgactaagcccaaatctttagctgtgaaaaaagccaagtggcatcttggaatccgaagtcagagcaaaccgtatgacattatggctgaagtttaccgagctatgaagcagctggattttgaatggaaggtagtgaatgcataccatcttcgtgtaagaagaaaaaatccagtgactggcaattacgtgaaaatgagcttacaactttacctggttgataacaggagctatcttttggactttaaaagcattgatgatgaagtagtggagcagagatctggttcctcaacacctcagcgttcctgttctgctgctggcttacacagaccaagatcaagttttgattccacaactgcagagagccattcactttctggctctctcactggctctttgaccggaagcacattgtcttcagtttcacctcgcctgggcagtcacaccatggatttttttgaaatgtgtgccagtctgattactactttagcccgttgatctgtctctagtttctttctgttattgcactatgaaaatcagttatattctttaaatttttatcttacttttggataatatccactgcaatactaattgagaaacatgaattatttccaggggcacacaatgctattgaaattactgaaaacaaaatatctgacatcttatttacttgtagaaatctgtaattctattgtgcctatgataaattcacataggcaatatctttaataggttaatatcaatgaagatttttaattacaataatgagttcactacagacgattaacacaccacactggcgaaccatctcaatgtaagggtggtttggcaacacctccttgctttgctgtttggtgtaggtaaatctagtttacttcctaaatttcagtaggctttatgctgtgtttatgcccccaatttattttaacaaaagaagattaaaaagtaaaagaaccacgagtaagatattatttaaatgttgaaatcttaaaaacctgcctccaagatttcagaagccaagtttttctaacagtatttgtacaaatactgcctagtgtattcaacagaaggactgtggtcatgtaacaggtaaccacaattttcaggtttcttaaaaacagctgtaactaactcaggatttttatcttgagatttccctgaataatatatttatcttaagagccttcaagtttcaaattaatattggaacatctggaattgcaacaacttttgtcttttacataaacttacgtcatttaaaaaatgtcttcaaaatctacctttctcaaattctttttgcctctatttatttttgcatttcaccaacagtgataaaatagttaaatgaaacaaagcaaagtatcaacagtcccttaaatgagaatccttatctttgatctttattttctgtgttaggtgttagggtcctggtgcagctcataatgctaattcttcattggaagccactcccttcacctcacctcacctagtcactattgtctttgttcattgtttgatcctgagtggttgattgatatagctttgaatcttttctagtccaagtttgaaaacactgttctggccctaagggctggctatgacctttactgttgaacctgatagggcagggaagctttgaacatcaagaaaaaatttttatcttaaataaataaatatatatattcacacaccagtgcttttaagcaaaaaccagtttttttgtttgtttgttttgctttgtgcaggttttctttaagattaaaaaaacacaaactatagcagggtagataatagtttattgattatattttgttttagtaaaagtatttaattttaaattctgtgtaatttatctaatttgtatttattcatttgttatttttatgttgtaattaacacttatttacctggattaccctaaaaaaattaagctcttgaaaacaaaaaaatgacattaccttgacaggcttctctttgccaaaagtaatgtatgttctgccaagaagcaaatgagaatgttagactaagtttctcctgtgttagtggaaaacaagtgtgtctatctttaaatattctttgaatcaggagtttgcgttgtgtcacatcatatggctttgcagatcttttaaaaactgatgttaaataacttataagtccaacttcttaatatcaagataaatgaatagttcaccaatttgggaaggagggcgggttgcaatttgagatagtttaaggtttaattattgaaagactgccatcttgtggcaccaaaaggtaatttttacatgattatttgtatagtgataagcagtcctgctgtgttagcctggtccattatagatatggcatagttttgggttctctaaatgggtccatacctcttttgggaaaaaacagggccacctcataatatttgcctgattatgaatggaattaccttagaaataaggaactaatcagattacttaaccccaatgacaaaatccacaaaaattttgaaggcagagaaacagaaggaatccagtgatgttttagctccattagtctaataggtcagatattaaaaaattgttcatatcaaaattaccttatatggattattgccatgttttttgagagttaattatttactgttttctaattcttgccagtatttatgaacagctgtagcttgatatttacctactgaattttaggagaactaatggtcacagtttgggttcttttatgtgtatgtttttaaaacagctattttgtgaatctaggtggttggtttttagaagatttcaggagatgcagtccagcacaattagagctggaacattgttacagcaggctttttgttgctcatgggcagatagagggaaagaatcagttgttagccccaaatttccacatttcagtgttgtaaactctgaatgtgataggtagatgtgggctaagaataatttcctccagtgaagacacgggagaagagcttctattatgaggttatagataaggccttagttatatcatggaaatggactccatgtagttctagaactgcatttcccaaagtatatcctgtgagatgctccacagaaaaaatgattgcatggactaagtttgaaaaatgttgcatgctactcttcccctcgaagatgacagtggatgtcagcattaaagactttgacaggtctttctgtgaaaaaaagaaagccacataactttgttgaactttgcccaaattaatttttcattttaaaaaacttaatagcccatgaaaagcaaatttgggaaatacattttttaggaaaatactgtcccagaatgccataattagggtagttaataattaacacttccatttctcttactggttgttgggagaatctgattgaaaattagaattactttgttttaacttgcagacatgttcatcgtgagtgaatgctggattaaatagaattttctgtgtctgcaacttgtttcatgacaccttggttttcttaatcatcttgtattattatttgagtgcaacattattcttatgcatgggtgactgaaaaacctgaaacaagattacttgttaaaaaaaagtctaagagactaatgactcatgcttatggctcagtgggtaatgaatcagtgtcactgattcttacttttaaaatgtgtagtcagtgaacattttctaaatacttttctttgggataccatatgaagatctaattccttatgtttcagtgtaggaacagctaccttctcaaatagaatatgcagggagggaagtaggcaaaccatttacaagttgggtttttgttttgattaacctgttaagagacacttttgtaatctctagtgtttacattcctttatactagctatctataaagagaatccagaaggctaaattaatcagaaataattatatttctatgtcagggtattggctatatgtagcatgaacaattctccattttctgcaaatgggtttttcaggacagttttataattctgagtttgctttttcttattccctagacagtttgtactcagggaatacaaattgatttttactgttaaatgagacatagtttagaaaaaatcataagcaactattgtagatttttgatctgtttggatttatctgtagcattgaataatgtgcagtgtactgagttaatgtaggcacctcactttggatttataaaatgtaaaaacctggaacatgcctgccacagacaccactttgtctattcaccgggtactaatttacatcctattaatggttgtaaaagctgagtgtctaaatgctagacatgttcacaattttgtctgtttttgtttatttgtttttaagacccaaaccttttcaatcttgcatttatttacttggttctcctgtgtcaccctgtggctttttaaatagggaatgtaatttattttaatagtagttctcaaagactctattaaaaactctggacgagggatatgtgcaatctgttggtaagtcacatcctatgtttggcctcatttttataactcctaaaatgagaaaggtagattttaacacttctaaggtacctttgagctttaaagttcttttctgcttttccatatgatttgtgttagtgttcactttttatatatttagagtttttatatgagtgtgaatgtttctgttttgatttggtgaggcatgtcagaggtatatacttgaatatttttctaaatacagctgctggaggaatgcaaatggcaaaaatcatccagaaaaccaaacacggtgaaacatcacatccatttggcatgaagcaaagcattacaaatttggagtgatgaaagtgttccatatattttttatagtgatttttcgatctagagacccttcatattgtttacttactattacgataactttgagaggtaaccagagaaagcatttttgccatttccagatgaggaagcaggaccagaaagctcttcataaagctttaacaccatacaagtatccagcagtgatcaattgctctttataggaaaccacctttcctctggggaagaacagtctgaattaataaaacatcagagtggttgagtagtaaaaataaacacagatgtattgctttcaagtcttagagtgacataaagtagtcttaaataaatagttcttagtttattttaagcagttgattgtactaacgagatgtaattatctgaagtatttatgattagcatattggtttttataagtatttctgagttattgagggtgcttaaaaatgctgaagaaactttaaaacatgattcttcttataattttatgtgattcttatagcacaatcatttttgaaaaaggaaaactaggctgggtgtagtggctcatgcctataatcccagcactttgggaggccaaagtgggtggatcacccgagttcaggagttcgagaccagtctggccaacatggtgaaacctcgtctctactaaaaataccaaaattatccggtgtggtgacaggctgcttgtaatcccagctactcgggaggctgaggcacgggaatctcttgaacctgggaggcagagattgcaataagccaagatcatgccactgcatgccagcctgggtgacagcacaagactgtctcaaaaaaaaacaaaaaaaggaaaaagaaaactagccccagtccctgtctaaattgttatagtttttgactattatctgaattagtcttatccaaatttcatatgcagattgatttttcattttgtatgtatattacatgatataactattttcatagaatatatttctaatttacaaacactgaattattagcttgatagagtttctcccaaaccttataaaactttgaaatgtacttatgtttgagctttaaaaattataaaaacttcatttaaacaagttgctggcatcattactagcctttccacctataattatgatgcatttgatgccactgaacagtaatagcacaaagaacaggtcacacagtctagactggattgagttttaattaaacttcttcatccatagcctgataagaatcaggctgggtctagaagagttatcagactgtaggcctgtattaattttgcaagctaatgttaatgtttactgccagccttgcatagcaatgccagtttgcagttgtgactatgatgtgacttttggtaaaaatggtttatatctaaagtagtttagattttatggaagtggctcttgattgtttggacaagcagggtaggtaaatttcaattacgtttgaagtgtaattaaatcctagaatagagcactctccagaaaaaaaaatgaaaaaagaatttggagaatatcctggcatgaaaacttttttgaataatacgtagaattttgacaaggttcatacagtgcatacagtgtgaccttttctgaggtgggcagggagggttgctacgttgtgttgatttaaaatttcaaggaggaacaaaaacattctagccaaggagaattgcattgttatttttttttctactaatttaaacgtgcatttttcacagttacacatttaagttttgctaccaaaaatggccatttttctagacagataacattttcctaaagtggaagagagatccactgttctaaaaaaaaaaaaaaaaaaaaacactaaattgtgccttctcccttaaattataagaagagtaatagtaaaaacttgtttaaactatattttctttttttctaatccctctcagttctccttagatctgcctcctacaaatgatcatgttgtttgcatctgcctgattgagttcccttggtcaaacctctccctatcactatcagaagttgttcactaaatgtattttcctatttctttcatgttgattgactttataagtcaccttggtaaacataacatttggctaccttctcatgctttataaatgaatttgatgaatggcagtttttatattttaaccctttaaaaagtttgtcaaggaaacaactcagagctaagaacaaaatctaacttggaatcagtttcttcctttggctgctgaagcagcagcaagtcacgtaacctcatttagttttttgatttacaaaatgtggataataacctacctcacagatgtgtgtgagcaactgtttgaaagcccttgtttaaatacagggtttatatccccacattcaatgtaaattcctttttttaaaaaaaataagtatctttgatactgataggatgagtatcttgatttttaggtaagatcacagtttcacaaattgtggtgttgttaggtgacatttaatatttcttgagacctcaagtattcaaatatcaaacttgtcctgtgttgtaacaaatattcagaatctcttaaaatgttggctgaagctgccttaatgtaccaaaatacagctctcaagactgttcacaaatatctgtggttgtacaatgttttgaacatttaatgtaaagttgttgtagaactgtgaactctaaggatagtatctttattgttttaggaagaatggttgtgttctttgtcatgtatgcttaaatatacagtggattttgaatgcaacaaataaaactgaaaacagccatttggttgtgtcatgacaatcataatataggatataatatttactttttttcaaaaacatcctgcattcattcattcttagcatacctttgaaaaagaaaaaaaaatccataggttgatacattgacccattgaagtacttcattacgtatttattgaaaattttttttaattgttgaaattgggaccactttttataattggtttcaagaaaaaaaaatgaacagacttccagtgcttttctgttcaaataaactccgattcaaatttcagttttgtttgttatatactttttgtgagtgttaaatgatatgggaaggatttgtctttcattaaccatatggaaaagatgtcttcctgaattacatagcatttcatagttacagattcttcctaattaatgtttgcaccatatgaaactcataggtaacaaacacaaaggagaaaagcagcctgtctgattgcttataagcttttttcacaaaatcaaattaaaagtctctgattcatttgaaagctaaaaaaaaaaaaaaaaaa

SEQ ID NO: 1770 - DNA, 1698 bp, Homo sapiens
gcggggcctgccccaagagagtttcctaaagcgaggaaaccaagccgggcgcctcttgcaatggagacggtcatttcttcagatagctccccagctgtggaaaatgagcatcctcaagagaccccagaatccaacaatagcgtgtatacttccttcatgaagtctcatcgctgctatgacctgattcccacaagctccaaattggttgtatttgatacgtccctgcaggtgaagaaagctttttttgctttggtgactaacggtgtacgagctgcccctttatgggatagtaagaagcaaagttttgtgggcatgctgaccatcactgatttcatcaatatcctgcaccgctactataaatcagccttggtacagatctatgagctagaagaacacaagatagaaacttggagagaggtgtatctccaggactcctttaaaccgcttgtctgcatttctcctaatgccagcttgtttgatgctgtctcttcattaattcggaacaagatccacaggctgccagttattgacccagaatcaggcaatactttgtacatcctcacccacaagcgcattctgaagttcctcaaattgtttatcactgagttccccaagccagagttcatgtccaagtctctggaagagctacagattggcacctatgccaatattgctatggttcgcactaccacccccgtctatgtggctctggggatttttgtacagcatcgagtctcagccctgccagtggtggatgagaaggggcgtgtggtggacatctactccaagtttgatgttatcaatctggcagcagaaaagacctacaacaacctagatgtatctgtgactaaagccttgcaacatcgatcacattactttgagggtgttctcaagtgctacctgcatgagactctggagaccatcatcaacaggctagtggaagcagaggttcaccgacttgtagtggtggatgaaaatgatgtggtcaagggaattgtatcactgtctgacatcctgcaggccctggtgctcacaggtggagagaagaagccctgagctgggggaaggggtcatgcagcaccaggggatatgcccaactcactgcctgctggaagctctgtgggaatcagatgaaacttgagggaattgtgactctgttccctgttcagggtcccctgcccttctatctgggagctagggaaggtatgggggaggaaagagaatggatttatagctacccttaccctcacacatacacttgaaaaaactttcagcctagccagttctagcccctgtcctcttagatatatccccctttctgggtgaactataggctctgtgcctctcagacaaattctgatctctaagagatccccagacctcacttgcctctgcctccatcttggccctgattcaaccctaagataatagcacaacaaaattcttcataaagatatttttattcacctgttccgtgctatatggaggaggccaagtccatttagtgacatttcttcccataatgtgagtggggaggattgtggggaggaggggctttgggttcctgtgtttgtgcatatgaagggagatgggggttaggtggaggaggagagcagcgtggttagctaaggttattgctttttgtggcaaatctaattaaatgacaggaatctcttcacgataaaaaaaaaaaaaaaa

SEQ ID NO: 1771 - DNA, 3600 bp, Homo sapiens
ggtggagctgtcgcctagccgctatcgcagagtggagcggggctgggagcaaagcgctgagggagctcggtacgccgccgcctcgcacccgcagcctcgcgcccgccgccgcccgtccccagagaaccatggagtctggcagtaccgccgccagtgaggaggcacgcagccttcgagaatgtgagctctacgtccagaagcataacattcaagcgctgctcaaagattctattgtgcagttgtgcactgctcgacctgagagacccatggcattcctcagggaatactttgagaggttggagaaggaggaggcaaaacagattcagaatctgcagaaagcaggcactcgtacagactcaagggaggatgagatttctcctcctccacccaacccagtggttaaaggtaggaggcgacgaggtgctatcagcgctgaggtctacacggaggaagatgcggcatcctatgttagaaaggttataccaaaagattacaagacaatggccgctttagccaaagccattgaaaagaatgtgctgttttcacatcttgatgataatgagagaagtgatatttttgatgccatgttttcggtctcctttatcgcaggagagactgtgattcagcaaggtgatgaaggggataacttctatgtgattgatcaaggagagacggatgtctatgttaacaatgaatgggcaaccagtgttggggaaggagggagctttggagaacttgctttgatttatggaacaccgagagcagccactgtcaaagcaaagacaaatgtgaaattgtggggcatcgaccgagacagctatagaagaatcctcatgggaagcacactgagaaagcggaagatgtatgaggaattccttagtaaagtctctattttagagtctctggacaagtgggaacgtcttacggtagctgatgcattggaaccagtgcagtttgaagatgggcagaagattgtggtgcagggagaaccaggggatgagttcttcattattttagaggggtcagctgctgtgctacaacgtcggtcagaaaatgaagagtttgttgaagtgggaagattggggccttctgattattttggtgaaattgcactactgatgaatcgtcctcgtgctgccacagttgttgctcgtggccccttgaagtgcgttaagctggaccgacctagatttgaacgtgttcttggcccatgctcagacatcctcaaacgaaacatccagcagtacaacagttttgtgtcactgtctgtctgaaatctgcctcctgtgcctcccttttctcctctccccaatccatgcttcactcatgcaaactgctttattttccctacttgcagcgccaagtggccactggcatcgcagcttcctgtctgtttatatattgaaagttgcttttattgcaccattttcaatttggagcattaactaaatgctcatacacagttaaataaatagaaagagttctatggagactttgctgttactgcttctctttgtgcagtgttagtattcaccctgggcagtgagtgccatgctttttggtgagggcagatcccagcacctattgaattaccatagagtaatgatgtaacagtgcaagattttttttttaagtgacataattgtccagttataagcgtatttagactgtggccatatatgctgtatttctttgtagaataaatggtttctcattaaactctaaagattagggaaaatggatatagaaaatcttagtatagtagaaagacatctgcctgtaattaaactagtttaagggtggaaaaatgcccatttttgctaattatcaatgggatatgattggttcagtttttttttttccagagttgttgtttgccaagctaatctgcctggttttatttatatcttgttattaatgtttcttctccaattctgaaatacttttgagtatggctatctatacctgccttttaagtttgaaactaactcatagattgcaaatattggttagtatttaactacatctgcctcggctcacaaattccgattagacctttatccagctagtgccaaataattgatcagatgctgaattgagaataagaatttgaggtctacattcttggttgttaatttagagcgtttggttaaagtatgtccttcagctgactccagtataatctcctctgctcattaaactgattccaggagattggatttgctgtgactagatacagatggagcaaatgtcctaacagagaaatagaggtgatgctgctaaagggagaaatgccaggcggacaaagttcagtgtcgggaattttccccgtgacattcactggggcatgagattttggaagaagttttttactttggtttagtctttttttccttcctttttattcagctagaatttctggtgggttgatggtagggtataatgtgtctgtgttgcttcaaattggtctgaaaggctatcctgcggaaagtcctgctttcctatctagcatttatttctctggcaaacttttctttcttttcttttttaaagtaaacttgtgtattgagtcttaactgtatttcagtattttccagccttatgtgttacattattccaatgatacccaacagtttatttttattatttttttaaacaaaatttcacagttctgtaatgtaggcacttttattttcattgtgatttatatataaggtaatgtagggttatatttgggagtgactgcaagcatttttccatctgtgtgcaactaactgactctgttattgatcccttctcctgccctttcccaggtaatttaaattggtcatggtagatttttttcatagatttgaaaaacttttaggttgttaccaagtatgaagtataaatctggggaagaggttttatttacattttagggtgggtaagaaagccaccttgttacaaattttttaatttccaaaataatctatattaaatgagggtttctgatctgtactttgtgtttagctacctttttatatttaaaaaattaaaaatgaaaattacgttcttacaagcttaaagcttgatttgatctttgtttaaatgccaaaatgtacttaaatgagttacttagaatgccataaaattgcagtttcatgtatgtatataatcatgctcatgtatatttagttacgtataatgctttctgagtgagttttactcttaaatcatttggttaaatcatttggcttgctgtttactcccttctgtagtttttaattaaaaactttaaagataagtctacattaaacaatgatcacatctaaagctttatctttgtgtaatctaagtatatgtgagaaatcagaattggcataatttgtcttagttgatattcaaggctttaaaagtcattattcctgggcttggtaagtgaatttatgagatttactgctctagaaagtatagatggcgaaaggaccgttttgtattgcttcctgattaccagtctgattataccatgtgtgctaatatactttttttgttatagattgtcttaatggtaggtcaagtaataaaaagagatgaaataatttaaaaaaaaaaaaaaaa

SEQ ID NO: 1772 - DNA, 2381 bp, Homo sapiens
gcccgtcggtccccgcggcggcggcggctgcccagtgacagcggcggcggtgccaggtcggccgtggtagcgtagggttgcgcggcccggaaacgcagagccggccaaagagcggcgcgacgtgagccggggccgtgcgcgaagagacctcgcgggcgcggagcgaaaggccggcgtgagtgagcgcggagacagtggccgccggcggcccaacccgtctatcccttcggccgccgccggcatgagccacatccagatcccgccggggctcacggagctgctgcagggctacacggtggaggtgctgcgacagcagccgcctgacctcgtcgaattcgcagtggagtacttcacccgcctgcgcgaggcccgcgccccagcctcagtcctgcccgccgccaccccacgccagagcctgggccaccccccgccagaacccggcccggaccgtgtcgccgacgccaaaggggacagcgagtcggaggaggacgaggacttggaagttccagttcctagcagatttaatagacgagtatcagtctgtgctgagacctataaccctgatgaggaagaggaagatacagatccaagggtgattcatcctaaaactgatgaacagagatgcagacttcaggaagcttgcaaagatattctccttttcaaaaatcttgatcaggaacagctttctcaagttctcgatgccatgtttgaaaggatagtcaaagctgatgagcatgtcattgaccaaggagatgatggagacaacttttatgtcatagaacggggaacttatgacattttagtaacaaaagataatcaaacccgctctgttggtcaatatgacaaccgtggcagttttggagaactagctctgatgtacaacaccccgagagctgctaccattgttgctacctcagaaggctccctttggggactggaccgggtgacttttagaagaatcatagtgaaaaataatgcaaagaagaggaagatgtttgaatcatttattgagtctgtgcccctccttaaatcactagaggtgtcagaacgaatgaagattgtggatgtaataggagagaagatctataaggatggagaacgcataatcactcagggtgaaaaggctgatagcttttacatcatagagtctggcgaagtgagcatcttgattagaagcaggactaaatcaaacaaggatggtgggaaccaggaggtcgagattgcccgctgccataaggggcagtactttggagagcttgccctggtcaccaacaaacccagagctgcctcagcttatgcagttggagatgtcaaatgcttagttatggatgtacaagcattcgagaggcttctggggccctgcatggacatcatgaagaggaacatctcacactatgaggaacagctggtgaagatgtttggctccagcgtggatctgggcaacctcgggcagtaggtgtgccacaccccagagccttcttagtgtgacaccaaaaccttctggtcagccacagaacacatacagaaaacagacatgacagaactgttcctgccgttgccgccactgctgccattgctgtggttatgggcatttagaaaacttgaaagtcagcactaaaggatgggcagaggttcaacccacacctccactttgcttctgaaggcccattcattagaccacttgtaaagattactccaacccagtttttatatctttggttcaaaacggcatgtctctccaacaatttaagtgcctgatacaaagtccaaagtataaacatgctcctttcctctcttgctgctactcttgcttttggaagttaccacagggtctgcagaaacctgttgtataactgtagacactctctaatggttctcaaaggaggaaatgtagccttcagtctcctcatttgtcctttgaggaagtccacatttgttcacagttgcagcctttggttttacagtgggaaatggtggtggatgatatggacatatgtagcccagtggcattgtactttctgctgacagctgcacacattacagctgtctccaaacccacagtgatgcttagggaaagaccctgctcaggacccagcaggtcagcaccccagagcagactgataggtccgtgggacccatgttagagcagaaaatttgggctcagcacattttactgttagtagagagccaggaaacgttttctgggttggggattttgtgggattttttaatttttttagtaggttttgtttaacctctgtgcagtttgtatgaatgaattgctatacatttataaggagccagggtctggagggttgctatcactttgtccagcccaaataccttcctgggcaactcctaccatttgtttgcagttgcct

SEQ ID NO: 1773 - DNA, 2126 bp, Homo sapiens
ctactaacagcgagcttccgccaatacttgttctcgttcttggttccgagcgtcccgggagccgggaagggaaggattgtctgcagggattggagcaaatatccagtggggggaaagccgggacttccgcgtcttgccggaagtgacgtgacaatcgcggccaccgccaggtggaacggcaggtgggttcaggtaccagcctggccgggacccggctgtgggaccaacgcttccgttccccattcccctaccgagctgggcagttagccagcccactccaactctcggaaccatgtttgcagacttggattatgacatcgaagaggataaactcggaatcccgactgtgcctgggaaggtgaccctgcagaaggatgctcagaacctgatcgggatcagcattggaggaggggcccagtactgtccctgcctctatatcgtccaggtatttgacaacaccccagcagccttggacggcacagtggcagctggcgatgagatcaccggtgtcaatggcaggtcaatcaaagggaaaactaaggtggaggtggcgaagatgattcaggaggtgaagggggaggtgaccatccactacaacaagctgcaggcggaccccaagcagggcatgtccctggacattgtgttgaagaaagtcaagcaccggctggtggagaacatgagttcagggaccgcagatgctctgggcctgagccgggccatcctgtgcaatgatgggcttgtcaagaggctagaggagctggagcggaccgctgagctatacaaagggatgacggaacacaccaagaacctcctacgggccttttatgagctgtcgcagactcaccgggcctttggggacgtgttctccgtgatcggggtgcgggagccccagccagctgcgagcgaggcttttgtgaagttcgccgatgcccaccgcagcatcgagaagttcggcattcggcttctgaaaaccatcaagccgatgctgacggatctgaacacgtacctcaacaaagccatcccggacactcgcctcaccatcaagaagtacctggacgtgaagtttgagtacctgtcgtactgcctgaaggtgaaggagatggatgacgaggaatacagctgcattgccctaggcgagcccctttaccgggtgagcaccggcaactatgagtaccgcctgatcctgcgctgccgccaggaggcgcgcgcccgcttctcccagatgcgcaaggatgtgctggagaagatggagctgctggaccagaagcacgtccaggacatcgtgttccagctgcagcgcctcgtgtccaccatgtccaagtactacaacgactgctacgcagtgctgcgggatgccgacgtcttccccatcgaggtagacctggcgcacaccacattggcctatggcctcaaccaggaggagttcacagatggggaggaggaggaggaggaggaagacacggcagctggggagccgtccagggatacacgaggggctgctgggcccttggacaagggtggaagctggtgtgactcctgagtgccccgcggctgtggtgccgggggcagggtgcgtgggaggacggagcctgggagcggggcggggccgccgcgcaagggggcgacgcataaaggcctgctggcttggggcgcctgcctccctgctcctctgtcctcgcacagcgaacctgggctcctgcccaggacaggcaccagggtcatggcctgggacctggacactggcccctccaccctccctcccctcccggctccccggccagagggagagcttggtctctggacctgccttaggaaggagagggagggcaggaaggaaaagaaaggacttggaggtggcaggagtccgagccctgctccttgtgggcgctcacactgcccccggagcctgctgggagtggggccagccgtggacagctgaggttggggtcaatgcctcctgggcacccttgcctcgccccagaccggcccgtccagtccccatcacacctcggcggcctttatttattctgttcccccagctcggccacttctctgaaggagggctgggttctgggcctgtatcgaataaacacaaacctggatggcgcaaaaaaaaaaaaaaaaaa

SEQ ID NO: 1774 - DNA, 5537 bp, Homo sapiens
gaacccggcgaggaaatacatgcactggctgagaatcgcccgcgccagggcgcaacgccacaaggtgtagggagtgtgcggggtggggcgaaaggggacccaagagtccctgtggctcggagtgccgggccgtcggttcttcattcctgccctcggggcagacggagtgaccccggcccccactccccgccccgaccatggtagtgttcaatggccttcttaagatcaaaatctgcgaggccgtgagcttgaagcccacagcctggtcgctgcgccatgcggtgggaccccggccgcagactttccttctcgacccctacattgccctcaatgtggacgactcgcgcatcggccaaacggccaccaagcagaagaccaacagcccggcctggcacgacgagttcgtcaccgatgtgtgcaacggacgcaagatcgagctggctgtctttcacgatgcccccataggctacgacgacttcgtggccaactgcaccatccagtttgaggagctgctgcagaacgggagccgccacttcgaggactggattgatctggagccagaaggaagagtgtatgtgatcatcgatctctcagggtcgtcgggtgaagcccctaaagacaatgaagagcgtgtgttcagggaacgcatgcggccgaggaagcggcagggggccgtcaggcgcagggtccatcaggtcaacggccacaagttcatggccacctatcttcggcagcccacctactgctcccattgcagagacttcatctggggtgtcataggaaagcagggataccagtgtcaagtctgcacctgcgtggtccacaagcggtgccacgagctcataatcacaaagtgtgctgggttaaagaagcaggagacccccgaccaggtgggctcccagcggttcagcgtcaacatgccccacaagttcggtatccacaactacaaggtccctaccttctgcgatcactgtgggtccctgctctggggactcttgcggcagggtttgcagtgtaaagtctgcaaaatgaatgttcaccgtcgatgtgagaccaacgtggctcccaactgtggagtggatgccagaggaatcgccaaagtactggccgacctgggcgttaccccagacaaaatcaccaacagcggccagagaaggaaaaagctcattgctggtgccgagtccccgcagcctgcttctggaagctcaccatctgaggaagatcgatccaagtcagcacccacctccccttgtgaccaggaaataaaagaacttgagaacaacattcggaaagccttgtcatttgacaaccgaggagaggagcaccgggcagcatcgtctcctgatggccagctgatgagccccggtgagaatggcgaagtccggcaaggccaggccaagcgcctgggcctggatgagttcaacttcatcaaggtgttgggcaaaggcagctttggcaaggtcatgttggcagaactcaagggcaaagatgaagtatatgctgtgaaggtcttaaagaaggacgtcatccttcaggatgatgacgtggactgcacaatgacagagaagaggattttggctctggcacggaaacacccgtaccttacccaactctactgctgcttccagaccaaggaccgcctctttttcgtcatggaatatgtaaatggtggagacctcatgtttcagattcagcgctcccgaaaattcgacgagcctcgttcacggttctatgctgcagaggtcacatcggccctcatgttcctccaccagcatggagtcatctacagggatttgaaactggacaacatccttctggatgcagaaggtcactgcaagctggctgacttcgggatgtgcaaggaagggattctgaatggtgtgacgaccaccacgttctgtgggactcctgactacatagctcctgagatcctgcaggagttggagtatggcccctccgtggactggtgggccctgggggtgctgatgtacgagatgatggctggacagcctccctttgaggccgacaatgaggacgacctatttgagtccatcctccatgacgacgtgctgtacccagtctggctcagcaaggaggctgtcagcatcttgaaagctttcatgacgaagaatccccacaagcgcctgggctgtgtggcatcgcagaatggcgaggacgccatcaagcagcacccattcttcaaagagattgactgggtgctcctggagcagaagaagatcaagccacccttcaaaccacgcattaaaaccaaaagagacgtcaataattttgaccaagactttacccgggaagagccggtactcacccttgtggacgaagcaattgtaaagcagatcaaccaggaggaattcaaaggtttctcctactttggtgaagacctgatgccctgagagcccactgcagttggactttgccgatgctgcaagaaggggtgcagagaagactcctgtgttggagacactcagcaggtcttgaactacttctcctcctcggagccccagtcccatgtccactgtctatttattgcattcccttgccccaggccacctcctccccctcccacctggtgaccagaaggcgctctcggttcttgtctcaccagtaatgcagactcattgggtcagcaattagctgtatacactgccgtgtttggaccattggcaagcctggttccactcctcaggggctcctggcagtgaagcaacttcagttcttttactgcaaagaacagaaaaaagaaagaaagcaaacaagaagactccggctctgctatcggacacagatcctgatccctcttgcttcttttccctcctgcaccgcagcttgccatccctgcccttctgtcctggagaagagactggtgcttctccgcacacacgagggagggcgcccttgaggcatgccctctgagggagggagaccagagatgcagggattggccagctgggttggtttgctctggaatggctaactcttgcctgctttggttttagcttttcagcatgccaaagtcatgtaagtttgtgtcttgtggaagaaatcctctttgtggaaaaagaaacagggttttgaactctgttaacatttgaaaaatatattttcaaattcactttctaattggccaaaagagatgagttccagtctgaatacaggtagatattaaagggctaataaaaaatgagaaaccggtcgtccaaggtggatgctgtcaatgcccgagtgacacatgagagctgtatgaattgagagaaaaggcaacaagtagcattcttcatcattcaagttctacctggacacaaaggcgaggaccctggggttccaacaaagctcagctcccagattctctttccagtttcatcctaagttcctagcataaacactatttattttctgcagcagtgtgttatttttgcgcacttatacaaaatggtagtactactgtgttgtggtttttaaacattaaacatgtaaagttatatacgaaatatctgcttttggaataagcagaatgaggctaaacatgggttatacaaagggtatctggaaactgaagagcaacttgttagaaaactgacaatgtcgcaagatgtactcagttttgtttctgtgtgacatgcaatggcaactcatgtggacactattgaagggatgtgacattacctcctgtagatatgctaacagtgttattctttcatttccaagggttctctgtggctttgtgtatatgtttcccagaggtcatttgattacctaatttactgaactgatttagcagggaatggaatccattccaactattgcacgtggatttcccagctgcccctaaatatatatacttgtgagtggcaaagtggcactaatgaagcttttgccttttgtacatttgagatttttgtatatagtgtttgctgcaaggcctgtggaattaattcgttgcatatagaggtatcaactgctgcatgttcaggcatattataaaactttagtctatgaaagaataattataataatgtccaggtgcaatactctgtaagtctattggttcaagttaccgagagataggtgtgttcctttatgggggatgggggggtgtgttggggattctttgtattgtttatttcattttggtttattttaaaagatgtaaacatatattaagctatattaaatctcacatacagttcttctgtgctctattataccctgatagagatgggggagagaaaggaatgtttttgatggtggtttcaaagctcggacagtaactatcttgagcccattagagagtctgtgtccatatttgcatctggctggtcatagcctttgttactaatgatgacattcagttctcttttgtttttattttttaaaaactcaggtgtaattattatctgttcttaagataattgcaaatattaaatattatgatatatcaattcatgtgtttggcataccagtgaatgatgaagaacatgagattaatttaatttatcttcggtaacttgacattctggagagagactatcttctggagttgagtacaagcacagaaacatctttacggtggcatcatctcattttttaggaagacatgataatactgcccatcatattcatgtgtaactactgttctttcttctgctttcttcaccataataaactttggacaaccaagcaagctctaaccgcaatgccagatggccttgtccgagggcctagtgtttgcacggcagtgggaactgggcctttcctacaggacaactggcaagtttgctgggaagtcaaataatacattccacctggcagctgaaggcagccagtcagtctgtcccagaaagggcccttttcagcacccaaagctgggctggctgggatgcctctggctggtgaagttctcacataggctgatttaaatccagcaaaggtctatagaaaaaggcttgcgtgttcgttgagtaatcattgtttcattttcatttttacgagagtttgaaaatagacacactgttaacacttctgccagttttttctgatctttccagccccaccccctttctctttctctctctctctcaaagaaaaaaaaaatgggagtgcaaaaaaaacaaagccaaaaaatatatgaaggatagctgttcttctgtgttctctcattatggactttgtgaagtagaaacataattttttttcctccaaaggtgaaaaaacaatgcattcttgctttaaaaaaaaaaaagaaggctaaaaaattacctctttttaaattatgtgcaaaataattctggctaactgtaaaatgtattcaattttaggattttttttttttgtattgtgatgctttatttgtacatttttttcctttctggatgtaattttaatctcttgccattcattagtgttatttcattgtaaacgttattgtgccaaatgtactgtattcaaaaggatgtgaatgtgtattgtttcagaacctaataaatacaatgacgttaagtcttaaaaaaaaaaaaaaaaaa

SEQ ID NO: 1775 - DNA, 3096 bp, Homo sapiens
gccggcgcgcccggggtgccgctccctgcctggcgcgctccgcacctggaggtgccttgcccctctcctgcccacctcggaatttccctgtggctcctttgatccttcgagtctccagctcctctcccttccacctgtttcccccaagaaaggcaggatcctggtccctgctacgtttctggggccatggctggtctgggccccggcgtaggcgattcagaggggggaccccggcccctgttttgcagaaagggggccctgaggcagaaggtggtccacgaagtcaagagccacaagttcaccgctcgcttcttcaagcagcccaccttctgcagccactgcaccgacttcatctggggtatcggaaagcagggcctgcaatgtcaagtctgcagctttgtggttcatcgacgatgccacgaatttgtgaccttcgagtgtccaggcgctgggaagggcccccagacggatgacccccggaacaaacacaagttccgcctgcatagctacagcagccccaccttctgcgaccactgtggctccctcctctacgggcttgtgcaccagggcatgaaatgctcctgctgcgagatgaacgtgcaccggcgctgtgtgcgtagcgtgccctccctgtgcggtgtggaccacaccgagcgccgcgggcgcctgcagctggagatccgggctcccacagcagatgagatccacgtaactgttggcgaggcccgtaacctaattcctatggaccccaatggtctctctgatccctatgtgaaactgaagctcatcccagaccctcggaacctgacgaaacagaagacccgaacggtgaaagccacgctaaaccctgtgtggaatgagacctttgtgttcaacctgaagccaggggatgtggagcgccggctcagcgtggaggtgtgggactgggaccggacctcccgcaacgacttcatgggggccatgtcctttggcgtctcggagctgctcaaggcgcccgtggatggctggtacaagttactgaaccaggaggagggcgagtattacaatgtgccggtggccgatgctgacaactgcagcctcctccagaagtttgaggcttgtaactaccccctggaattgtatgagcgggtgcggatgggcccctcttcctctcccatcccctccccttcccctagtcccaccgaccccaagcgctgcttcttcggggcgagtccaggacgcctgcacatctccgacttcagcttcctcatggttctaggaaaaggcagttttgggaaggtgatgctggccgagcgcaggggctctgatgagctctacgccatcaagatcttgaaaaaggacgtgatcgtccaggacgacgatgtggactgcacgctggtggagaaacgtgtgctggcgctggggggccggggtcctggcggccggccccacttcctcacccagctccactccaccttccagaccccggaccgcctgtatttcgtgatggagtacgtcaccgggggagacttgatgtaccacattcaacagctgggcaagtttaaggagccccatgcagcgttctacgcggcagaaatcgctatcggcctcttcttccttcacaatcagggcatcatctacagggacctgaagctggacaatgtgatgctggatgctgagggacacatcaagatcactgactttggcatgtgtaaggagaacgtcttccccgggacgacaacccgcaccttctgcgggaccccggactacatagccccggagatcattgcctaccagccctatgggaagtctgtcgattggtggtcctttggagttctgctgtatgagatgttggcaggacagcctcccttcgatggggaggacgaggaggagctgtttcaggccatcatggaacaaactgtcacctaccccaagtcgctttcccgggaagccgtggccatctgcaaggggttcctgaccaagcacccagggaagcgcctgggctcagggcctgatggggaacctaccatccgtgcacatggctttttccgctggattgactgggagcggctggaacgattggagatcccgcctcctttcagaccccgcccgtgtggccgcagcggcgagaactttgacaagttcttcacgcgggcggcgccagcgctgacccctccagaccgcctagtcctggccagcatcgaccaggccgatttccagggcttcacctacgtgaaccccgacttcgtgcacccggatgcccgcagccccaccagcccagtgcctgtgcccgtcatgtaatctcacccgccgccactaggtgtccccaacgtcccctccgccgtgccggcggcagccccacttcacccccaacttcaccaccccctgtcccattctagatcctgcaccccagcattccagctctgcccccgcgggttctagacgcccctcccaagcgttcctggccttctgaactccatacagcctctacagccgtcccgcgttcaagacttgagcggagcccgatattctccctgaccttagcgttctggactctgccccaatcgggtccagagaccacaccactaaccatccccaactccatggggttcgagactccatcttggtagttctgtgcctccccccagaccccgcccctggggaaatagcctcacggggttggctgttccagactcaggttccagaacagccctcggcctccgaggctccccgcctccactctagttctagatgagtgggaggcgtgcccccctcctccagtacgtcccgctgctgtgctctggggatttctgggatatatggaggattctttccccagaggctcccaatcagcttttgttctagacttccccatcccgaagccatcacttctccccgcagcccgcctgccgtgcatggctcctgtctggctcggacccaccccaactctccccagtgcctgccactctctgggactctcctcctcccctcctcttcccttagcctctcccacccggccacagctgctggagaataaatttgggatgctgatgaaaaaaaaaaaaaaaaaaaaaaaaaaaaaaaaaaaaaaaaaaaaaaaaaaaaaaaaaaaaaaaa

SEQ ID NO: 1776 - DNA, 3679 bp, Homo sapiens
ccctcccctcccgatcctcatccccttgccctcccccagcccagggacttttccggaaagtttttattttccgtctgggctctcggagaaagaagctcctggctcagcggctgcaaaactttcctgctgccgcgccgccagcccccgccctccgctgcccggccctgcgccccgccgagcgatgagcgcccctccggtcctgcggccgcccagtccgctgctgcccgtggcggcggcagctgccgcagcggccgccgcactggtcccagggtccgggcccgggcccgcgccgttcttggctcctgtcgcggccccggtcgggggcatctcgttccatctgcagatcggcctgagccgtgagccggtgctgctgctgcaggactcgtccggggactacagcctggcgcacgtccgcgagatggcttgctccattgtcgaccagaagttccctgaatgtggtttctacggaatgtatgataagatcctgctttttcgccatgaccctacctctgaaaacatccttcagctggtgaaagcggccagtgatatccaggaaggcgatcttattgaagtggtcttgtcagcttccgccacctttgaagactttcagattcgtccccacgctctctttgttcattcatacagagctccagctttctgtgatcactgtggagaaatgctgtgggggctggtacgtcaaggtcttaaatgtgaagggtgtggtctgaattaccataagagatgtgcatttaaaatacccaacaattgcagcggtgtgaggcggagaaggctctcaaacgtttccctcactggggtcagcaccatccgcacatcatctgctgaactctctacaagtgcccctgatgagccccttctgcaaaaatcaccatcagagtcgtttattggtcgagagaagaggtcaaattctcaatcatacattggacgaccaattcaccttgacaagattttgatgtctaaagttaaagtgccgcacacatttgtcatccactcctacacccggcccacagtgtgccagtactgcaagaagcttctgaaggggcttttcaggcagggcttgcagtgcaaagattgcagattcaactgccataaacgttgtgcaccgaaagtaccaaacaactgccttggcgaagtgaccattaatggagatttgcttagccctggggcagagtctgatgtggtcatggaagaagggagtgatgacaatgatagtgaaaggaacagtgggctcatggatgatatggaagaagcaatggtccaagatgcagagatggcaatggcagagtgccagaacgacagtggcgagatgcaagatccagacccagaccacgaggacgccaacagaaccatcagtccatcaacaagcaacaatatcccactcatgagggtagtgcagtctgtcaaacacacgaagaggaaaagcagcacagtcatgaaagaaggatggatggtccactacaccagcaaggacacgctgcggaaacggcactattggagattggatagcaaatgtattaccctctttcagaatgacacaggaagcaggtactacaaggaaattcctttatctgaaattttgtctctggaaccagtaaaaacttcagctttaattcctaatggggccaatcctcattgtttcgaaatcactacggcaaatgtagtgtattatgtgggagaaaatgtggtcaatccttccagcccatcaccaaataacagtgttctcaccagtggcgttggtgcagatgtggccaggatgtgggagatagccatccagcatgcccttatgcccgtcattcccaagggctcctccgtgggtacaggaaccaacttgcacagagatatctctgtgagtatttcagtatcaaattgccagattcaagaaaatgtggacatcagcacagtatatcagatttttcctgatgaagtactgggttctggacagtttggaattgtttatggaggaaaacatcgtaaaacaggaagagatgtagctattaaaatcattgacaaattacgatttccaacaaaacaagaaagccagcttcgtaatgaggttgcaattctacagaaccttcatcaccctggtgttgtaaatttggagtgtatgtttgagacgcctgaaagagtgtttgttgttatggaaaaactccatggagacatgctggaaatgatcttgtcaagtgaaaagggcaggttgccagagcacataacgaagtttttaattactcagatactcgtggctttgcggcaccttcattttaaaaatatcgttcactgtgacctcaaaccagaaaatgtgttgctagcctcagctgatccttttcctcaggtgaaactttgtgattttggttttgcccggatcattggagagaagtctttccggaggtcagtggtgggtacccccgcttacctggctcctgaggtcctaaggaacaagggctacaatcgctctctagacatgtggtctgttggggtcatcatctatgtaagcctaagcggcacattcccatttaatgaagatgaagacatacacgaccaaattcagaatgcagctttcatgtatccaccaaatccctggaaggaaatatctcatgaagccattgatcttatcaacaatttgctgcaagtaaaaatgagaaagcgctacagtgtggataagaccttgagccacccttggctacaggactatcagacctggttagatttgcgagagctggaatgcaaaatcggggagcgctacatcacccatgaaagtgatgacctgaggtgggagaagtatgcaggcgagcaggggctgcagtaccccacacacctgatcaatccaagtgctagccacagtgacactcctgagactgaagaaacagaaatgaaagccctcggtgagcgtgtcagcatcctctgagttccatctcctataatctgtcaaaacactgtggaactaataaatacatacggtcaggtttaacatttgccttgcagaactgccattattttctgtcagatgagaacaaagctgttaaactgttagcactgttgatgtatctgagttgccaagacaaatcaacagaagcatttgtattttgtgtgaccaactgtgttgtattaacaaaagttccctgaaacacgaaacttgttattgtgaatgattcatgttatatttaatgcattaaacctgtctccactgtgcctttgcaaatcagtgtttttcttactggagcttcattttggtaagagacagaatgtatctgtgaagtagttctgtttggtgtgtcccattggtgttgtcattgtaaacaaactcttgaagagtcgattatttccagtgttctatgaacaactccaaaacccatgtgggaaaaaaatgaatgaggagggtagggaataaaatcctaagacacaaatgcatgaacaagttttaatgtatagttttgaatcctttgcctgcctggtgtgcctcagtatatttaaactcaagacaatgcacctagctgtgcaagacctagtgctcttaagcctaaatgccttagaaatgtaaactgccatatataacagatacatttccctctttcttataatactctgttgtactatggaaaatcagctgctcagcaacctttcacctttgtgtatttttcaataataaaaaatattcttgtcaaaa

SEQ ID NO: 1777 - DNA, 3617 bp, Homo sapiens
actgtcgctccggacacttcctcctgggccgccgccgccgccgccgacttaaactttggagggggaaaaagagctactggcgcctggcgaccctccctgccccccacccaaccccgctccggcaacgcccccttcctcacggctcccgaccgaacttttctccaacttctgcgactcgtgagattcccttctacccactccggccctcgggacccctctgcccatcccctggccggtcgggtccctgcgaacccctttatctctggaatccactcggtccccgactcagagactcctgccctccacccccaaggtgaattcccccgggccgccttctgagtgggatcctcttcttggagcactggatcctgggattccctctgcccccttctcaatccctcctctagggaaggggcctttgaatcgcgggctctcctgatccctgtgaccccgacctactagatttcctctcaggcttcttggaatctcaatcgctgggacctccaacccactacttttctcctttctgatcttctgggagccctggattccgggcctctgacccactatagtgcctttctctccttcccaggaccccgccatcctcaggtcccctccgcctgccagatcttttctcggatccccgctctcccaccacctgctcacgagatcccgcggatctagaacccagggtcccccggggccccccggccgggtcccgggtgggctccaggcggccggtccccggcctccccccatggccaccgccccctcttatcccgccgggctccctggctctcccgggccggggtctcctccgccccccggcggcctagagctgcagtcgccgccaccgctactgccccagatcccggccccgggttccggggtctcctttcacatccagatcgggctgacccgcgagttcgtgctgttgcccgccgcctccgagctggctcatgtgaagcagctggcctgttccatcgtggaccagaagttccctgagtgtggcttctacggcctttacgacaagatcctgcttttcaaacatgaccccacgtcggccaacctcctgcagctggtgcgctcgtccggagacatccaggagggcgacctggtggaggtggtgctgtcggcctcggccaccttcgaggacttccagatccgcccgcacgccctcacggtgcactcctatcgggcgcctgccttctgtgatcactgcggggagatgctcttcggcctagtgcgccagggcctcaagtgcgatggctgcgggctgaactaccacaagcgctgtgccttcagcatccccaacaactgtagtggggcccgcaaacggcgcctgtcatccacgtctctggccagtggccactcggtgcgcctcggcacctccgagtccctgccctgcacggctgaagagctgagccgtagcaccaccgaactcctgcctcgccgtcccccgtcatcctcttcctcctcttctgcctcatcgtatacgggccgccccattgagctggacaagatgctgctctccaaggtcaaggtgccgcacaccttcctcatccacagctatacacggcccaccgtttgccaggcttgcaagaaactcctcaagggcctcttccggcagggcctgcaatgcaaagactgcaagtttaactgtcacaaacgctgcgccacccgcgtccctaatgactgcctgggggaggcccttatcaatggagatgtgccgatggaggaggccaccgatttcagcgaggctgacaagagcgccctcatggatgagtcagaggactccggtgtcatccctggctcccactcagagaatgcgctccacgccagtgaggaggaggaaggcgagggaggcaaggcccagagctccctggggtacatccccctaatgagggtggtgcaatcggtgcgacacacgacgcggaaatccagcaccacgctgcgggagggttgggtggttcattacagcaacaaggacacgctgagaaagcggcactattggcgcctggactgcaagtgtatcacgctcttccagaacaacacgaccaacagatactataaggaaattccgctgtcagaaatcctcacggtggagtccgcccagaacttcagccttgtgccgccgggcaccaacccacactgctttgagatcgtcactgccaatgccacctacttcgtgggcgagatgcctggcgggactccgggtgggccaagtgggcagggggctgaggccgcccggggctgggagacagccatccgccaggccctgatgcccgtcatccttcaggacgcacccagcgccccaggccacgcgccccacagacaagcttctctgagcatctctgtgtccaacagtcagatccaagagaatgtggacattgccactgtctaccagatcttccctgacgaagtgctgggctcagggcagtttggagtggtctatggaggaaaacaccggaagacaggccgggacgtggcagttaaggtcattgacaaactgcgcttccctaccaagcaggagagccagctccggaatgaagtggccattctgcagagcctgcggcatcccgggatcgtgaacctggagtgcatgttcgagacgcctgagaaagtgtttgtggtgatggagaagctgcatggggacatgttggagatgatcctgtccagtgagaagggccggctgcctgagcgcctcaccaagttcctcatcacccagatcctggtggctttgagacaccttcacttcaagaacattgtccactgtgacttgaaaccagaaaacgtgttgctggcatcagcagacccatttcctcaggtgaagctgtgtgactttggctttgctcgcatcatcggcgagaagtcgttccgccgctcagtggtgggcacgccggcctacctggcacccgaggtgctgctcaaccagggctacaaccgctcgctggacatgtggtcagtgggcgtgatcatgtacgtcagcctcagcggcaccttccctttcaacgaggatgaggacatcaatgaccagatccagaacgccgccttcatgtacccggccagcccctggagccacatctcagctggagccattgacctcatcaacaacctgctgcaggtgaagatgcgcaaacgctacagcgtggacaaatctctcagccacccctggttacaggagtaccagacgtggctggacctccgagagctggaggggaagatgggagagcgatacatcacgcatgagagtgacgacgcgcgctgggagcagtttgcagcagagcatccgctgcctgggtctgggctgcccacggacagggatctcggtggggcctgtccaccacaggaccacgacatgcaggggctggcggagcgcatcagtgttctctgaggtcctgtgccctcgtccagctgctgccctccacagcggttcttcacaggatcccagcaatgaactgttctagggaaagtggcttcctgcccaaactggatgggacacgtggggagtggggtggggggagctatttccaaggcccctccctgtttccccagcaattaaaacggactcatctctggccccatggccttgatctcagcaaaaaaaaaaaaaaaaa

SEQ ID NO: 1778 - DNA, 3338 bp, Homo sapiens
actgtcgctccggacacttcctcctgggccgccgccgccgccgccgacttaaactttggagggggaaaaagagctactggcgcctggcgaccctccctgccccccacccaaccccgctccggcaacgcccccttcctcacggctcccgaccgaacttttctccaacttctgcgactcgtgagattcccttctacccactccggccctcgggacccctctgcccatcccctggccggtcgggtccctgcgaacccctttatctctggaatccactcggtccccgactcagagactcctgccctccacccccaaggaccccgccatcctcaggtcccctccgcctgccagatcttttctcggatccccgctctcccaccacctgctcacgagatcccgcggatctagaacccagggtcccccggggccccccggccgggtcccgggtgggctccaggcggccggtccccggcctccccccatggccaccgccccctcttatcccgccgggctccctggctctcccgggccggggtctcctccgccccccggcggcctagagctgcagtcgccgccaccgctactgccccagatcccggccccgggttccggggtctcctttcacatccagatcgggctgacccgcgagttcgtgctgttgcccgccgcctccgagctggctcatgtgaagcagctggcctgttccatcgtggaccagaagttccctgagtgtggcttctacggcctttacgacaagatcctgcttttcaaacatgaccccacgtcggccaacctcctgcagctggtgcgctcgtccggagacatccaggagggcgacctggtggaggtggtgctgtcggcctcggccaccttcgaggacttccagatccgcccgcacgccctcacggtgcactcctatcgggcgcctgccttctgtgatcactgcggggagatgctcttcggcctagtgcgccagggcctcaagtgcgatggctgcgggctgaactaccacaagcgctgtgccttcagcatccccaacaactgtagtggggcccgcaaacggcgcctgtcatccacgtctctggccagtggccactcggtgcgcctcggcacctccgagtccctgccctgcacggctgaagagctgagccgtagcaccaccgaactcctgcctcgccgtcccccgtcatcctcttcctcctcttctgcctcatcgtatacgggccgccccattgagctggacaagatgctgctctccaaggtcaaggtgccgcacaccttcctcatccacagctatacacggcccaccgtttgccaggcttgcaagaaactcctcaagggcctcttccggcagggcctgcaatgcaaagactgcaagtttaactgtcacaaacgctgcgccacccgcgtccctaatgactgcctgggggaggcccttatcaatggagatgtgccgatggaggaggccaccgatttcagcgaggctgacaagagcgccctcatggatgagtcagaggactccggtgtcatccctggctcccactcagagaatgcgctccacgccagtgaggaggaggaaggcgagggaggcaaggcccagagctccctggggtacatccccctaatgagggtggtgcaatcggtgcgacacacgacgcggaaatccagcaccacgctgcgggagggttgggtggttcattacagcaacaaggacacgctgagaaagcggcactattggcgcctggactgcaagtgtatcacgctcttccagaacaacacgaccaacagatactataaggaaattccgctgtcagaaatcctcacggtggagtccgcccagaacttcagccttgtgccgccgggcaccaacccacactgctttgagatcgtcactgccaatgccacctacttcgtgggcgagatgcctggcgggactccgggtgggccaagtgggcagggggctgaggccgcccggggctgggagacagccatccgccaggccctgatgcccgtcatccttcaggacgcacccagcgccccaggccacgcgccccacagacaagcttctctgagcatctctgtgtccaacagtcagatccaagagaatgtggacattgccactgtctaccagatcttccctgacgaagtgctgggctcagggcagtttggagtggtctatggaggaaaacaccggaagacaggccgggacgtggcagttaaggtcattgacaaactgcgcttccctaccaagcaggagagccagctccggaatgaagtggccattctgcagagcctgcggcatcccgggatcgtgaacctggagtgcatgttcgagacgcctgagaaagtgtttgtggtgatggagaagctgcatggggacatgttggagatgatcctgtccagtgagaagggccggctgcctgagcgcctcaccaagttcctcatcacccagatcctggtggctttgagacaccttcacttcaagaacattgtccactgtgacttgaaaccagaaaacgtgttgctggcatcagcagacccatttcctcaggtgaagctgtgtgactttggctttgctcgcatcatcggcgagaagtcgttccgccgctcagtggtgggcacgccggcctacctggcacccgaggtgctgctcaaccagggctacaaccgctcgctggacatgtggtcagtgggcgtgatcatgtacgtcagcctcagcggcaccttccctttcaacgaggatgaggacatcaatgaccagatccagaacgccgccttcatgtacccggccagcccctggagccacatctcagctggagccattgacctcatcaacaacctgctgcaggtgaagatgcgcaaacgctacagcgtggacaaatctctcagccacccctggttacaggagtaccagacgtggctggacctccgagagctggaggggaagatgggagagcgatacatcacgcatgagagtgacgacgcgcgctgggagcagtttgcagcagagcatccgctgcctgggtctgggctgcccacggacagggatctcggtggggcctgtccaccacaggaccacgacatgcaggggctggcggagcgcatcagtgttctctgaggtcctgtgccctcgtccagctgctgccctccacagcggttcttcacaggatcccagcaatgaactgttctagggaaagtggcttcctgcccaaactggatgggacacgtggggagtggggtggggggagctatttccaaggcccctccctgtttccccagcaattaaaacggactcatctctggccccatggccttgatctcagcaaaaaaaaaaaaaaaaa

SEQ ID NO: 1779 - DNA, 3202 bp, Homo sapiens
actgtcgctccggacacttcctcctgggccgccgccgccgccgccgacttaaactttggagggggaaaaagagctactggcgcctggcgaccctccctgccccccacccaaccccgctccggcaacgcccccttcctcacggctcccgaccgaacttttctccaacttctgcgactcgaccccgccatcctcaggtcccctccgcctgccagatcttttctcggatccccgctctcccaccacctgctcacgagatcccgcggatctagaacccagggtcccccggggccccccggccgggtcccgggtgggctccaggcggccggtccccggcctccccccatggccaccgccccctcttatcccgccgggctccctggctctcccgggccggggtctcctccgccccccggcggcctagagctgcagtcgccgccaccgctactgccccagatcccggccccgggttccggggtctcctttcacatccagatcgggctgacccgcgagttcgtgctgttgcccgccgcctccgagctggctcatgtgaagcagctggcctgttccatcgtggaccagaagttccctgagtgtggcttctacggcctttacgacaagatcctgcttttcaaacatgaccccacgtcggccaacctcctgcagctggtgcgctcgtccggagacatccaggagggcgacctggtggaggtggtgctgtcggcctcggccaccttcgaggacttccagatccgcccgcacgccctcacggtgcactcctatcgggcgcctgccttctgtgatcactgcggggagatgctcttcggcctagtgcgccagggcctcaagtgcgatggctgcgggctgaactaccacaagcgctgtgccttcagcatccccaacaactgtagtggggcccgcaaacggcgcctgtcatccacgtctctggccagtggccactcggtgcgcctcggcacctccgagtccctgccctgcacggctgaagagctgagccgtagcaccaccgaactcctgcctcgccgtcccccgtcatcctcttcctcctcttctgcctcatcgtatacgggccgccccattgagctggacaagatgctgctctccaaggtcaaggtgccgcacaccttcctcatccacagctatacacggcccaccgtttgccaggcttgcaagaaactcctcaagggcctcttccggcagggcctgcaatgcaaagactgcaagtttaactgtcacaaacgctgcgccacccgcgtccctaatgactgcctgggggaggcccttatcaatggagatgtgccgatggaggaggccaccgatttcagcgaggctgacaagagcgccctcatggatgagtcagaggactccggtgtcatccctggctcccactcagagaatgcgctccacgccagtgaggaggaggaaggcgagggaggcaaggcccagagctccctggggtacatccccctaatgagggtggtgcaatcggtgcgacacacgacgcggaaatccagcaccacgctgcgggagggttgggtggttcattacagcaacaaggacacgctgagaaagcggcactattggcgcctggactgcaagtgtatcacgctcttccagaacaacacgaccaacagatactataaggaaattccgctgtcagaaatcctcacggtggagtccgcccagaacttcagccttgtgccgccgggcaccaacccacactgctttgagatcgtcactgccaatgccacctacttcgtgggcgagatgcctggcgggactccgggtgggccaagtgggcagggggctgaggccgcccggggctgggagacagccatccgccaggccctgatgcccgtcatccttcaggacgcacccagcgccccaggccacgcgccccacagacaagcttctctgagcatctctgtgtccaacagtcagatccaagagaatgtggacattgccactgtctaccagatcttccctgacgaagtgctgggctcagggcagtttggagtggtctatggaggaaaacaccggaagacaggccgggacgtggcagttaaggtcattgacaaactgcgcttccctaccaagcaggagagccagctccggaatgaagtggccattctgcagagcctgcggcatcccgggatcgtgaacctggagtgcatgttcgagacgcctgagaaagtgtttgtggtgatggagaagctgcatggggacatgttggagatgatcctgtccagtgagaagggccggctgcctgagcgcctcaccaagttcctcatcacccagatcctggtggctttgagacaccttcacttcaagaacattgtccactgtgacttgaaaccagaaaacgtgttgctggcatcagcagacccatttcctcaggtgaagctgtgtgactttggctttgctcgcatcatcggcgagaagtcgttccgccgctcagtggtgggcacgccggcctacctggcacccgaggtgctgctcaaccagggctacaaccgctcgctggacatgtggtcagtgggcgtgatcatgtacgtcagcctcagcggcaccttccctttcaacgaggatgaggacatcaatgaccagatccagaacgccgccttcatgtacccggccagcccctggagccacatctcagctggagccattgacctcatcaacaacctgctgcaggtgaagatgcgcaaacgctacagcgtggacaaatctctcagccacccctggttacaggagtaccagacgtggctggacctccgagagctggaggggaagatgggagagcgatacatcacgcatgagagtgacgacgcgcgctgggagcagtttgcagcagagcatccgctgcctgggtctgggctgcccacggacagggatctcggtggggcctgtccaccacaggaccacgacatgcaggggctggcggagcgcatcagtgttctctgaggtcctgtgccctcgtccagctgctgccctccacagcggttcttcacaggatcccagcaatgaactgttctagggaaagtggcttcctgcccaaactggatgggacacgtggggagtggggtggggggagctatttccaaggcccctccctgtttccccagcaattaaaacggactcatctctggccccatggccttgatctcagcaaaaaaaaaaaaaaaaa

SEQ ID NO: 1780 - DNA, 2939 bp, Homo sapiens
attcagcatcccctcccacctccgccaggttccggaaaattcgaggtgtccacgctcccggagccactctccctcccaccccagctcccccttccagccaccaaacccacgccggcgccccctccccgtacaattggggcgctggcatcctgcccggctcgcgctggggttgggagggggcaggcaggaagcgagggcctgcggggtctctgcgtttccgggggaaacagccggccctgccctgggagggtcacagtccgcccgctgctgaaggcggctctgagcttttccgtcgccacatccctctcccgcccctcagttccctgagtgtggcttctacggcctttacgacaagatcctgcttttcaaacatgaccccacgtcggccaacctcctgcagctggtgcgctcgtccggagacatccaggagggcgacctggtggaggtggtgctgtcggcctcggccaccttcgaggacttccagatccgcccgcacgccctcacggtgcactcctatcgggcgcctgccttctgtgatcactgcggggagatgctcttcggcctagtgcgccagggcctcaagtgcgatggctgcgggctgaactaccacaagcgctgtgccttcagcatccccaacaactgtagtggggcccgcaaacggcgcctgtcatccacgtctctggccagtggccactcggtgcgcctcggcacctccgagtccctgccctgcacggctgaagagctgagccgtagcaccaccgaactcctgcctcgccgtcccccgtcatcctcttcctcctcttctgcctcatcgtatacgggccgccccattgagctggacaagatgctgctctccaaggtcaaggtgccgcacaccttcctcatccacagctatacacggcccaccgtttgccaggcttgcaagaaactcctcaagggcctcttccggcagggcctgcaatgcaaagactgcaagtttaactgtcacaaacgctgcgccacccgcgtccctaatgactgcctgggggaggcccttatcaatggagatgtgccgatggaggaggccaccgatttcagcgaggctgacaagagcgccctcatggatgagtcagaggactccggtgtcatccctggctcccactcagagaatgcgctccacgccagtgaggaggaggaaggcgagggaggcaaggcccagagctccctggggtacatccccctaatgagggtggtgcaatcggtgcgacacacgacgcggaaatccagcaccacgctgcgggagggttgggtggttcattacagcaacaaggacacgctgagaaagcggcactattggcgcctggactgcaagtgtatcacgctcttccagaacaacacgaccaacagatactataaggaaattccgctgtcagaaatcctcacggtggagtccgcccagaacttcagccttgtgccgccgggcaccaacccacactgctttgagatcgtcactgccaatgccacctacttcgtgggcgagatgcctggcgggactccgggtgggccaagtgggcagggggctgaggccgcccggggctgggagacagccatccgccaggccctgatgcccgtcatccttcaggacgcacccagcgccccaggccacgcgccccacagacaagcttctctgagcatctctgtgtccaacagtcagatccaagagaatgtggacattgccactgtctaccagatcttccctgacgaagtgctgggctcagggcagtttggagtggtctatggaggaaaacaccggaagacaggccgggacgtggcagttaaggtcattgacaaactgcgcttccctaccaagcaggagagccagctccggaatgaagtggccattctgcagagcctgcggcatcccgggatcgtgaacctggagtgcatgttcgagacgcctgagaaagtgtttgtggtgatggagaagctgcatggggacatgttggagatgatcctgtccagtgagaagggccggctgcctgagcgcctcaccaagttcctcatcacccagatcctggtggctttgagacaccttcacttcaagaacattgtccactgtgacttgaaaccagaaaacgtgttgctggcatcagcagacccatttcctcaggtgaagctgtgtgactttggctttgctcgcatcatcggcgagaagtcgttccgccgctcagtggtgggcacgccggcctacctggcacccgaggtgctgctcaaccagggctacaaccgctcgctggacatgtggtcagtgggcgtgatcatgtacgtcagcctcagcggcaccttccctttcaacgaggatgaggacatcaatgaccagatccagaacgccgccttcatgtacccggccagcccctggagccacatctcagctggagccattgacctcatcaacaacctgctgcaggtgaagatgcgcaaacgctacagcgtggacaaatctctcagccacccctggttacaggagtaccagacgtggctggacctccgagagctggaggggaagatgggagagcgatacatcacgcatgagagtgacgacgcgcgctgggagcagtttgcagcagagcatccgctgcctgggtctgggctgcccacggacagggatctcggtggggcctgtccaccacaggaccacgacatgcaggggctggcggagcgcatcagtgttctctgaggtcctgtgccctcgtccagctgctgccctccacagcggttcttcacaggatcccagcaatgaactgttctagggaaagtggcttcctgcccaaactggatgggacacgtggggagtggggtggggggagctatttccaaggcccctccctgtttccccagcaattaaaacggactcatctctggccccatggccttgatctcagcaaaaaaaaaaaaaaaaa

SEQ ID NO: 1781 - DNA, 5907 bp, Homo sapiens
aaagttcatccccccagaatgaaaatgaggacatttgagaaggtgatttaaggtgtggacatttgagaaggtgtcctatcaaattagtaaaccaaaggaaaagtactgaatagattaatccaaaacacttactgttttttaaacgaagaggatttcaccttgacagaaaaacaacttttattcaatatgtatttcctgaaattaaagagacaagtacagactgaaaggaaaatagattcgtaaataagctacgtcaactctatcctgctgaggatagctcagtgatgttaaatcctttacaaatccctggttgtcttcctacagacaagactgctttttgatgggactgatattaagagaaataggacctttggggcattcaactccttgataaaacttaaaagtatcggcatgagtggcttaacagaggaaataaagaagttttcaactaaatccaaaagtgcggtcattttctttactgctgttattttaaaaacctcttcataaccattgaaaaagaatcgacaactattttaaaagattaaagaaaggcagatgtctgcaaataattcccctccatcagcccagaagtctgtattacccacagctattcctgctgtgcttccagctgcttctccgtgttcaagtcctaagacgggactctctgcccgactctctaatggaagcttcagtgcaccatcactcaccaactccagaggctcagtgcatacagtttcatttctactgcaaattggcctcacacgggagagtgttaccattgaagcccaggaactgtctttatctgctgtcaaggatcttgtgtgctccatagtttatcaaaagtttccagagtgtggattctttggcatgtatgacaaaattcttctctttcgccatgacatgaactcagaaaacattttgcagctgattacctcagcagatgaaatacatgaaggagacctagtggaagtggttctttcagctttagccacagtagaagacttccagattcgtccacatactctctatgtacattcttacaaagctcctactttctgtgattactgtggtgagatgctctggggattggtacgtcaaggactgaaatgtgaaggctgtggattaaattaccataaacgatgtgccttcaagattccaaataactgtagtggagtaagaaagagacgtctgtcaaatgtatctttaccaggacccggcctctcagttccaagacccctacagcctgaatatgtagcccttcccagtgaagagtcacatgtccaccaggaaccaagtaagagaattccttcttggagtggtcgcccaatctggatggaaaagatggtaatgtgcagagtgaaagttccacacacatttgctgttcactcttacacccgtcccacgatatgtcagtactgcaagcggttactgaaaggcctctttcgccaaggaatgcagtgtaaagattgcaaattcaactgccataaacgctgtgcatcaaaagtaccaagagactgccttggagaggttactttcaatggagaaccttccagtctgggaacagatacagatataccaatggatattgacaataatgacataaatagtgatagtagtcggggtttggatgacacagaagagccatcacccccagaagataagatgttcttcttggatccatctgatctcgatgtggaaagagatgaagaagccgttaaaacaatcagtccatcaacaagcaataatattccgctaatgagggttgtacaatccatcaagcacacaaagaggaagagcagcacaatggtgaaggaagggtggatggtccattacaccagcagggataacctgagaaagaggcattattggagacttgacagcaaatgtctaacattatttcagaatgaatctggatcaaagtattataaggaaattccactttcagaaattctccgcatatcttcaccacgagatttcacaaacatttcacaaggcagcaatccacactgttttgaaatcattactgatactatggtatacttcgttggtgagaacaatggggacagctctcataatcctgttcttgctgccactggagttggacttgatgtagcacagagctgggaaaaagcaattcgccaagccctcatgcctgttactcctcaagcaagtgtttgcacttctccagggcaagggaaagatcacaaagatttgtctacaagtatctctgtatctaattgtcagattcaggagaatgtggatatcagtactgtttaccagatctttgcagatgaggtgcttggttcaggccagtttggcatcgtttatggaggaaaacatagaaagactgggagggatgtggctattaaagtaattgataagatgagattccccacaaaacaagaaagtcaactccgtaatgaagtggctattttacagaatttgcaccatcctgggattgtaaacctggaatgtatgtttgaaaccccagaacgagtctttgtagtaatggaaaagctgcatggagatatgttggaaatgattctatccagtgagaaaagtcggcttccagaacgaattactaaattcatggtcacacagatacttgttgctttgaggaatctgcattttaagaatattgtgcactgtgatttaaagccagaaaatgtgctgcttgcatcagcagagccatttcctcaggtgaagctgtgtgactttggatttgcacgcatcattggtgaaaagtcattcaggagatctgtggtaggaactccagcatacttagcccctgaagttctccggagcaaaggttacaaccgttccctagatatgtggtcagtgggagttatcatctatgtgagcctcagtggcacatttccttttaatgaggatgaagatataaatgaccaaatccaaaatgctgcatttatgtacccaccaaatccatggagagaaatttctggtgaagcaattgatctgataaacaatctgcttcaagtgaagatgagaaaacgttacagtgttgacaaatctcttagtcatccctggctacaggactatcagacttggcttgaccttagagaatttgaaactcgcattggagaacgttacattacacatgaaagtgatgatgctcgctgggaaatacatgcatacacacataaccttgtatacccaaagcacttcattatggctcctaatccagatgatatggaagaagatccttaatcactgagctaacctaaataaggaaggatttcattttatggactgatattttgctgtgtaacttgttctttgtagattgtcatctgcagtgctgcaaagatatgaagaaatatgataacgaataagtgacaccagtactgtagttcataatgagtaggtacaggcgggaaactgaataataagaagtcataatggaatcaaggtgaagctttttataaacttttttagcctaagcaataactggttttgtattttttcttaatccttcactttaatacaataggctcacttaatttgtcttcccatttctctttatatatatatatataaatataaatatatgtttgtttgtttttttaaggaaaaacaagtcaagctagcatccagttactatatagcttggctaaattatacaagacttacaagattgattactcgacaggcttgtatttaagagataactgtgaggttaccattatgtgatgttactataaggacttttaacattggtttaacaaaccatagaggcattgaagggtttttcttagatgcctagaaaaagcgcactgggctgttttacctttcttttttaggtcaatcaagactccaaaatagtgattcctaacctttttggagttgctctgctactctgaatatgttctatacagcataaggattgtcaccttctgtgtgttgcaacagcttctaagataattagggacaaatgatgttacaaaaggaagagtactgctggtctaagtgctgagttgtatgtctttgcatagctccactctgctgctaaatatgcatgttctgactgacaccatcttgatgccagtactggattccagcattcagcaggtgcagatctcggctttacacaatttatctttacctagggttcagtcagtaatttctgctttttagcagggccagtgcagggtcagttaatgctacagttactgtatagcaaacagtatccttttttctccttcccctagcctattgggctttgcagatatctggagtgttttaaagtcaattattttaagcagtttgaggggatgtgtaggagtggagcatgaaacagtttataaggctggggctgtattatcagcacagcaaattaaagaatgaaagaagtacttctttttacatttcagctccagcagccagctatttaaaaaatatttttaaatatcttccccaaagtttaagatgtgggaccatctacttgtaagaaacagtggcttatttcttcatttctcagtaatcattgtaaacctttttttttttcttctccactctaacaaaagtaaaagaacaaaacttttgctgaggtcttggactccactacttgttagttatgttggcctggacagatggcaggtctgtcggcagttcctcagtctgtaaaatgaagattatcattcttgcctctccctttgtcacagtgttgtcgtgaagatcagatatgtatgaatgcagtcaaataaactaaaaactaggaaagtgttaactatcgttgcccaccgaatttgaggtagcaaaaaaaaaaaagaatgttctggtacatgaacagactgagaaggcctttcgacatccctgaagctagtctcctgtctagactaaaaatatccttgaaagaatagtagcaaacagtatgcagtactcctgtgttctaagttcttttatgttttagtttaccctcacagcagccatagtgttaagtcattatgagcttcatcttaaagataagaaaactgaggcaaggggagattaacttactgccaaatttcaaacagttagtagtatttgagaccagtagtatggctctaatcttacccttagccctcccaaccattatgctgtactatctacccataaatacctccaggaaacattcccctcttggtaatttgtccttctatagaagcttcaaagattaaatcaaattaattttcaaaaaaaatttttttttagaaatgttattttccctgtgatagaggatgacttcccagtttcaccaaagtctgtttatatcaacacacacaaaatggaataattctgagtcactaggcaatcaatctactgtggttttactatgtaaggtgaaaattaactggaacgatgtttgtttgctatacttacatagtcaaactttacaagccatgaaattaattgcactctttgtatttgttgttaaatgcctaagaagttttctaaaaattttgtaaaggcactgtcagagaatctggagttgaatgattattccagatactgtataacctgcataactttttgtctttaagtcgtgtttgtaaaagaagtaattgctagaaacatttgataatgtacaaagtagtctataatgactgttcagtacatttttaatatttttttggttatatccaactttttgtaaatatactggaagcttgataataaaatgtatttcctatcaccatacttttccatgtgaaaacctgagcctatttctagtataagtatccaaagaaaagtttgacctggttgtgttattttaccagaccttggtaaaagaactattttggaaacagtatttgtaaatggaactaatgctatatttaaaaacactgatttttttttaacctgccaaaaataaaaaaaagctcattttataattttctactaaaaaaa

SEQ ID NO: 1782 - DNA, 13509 bp, Homo sapiens
ggggcatttccgggtccgggccgagcgggcgcacgcgcgggagcgggactcggcggcatggcgggctccggagccggtgtgcgttgctccctgctgcggctgcaggagaccttgtccgctgcggaccgctgcggtgctgccctggccggtcatcaactgatccgcggcctggggcaggaatgcgtcctgagcagcagccccgcggtgctggcattacagacatctttagttttttccagagatttcggtttgcttgtatttgtccggaagtcactcaacagtattgaatttcgtgaatgtagagaagaaatcctaaagtttttatgtattttcttagaaaaaatgggccagaagatcgcaccttactctgttgaaattaagaacacttgtaccagtgtttatacaaaagatagagctgctaaatgtaaaattccagccctggaccttcttattaagttacttcagacttttagaagttctagactcatggatgaatttaaaattggagaattatttagtaaattctatggagaacttgcattgaaaaaaaaaataccagatacagttttagaaaaagtatatgagctcctaggattattgggtgaagttcatcctagtgagatgataaataatgcagaaaacctgttccgcgcttttctgggtgaacttaagacccagatgacatcagcagtaagagagcccaaactacctgttctggcaggatgtctgaaggggttgtcctcacttctgtgcaacttcactaagtccatggaagaagatccccagacttcaagggagatttttaattttgtactaaaggcaattcgtcctcagattgatctgaagagatatgctgtgccctcagctggcttgcgcctatttgccctgcatgcatctcagtttagcacctgccttctggacaactacgtgtctctatttgaagtcttgttaaagtggtgtgcccacacaaatgtagaattgaaaaaagctgcactttcagccctggaatcctttctgaaacaggtttctaatatggtggcgaaaaatgcagaaatgcataaaaataaactgcagtactttatggagcagttttatggaatcatcagaaatgtggattcgaacaacaaggagttatctattgctatccgtggatatggactttttgcaggaccgtgcaaggttataaacgcaaaagatgttgacttcatgtacgttgagctcattcagcgctgcaagcagatgttcctcacccagacagacactggtgacgaccgtgtttatcagatgccaagcttcctccagtctgttgcaagcgtcttgctgtaccttgacacagttcctgaggtgtatactccagttctggagcacctcgtggtgatgcagatagacagtttcccacagtacagtccaaaaatgcagctggtgtgttgcagagccatagtgaaggtgttcctagctttggcagcaaaagggccagttctcaggaattgcattagtactgtggtgcatcagggtttaatcagaatatgttctaaaccagtggtccttccaaagggccctgagtctgaatctgaagaccaccgtgcttcaggggaagtcagaactggcaaatggaaggtgcccacatacaaagactacgtggatctcttcagacatctcctgagctctgaccagatgatggattctattttagcagatgaagcatttttctctgtgaattcctccagtgaaagtctgaatcatttactttatgatgaatttgtaaaatccgttttgaagattgttgagaaattggatcttacacttgaaatacagactgttggggaacaagagaatggagatgaggcgcctggtgtttggatgatcccaacttcagatccagcggctaacttgcatccagctaaacctaaagatttttcggctttcattaacctggtggaattttgcagagagattctccctgagaaacaagcagaattttttgaaccatgggtgtactcattttcatatgaattaattttgcaatctacaaggttgcccctcatcagtggtttctacaaattgctttctattacagtaagaaatgccaagaaaataaaatatttcgagggagttagtccaaagagtctgaaacactctcctgaagacccagaaaagtattcttgctttgctttatttgtgaaatttggcaaagaggtggcagttaaaatgaagcagtacaaagatgaacttttggcctcttgtttgacctttcttctgtccttgccacacaacatcattgaactcgatgttagagcctacgttcctgcactgcagatggctttcaaactgggcctgagctatacccccttggcagaagtaggcctgaatgctctagaagaatggtcaatttatattgacagacatgtaatgcagccttattacaaagacattctcccctgcctggatggatacctgaagacttcagccttgtcagatgagaccaagaataactgggaagtgtcagctctttctcgggctgcccagaaaggatttaataaagtggtgttaaagcatctgaagaagacaaagaacctttcatcaaacgaagcaatatccttagaagaaataagaattagagtagtacaaatgcttggatctctaggaggacaaataaacaaaaatcttctgacagtcacgtcctcagatgagatgatgaagagctatgtggcctgggacagagagaagcggctgagctttgcagtgccctttagagagatgaaacctgtcattttcctggatgtgttcctgcctcgagtcacagaattagcgctcacagccagtgacagacaaactaaagttgcagcctgtgaacttttacatagcatggttatgtttatgttgggcaaagccacgcagatgccagaagggggacagggagccccacccatgtaccagctctataagcggacgtttcctgtgctgcttcgacttgcgtgtgatgttgatcaggtgacaaggcaactgtatgagccactagttatgcagctgattcactggttcactaacaacaagaaatttgaaagtcaggatactgttgccttactagaagctatattggatggaattgtggaccctgttgacagtactttaagagatttttgtggtcggtgtattcgagaattccttaaatggtccattaagcaaataacaccacagcagcaggagaagagtccagtaaacaccaaatcgcttttcaagcgactttatagccttgcgcttcaccccaatgctttcaagaggctgggagcatcacttgcctttaataatatctacagggaattcagggaagaagagtctctggtggaacagtttgtgtttgaagccttggtgatatacatggagagtctggccttagcacatgcagatgagaagtccttaggtacaattcaacagtgttgtgatgccattgatcacctatgccgcatcattgaaaagaagcatgtttctttaaataaagcaaagaaacgacgtttgccgcgaggatttccaccttccgcatcattgtgtttattggatctggtcaagtggcttttagctcattgtgggaggccccagacagaatgtcgacacaaatccattgaactcttttataaattcgttcctttattgccaggcaacagatcccctaatttgtggctgaaagatgttctcaaggaagaaggtgtctcttttctcatcaacacctttgaggggggtggctgtggccagccctcgggcatcctggcccagcccaccctcttgtaccttcgggggccattcagcctgcaggccacgctatgctggctggacctgctcctggccgcgttggagtgctacaacacgttcattggcgagagaactgtaggagcgctccaggtcctaggtactgaagcccagtcttcacttttgaaagcagtggctttcttcttagaaagcattgccatgcatgacattatagcagcagaaaagtgctttggcactggggcagcaggtaacagaacaagcccacaagagggagaaaggtacaactacagcaaatgcaccgttgtggtccggattatggagtttaccacgactctgctaaacacctccccggaaggatggaagctcctgaagaaggacttgtgtaatacacacctgatgagagtcctggtgcagacgctgtgtgagcccgcaagcataggtttcaacatcggagacgtccaggttatggctcatcttcctgatgtttgtgtgaatctgatgaaagctctaaagatgtccccatacaaagatatcctagagacccatctgagagagaaaataacagcacagagcattgaggagctttgtgccgtcaacttgtatggccctgacgcgcaagtggacaggagcaggctggctgctgttgtgtctgcctgtaaacagcttcacagagctgggcttctgcataatatattaccgtctcagtccacagatttgcatcattctgttggcacagaacttctttccctggtttataaaggcattgcccctggagatgagagacagtgtctgccttctctagacctcagttgtaagcagctggccagcggacttctggagttagcctttgcttttggaggactgtgtgagcgccttgtgagtcttctcctgaacccagcggtgctgtccacggcgtccttgggcagctcacagggcagcgtcatccacttctcccatggggagtatttctatagcttgttctcagaaacgatcaacacggaattattgaaaaatctggatcttgctgtattggagctcatgcagtcttcagtggataataccaaaatggtgagtgccgttttgaacggcatgttagaccagagcttcagggagcgagcaaaccagaaacaccaaggactgaaacttgcgactacaattctgcaacactggaagaagtgtgattcatggtgggccaaagattcccctctcgaaactaaaatggcagtgctggccttactggcaaaaattttacagattgattcatctgtatcttttaatacaagtcatggttcattccctgaagtctttacaacatatattagtctacttgctgacacaaagctggatctacatttaaagggccaagctgtcactcttcttccattcttcaccagcctcactggaggcagtctggaggaacttagacgtgttctggagcagctcatcgttgctcacttccccatgcagtccagggaatttcctccaggaactccgcggttcaataattatgtggactgcatgaaaaagtttctagatgcattggaattatctcaaagccctatgttgttggaattgatgacagaagttctttgtcgggaacagcagcatgtcatggaagaattatttcaatccagtttcaggaggattgccagaaggggttcatgtgtcacacaagtaggccttctggaaagcgtgtatgaaatgttcaggaaggatgacccccgcctaagtttcacacgccagtcctttgtggaccgctccctcctcactctgctgtggcactgtagcctggatgctttgagagaattcttcagcacaattgtggtggatgccattgatgtgttgaagtccaggtttacaaagctaaatgaatctacctttgatactcaaatcaccaagaagatgggctactataagattctagacgtgatgtattctcgccttcccaaagatgatgttcatgctaaggaatcaaaaattaatcaagttttccatggctcgtgtattacagaaggaaatgaacttacaaagacattgattaaattgtgctacgatgcatttacagagaacatggcaggagagaatcagctgctggagaggagaagactttaccattgtgcagcatacaactgcgccatatctgtcatctgctgtgtcttcaatgagttaaaattttaccaaggttttctgtttagtgaaaaaccagaaaagaacttgcttatttttgaaaatctgatcgacctgaagcgccgctataattttcctgtagaagttgaggttcctatggaaagaaagaaaaagtacattgaaattaggaaagaagccagagaagcagcaaatggggattcagatggtccttcctatatgtcttccctgtcatatttggcagacagtaccctgagtgaggaaatgagtcaatttgatttctcaaccggagttcagagctattcatacagctcccaagaccctagacctgccactggtcgttttcggagacgggagcagcgggaccccacggtgcatgatgatgtgctggagctggagatggacgagctcaatcggcatgagtgcatggcgcccctgacggccctggtcaagcacatgcacagaagcctgggcccgcctcaaggagaagaggattcagtgccaagagatcttccttcttggatgaaattcctccatggcaaactgggaaatccaatagtaccattaaatatccgtctcttcttagccaagcttgttattaatacagaagaggtctttcgcccttacgcgaagcactggcttagccccttgctgcagctggctgcttctgaaaacaatggaggagaaggaattcactacatggtggttgagatagtggccactattctttcatggacaggcttggccactccaacaggggtccctaaagatgaagtgttagcaaatcgattgcttaatttcctaatgaaacatgtctttcatccaaaaagagctgtgtttagacacaaccttgaaattataaagacccttgtcgagtgctggaaggattgtttatccatcccttataggttaatatttgaaaagttttccggtaaagatcctaattctaaagacaactcagtagggattcaattgctaggcatcgtgatggccaatgacctgcctccctatgacccacagtgtggcatccagagtagcgaatacttccaggctttggtgaataatatgtcctttgtaagatataaagaagtgtatgccgctgcagcagaagttctaggacttatacttcgatatgttatggagagaaaaaacatactggaggagtctctgtgtgaactggttgcgaaacaattgaagcaacatcagaatactatggaggacaagtttattgtgtgcttgaacaaagtgaccaagagcttccctcctcttgcagacaggttcatgaatgctgtgttctttctgctgccaaaatttcatggagtgttgaaaacactctgtctggaggtggtactttgtcgtgtggagggaatgacagagctgtacttccagttaaagagcaaggacttcgttcaagtcatgagacatagagatgatgaaagacaaaaagtatgtttggacataatttataagatgatgccaaagttaaaaccagtagaactccgagaacttctgaaccccgttgtggaattcgtttcccatccttctacaacatgtagggaacaaatgtataatattctcatgtggattcatgataattacagagatccagaaagtgagacagataatgactcccaggaaatatttaagttggcaaaagatgtgctgattcaaggattgatcgatgagaaccctggacttcaattaattattcgaaatttctggagccatgaaactaggttaccttcaaataccttggaccggttgctggcactaaattccttatattctcctaagatagaagtgcactttttaagtttagcaacaaattttctgctcgaaatgaccagcatgagcccagattatccaaaccccatgttcgagcatcctctgtcagaatgcgaatttcaggaatataccattgattctgattggcgtttccgaagtactgttctcactccgatgtttgtggagacccaggcctcccagggcactctccagacccgtacccaggaagggtccctctcagctcgctggccagtggcagggcagataagggccacccagcagcagcatgacttcacactgacacagactgcagatggaagaagctcatttgattggctgaccgggagcagcactgacccgctggtcgaccacaccagtccctcatctgactccttgctgtttgcccacaagaggagtgaaaggttacagagagcacccttgaagtcagtggggcctgattttgggaaaaaaaggctgggccttccaggggacgaggtggataacaaagtgaaaggtgcggccggccggacggacctactacgactgcgcagacggtttatgagggaccaggagaagctcagtttgatgtatgccagaaaaggcgttgctgagcaaaaacgagagaaggaaatcaagagtgagttaaaaatgaagcaggatgcccaggtcgttctgtacagaagctaccggcacggagaccttcctgacattcagatcaagcacagcagcctcatcaccccgttacaggccgtggcccagagggacccaataattgcaaaacagctctttagcagcttgttttctggaattttgaaagagatggataaatttaagacactgtctgaaaaaaacaacatcactcaaaagttgcttcaagacttcaatcgttttcttaataccaccttctctttctttccaccctttgtctcttgtattcaggacattagctgtcagcacgcagccctgctgagcctcgacccagcggctgttagcgctggttgcctggccagcctacagcagcccgtgggcatccgcctgctagaggaggctctgctccgcctgctgcctgctgagctgcctgccaagcgagtccgtgggaaggcccgcctccctcctgatgtcctcagatgggtggagcttgctaagctgtatagatcaattggagaatacgacgtcctccgtgggatttttaccagtgagataggaacaaagcaaatcactcagagtgcattattagcagaagccagaagtgattattctgaagctgctaagcagtatgatgaggctctcaataaacaagactgggtagatggtgagcccacagaagccgagaaggatttttgggaacttgcatcccttgactgttacaaccaccttgctgagtggaaatcacttgaatactgttctacagccagtatagacagtgagaaccccccagacctaaataaaatctggagtgaaccattttatcaggaaacatatctaccttacatgatccgcagcaagctgaagctgctgctccagggagaggctgaccagtccctgctgacatttattgacaaagctatgcacggggagctccagaaggcgattctagagcttcattacagtcaagagctgagtctgctttacctcctgcaagatgatgttgacagagccaaatattacattcaaaatggcattcagagttttatgcagaattattctagtattgatgtcctcttacaccaaagtagactcaccaaattgcagtctgtacaggctttaacagaaattcaggagttcatcagctttataagcaaacaaggcaatttatcatctcaagttccccttaagagacttctgaacacctggacaaacagatatccagatgctaaaatggacccaatgaacatctgggatgacatcatcacaaatcgatgtttctttctcagcaaaatagaggagaagcttacccctcttccagaagataatagtatgaatgtggatcaagatggagaccccagtgacaggatggaagtgcaagagcaggaagaagatatcagctccctgatcaggagttgcaagttttccatgaaaatgaagatgatagacagtgcccggaagcagaacaatttctcacttgctatgaaactactgaaggagctgcataaagagtcaaaaaccagagacgattggctggtgagctgggtgcagagctactgccgcctgagccactgccggagccggtcccagggctgctctgagcaggtgctcactgtgctgaaaacagtctctttgttggatgagaacaacgtgtcaagctacttaagcaaaaatattctggctttccgtgaccagaacattctcttgggtacaacttacaggatcatagcgaatgctctcagcagtgagccagcctgccttgctgaaatcgaggaggacaaggctagaagaatcttagagctttctggatccagttcagaggattcagagaaggtgatcgcgggtctgtaccagagagcattccagcacctctctgaggctgtgcaggcggctgaggaggaggcccagcctccctcctggagctgtgggcctgcagctggggtgattgatgcttacatgacgctggcagatttctgtgaccaacagctgcgcaaggaggaagagaatgcatcagttattgattctgcagaactgcaggcgtatccagcacttgtggtggagaaaatgttgaaagctttaaaattaaattccaatgaagccagattgaagtttcctagattacttcagattatagaacggtatccagaggagactttgagcctcatgacaaaagagatctcttccgttccctgctggcagttcatcagctggatcagccacatggtggccttactggacaaagaccaagccgttgctgttcagcactctgtggaagaaatcactgataactacccgcaggctattgtttatcccttcatcataagcagcgaaagctattccttcaaggatacttctactggtcataagaataaggagtttgtggcaaggattaaaagtaagttggatcaaggaggagtgattcaagattttattaatgccttagatcagctctctaatcctgaactgctctttaaggattggagcaatgatgtaagagctgaactagcaaaaacccctgtaaataaaaaaaacattgaaaaaatgtatgaaagaatgtatgcagccttgggtgacccaaaggctccaggcctgggggcctttagaaggaagtttattcagacttttggaaaagaatttgataaacattttgggaaaggaggttctaaactactgagaatgaagctcagtgacttcaacgacattaccaacatgctacttttaaaaatgaacaaagactcaaagccccctgggaatctgaaagaatgttcaccctggatgagcgacttcaaagtggagttcctgagaaatgagctggagattcccggtcagtatgacggtaggggaaagccattgccagagtaccacgtgcgaatcgccgggtttgatgagcgggtgacagtcatggcgtctctgcgaaggcccaagcgcatcatcatccgtggccatgacgagagggaacaccctttcctggtgaagggtggcgaggacctgcggcaggaccagcgcgtggagcagctcttccaggtcatgaatgggatcctggcccaagactccgcctgcagccagagggccctgcagctgaggacctatagcgttgtgcccatgacctccaggttaggattaattgagtggcttgaaaatactgttaccttgaaggaccttcttttgaacaccatgtcccaagaggagaaggcggcttacctgagtgatcccagggcaccgccgtgtgaatataaagattggctgacaaaaatgtcaggaaaacatgatgttggagcttacatgctaatgtataagggcgctaatcgtactgaaacagtcacgtcttttagaaaacgagaaagtaaagtgcctgctgatctcttaaagcgggccttcgtgaggatgagtacaagccctgaggctttcctggcgctccgctcccacttcgccagctctcacgctctgatatgcatcagccactggatcctcgggattggagacagacatctgaacaactttatggtggccatggagactggcggcgtgatcgggatcgactttgggcatgcgtttggatccgctacacagtttctgccagtccctgagttgatgccttttcggctaactcgccagtttatcaatctgatgttaccaatgaaagaaacgggccttatgtacagcatcatggtacacgcactccgggccttccgctcagaccctggcctgctcaccaacaccatggatgtgtttgtcaaggagccctcctttgattggaaaaattttgaacagaaaatgctgaaaaaaggagggtcatggattcaagaaataaatgttgctgaaaaaaattggtacccccgacagaaaatatgttacgctaagagaaagttagcaggtgccaatccagcagtcattacttgtgatgagctactcctgggtcatgagaaggcccctgccttcagagactatgtggctgtggcacgaggaagcaaagatcacaacattcgtgcccaagaaccagagagtgggctttcagaagagactcaagtgaagtgcctgatggaccaggcaacagaccccaacatccttggcagaacctgggaaggatgggagccctggatgtgaggtctgtgggagtctgcagatagaaagcattacattgtttaaagaatctactatactttggttggcagcattccatgagctgattttcctgaaacactaaagagaaatgtcttttgtgctacagtttcgtagcatgagtttaaatcaagattatgatgagtaaatgtgtatgggttaaatcaaagataaggttatagtaacatcaaagattaggtgaggtttatagaaagatagatatccaggcttaccaaagtattaagtcaagaatataatatgtgatcagctttcaaagcatttacaagtgctgcaagttagtgaaacagctgtctccgtaaatggaggaaatgtggggaagccttggaatgcccttctggttctggcacattggaaagcacactcagaaggcttcatcaccaagattttgggagagtaaagctaagtatagttgatgtaacattgtagaagcagcataggaacaataagaacaataggtaaagctataattatggcttatatttagaaatgactgcatttgatattttaggatatttttctaggttttttcctttcattttattctcttctagttttgacattttatgatagatttgctctctagaaggaaacgtctttatttaggagggcaaaaattttggtcatagcattcacttttgctattccaatctacaactggaagatacataaaagtgctttgcattgaatttgggataacttcaaaaatcccatggttgttgttagggatagtactaagcatttcagttccaggagaataaaagaaattcctatttgaaatgaattcctcatttggaggaaaaaaagcatgcattctagcacaacaagatgaaattatggaatacaaaagtggctccttcccatgtgcagtccctgtccccccccgccagtcctccacacccaaactgtttctgattggcttttagctttttgttgtttttttttttccttctaacacttgtatttggaggctcttctgtgattttgagaagtatactcttgagtgtttaataaagtttttttccaaaagta

SEQ ID NO: 1783 - DNA, 13416 bp, Homo sapiens
ggggcatttccgggtccgggccgagcgggcgcacgcgcgggagcgggactcggcggcatggcgggctccggagccggtgtgcgttgctccctgctgcggctgcaggagaccttgtccgctgcggaccgctgcggtgctgccctggccggtcatcaactgatccgcggcctggggcaggaatgcgtcctgagcagcagccccgcggtgctggcattacagacatctttagttttttccagagatttcggtttgcttgtatttgtccggaagtcactcaacagtattgaatttcgtgaatgtagagaagaaatcctaaagtttttatgtattttcttagaaaaaatgggccagaagatcgcaccttactctgttgaaattaagaacacttgtaccagtgtttatacaaaagatagagctgctaaatgtaaaattccagccctggaccttcttattaagttacttcagacttttagaagttctagactcatggatgaatttaaaattggagaattatttagtaaattctatggagaacttgcattgaaaaaaaaaataccagatacagttttagaaaaagtatatgagctcctaggattattgggtgaagttcatcctagtgagatgataaataatgcagaaaacctgttccgcgcttttctgggtgaacttaagacccagatgacatcagcagtaagagagcccaaactacctgttctggcaggatgtctgaaggggttgtcctcacttctgtgcaacttcactaagtccatggaagaagatccccagacttcaagggagatttttaattttgtactaaaggcaattcgtcctcagattgatctgaagagatatgctgtgccctcagctggcttgcgcctatttgccctgcatgcatctcagtttagcacctgccttctggacaactacgtgtctctatttgaagtcttgttaaagtggtgtgcccacacaaatgtagaattgaaaaaagctgcactttcagccctggaatcctttctgaaacaggtttctaatatggtggcgaaaaatgcagaaatgcataaaaataaactgcagtactttatggagcagttttatggaatcatcagaaatgtggattcgaacaacaaggagttatctattgctatccgtggatatggactttttgcaggaccgtgcaaggttataaacgcaaaagatgttgacttcatgtacgttgagctcattcagcgctgcaagcagatgttcctcacccagacagacactggtgacgaccgtgtttatcagatgccaagcttcctccagtctgttgcaagcgtcttgctgtaccttgacacagttcctgaggtgtatactccagttctggagcacctcgtggtgatgcagatagacagtttcccacagtacagtccaaaaatgcagctggtgtgttgcagagccatagtgaaggtgttcctagctttggcagcaaaagggccagttctcaggaattgcattagtactgtggtgcatcagggtttaatcagaatatgttctaaaccagtggtccttccaaagggccctgagtctgaatctgaagaccaccgtgcttcaggggaagtcagaactggcaaatggaaggtgcccacatacaaagactacgtggatctcttcagacatctcctgagctctgaccagatgatggattctattttagcagatgaagcatttttctctgtgaattcctccagtgaaagtctgaatcatttactttatgatgaatttgtaaaatccgttttgaagattgttgagaaattggatcttacacttgaaatacagactgttggggaacaagagaatggagatgaggcgcctggtgtttggatgatcccaacttcagatccagcggctaacttgcatccagctaaacctaaagatttttcggctttcattaacctggtggaattttgcagagagattctccctgagaaacaagcagaattttttgaaccatgggtgtactcattttcatatgaattaattttgcaatctacaaggttgcccctcatcagtggtttctacaaattgctttctattacagtaagaaatgccaagaaaataaaatatttcgagggagttagtccaaagagtctgaaacactctcctgaagacccagaaaagtattcttgctttgctttatttgtgaaatttggcaaagaggtggcagttaaaatgaagcagtacaaagatgaacttttggcctcttgtttgacctttcttctgtccttgccacacaacatcattgaactcgatgttagagcctacgttcctgcactgcagatggctttcaaactgggcctgagctatacccccttggcagaagtaggcctgaatgctctagaagaatggtcaatttatattgacagacatgtaatgcagccttattacaaagacattctcccctgcctggatggatacctgaagacttcagccttgtcagatgagaccaagaataactgggaagtgtcagctctttctcgggctgcccagaaaggatttaataaagtggtgttaaagcatctgaagaagacaaagaacctttcatcaaacgaagcaatatccttagaagaaataagaattagagtagtacaaatgcttggatctctaggaggacaaataaacaaaaatcttctgacagtcacgtcctcagatgagatgatgaagagctatgtggcctgggacagagagaagcggctgagctttgcagtgccctttagagagatgaaacctgtcattttcctggatgtgttcctgcctcgagtcacagaattagcgctcacagccagtgacagacaaactaaagttgcagcctgtgaacttttacatagcatggttatgtttatgttgggcaaagccacgcagatgccagaagggggacagggagccccacccatgtaccagctctataagcggacgtttcctgtgctgcttcgacttgcgtgtgatgttgatcaggtgacaaggcaactgtatgagccactagttatgcagctgattcactggttcactaacaacaagaaatttgaaagtcaggatactgttgccttactagaagctatattggatggaattgtggaccctgttgacagtactttaagagatttttgtggtcggtgtattcgagaattccttaaatggtccattaagcaaataacaccacagcagcaggagaagagtccagtaaacaccaaatcgcttttcaagcgactttatagccttgcgcttcaccccaatgctttcaagaggctgggagcatcacttgcctttaataatatctacagggaattcagggaagaagagtctctggtggaacagtttgtgtttgaagccttggtgatatacatggagagtctggccttagcacatgcagatgagaagtccttaggtacaattcaacagtgttgtgatgccattgatcacctatgccgcatcattgaaaagaagcatgtttctttaaataaagcaaagaaacgacgtttgccgcgaggatttccaccttccgcatcattgtgtttattggatctggtcaagtggcttttagctcattgtgggaggccccagacagaatgtcgacacaaatccattgaactcttttataaattcgttcctttattgccaggcaacagatcccctaatttgtggctgaaagatgttctcaaggaagaaggtgtctcttttctcatcaacacctttgaggggggtggctgtggccagccctcgggcatcctggcccagcccaccctcttgtaccttcgggggccattcagcctgcaggccacgctatgctggctggacctgctcctggccgcgttggagtgctacaacacgttcattggcgagagaactgtaggagcgctccaggtcctaggtactgaagcccagtcttcacttttgaaagcagtggctttcttcttagaaagcattgccatgcatgacattatagcagcagaaaagtgctttggcactggggcagcaggtaacagaacaagcccacaagagggagaaaggtacaactacagcaaatgcaccgttgtggtccggattatggagtttaccacgactctgctaaacacctccccggaaggatggaagctcctgaagaaggacttgtgtaatacacacctgatgagagtcctggtgcagacgctgtgtgagcccgcaagcataggtttcaacatcggagacgtccaggttatggctcatcttcctgatgtttgtgtgaatctgatgaaagctctaaagatgtccccatacaaagatatcctagagacccatctgagagagaaaataacagcacagagcattgaggagctttgtgccgtcaacttgtatggccctgacgcgcaagtggacaggagcaggctggctgctgttgtgtctgcctgtaaacagcttcacagagctgggcttctgcataatatattaccgtctcagtccacagatttgcatcattctgttggcacagaacttctttccctggtttataaaggcattgcccctggagatgagagacagtgtctgccttctctagacctcagttgtaagcagctggccagcggacttctggagttagcctttgcttttggaggactgtgtgagcgccttgtgagtcttctcctgaacccagcggtgctgtccacggcgtccttgggcagctcacagggcagcgtcatccacttctcccatggggagtatttctatagcttgttctcagaaacgatcaacacggaattattgaaaaatctggatcttgctgtattggagctcatgcagtcttcagtggataataccaaaatggtgagtgccgttttgaacggcatgttagaccagagcttcagggagcgagcaaaccagaaacaccaaggactgaaacttgcgactacaattctgcaacactggaagaagtgtgattcatggtgggccaaagattcccctctcgaaactaaaatggcagtgctggccttactggcaaaaattttacagattgattcatctgtatcttttaatacaagtcatggttcattccctgaagtctttacaacatatattagtctacttgctgacacaaagctggatctacatttaaagggccaagctgtcactcttcttccattcttcaccagcctcactggaggcagtctggaggaacttagacgtgttctggagcagctcatcgttgctcacttccccatgcagtccagggaatttcctccaggaactccgcggttcaataattatgtggactgcatgaaaaagtttctagatgcattggaattatctcaaagccctatgttgttggaattgatgacagaagttctttgtcgggaacagcagcatgtcatggaagaattatttcaatccagtttcaggaggattgccagaaggggttcatgtgtcacacaagtaggccttctggaaagcgtgtatgaaatgttcaggaaggatgacccccgcctaagtttcacacgccagtcctttgtggaccgctccctcctcactctgctgtggcactgtagcctggatgctttgagagaattcttcagcacaattgtggtggatgccattgatgtgttgaagtccaggtttacaaagctaaatgaatctacctttgatactcaaatcaccaagaagatgggctactataagattctagacgtgatgtattctcgccttcccaaagatgatgttcatgctaaggaatcaaaaattaatcaagttttccatggctcgtgtattacagaaggaaatgaacttacaaagacattgattaaattgtgctacgatgcatttacagagaacatggcaggagagaatcagctgctggagaggagaagactttaccattgtgcagcatacaactgcgccatatctgtcatctgctgtgtcttcaatgagttaaaattttaccaaggttttctgtttagtgaaaaaccagaaaagaacttgcttatttttgaaaatctgatcgacctgaagcgccgctataattttcctgtagaagttgaggttcctatggaaagaaagaaaaagtacattgaaattaggaaagaagccagagaagcagcaaatggggattcagatggtccttcctatatgtcttccctgtcatatttggcagacagtaccctgagtgaggaaatgagtcaatttgatttctcaaccggagttcagagctattcatacagctcccaagaccctagacctgccactggtcgttttcggagacgggagcagcgggaccccacggtgcatgatgatgtgctggagctggagatggacgagctcaatcggcatgagtgcatggcgcccctgacggccctggtcaagcacatgcacagaagcctgggcccgcctcaaggagaagaggattcagtgccaagagatcttccttcttggatgaaattcctccatggcaaactgggaaatccaatagtaccattaaatatccgtctcttcttagccaagcttgttattaatacagaagaggtctttcgcccttacgcgaagcactggcttagccccttgctgcagctggctgcttctgaaaacaatggaggagaaggaattcactacatggtggttgagatagtggccactattctttcatggacaggcttggccactccaacaggggtccctaaagatgaagtgttagcaaatcgattgcttaatttcctaatgaaacatgtctttcatccaaaaagagctgtgtttagacacaaccttgaaattataaagacccttgtcgagtgctggaaggattgtttatccatcccttataggttaatatttgaaaagttttccggtaaagatcctaattctaaagacaactcagtagggattcaattgctaggcatcgtgatggccaatgacctgcctccctatgacccacagtgtggcatccagagtagcgaatacttccaggctttggtgaataatatgtcctttgtaagatataaagaagtgtatgccgctgcagcagaagttctaggacttatacttcgatatgttatggagagaaaaaacatactggaggagtctctgtgtgaactggttgcgaaacaattgaagcaacatcagaatactatggaggacaagtttattgtgtgcttgaacaaagtgaccaagagcttccctcctcttgcagacaggttcatgaatgctgtgttctttctgctgccaaaatttcatggagtgttgaaaacactctgtctggaggtggtactttgtcgtgtggagggaatgacagagctgtacttccagttaaagagcaaggacttcgttcaagtcatgagacatagagatgatgaaagacaaaaagtatgtttggacataatttataagatgatgccaaagttaaaaccagtagaactccgagaacttctgaaccccgttgtggaattcgtttcccatccttctacaacatgtagggaacaaatgtataatattctcatgtggattcatgataattacagagatccagaaagtgagacagataatgactcccaggaaatatttaagttggcaaaagatgtgctgattcaaggattgatcgatgagaaccctggacttcaattaattattcgaaatttctggagccatgaaactaggttaccttcaaataccttggaccggttgctggcactaaattccttatattctcctaagatagaagtgcactttttaagtttagcaacaaattttctgctcgaaatgaccagcatgagcccagattatccaaaccccatgttcgagcatcctctgtcagaatgcgaatttcaggaatataccattgattctgattggcgtttccgaagtactgttctcactccgatgtttgtggagacccaggcctcccagggcactctccagacccgtacccaggaagggtccctctcagctcgctggccagtggcagggcagataagggccacccagcagcagcatgacttcacactgacacagactgcagatggaagaagctcatttgattggctgaccgggagcagcactgacccgctggtcgaccacaccagtccctcatctgactccttgctgtttgcccacaagaggagtgaaaggttacagagagcacccttgaagtcagtggggcctgattttgggaaaaaaaggctgggccttccaggggacgaggtggataacaaagtgaaaggtgcggccggccggacggacctactacgactgcgcagacggtttatgagggaccaggagaagctcagtttgatgtatgccagaaaaggcgttgctgagcaaaaacgagagaaggaaatcaagagtgagttaaaaatgaagcaggatgcccaggtcgttctgtacagaagctaccggcacggagaccttcctgacattcagatcaagcacagcagcctcatcaccccgttacaggccgtggcccagagggacccaataattgcaaaacagctctttagcagcttgttttctggaattttgaaagagatggataaatttaagacactgtctgaaaaaaacaacatcactcaaaagttgcttcaagacttcaatcgttttcttaataccaccttctctttctttccaccctttgtctcttgtattcaggacattagctgtcagcacgcagccctgctgagcctcgacccagcggctgttagcgctggttgcctggccagcctacagcagcccgtgggcatccgcctgctagaggaggctctgctccgcctgctgcctgctgagctgcctgccaagcgagtccgtgggaaggcccgcctccctcctgatgtcctcagatgggtggagcttgctaagctgtatagatcaattggagaatacgacgtcctccgtgggatttttaccagtgagataggaacaaagcaaatcactcagagtgcattattagcagaagccagaagtgattattctgaagctgctaagcagtatgatgaggctctcaataaacaagactgggtagatggtgagcccacagaagccgagaaggatttttgggaacttgcatcccttgactgttacaaccaccttgctgagtggaaatcacttgaatactgttctacagccagtatagacagtgagaaccccccagacctaaataaaatctggagtgaaccattttatcaggaaacatatctaccttacatgatccgcagcaagctgaagctgctgctccagggagaggctgaccagtccctgctgacatttattgacaaagctatgcacggggagctccagaaggcgattctagagcttcattacagtcaagagctgagtctgctttacctcctgcaagatgatgttgacagagccaaatattacattcaaaatggcattcagagttttatgcagaattattctagtattgatgtcctcttacaccaaagtagactcaccaaattgcagtctgtacaggctttaacagaaattcaggagttcatcagctttataagcaaacaaggcaatttatcatctcaagttccccttaagagacttctgaacacctggacaaacagatatccagatgctaaaatggacccaatgaacatctgggatgacatcatcacaaatcgatgtttctttctcagcaaaatagaggagaagcttacccctcttccagaagataatagtatgaatgtggatcaagatggagaccccagtgacaggatggaagtgcaagagcaggaagaagatatcagctccctgatcaggagttgcaagttttccatgaaaatgaagatgatagacagtgcccggaagcagaacaatttctcacttgctatgaaactactgaaggagctgcataaagagtcaaaaaccagagacgattggctggtgagctgggtgcagagctactgccgcctgagccactgccggagccggtcccagggctgctctgagcaggtgctcactgtgctgaaaacagtctctttgttggatgagaacaacgtgtcaagctacttaagcaaaaatattctggctttccgtgaccagaacattctcttgggtacaacttacaggatcatagcgaatgctctcagcagtgagccagcctgccttgctgaaatcgaggaggacaaggctagaagaatcttagagctttctggatccagttcagaggattcagagaaggtgatcgcgggtctgtaccagagagcattccagcacctctctgaggctgtgcaggcggctgaggaggaggcccagcctccctcctggagctgtgggcctgcagctggggtgattgatgcttacatgacgctggcagatttctgtgaccaacagctgcgcaaggaggaagagaatgcatcagttattgattctgcagaactgcaggcgtatccagcacttgtggtggagaaaatgttgaaagctttaaaattaaattccaatgaagccagattgaagtttcctagattacttcagattatagaacggtatccagaggagactttgagcctcatgacaaaagagatctcttccgttccctgctggcagttcatcagctggatcagccacatggtggccttactggacaaagaccaagccgttgctgttcagcactctgtggaagaaatcactgataactacccgcaggctattgtttatcccttcatcataagcagcgaaagctattccttcaaggatacttctactggtcataagaataaggagtttgtggcaaggattaaaagtaagttggatcaaggaggagtgattcaagattttattaatgccttagatcagctctctaatcctgaactgctctttaaggattggagcaatgatgtaagagctgaactagcaaaaacccctgtaaataaaaaaaacattgaaaaaatgtatgaaagaatgtatgcagccttgggtgacccaaaggctccaggcctgggggcctttagaaggaagtttattcagacttttggaaaagaatttgataaacattttgggaaaggaggttctaaactactgagaatgaagctcagtgacttcaacgacattaccaacatgctacttttaaaaatgaacaaagactcaaagccccctgggaatctgaaagaatgttcaccctggatgagcgacttcaaagtggagttcctgagaaatgagctggagattcccggtcagtatgacggtaggggaaagccattgccagagtaccacgtgcgaatcgccgggtttgatgagcgggtgacagtcatggcgtctctgcgaaggcccaagcgcatcatcatccgtggccatgacgagagggaacaccctttcctggtgaagggtggcgaggacctgcggcaggaccagcgcgtggagcagctcttccaggtcatgaatgggatcctggcccaagactccgcctgcagccagagggccctgcagctgaggacctatagcgttgtgcccatgacctccagtgatcccagggcaccgccgtgtgaatataaagattggctgacaaaaatgtcaggaaaacatgatgttggagcttacatgctaatgtataagggcgctaatcgtactgaaacagtcacgtcttttagaaaacgagaaagtaaagtgcctgctgatctcttaaagcgggccttcgtgaggatgagtacaagccctgaggctttcctggcgctccgctcccacttcgccagctctcacgctctgatatgcatcagccactggatcctcgggattggagacagacatctgaacaactttatggtggccatggagactggcggcgtgatcgggatcgactttgggcatgcgtttggatccgctacacagtttctgccagtccctgagttgatgccttttcggctaactcgccagtttatcaatctgatgttaccaatgaaagaaacgggccttatgtacagcatcatggtacacgcactccgggccttccgctcagaccctggcctgctcaccaacaccatggatgtgtttgtcaaggagccctcctttgattggaaaaattttgaacagaaaatgctgaaaaaaggagggtcatggattcaagaaataaatgttgctgaaaaaaattggtacccccgacagaaaatatgttacgctaagagaaagttagcaggtgccaatccagcagtcattacttgtgatgagctactcctgggtcatgagaaggcccctgccttcagagactatgtggctgtggcacgaggaagcaaagatcacaacattcgtgcccaagaaccagagagtgggctttcagaagagactcaagtgaagtgcctgatggaccaggcaacagaccccaacatccttggcagaacctgggaaggatgggagccctggatgtgaggtctgtgggagtctgcagatagaaagcattacattgtttaaagaatctactatactttggttggcagcattccatgagctgattttcctgaaacactaaagagaaatgtcttttgtgctacagtttcgtagcatgagtttaaatcaagattatgatgagtaaatgtgtatgggttaaatcaaagataaggttatagtaacatcaaagattaggtgaggtttatagaaagatagatatccaggcttaccaaagtattaagtcaagaatataatatgtgatcagctttcaaagcatttacaagtgctgcaagttagtgaaacagctgtctccgtaaatggaggaaatgtggggaagccttggaatgcccttctggttctggcacattggaaagcacactcagaaggcttcatcaccaagattttgggagagtaaagctaagtatagttgatgtaacattgtagaagcagcataggaacaataagaacaataggtaaagctataattatggcttatatttagaaatgactgcatttgatattttaggatatttttctaggttttttcctttcattttattctcttctagttttgacattttatgatagatttgctctctagaaggaaacgtctttatttaggagggcaaaaattttggtcatagcattcacttttgctattccaatctacaactggaagatacataaaagtgctttgcattgaatttgggataacttcaaaaatcccatggttgttgttagggatagtactaagcatttcagttccaggagaataaaagaaattcctatttgaaatgaattcctcatttggaggaaaaaaagcatgcattctagcacaacaagatgaaattatggaatacaaaagtggctccttcccatgtgcagtccctgtccccccccgccagtcctccacacccaaactgtttctgattggcttttagctttttgttgtttttttttttccttctaacacttgtatttggaggctcttctgtgattttgagaagtatactcttgagtgtttaataaagtttttttccaaaagta

SEQ ID NO: 1784 - DNA, 3740 bp, Homo sapiens
aggaagcctcaagacgcggagcagcggcaggaaggagcccccggcagcccggaggagcatgggcaccttgcgggatttacagtacgcgctccaggagaagatcgaggagctgaggcagcgggatgctctcatcgacgagctggagctggagttggatcagaaggacgaactgatccagaagctgcagaacgagctggacaagtaccgctcggtgatccgaccagccacccagcaggcgcagaagcagagcgcgagcaccttgcagggcgagccgcgcaccaagcggcaggcgatctccgccgagcccaccgccttcgacatccaggatctcagccatgtgaccctgcccttctaccccaagagcccacagtccaaggatcttataaaggaagctatccttgacaatgactttatgaagaacttggagctgtcgcagatccaggagattgtggattgtatgtacccggtggagtatggcaaggacagttgcatcatcaaagaaggagacgtggggtcactggtgtatgtcatggaagatggtaaggttgaagttacaaaagaaggtgtgaagttgtgtaccatgggtccaggaaaagtgtttggggaattggctattctttacaactgtacccggacagcgaccgtcaagactcttgtaaatgtaaaactctgggccattgatcgacaatgttttcaaacaataatgatgaggacaggactcatcaagcataccgagtatatggaatttttaaaaagcgttccaacattccagagccttcctgaagagatcctcagcaagcttgctgatgtccttgaagagacccactatgaaaatggagaatatattatcaggcaaggtgcaagaggggacaccttctttatcatcagcaaaggaacggtaaatgtcactcgtgaagactcaccgagtgaagacccagtctttcttagaactttaggaaaaggagactggtttggagagaaagccttgcagggggaagatgtgagaacagcaaacgtaattgctgcagaagctgtaacctgccttgtgattgacagagactcttttaaacatttgattggagggctggatgatgtttctaataaagcatatgaagatgcagaagctaaagcaaaatatgaagctgaagcggctttcttcgccaacctgaagctgtctgatttcaacatcattgatacccttggagttggaggtttcggacgagtagaactggtccagttgaaaagtgaagaatccaaaacgtttgcaatgaagattctcaagaaacgtcacattgtggacacaagacagcaggagcacatccgctcagagaagcagatcatgcagggggctcattccgatttcatagtgagactgtacagaacatttaaggacagcaaatatttgtatatgttgatggaagcttgtctaggtggagagctctggaccattctcagggatagaggttcgtttgaagattctacaaccagattttacacagcatgtgtggtagaagcttttgcctatctgcattccaaaggaatcatttacagggacctcaagccagaaaatctcatcctagatcaccgaggttatgccaaactggttgattttggctttgcaaagaaaataggatttggaaagaaaacatggactttttgtgggactccagagtatgtagccccagagatcatcctgaacaaaggccatgacatttcagccgactactggtcactgggaatcctaatgtatgaactcctgactggcagcccacctttctcaggcccagatcctatgaaaacctataacatcatattgagggggattgacatgatagaatttccaaagaagattgccaaaaatgctgctaatttaattaaaaaactatgcagggacaatccatcagaaagattagggaatttgaaaaatggagtaaaagacattcaaaagcacaaatggtttgagggctttaactgggaaggcttaagaaaaggtaccttgacacctcctataataccaagtgttgcatcacccacagacacaagtaattttgacagtttccctgaggacaacgatgaaccaccacctgatgacaactcaggatgggatatagacttctaatgtatttctcttacctgcttctgccttgctgaagacagctttttctgagacacagctgccagcaaacctgagggaaagagagaagattagtgctcggggtcaccatgatgcctttgatcgatgctgctccagtaactacagtggcattaggacttatcgcttagatgacaatagtgctctttacatgttttctgtttgaacctaaaatagcagttgacatggtggtcctgaagcaaagcctttcaccagtaaagagatgttttctattgttgcaatgaccttgctttgctctgattataatttgaaagactgtaggaaacacttcaatgtagtataagagtctgtaccttgctggaatattcaagaagatgaaagaataatatattgggtacaatagattactatggtacagaaactgggctattccctttcttcaagtgaaggctgtgggatctattacagctgcaggccggtgtatataccatacaaaagaggaccacacatctgttggtcacagagttcatgtcacaccagtgctagaagtttcatgattttatttcccagcagtgctgatgacaagactgaatgttaccttttctttctgacagattttaaaaattgatatgataaaagcacaactgctatagattctgctgagacctctcatagtaggtatatatgagttttcacagaagactgaaaaataatgcatgatatttgtttgttttttttgataaattggcatgacagagtggggaaaaaaagcaattcacaaaaccatttcatattttttaaaatattgtgcttaaagatggtcctggaagtaaatgactagcagccaattggttttacttaacataccctcaaactgaggcttaaagtattcccttttataaaaataaatgcttggggtagggtggagtggggagggattaaaacccatccaaaaaataaataaaaactatataggtgctatgtatatctttcatctgtaaatgtcagtgtctgaacagcaacacaaattcaaatcattatacgtgtagccagaaactcaagcattttcactaaagttattaaaccaaactcctgtccaatttgacttatacaacatagtcagtctagagttgagagacaaaggtaattataaacctatttgaactagcttcttgtcttaggcctgaaccaaaaaacaacaaacaaacaaaaaacaagaatgaaaaacagaaataaaagaagtagaaaagacaaagaaagaaagcccaaagtcaaagttgttaatatttacaggtttaccagatctggaacattacttatttgaggtcagagaacaaaacaagaacctggccaggtgttgattaccttttagtgaataagctgagtccatatacttgtctaactaagaaagcagtacagaggaaaacaggaacctgatttttttaaaataaattttaaataaaatagaattactacaattctgcaatttcatactacctaaaaaagactagatttgaaaatgtcaagctgatttactttattcacatggagaaaagaatccacaaattaaactgagtccttcactggcatgccagttgactattattagctgtcataagtaaccccg

SEQ ID NO: 1785 - DNA, 1835 bp, Homo sapiens
ggaggaggtggcggcgctggagctcctcccggggaccagcgacccggggagcgagcacgtcgctccgcaccgctcttcctccagccgctgagccgtcccttctcgccatgtcccagagcaggcaccgcgccgaggccccgccgctggagcgcgaggacagtgggaccttcagtttggggaagatgataacagctaagccagggaaaacaccgattcaggtattacacgaatacggcatgaagaccaagaacatcccagtttatgaatgtgaaagatctgatgtgcaaatacacgtgcccactttcaccttcagagtaaccgttggtgacataacctgcacaggtgaaggtacaagtaagaagctggcgaaacatagagctgcagaggctgccataaacattttgaaagccaatgcaagtatttgctttgcagttcctgaccccttaatgcctgacccttccaagcaaccaaagaaccagcttaatcctattggttcattacaggaattggctattcatcatggctggagacttcctgaatataccctttcccaggagggaggacctgctcataagagagaatatactacaatttgcaggctagagtcatttatggaaactggaaagggggcatcaaaaaagcaagccaaaaggaatgctgctgagaaatttcttgccaaatttagtaatatttctccagagaaccacatttctttaacaaatgtagtaggacattctttaggatgtacttggcattccttgaggaattctcctggtgaaaagatcaacttactgaaaagaagcctccttagtattccaaatacagattacatccagctgcttagtgaaattgccaaggaacaaggttttaatataacatatttggatatagatgaactgagcgccaatggacaatatcaatgtcttgctgaactgtccaccagccccatcacagtctgtcatggctccggtatctcctgtggcaatgcacaaagtgatgcagctcacaatgctttgcagtatttaaagataatagcagaaagaaagtaaatctggagcaacttaaaaaatctttcagtagcacataaaaagttcccctctggccccttcccaagtaaaacttttaccgtagtgtttatgtcttgtttctaaatctcttcatagattccatcaacactccagatttaattatctcctcatagttgttattaagctctttttaatggcttcaactttgtatcagtatactgtatttataaactttgtaccacaagagagagtgtagcacccattttacagtgccatgcacatcagagaaagaaactgcatgtttgttgttgatgatgaaataaaaatgctagcgacagtctttcttactggtgcttaagctcttctttgcacaaagctttataaagggaattcaaaggaagccctttagaattagagtcttgagggacagcactaacaggcctttattaagtatgattgattgttaaatttcagggaacatgattggtctgctgtgtatttgaattcatgtaacaaagaactgttacgatgggattctgctcattttattaaaaagctactgacttgactgtcatcctgttcttgttagccattgtgaataagattttaatgttgataattctgttatttacatatctctaatttactttgaaattcaaaggtgaaaataaaaaatgatggcctaagtaaaatttaaaaaaaaaaaaaaaaaaaaaaaaaaaaaaaaaaaaaaaaaaaaaaaaaaaaaaaaaaaaaaaaaaaaaaaaaaaaaaaaaaaaaaaaaaaaaaaaaaaaaaaaaaaaaaaa

SEQ ID NO: 1786 - DNA, 10316 bp, Homo sapiens
ctcctctgccccggggccgccaccgcccgggcgtcggacctggtcccgtgctcgcggtgccgccgccctctgggcctagcccgcccagctcggcgagcggcggcagtgggagccgcgtccgccgcatccgcctcgactcggtgccggcccctggccctcccctcatgactgcggcgcctctgctgccaccgcccgcccggccgccgctcgccgcaggatggatgcggaccgtgcggcgctaacccccgtggctcagctcccgaatcgcccgccttcgagccctcctcgtgagccgcagcagcctcggtgccagcccccgccgcagctgggcccagcggtccgcctgtccctcgttgcggcttgtcggtgctgagtgaggcgtcgtccgggtcggcgcgaacccgcccggccgcggttccctgcagacctctgcgcgggcggctcggcccttcacgcccttttcgttcacgaatccgagcccgctcgcctctctccagcgaaccgaccatgtctggcggcgccgcagagaagcagagcagcactcccggttccctgttcctctcgccgccggctcctgcccccaagaatggctccagctccgattcctccgtgggggagaaactgggagccgcggccgccgacgctgtgaccggcaggaccgaggagtacaggcgccgccgccacactatggacaaggacagccgtggggcggccgcgaccactaccaccactgagcaccgcttcttccgccggagcgtcatctgtgactccaatgccactgcactggagcttcccggccttcctctttccctgccccagcccagcatccccgcggctgtcccgcagagtgctccaccggagccccaccgggaagagaccgtgaccgccaccgccacttcccaggtagcccagcagcctccagccgctgccgcccctggggaacaggccgtcgcgggccctgccccctcgactgtccccagcagtaccagcaaagaccgcccagtgtcccagcctagccttgtggggagcaaagaggagccgccgccggcgagaagtggcagcggcggcggcagcgccaaggagccacaggaggaacggagccagcagcaggatgatatcgaagagctggagaccaaggccgtgggaatgtctaacgatggccgctttctcaagtttgacatcgaaatcggcagaggctcctttaagacggtctacaaaggtctggacactgaaaccaccgtggaagtcgcctggtgtgaactgcaggatcgaaaattaacaaagtctgagaggcagagatttaaagaagaagctgaaatgttaaaaggtcttcagcatcccaatattgttagattttatgattcctgggaatccacagtaaaaggaaagaagtgcattgttttggtgactgaacttatgacgtctggaacacttaaaacgtatctgaaaaggtttaaagtgatgaagatcaaagttctaagaagctggtgccgtcagatccttaaaggtcttcagtttcttcatactcgaactccacctatcattcaccgcgatcttaaatgtgacaacatctttatcaccggccctactggctcagtcaagattggagacctcggtctggcaaccctgaagcgggcttcttttgccaagagtgtgataggtaccccagagttcatggcccctgagatgtatgaggagaaatatgatgaatccgttgacgtttatgcttttgggatgtgcatgcttgagatggctacatctgaatatccttactcggagtgccaaaatgctgcacagatctaccgtcgcgtgaccagtggggtgaagccagccagttttgacaaagtagcaattcctgaagtgaaggaaattattgaaggatgcatacgacaaaacaaagatgaaagatattccatcaaagaccttttgaaccatgccttcttccaagaggaaacaggagtacgggtagaattagcagaagaagatgatggagaaaaaatagccataaaattatggctacgtattgaagatattaagaaattaaagggaaaatacaaagataatgaagctattgagttttcttttgatttagagagagatgtcccagaagatgttgcacaagaaatggtagagtctgggtatgtctgtgaaggtgatcacaagaccatggctaaagctatcaaagacagagtatcattaattaagaggaaacgagagcagcggcagttggtacgggaggagcaagaaaaaaaaaagcaggaagagagcagtctcaaacagcaggtagaacaatccagtgcttcccagacaggaatcaagcagctcccttctgctagcaccggcatacctactgcttctaccacttcagcttcagtttctacacaagtagaacctgaagaacctgaggcagatcaacatcaacaactacagtaccagcaacccagtatatctgtgttatctgatgggacggttgacagtggtcagggatcctctgtcttcacagaatctcgagtgagcagccaacagacagtttcatatggttcccaacatgaacaggcacattctacaggcacagtcccagggcatataccttctactgtccaagcacagtctcagccccatggggtatatccaccctcaagtgtggcacaggggcagagccagggtcagccatcctcaagtagcttaacaggggtttcatcttcccaacccatacaacatcctcagcagcagcagggaatacagcagacagcccctcctcaacagacagtgcagtattcactttcacagacatcaacctccagtgaggccactactgcacagccagtgagtcagcctcaagctccacaagtcttgcctcaagtatcagctggaaaacagcttccagtttcccagccagtaccaactatccaaggcgaacctcagatcccagttgcgacacaaccctcggttgttccagtccactctggtgctcatttccttccagtgggacagccgctccctactcccttgctccctcagtaccctgtctctcagattcccatatcaactcctcatgtgtctacggctcagacaggtttctcatcccttcccatcacaatggcagctggcattactcagcctctgctcacgttggcttcatctgctacaacagctgcgatcccgggggtatcaactgtggttcctagtcagcttccaacccttctgcagcctgtgactcagctgccaagtcaggttcacccacagctcctacaaccagcagttcagtccatgggaataccagctaaccttggacaagctgctgaggttccactttcctctggagatgttctgtaccagggcttcccacctcgactgccaccacagtacccaggagattcaaatattgctccctcttccaacgtggcttctgtttgcatccattctacagtcctatcccctcccatgccgacagaagtactggctacacctgggtactttcccacagtggtgcagccttatgtggaatcaaatcttttagttcctatgggtggtgtaggaggacaggttcaagtgtcccagccaggagggagtttagcacaagcccccactacatcctcccagcaagcagttttggagagtactcagggagtctctcaggttgctcctgcagagccagttgcagtagcacagacccaagctacccagccgaccactttggcttcctctgtagacagtgcacattcagatgttgcttcaggtatgagtgatggcaatgagaacgtcccatcttccagtggaaggcatgaaggaagaactacaaaacggcattaccgaaaatctgtaaggagtcgctctcgacatgaaaaaacttcacgcccaaaattaagaattttgaatgtttcaaataaaggagaccgagtagtagaatgtcaattagagactcataataggaaaatggttacattcaaatttgacctagatggtgacaaccccgaggagatagcaacaattatggtgaacaatgactttattctagcaatagagagagagtcgtttgtggatcaagtgcgagaaattattgaaaaagctgatgaaatgctcagtgaggatgtcagtgtggaaccagagggtgatcagggattggagagtctacaaggaaaggatgactatggcttttcaggttctcagaaattggaaggagagttcaaacaaccaattcctgcgtcttccatgccacagcaaataggcattcctaccagttctttaactcaagttgttcattctgcgggaaggcggtttatagtgagtcctgtgccagaaagccgattacgagaatcaaaagttttccccagtgaaataacagatacagttgctgcctctacagctcagagccctggaatgaacttgtctcactctgcatcatcccttagtctacaacaggccttttctgaacttagacgtgcccaaatgacagaaggacccaacacagcacctccaaactttagtcatacaggaccaacatttccagtagtacctcctttcttaagtagcattgctggagtcccaaccacagcagcagccacagcaccagtccctgcaacaagcagccctcctaatgacatttccacatcagtaattcagtctgaggttacagtgcccactgaagaggggattgctggagttgccaccagcacaggtgtggtaacttcaggtggtctccccataccacctgtgtctgaatcaccagtactttccagcgtagtttcaagtatcacaatacctgcagttgtctcaatatctactacatccccgtcacttcaagtccccacatccacatctgagatcgttgtttctagtacagcactgtatccttcagtaacagtttcagcaacttcagcctctgcagggggcagtactgctaccccaggtcctaagcctccagctgtagtatctcagcaggcagcaggcagcactactgtgggagccacattaacatcagtttctaccaccacttcattcccaagcacagcttcacagctgtccattcagcttagcagcagtacttctactcctactttagctgaaaccgtggtagttagcgcacactcactagataagacatctcatagcagtacaactggattggctttctccctctctgcaccatcttcctcttcctctcctggagcaggagtgtctagttatatttctcagcctggtgggctgcatcctttggtcattccatcagtgatagcttctactcctattcttccccaagcagcaggacctacttctacacctttattaccccaagtacctagtatcccacccttggtacagcctgttgccaatgtgcctgctgtacagcagacactaattcatagtcagcctcaaccagctttgcttcccaaccagccccatactcattgtcctgaagtagattctgatacacaacccaaagctcctggaattgatgacataaagactctagaagaaaagctgcggtctctgttcagtgaacacagctcatctggagctcagcatgcctctgtctcactggagacctcactagtcatagagagcactgtcacaccaggcatcccaactactgctgttgcaccaagcaaactcctgacttctaccacaagtacttgcttaccaccaaccaatttaccactaggaacagttgctttgccagttacaccagtggtcacacctgggcaagtttctaccccagtcagcactactacatcaggagtgaaacctggaactgctccctccaagccacctctaactaaggctccggtgctgccagtgggtactgaacttccagcaggtactctacccagcgagcagctgccaccttttccaggaccttctctaacccagtcccagcaacctctagaggatcttgatgctcaattgagaagaacacttagtccagagatgatcacagtgacttctgcggttggtcctgtgtccatggcggctccaacagcaatcacagaagcaggaacacagcctcagaagggtgtttctcaagtcaaagaaggccctgtcctagcaactagttcaggagctggtgtttttaagatgggacgatttcaggtttctgttgcagcagacggtgcccagaaagagggtaaaaataagtcagaagatgcaaagtctgttcattttgaatccagcacctcagagtcctcagtgctatcaagtagtagtccagagagtaccttggtgaaaccagagccgaatggcataaccatccctggtatctcttcagatgtgccagagagtgcccacaaaactactgcctcagaggcaaagtcagacactgggcagcctaccaaggttggacgttttcaggtgacaactacagcaaacaaagtgggtcgtttctctgtatcaaaaactgaggacaagatcactgacacaaagaaagaaggaccagtggcatctcctccttttatggatttggaacaagctgttcttcctgctgtgataccaaagaaagagaagcctgaactgtcagagccttcacatctaaatgggccgtcttctgacccggaggccgcttttttaagtagggatgtggatgatggttccggtagtccacactcgccccatcagctgagctcaaagagccttcctagccagaatctaagtcaaagccttagtaattcatttaactcctcttacatgagtagcgacaatgagtcagatatcgaagatgaagacttaaagttagagctgcgacgactacgagataaacatctcaaagagattcaggacctgcagagtcgccagaagcatgaaattgaatctttgtataccaaactgggcaaggtgccccctgctgttattattcccccagctgctcccctttcagggagaagacgacgacccactaaaagcaaaggcagcaaatctagtcgaagcagttccttggggaataaaagcccccagctttcaggtaacctgtctggtcagagtgcagcttcagtcttgcacccccagcagaccctccaccctcctggcaacatcccagagtccgggcagaatcagctgttacagccccttaagccatctccctccagtgacaacctctattcagccttcaccagtgatggtgccatttcagtaccaagcctttctgctccaggtcaaggaaccagcagcacaaacactgttggggcaacagtgaacagccaagccgcccaagctcagcctcctgccatgacgtccagcaggaagggcacattcacagatgacttgcacaagttggtagacaattgggcccgagatgccatgaatctctcaggcaggagaggaagcaaagggcacatgaattacgagggccctggaatggcaaggaagttctctgcacctgggcaactgtgcatctccatgacctcgaacctgggtggctctgcccccatctctgcagcatcagctacctctctaggtcacttcaccaagtctatgtgccccccacagcagtatggctttccagctaccccatttggcgctcaatggagtgggacgggtggcccagcaccacagccacttggccagttccaacctgtgggaactgcctccttgcagaatttcaacatcagcaatttgcagaaatccatcagcaaccccccaggctccaacctgcggaccacttagacctagagacattaactgaatagatctgggggcaggagatggaatgctgagggggtgggtgggggtgggaagtagcctatatactaactactagtgctgcatttaactggttatttcttgccagaggggaatgtttttaatactgcattgagccctcagaatggagagtctcccccgctccagttattggaatgggagaggaaggaaagaacagcttttttgtcaaggggcagcttcagaccatgctttcctgtttatctatactcagtaatgaggatgagggctaggaaagtcttgttcataaggaagctggagaactcaatgtaaaatcaaacccatctgtaatttcgagtgggtggagctcttgcttttggtacatgccctgaatccctcactccctcaagaatccgaaccacaggacaaaaaccacctactgggctctctcctaccctgccctcctcccttttttttacccctctcttttttattttttctttgctctttagaacccagtgaaaaataccagggtactggggtgcaactctttcttatgataggtcattagtgctttaagcaaaagatattagcagctttgactgcagcattagcaattaggaaaaaaaaaaaattaagttccctgcggacatgtaactttgccatcagttttgatgtggaaacactgtgatatataaaatgttgttggacaacagtagttttaagagtaaaatatgaaacgtttaaaaagttccaaaaaaagctagctctgtcctttacttattgagacactttaactttttcctttgtatttccattgtattagataaataaatgtgaatgtaaaattgtataaattactgtacttgaatacttctgtttcccagtgttgcttgctggacattttagtgccttggacttctattgcttctgccattagcatcaacttaccagaccccagatcaataaagggcatgtggaaggaaatcgtaggtccatgtgaccccagcagtccagcagtggttatgccaaagggaaattgaaaaagtatttttttaagtcattcaacaactttgtctagagcaggtgtaagatgagtagggtgggaagttaggttggcatcagtggttaaaaacagaaagttctgtttcgggaatagtgaggagggggtgttgtaacaaaattggacaacttaaaagaatggtgtgtgctgggtgaaagacaaagactaaagaatgaggaaacaaacgtgatgcctggccagtgactgtcatataaacctttcttatttgagctaggcttgaacagacgtgacctagaagaaactgaacataaagagaagggggtggggggctagttttcaagttggggaacctgatagtgaaaagtcacagatggagaaaattgctctcagaaaaactgtttggattgctttcctcttgttgcacatgtaccatgcatttctcagcttggggtactacattttgtggaaagttaatctatctatctttccacatctgaattaatcattctaggaaagaatacttattcctactcatttcctttatgatgtccaaatggttgcaggatcataatctattgtgccacctttatttctagaagtacaactaatatgttcacattttcaaataaataatactccccgtaagtaataactgcaaccaatcagtgttattcagtgctatgcctccttgtaatgggtagttattaattattttcagagctttccggaaatactgtcctaactggctatgtttaggatctttgttatctctgaagacaaagaaagaagctaggactcttaattttggggtgcttcttgactcttagttgggaaactgaaaatatttccaaccttttacccacgtcaatggcatattctgggaatcaccaccaccaccaccactaccacagaaagaggctggaggctcctgtaccctgttcattccttaagggccctgcttcccttagtaagtaagtaagttggtctacggccctaaatatgcaaatgagagctgaaggtttttaaaaggtagaaaggaaaagggcaagggcttccacccctgctttaaaatgatttatttattctctgcttgtatttcttgtggagagagtaaggatagaaccaacaaggggctgagtagctgagaaaggggccacccaagagtgaaacatactttataccagaggagcagtggagcctcatgcagcacattatcatttgttatttgggtttaataataattttgacatcttttcactcatacacaaaaaaagtcagaactggtgttatttactgttgatttcatcctcctgtgtatgaaataacaagcctagaggaatgaactagtgctactgaactgtttaaattatttttgtgttaatagtacactttgagtatctttttccacattaaaaactttctgaattataaatgttttccttacattatttaacaatgtacactgttaaaaataaaaataaaaattcaaactttgggggtttctcagcagccgttaattgtacattttgcactaactctgggtgttgcgcttcttgtaagattgcgctttgtgcttcagtttgttacctttgtagacttatttaatgaaaccattcaaataaaccaaacttgcttttgttga

SEQ ID NO: 1787 - DNA, 3996 bp, Homo sapiens
gctgcgcggagggctcggcgatcagcggcggcggcggcagtggggaggccgcagcgccatgggggggcgttagacaggctgcggcggccgaggcgaggggcggcagcggttatctggtccgcggcgaccttcggccgggcccgggggtgggaaggcctggggcgggggtcgtccctggttgcacggggccgcggggcggggctcgccggccgtcggggtgcaggaggcctgggccgctgaaaggagaaggcgccgtcggtcgccaggccctgccgccgggccgcttgacgacgacgctcccgcgggggccccgcctgaggaggacgcggcggcggtggcggcgaggccgcgggaggccgcggaggatggaggagcggaaggaggagggcgaggccgagatccaggagcacgggcccgagcactggttctccaagtgggagcggcagtgcctggccgaggccgaacaggacgagcagctgccccccgagctgcaggaggaggcggcggccgccgcgcagcccgagcacaagcagcagaagctgtggcacctcttccagaactcggccaccgccgtggcccagctctacaaagaccgagtgtgtcagcagccaggactttctctctgggtccccttccaaaacgcagccaccgccgtcaccaatctctacaaagaaagcgtggatacccatcaacgaagttttgatattggaattcagattggctatcagcgacgcaataaggatgtgttggcttgggttaaaaaacgcagaagaactattcgtcgagaagatttgatcagcttcctgtgtggaaaagttcctccaccacgaaactctagagctcccccaagactgactgtagtgtcccctaaccgagctacttcaacggaaactagctcatctgtagagactgatttgcaacccttccgggaagccatagctctgcatggtcttagtggtgcaatggctagtataagcgtgcgttcgagtaccccaggctctcctacacatgtaagcagtggatcgaatgctagtcgaaggagaaatggactccatgatgtcgatttgaacactttcatatcagaagaaatggcactccacttggacaatggtggaactagaaagcgtacctcagcccagtgtggcgatgtcattacagactcaccaacccataaacgcaacagaatgatctaaactgcaaacattttcacacccaccatgctgcttgaaagccacttgatcctcaacatatactataattgcaaaggaaacatgaggccatcttcccttgttcactgtttaagacaagtgaattctatagtggttgccataaaaggaagttctaggtatttatagtagatgcctcttgtaattatggctttcttaaaactataatcctagcagaggacatcagatattgtgtagtcgttagcaagatcatcataggcaaacatatatccgttccaaggctaaaagtgaccttaactgtatttattctcaaagggaaaggaaatatcagatgtttatttggttatagaatgctttttttttttttgggtccatttcctgctgtgttgagtattttgcttcaacagtattgccaggttcctaaaattgtctaaaaacatgatttggcttccatttttgcagctgcactgtaccatgcacctggtttctatatagtaacagtgtgcaattctaattattggactgtgccctgtttttagttttcaaatcaatttctaattctggtgattgtgtgatgtaaagaggtgctatgatggtcatgcaattaatactaaatattgaatcaatgcccagagctttattggattcactttgtgtgtgttagtgctctaaagtagcagtattattattaaactgtccccagagtaaccctgtaggcctaaagtactcagttttaagacaaacactacttcccatgcggggtactttccttatggtaaatgtaaacatgtagactgcattcgaggtgacctaaagtagagaggtcatgaactttgagaatgggcttcctttttggttcagtattagtgagagggagagggagatggatggtggggtaggttttctagtctatcattttacatttttcatggagtccctgcttagtgcagtttccattggaatgggtggaagatgataaagctctcttttttatctactaataatgtgattgcaacttaaaatagcaaaacccaactctccctgtccctccaatccctctcctaaaaagttcagtttggaatctcattctggaaaagatggaatcgcatggagattctctagctgttaggtagacctaaataaaaagttctcaatagattcctcttttgagtaaatataagacctcttgtagctacaatgttttagagcatgtttcatcttcatttttaatatcctgaactgaatgatagtgtttttttagatgaagaactgatgtcagcctgccaggtactgtaatttattctatcatattattatattatatatcaagtaggacagtgaaaaatgtttccttgcaaacttgtagtccagtatcagttacttcctatttttatccttaaaagaccattgcaaatcagtgtaagggtttttccagtaattactcacagcactttgttaaagtttgcaatttcttcagccatttaataatatctttctgtgaagaaactttgctgagttaaccataaatgttcattcattgactgggtgggatgtgaatggaatgttagaaatgttgtgtgaattgaagttctgtattcattatagatgtagcccttatttaaaaaagtgaattccatactaaaactaggaatgaaagtgagagatttctaaacttttgcgaaagtgggtcattttttgtttgactataatagcaggaagaattatagcaatctgtcattttacctgaaacagacaagcctatgtattatgaatactttcaagcttccctttggaatatacaagacatgcgtttggagttacctttgtttttctatcgtaaatttagattctggaattggggtttggtggtgcaatgtgttgctcacaagtggccagaactcctattcctaaaaggattttgagatggaggaacacatatttaattcccctttatgccttggttcttgctcctctttccacgttggataacaattttttggttgttttgtttaagttggtgctctgaagcttaatctcagtaccctttactctgaattgtcaaattttgataaaacgtgccattttctttggtaagagaaagcaggtcttaatgtctgccagaacacaatttatatgccttattggcttcattaaacttttagaaaactttagcatttgttacttttttccattgcatttactttcaaatgcacctaatgaatttgtcacccagtcgcaacttttcccttctctgtcccattgctttctcctttccccgacgcacagaataaacatgaagctcagcagtagaagcgtaatgatttccctcaggaaaaacttctgacagctaggtttttcaagggtttccctgtgctagctgagatgcaaaacaaatcatggaagattgcatacctgtgtggtattttaaaaacaagttgactttttcagtttcttgaacggttaagggtggatttaaaaactagacagtttagttttggggaacagaagctctcttcgtcttaagccagattctctgattcttttagacgtcatagctccttagttctgctcctgtcgccctaacttggcatgggcaagttgaagttcatccttagactgcagcgttctgagcatggctgaagtattaaaatgtttaatattttttagagcaaaattgatggaaagcatttggctgaatctaaagacctgcagtcagattcttcaatgtggtttacccaactggagtagtgataaacaccttaatcataaaatgaataaaaacaaaaaaaccaaaaaaaaaaaaaaaaaa

SEQ ID NO: 1788 - DNA, 4257 bp, Homo sapiens
catagacttaccattgggttacgtcttgataaagccatcataaactaaaaatatctgcatttagtacagctaacctaccaaacatcatggcttaacctagcctaccttaaacatgctcagaataattaacattagccttcagttgggcaaaatcatctaacgcaaagcctattttataataaagtgttgaatatttcatgtaatttattgaatactgtactgaacgtgaaaaagagtggctatacgactactccaagtaccgtttctactgaatgtgtatcactttcatatcaccaaaaaactttaagtggaaccatcatatacctgggactgtctgtaattcaaaatctttctagacaaggaaggaatcaccagtagcactgctgggctatgggtaggtgggcaactacctactaggtgtaaatctgtcaaccaaaaaagtaaattatggtggctttaagggagaaaatgttcctctgaatgtgtttaaaatcccatgggtgtagctacttaaatgaagaaatctggtgagtacttagctatttaaaatttaattctttgcaggtacttactttacaagaagtattcttatatagagagattcatattgctataaatatgtacataatagctaacatgcgcttaccactggcagacactatgctgttatttaataggcaataatcctatgaattagtattattagtatcaccatttttcagaatttaagttttcagaggcaccaagagtttgaactttaagacatttagctaataaaaaaatgtggccaggatttgaatccaagggaactgaattttggagctggcactcttaaacactatacaatgcagttaaatatatgtagtttactgcccataataaatttttccaaaaaagagatggcttcttaaaaattttaaattagattcagattagtatagacacttgcaagtcaatgatgcttaaaaactaaactaaaaccctatgccagttgagtgtttatttcctggaatgtttactcacatacaccttatggtggagaggggagtttataattggccacagagcctgagacctaatatttttgaaatcataatatattttacagtacttcacaatttacaaagcatatttacatacattgtatcacatgaacctcaaaataatgctgtgaaatggggcagataattctgtaaacaggcattattcttaactttatagatgattaatgaggcttacaatgataagtcatttccttaaataacacaattctctcaaaatctaagatgttccaaatgactgaatgcattatgaattagcctatcataggctttatcatctgtcacataacatttaaaaaaagatttctcacaataaaccaaaataaaattttactttattttatttctgctttatctacaataaatattataattcaacagtaattactattgttgaactagcaaaacccacataacaaaataaaaatcagaacatgaaaagctatagtaaggagaatgagaacaagtatggatcataaaatccagaattaggagcgaaatggtccaaaaattatgagattaagatcaatgattacataaagcactcagcatttttgtaattacttaaatttgtaaagtgccttcaaaaatttgttactcttttataatccctaagagatcactgagagacaataatagcctttacacagcagatgaagaacattttgaaagtactatgaaattcagttattatttttgtttaaaagaaaacatcttgtgattctaaatcacaagagcccgaaattctttctgaatataagcaatgccatttacaaacattcctgctgcacccatcttctacaccccctgttgtaatgaattcgcatacctgcctccgattacaggctggattgccccaaagtagtcttctcagaaacctatctacacagttagcttctttctcttgtgcatcttcaaactctctttgtctttagcatcaacatgatatactttctgatatttcccatcttaaacttttattgttttttcttatctcaagaaaaccctgccttgactcacggccattcctccagttgtcacaattccatccctcttctcctttagaaagtcaaacttctcaaagtatggagaaaacaataaccatattttaaattggcaatcaaacttcaacttgctccatactggcttctgatcccctaatgctctccaaattcctcttgttaggtcgccaaagttaaatgaattctttttagtttctatcttatttggcccctccagctgtacttgatactttgtccacacctttccttcttgaaacctccctctcttggctcctacaacaccatgctctcttttctcctaaatttatggccatttctcaatctcctttattggcttcttctcaactactaaatgttagaactactcaggactctgggcttttactatatactccatttcctaggcagtctcatacatgccctgggctttaaataccatctatctgatagtatctctaatatagatctgtcttctgagttccagaacttagcaattctattagatgtctcctgggtattgcaatactcagtaagttcatatctgacagagaccttctaaactgtttatcttttaacctttcctatttcactaaatggctcttccaccatccaactagttgcaaatgctaagaacctaccatattcaaatgttgccatgccttgtggtgttcatactacttaccaagatatgtcaaatcgatgtcctcctcttcatctgctgtcatctccccagtcaaagccctcttatcttgagcacactgtttcaatagcttcctaactagtttccttctatctttgctcccctccaattcactctccatacagcagccagaattattgtttaaaaatgtatactgggtcatgtcctgcccctaagatacggaaatggctctttcttgcatatgaaatccaaatgcggccttgcctgaatctaatcctgcctaggtctgcagcttcagcttgtgctactctagccattactcctatgtttccatcatgactgattctctttcagtttctcagattcaccaagctctttgcatgtgaattgggagtaaaatcgtccaaaaattaagaggttaggattaaatgattacatgcctttcctttgcttagaatgttgttccacactccccactttggcttcaagactttgttaacacagttctgtctactgagagtgtcctttccctcatctctgcctgatgaagttctattcatctttaggactgatcttaaatgtcatcttcataaagtcttcctggtcaaattttccctgtaagcatactgagttacttttttctccatatacctaaagataattttgcatatgtctctgttataacatttatcaccgtactgcaatcattttttaaatttctgccacattagaactgtacaatatgagatacgtgaatataggactgggccttctttagatccccaaatttagcaggtgcctaacatcatccaatctgtcacccattaatattgctttaagaataagagccatcttacatggcaacaaccactagtgaagattgtatttattaacttgttagtgtttgtcatcacggtgacatacacatattcagaaaaatgagtcaatattaataattaaagacgttactgtgatgaagtttcctgaaatctgagctcatctgtatacccatatccaatgacttgaatgtctcaatcaattcattggctagcacaattctcaagccttattagggaccataatttctatggttgacatcttaatgctgagtaggagccggaagctttgtggactctcaggttcatgcacctgaaagtcctgtgcttaagtgtgtgcatgatcttgctcagaagcaccaagaacaggggtgagaagagagaatgtagaacatccattgttatacaagaggcagtgacaacagagatggcctatttaacttacttcaaaagcctttaattctcaagcaccaggaaaacaattttagagctgactacaatagatcttttgctagactgttctgaagactagttttttagaaagtaaaaccatattaccagaatattaatccacaataaggttgaatacaatttgttaaagaacagactccatgtactattacaaaaatgaggtctgacctgaaacaccatccatttgaaatatttaaaaaaaaaaa

SEQ ID NO: 1789 - DNA, 2341 bp, Homo sapiens
agtgtaagcagtgtgcaaacaaggtgttacagcacatgaaggccgtgcaggcagatcaggagcgggagaggcagcggcggctggaagtagaacgtgaggcagagaagaagcgtgaggctaagcagcgagctaaggaagctcaggagcgggaactgcggaagcgggagaaggcggaagagaaggagcgccggagaaaggagtatgatgccctcaaagcagccaagcgggagcaggagaagaaacctaagaaggaagcaaatcaggccccgaaatctaagtctggctcccgtccccgcaagccaccaccccggaagcacactcgttcctgggctgtgctgaagctgctgctgctgctgctgctatttggtgtggcgggagggctggttgcttgtcgggtgacagagctgcagcagcagcccctctgcaccagcgtgaacaccatctatgacaatgcggtccagggtctacgccgccatgagatcctccagtgggtccttcagaccgactctcagcagtgagcttgttcccagcacctgctgcctcccagccttggagtttggattcctatggaattgggttctgctggacacaacctctttttagcatcagacctacctgccatcatcaaatggctgcagattggtacatgagacctcctctttgtaggacttcttcattccttagtcagggttccctgaaggaatgaggagaaatgggaggtggcgggggggcgtggggggcagttacctgcatgcctaaaggagtaggcttgggggtggggagagagaaaacatagccttttctagttgttatataaagctgtgtaaaggcaaggctcgtttctactaaatggtcagctgtcactacatttatacttttgtatgccacaaaccctttcattcctccctgggaatcagggtagatcaggaggaactgggggggactagaacaccacgctcagtaaatccagtctaaactgggaggtaggggtattcctgttttctttaggacctcagagatgtaagcattttagcagccacacaaaatctctggctatgaaagggacttcatgaccatccagtccaatataacacttgcagacagagaaactgaggtcttccatgacttgcctagtctcccagctagtttgaggcaaaactggattcccactctggtattctttcttccctttacatcattttccctcctttataatgtcctgagagaccagaactcacaccagaatcgattattcctcaggtgaagcatagactctttcatggtagacagatttcacgactcagagatagaaatctcttgctatcatcaggtcacgggcagctcctgtggagtcctgcccaacttatgtggcttccataaaatggcaacagtccaggctccttgcctaattttagagcattaactccctaattgccagtaagcaaggaggtggatctctgcaaacctacactgtctatgacagctctagttgtacttggtgtgactaaatacctcaaaggcaacctgcttctgcaggttttgaagtgtcagcttcataagacactgaggtttagaattgtttgattctagaccataactgaagggcataaatggaaacaggatatgaagggaaacaagtagcatcatggagctgaaaagtggtgcatcacccaatggctagcacaaacaaggatcacactgtccattctcttgtctgctaaattaagcattttcttgcctcctttgcttcatcttttcacaacagctggatagagggatcagaaatgactgtgtcatggtgctcattcactgcaaactcccagttgcaagctccttggctcccccggagggagcaagaatctcatagttcagagacacagagggccttttagccctaatgaccttttggatgggactgcaactcatgactatcctgatattggaagaaaggactttgttaatcttctcccccatagctctgctgcgtaggtctacatcttactcagaatcactacacattcctttagtcttcctccaagctccagagccattggtacaaatgctttattgaaactaaatacataatacacacaatgagatgaagacaatatagaagtccgcatagtcatcataatcccgttccttggccggttgaggcagctcagtggctgagcccagtcaagccaacccgcagcttcactcacgacttcaagatttgatgctaattcttttggatttctacagttattaaataagtgtctgagtggacaaaaaaaaaaaaaaaaaaaaaaaaaaaaaaaaaaaaaaaaaaaaaaaaaaaaaaaaaaaaaaaaaaaaaaaa

SEQ ID NO: 1790 - DNA, 1787 bp, Homo sapiens
gggatagactggaggggaaggtggacaggtctggagtacagtaggtggagggagggaagcacaggtttggggcactgaattttgtgctgtagggagaagggaggtagggagaaagaaggaaggtagacaggctattttggggtagaggatgtagaagaatgcttaatacctatagtggagtaagagaagggcaaggcagaggtgtatgtggacatgtctgtaactagaaaggcataggtgatggattggagtggtggtggtggtggtgggggaaataggatgcccaggtttagggcaggaaatgactgcttaagttggagagagctaggaacacaggttgcttaagagagtatggaagatccaaggagtggaagtatggggagagattggaacactttgagtttgagagatgaaaggggccaagatttttaggtcactgagagtctaaggaagatcaggcagagtgcagaagttggaaaaataactaaatggagaggattaaattccatactgagagaaactggagattgaggggtggggggacctggatcctggaatgatgttaatggaaagtggaggacattaaactcagtgtcatatctgaaagttcatactcctagggtcagagagatcgttgagcctgcttttaattccagaacccagtaaatgaggaagggggaaggggtaagggagagctgagtgcacatccccaaatttgggagaggtgtgtagtgggtatcatcctagcatattggtttgacgagtggacagaagggccacacagggtcacgaggagcgcaccaagagtgaatggaaatgggattgcagcaggtgcagggcagatgtctttgtgaaactgcaagagaccaggcccagtggccagtagcattcaagggctatgcataagagaggaagaaagggataccttggtgcagtgtctcagataccctggtgctttctgggtaatgggtcagtattcaggcagcatggggtgatgtaatatctgagtcccatgctataggcagacagaagtaatgtacacctagctcctaaaagtggcagaattggagctttctgactcttaacactctttcaaggcgtgaataactgatctggtttgttgactttttctcccaaatggttcaggtaaaatttagttggaggcttttggattctctggtattttgatttgagttgggaagtgtaatgttagctttattgaggaaagacacttatgggttgggcggacatatggccttcagcttgccaaacacatgggaagtaacctttaggggtttgaacacagacatttatttcagtgcaagtctcattcactgttctgtggcttgtgttagattcttaggggtttgaaaggattaagcaaactactttgagactgcttcagtaagcaaggtttcctagaatcttggaaaacgatttcccttttgacagttgaaaattaagtcttgtcagattttgctaagaaataaatttcatcatgttgcagaaataacttcaattatcactctgtgggcttcacgtaatgtgtagtgtggtacctagtatgatttcaaataaaaggttcgctttggtagcttgggagctttctgggttgattagttttcttcttttgtcgatttaggaagtatcttaatgcagccattgtatgttcgaataataagtttgagtggaagtgggaatcttgcctaaacataatgagggcggagcagaacaccaaattttaagtaatcggaatccgttaatataaatattaaaaaaaaaaaaaa

SEQ ID NO: 1791 - DNA, 2400 bp, Homo sapiens
ggtctcactctgttgctgtcttcacggagagcaggagcagaggctttgagaagccagtgggccttggcctcagccctgccggcagagggtccccaccatgcagctgaagtgccagggtgcttgtgaagtctaagcccttgtctggcatttgtcaggaatataggcgcacacttaagcggcccgggcgggtaccgccgtcccgccatggctctgaggcgcgccctgcccgcgctgcgcccctgcattccccgcttcgtccagctgtccacggcgccggcctcccgcgagcagcccgcagcgggcccagcggccgtgccaggaggtgggtcggccacggcagtgcggccgccggtgcccgccgtggacttcggcaacgcgcaggaggcgtaccgcagccggcgaacctgggagctggcgcggagcctgctggtgctgcgcttgtgcgcctggcccgcgctgctggcgcgccacgagcagctgctgtatgtttccaggaaacttctaggacagaggctattcaacaagctcatgaagatgaccttctatgggcattttgtagccggggaggaccaggagtccatccagcccctgcttcggcactacagggccttcggtgtcagcgccatcctggactatggagtggaggaggacctgagccccgaggaggcagagcacaaggagatggagtcctgcacctcagctgcggagagggatggcagtggcacgaataagcgggacaagcaataccaggcccaccgggccttcggggaccgcaggaatggtgtcatcagtgcccgcacctacttctacgccaatgaggccaagtgcgacagccacatggagacattcttgcgctgcatcgaagcctcaggtagagtcagcgatgacggcttcatagccattaagctcacagcactggggagaccccagtttctgctgcagttctcagaggtgctggccaagtggaggtgcttctttcaccaaatggctgtggagcaagggcaggcgggcctggctgccatggacaccaagctggaggtggcggtgctgcaggaaagtgtcgcaaagttgggcatcgcatccagggctgagattgaggactggttcacggcagagaccctgggagtgtctggcaccatggacctgctggactggagcagcctcatcgacagcaggaccaagctgtccaagcacttggtagtccccaacgcacagacaggacagctggagcccctgctgtcccggttcactgaggaggaggagctacagatgaccaggatgctacagcggatggatgtcctggccaagaaagccacagagatgggcgtgcggctgatggtggatgccgagcagacctacttccagccggccatcagccgcctgacgctggagatgcagcggaagttcaatgtggagaagccgctcatcttcaacacataccagtgctacctcaaggatgcctatgacaatgtgaccctggacgtggagctggctcgccgtgagggctggtgttttggggccaagctggtgcggggcgcatacctggcccaggagcgagcccgtgcggcagagatcggctatgaggaccccatcaaccccacgtacgaggccaccaacgccatgtaccacaggtgcctggactacgtgttggaggagctgaagcacaacgccaaggccaaggtgatggtggcctcccacaatgaggacacagtgcgctttgcactgcgcaggatggaggagctgggcctgcatcctgctgaccaccgggtgtactttggacagctgctaggcatgtgtgaccagatcagcttcccgctgggccaggccggctaccccgtgtacaagtacgtgccctatggccccgtgatggaggtgctgccctacttgtcccgccgtgccctggagaacagcagcctcatgaagggcacccatcgggagcggcagctgctgtggctggagctcttgaggcggctccgaactggcaacctcttccatcgccctgcctagcacccgccagcacacccttagcctccagcaccccccgcccccgcccaggccatcaccacagctgcagccaaccccatcctcacacagattcaccttttttcaccccacacttgcagagctgctggaggtgaggtcaggtgcctcccagccctgcccagagtatgggcactcaggtgtgggccgaacctgatacctgcctgggacagccactggaaacttttgggaactctcctcgaatgtgtgggcccaaggcccccacctctgtgacccccatgtccttggacctagaggattgtccaccttctgccaaggccagcccacacagcccgagccccttggggagcagtggccgggctggggaggcctgcctggtcaataaaccactgttcctgc

SEQ ID NO: 1792 - DNA, 3866 bp, Homo sapiens
ctccgcagaagatttgttgccgtcatgtcggctgcgattgcagctctggccgcttcctatggttcgggttcagggtccgaatcggactcggacagtgagagcagtcggtgtccgctgccagccgccgactccctcatgcacttgactaaatcgccttcatcaaagccgtctctagcagtggcagtggactcggctccggaggtggcagttaaggaagatttggagactggagttcaccttgaccctgccgtcaaagaagttcagtataatcctacctatgagaccatgtttgctcctgagtttggaccagaaaatccctttaggacacagcaaatggctgcccctagaaatatgctttctggatatgccgaaccagctcatatcaatgatttcatgtttgagcagcaaaggagaacttttgcaacatatggttatgcattagacccttcattagataatcatcaagtgtctgctaaatatattggttctgtagaagaagctgaaaaaaatcaaggtttaactgtatttgaaactggtcagaagaaaacagaaaagaggaaaaagtttaaagaaaatgatgcatccaatattgatggttttttgggaccatgggcaaaatatgtggatgaaaaagatgtagccaaaccttcagaagaagagcaaaaagaattggatgaaatcacagcaaagaggcagaaaaaaggaaaacaggaagaagagaaacctggggaggagaagacaatcttacatgttaaagaaatgtatgactatcaaggcaggtcctatcttcacatacctcaggatgttggtgttaatctacggtcaactatgccacctgagaagtgttatcttcccaaaaaacaaattcatgtgtggtctggacacacaaagggcgtcagtgcagtcagattgtttcctctctctggccatttattgctgtcttgttccatggactgtaaaattaagctatgggaggtttatggagaacggcgctgtctgagaacatttattggtcacagtaaggctgttagggatatctgcttcaatactgcaggaacacagttcctcagtgcagcctatgacaggtatcttaagctctgggacactgagacaggacagtgtatatcaagatttacaaaccgaaaagtaccttattgtgtcaaattcaatcctgatgaagataagcaaaatctctttgtggctgggatgtctgataagaagattgtgcaatgggacattcgaagtggagaaattgtgcaggaatatgatcggcatttgggagctgtcaacaccattgtttttgtggatgagaataggagatttgtgagcacatctgatgataaaagcctaagagtttgggaatgggatatccctgtggatttcaagtacatagcagaacccagtatgcactcaatgcctgcagtgactttgtctccaaatggaaaatggctagcatgccaatcaatggacaaccaaatcttaatttttggagcacagaacagatttagattaaataagaaaaaaatttttaagggccatatggtagcaggctatgcttgtcaggtggacttttcaccagacatgagttatgtgatttcaggagatggaaatggaaaattaaacatttgggactggaagaccacaaaactctacagtcgatttaaagctcatgataaagtgtgtataggtgcagtgtggcatcctcatgaaacttctaaggtcataacatgtggttgggatggtctcattaaattgtgggattaatgagattaatccttaaactagctgggatcatttttgatccattgtcatatttatatttaattattaaatgtatctgatgataacttgatttacagataatgttgatgacattgaccctttgtttaaaaaaagaaactgtaaatttgacataatttcatttgcaacttcattttgttttttataaatgttatttatacagaaagtggctattgactttctatttgacaagtagttataattggcaagcagtttgagtttatactcatgacatactgaaagcatctctttggggtcaagaaagaatccctagtggatttgggattctagaggaggtgttataattaattattcagaaaaatgcatgtatttacctcttcaaccaaaagggcagtaaagaatagggataatatattttaatgtaaatttggaagaaggataaaatcacccacagttactctccctattattttcactgggtcaagttttaatcttttggcttcatgagttccactccctttgatgatatatgttgtatatttttagttgtaaagcagtaatctttaactgtagcattcctctaattataaacagtgaaaaatcaaaatcagtccagagttcttttgttgacttaattcctgatcagtatagacaggactatatatatttaatcagagaattacattatatctgaagatggagctcaggagaatgcaccaagactttgaattgtatttacattcactgtcagtaaagacctggctacgctttgagaaatcaggatctcctaggtcattgcttcgcagctgtgattactgaaatcctcctcataggagataaagtacgaggggtagagtccaagatgtcaacttgtaatttctttgaagtcatatgttttatctttaaaattattcttattttacctgtgaatatatacaacagaactttttaagattaaaaaatttttaaacctctatgtctgaaaaaaaaaatgacactcctggaagatggctagggttccccagtttgagaagcagtggccatggtgaaaaatagtttttgaaaacatcagattataaaatcaagatagtccggacgcggtggcacatgcctgtaatcccagcactttgggaggctgaggcaggtgaatcacctgaggtcaggagttcaagaccagcctggccaacatagtgaaaccccgtctctactaaaaacacaaaaattagccaggcttggtggctggcgcctgtaattccagctactcagaaggctgaggcagggagaattgcttgaacccaggagtggaggttgcagtgagctgagatcatgccactgcactccagcctgggcgacagagcgagactccacctcaaaaaataaaatcaagataacctcttgaatgtaatagctcatagcactttaatttggcaagccatttttcctgttttattataaatctatattagatgtttgaatatggtttgaaatatttcactaccgtgctgaaaaaggttggttgatagcagcttggagtgctaactggaagatcaaaatcatgtctcttgctgataacctaagagcattaagctctgagtccagtgaggtcatagcagtgtatgctccttgcccttacggagtgtctgtttttagaaatttagattttaaaaggcgtgggacatacgaccaggccctatagccacataaatataaatttcatagaaaaagaataaaagcggagatatattttttgacacagaggcacccaaagaaatacaaacattgcctagctgctgccatttctgtaactgcccagaagggtgacagatttctgaaggggaaaggattcagatatgaccttttctttagtcccaaccactagttttaacaaatgtgaattattgaaatgtgaagggacaaaaagaatcatacatttaaactgtcttgttcagcataccaatattgtatgttacaaatcatcatttctaaatctggattgattctgttgtgtttttgactgtttctaaagtaagtgtgtataaaagtctcctttttaaaaagatcatatttttaaataaagcattttttgtagaaaaaaaaaaaaaaaa

SEQ ID NO: 1793 - DNA, 2153 bp, Homo sapiens
gcacgaggcgaatccctgcttaaaggccttgctttcttgtctaacgccgcaaccagtcctctgagttgccaacgtctttcttcttgtctcgacgccccgtcgtccggccacagcgattctctgcttagcaggatcggtccacagcgggacgtgagtccctttcctcctcgcggcttaccgcctctctccgcctagtgccaggtgctaataaagttgttgtttcaaatgcggccaggaacatcgcgagcggggaccaatcagagagtagctttgcctctataacggcgcgagagtgagacgtcatcggtgagcgactaacgctagaaacagtggtgcgcggagaggagaggcctcgggatgtctctggcagatgagctcttagctgatctcgaagaggcagcagaagaggaggaaggaggaagctatggggaggaagaagaggagccagcgatcgaggatgtgcaggaggagacacagctggatctttccggggattcagtcaagaccatcgccaagctatgggatagtaagatgtttgctgagattatgatgaagattgaggagtatatcagcaagcaagccaaagcttcagaagtgatgggaccagtggaggccgcgcctgaataccgcgtcatcgtggatgccaacaacctgaccgtggagatcgaaaacgagctgaacatcatccataagttcatccgggataagtactcaaagagattccctgaactggagtccttggtccccaatgcactggattacatccgcacggtcaaggagctgggcaacagcctggacaagtgcaagaacaatgagaacctgcagcagatcctcaccaatgccaccatcatggtcgtcagcgtcaccgcctccaccacccaggggcagcagctgtcggaggaggagctggagcggctggatgaggcctgcgacatggcgctggagctgaacgcctccaagcaccgcatctacgagtatgtggagtcccggatgtccttcatcgcacccaacctgtccatcattatcggggcatccacggccgccaagatcatgggtgtggccggcggcctgaccaacctctccaagatgcccgcctgcaacatcatgctgctcggggcccagcgcaagacgctgtcgggcttctcgtctacctcagtgctgccccacaccggctacatctaccacagtgacatcgtgcagtccctgccaccggatctgcggcggaaagcggcccggctggtggccgccaagtgcacactggcagcccgtgtggacagtttccacgagagcacagaagggaaggtgggctacgaactgaaggatgagatcgagcgcaaattcgacaagtggcaggagccgccgcctgtgaagcaggtgaagccgctgcctgcgcccctggatggacagcggaagaagcgaggcggccgcaggtaccgcaagatgaaggagcggctggggctgacggagatccggaagcaggccaaccgtatgagcttcggagagatcgaggaggacgcctaccaggaggacctgggattcagcctgggccacctgggcaagtcgggcagtgggcgtgtgcggcagacacaggtaaacgaggccaccaaggccaggatctccaagacgctgcagcggaccctgcagaagcagagcgtcgtatatggcgggaagtccaccatccgcgaccgctcctcgggcacggcctccagcgtggccttcaccccactccagggcctggagattgtgaacccacaggcggcagagaagaaggtggctgaggccaaccagaagtatttctccagcatggctgagttcctcaaggtcaagggcgagaagagtggccttatgtccacctgaatgactgcgtgtgtccaaggtggcttcccactgaagggacacagaggtccagtccttctgaagggctaggatcgggttctggcagggagaacctgccctgccactggccccattgctgggactgcccagggaggaggccttggaagagtccggcctggcctcccccaggaccgagatcaccgcccagtatgggctagagcaggttttcatcatgccttgtcttttttaactgagaaaggagattttttgaaaagagtacaattaaaaggacattgtcaaaaaaaaaaaaaaaaaaa

SEQ ID NO: 1794 - DNA, 7311 bp, Homo sapiens
gaactcgggttgcgcacttcccggcgctgggaacgcggagcggacgcagtctggccgccattgcgctgcggggaaagcggcctcttgtgtgagggcctgtgggattctccggatatggccggagtgtttccttatcgagggccgggtaacccggtgcctggccctctagccccgctaccggactacatgtcggaggagaagctgcaggagaaagctcgaaaatggcagcaattgcaggccaagcgctatgcagaaaagcggaagtttgggtttgtggatgcccagaaggaagacatgcccccagaacatgtcaggaagatcattcgagaccatggagacatgaccaacaggaagttccgccatgacaaaagggtttacttgggtgccctaaagtacatgccccacgcagtcctcaaactcctggagaacatgcctatgccttgggagcagattcgggatgtgcctgtgctgtaccacatcactggagccatttccttcgtcaatgagattccctgggtcattgaacctgtctacatctcccagtgggggtcaatgtggattatgatgcgccgagaaaaaagagataggaggcatttcaagaggatgcgttttcccccttttgatgatgaggagccgcccttggactatgctgacaacatcctagatgttgagccactggaggccattcagctagagctggaccctgaggaggacgcccctgtgttggactggttctatgaccaccagccgttgagggacagcaggaagtatgtaaatggctccacttaccagcgctggcagttcacactacctatgatgtcgactctctaccgcctggctaatcagctcctgacagacttggtggatgacaactacttctacctgtttgatttgaaggccttctttacgtccaaggcactcaatatggccattcctggaggccccaaatttgaacctcttgttcgagacatcaacctacaggatgaagactggaatgaattcaatgatattaacaagattatcatccggcagcctatccgcactgagtacaagattgcttttccttacttgtacaacaatcttccacaccatgtccacctcacctggtaccatactcccaatgttgtattcatcaaaactgaggatcctgacttgccagctttctactttgaccctttgatcaacccaatctcccataggcactcagtcaagagccaggaaccattgccggatgatgatgaggaatttgagctcccggagtttgtggagcccttcctgaaggacacacccctctatacagacaatacagccaatggcattgccctgctctgggccccgcggcccttcaacctacgctctggtcgcacccgtcgggccctggacataccccttgtcaagaactggtatcgggagcattgtcctgccgggcagcctgtgaaagtgagggtctcctaccagaagctgcttaagtactatgtgctgaatgccctgaagcatcggccccctaaggctcaaaagaagaggtatttgttccgctccttcaaagccaccaaattctttcagtccacaaagctggactgggtggaggttgggctccaggtttgccgccagggctacaacatgctcaaccttctcattcaccgcaaaaacctcaactacctgcacctggactacaacttcaacctcaagcctgtgaaaacgctcaccaccaaggaaagaaagaaatctcgttttgggaatgctttccacctgtgtcgggaagttctgcgtttgactaagctggtggtggatagtcacgtgcagtatcggctgggcaatgtggatgccttccagctggcagatggattgcagtatatatttgcccatgttgggcagttgacgggcatgtatcgatacaaatacaagctgatgcgacagattcgcatgtgcaaggacctgaagcatctcatctattatcgtttcaacacgggccctgtagggaagggtcctggctgtggcttctgggctgccggttggcgagtctggctctttttcatgcgtggcattacccctttattagagcgatggcttggcaacctcctggcccggcagtttgaaggtcgacactcaaagggggtggcaaagacagtaacaaagcagcgagtggagtcacattttgaccttgagctgcgggcagctgtgatgcatgatattctggacatgatgcctgaggggatcaagcagaacaaggcccggacaatcctgcagcacctcagtgaagcctggcgctgctggaaagccaacattccctggaaggtccctgggctgccgacgcccatagagaatatgatccttcgatacgtgaaggccaaggctgactggtggaccaacactgcccactacaaccgagaacggatccgccgaggggccactgtggacaagactgtttgtaaaaagaatctgggccgcctcacccggctctatctgaaggcagaacaggagcggcagcacaactacctgaaggacgggccttacatcacagcggaggaagcagtggcagtatataccaccacagtgcattggttggaaagccgcaggttttcacccatcccattccccccactctcctataagcatgacaccaagttgctcatcttggcattggagcggctcaaggaagcttatagtgtgaagtctcggttgaaccagtctcagagggaggagctaggtctgatcgagcaggcctacgataacccccacgaggcgctgtcccgcatcaagcgtcacctcctcacacagagagccttcaaagaggtgggcattgagttcatggatctgtatagccacctcgttccagtatatgatgttgagcccctggagaagataactgatgcttacctggaccagtacctgtggtatgaagccgacaagcgccgcctgttcccaccctggattaagcctgcagacacagaaccacctccgctgcttgtttacaagtggtgtcaaggcatcaataacctgcaggacgtgtgggagacgagtgaaggcgagtgcaatgtcatgctggaatcccgctttgagaagatgtatgagaagatcgacttgactctgctcaacaggctgctgcgcctcatcgtggaccacaacatagccgactacatgacagccaagaacaacgtcgtcatcaactataaggacatgaaccatacgaattcatatgggatcatcagaggcctgcagtttgcctcattcatcgtgcagtattatggcctggtgatggatttgcttgtattgggattgcaccgggccagtgagatggctgggccccctcagatgccaaatgactttctcagtttccaggacatagccactgaggctgcccaccccatccgtctcttctgcagatacattgatcgcatccatatttttttcaggttcacagcagatgaggctcgggacctgattcaacgttacctgacagagcaccctgaccccaataatgaaaacatcgttggctataataacaagaagtgctggccccgagatgcccgcatgcgcctcatgaaacatgatgttaacttaggccgggcggtattctgggacatcaagaaccgcttgccacggtcagtgactacagttcagtgggagaacagcttcgtgtctgtgtacagtaaggacaaccccaacctgctgttcaacatgtgtggcttcgagtgccgcatcctgcctaagtgccgcaccagctatgaggagttcacccacaaggacggggtctggaacctgcagaatgaggttactaaggagcgcacagctcagtgtttcctgcgtgtggacgatgagtcaatgcagcgcttccacaaccgcgtgcgtcagattctcatggcctctgggtccaccaccttcaccaagattgtgaataagtggaatacagctctcattggccttatgacatactttcgggaggctgtggtgaacacccaagagctcttggacttactggtgaagtgtgagaacaaaatccagacacgtatcaagattggactcaactccaagatgccaagtcggttccccccggttgtgttctacacccctaaggagttgggtggactcggcatgctctcaatgggccatgtgctcatcccccaatccgacctcaggtggtccaaacagacagatgtaggtatcacacactttcgttcaggaatgagccatgaagaagaccagctcattcccaacttgtaccgctacatacagccatgggagagcgagttcattgattctcagcgggtctgggctgagtacgcactcaagaggcaagaggccattgctcagaacagacgcctgactttagaagacctagaagattcatgggatcgtggcattcctcgaatcaataccctcttccagaaggaccggcacacactggcttatgataagggctggcgtgtcagaactgactttaagcagtatcaggttttgaagcagaatccgttctggtggacacaccagcggcatgatgggaagctctggaacctgaacaactaccgtacagacatgatccaggccctgggcggtgtggaaggcattctggaacacacactctttaagggcacttacttccctacctgggaggggcttttctgggagaaggccagtggctttgaggaatctatgaagtggaagaagctaactaatgctcagcgatcaggactgaaccagattcccaatcgtagattcaccctctggtggtccccgaccattaatcgagccaatgtatatgtaggctttcaggtgcagctagacctgacgggtatcttcatgcacggcaagatccccacgctgaagatctctctcatccagatcttccgagctcacttgtggcagaagatccatgagagcattgttatggacttatgtcaggtgtttgaccaggaacttgatgcactggaaattgagacagtacaaaaggagacaatccatccccgaaagtcatataagatgaactcttcctgtgcagatatcctgctctttgcctcctataagtggaatgtctcccggccctcattgctggctgactccaaggatgtgatggacagcaccaccacccagaaatactggattgacatccagttgcgctggggggactatgattcccacgacattgagcgctacgcccgggccaagttcctggactacaccaccgacaacatgagtatctacccttcgcccacaggtgtactcatcgccattgacctggcctataacttgcacagtgcctatggaaactggttcccaggcagcaagcctctcatacaacaggccatggccaagatcatgaaggcaaaccctgccctgtatgtgttacgtgaacggatccgcaaggggctacagctctattcatctgaacccactgagccttatttgtcttctcagaactatggtgagctcttctccaaccagattatctggtttgtggatgacaccaacgtctacagagtgactattcacaagacctttgaagggaacttgacaaccaagcccatcaacggagccatcttcatcttcaacccacgcacagggcagctgttcctcaagataatccacacgtccgtgtgggcgggacagaagcgtttggggcagttggctaagtggaagacagctgaggaggtggccgccctgatccgatctctgcctgtggaggagcagcccaagcagatcattgtcaccaggaagggcatgctggacccactggaggtgcacttactggacttccccaatattgtcatcaaaggatcggagctccaactccctttccaggcgtgtctcaaggtggaaaaattcggggatctcatccttaaagccactgagccccagatggttctcttcaacctctatgacgactggctcaagactatttcatcttacacggccttctcccgtctcatcctgattctgcgtgccctacatgtgaacaacgatcgggcaaaagtgatcctgaagccagacaagactactattacagaaccacaccacatctggcccactctgactgacgaagaatggatcaaggtcgaggtgcagctcaaggatctgatcttggctgactacggcaagaaaaacaatgtgaacgtggcatcactgacacaatcagaaattcgagacatcatcctgggtatggagatctcggcaccgtcacagcagcggcagcagatcgctgagatcgagaagcagaccaaggaacaatcgcagctgacggcaacacagactcgcactgtcaacaagcatggcgatgagatcatcacctccaccaccagcaactatgagacccagactttctcatccaagactgagtggagggtcagggccatctctgctgccaacctgcacctaaggaccaatcacatctatgtttcatctgacgacatcaaggagactggctacacctacatccttcccaagaatgtgcttaagaagttcatctgcatatctgaccttcgggcccaaattgcaggatacctatatggggtgagcccaccagataacccccaggtgaaggagatccgctgcattgtgatggtgccgcagtggggcactcaccagaccgtgcacctgcctggccagctgccccagcatgagtacctcaaggagatggaacccttaggttggatccacactcagcccaatgagtccccgcagttatcaccccaggatgtcaccacccatgccaagatcatggctgacaacccatcttgggatggcgagaagaccattatcatcacatgcagcttcacgccaggctcctgtacactgacggcctacaagctgacccccagtggctacgaatggggccgccagaacacagacaagggcaacaaccccaagggctacctgccttcacactatgagagggtgcagatgctgctgtcggaccgtttccttggcttcttcatggtccctgcccagtcctcgtggaactacaacttcatgggtgttcggcatgaccccaacatgaaatatgagctacagctggcgaaccccaaagagttctaccacgaggtgcacaggccctctcacttcctcaactttgctctcctgcaggagggggaggtttactctgcggatcgggaggacctgtatgcctgaccgtttccctgcctcctgcttcagcctcccgaggccgaagcctcagcccctccagacaggccgctgacattcagcagtttggcctctttccctctgtctgtgcttgtgttgttgacctcctgatggcttgtcatcctgaataaaatataataataaattttgtataaataggaaaaaaaaaaaaaaaaa

SEQ ID NO: 1795 - DNA, 1890 bp, Homo sapiens
ctagagaggccgccaggagacccggcgctttcttccttctgcagctgaggctgcggcggggccggggctggggtcggggccaggaggaattttgttgtcagagaataaaaggaggttgtccataattgactttaagcagcaatcagtaaaacattgagctcttcagctccgcctttcttgctctgaaaattggaaaaccaagaaggttttgatgttttgtgtgacgccacctgaattagaaaccaagatgaacataaccaaaggtggtctggtgttgttttcagcaaactcgaattcatcatgtatggagctatcaaagaaaattgcagagcggctaggggtggagatgggcaaagtgcaggtttaccaggaacctaacagagaaacaagagtacaaattcaagagtctgtgaggggaaaagatgttttcatcatccaaactgtttcgaaggacgtgaacaccaccatcatggagctcctgatcatggtgtatgcatgtaagacctcttgtgccaagagcatcattggcgtgataccctactttccttacagcaagcagtgcaagatgagaaaaagaggctccattgtctctaaattgctggcttccatgatgtgcaaagctggtctaactcatcttattactatggatttacaccagaaggaaattcagggcttcttcaatattcctgttgacaatttaagagcatctcccttcttattacagtatattcaagaagagatcccagattacaggaatgcagtaatcgtggccaagtctccagcctcggcgaagagggcacagtcttttgctgagcgcctgcgcctgggaattgcagtgattcatggagaggcgcaggatgccgagtcggacttggtggatggacggcattccccacccatggtcagaagtgtggctgccatccaccccagcctggagatccccatgctgattcctaaagaaaagcccccaatcacggttgtgggtgatgttggaggaaggattgccatcatcgtggatgacatcattgatgatgttgacagctttcttgctgcagcagagaccctgaaggaaagaggtgcatataagatctttgtgatggcaactcatggcttgttgtcttctgacgccccccggcggattgaagagtctgccattgatgaggtggtggtcaccaatacaattccacatgaagtccagaagctccagtgccccaagattaaaactgtggatatcagcatgatcctttcagaggcgatccgtcggatccacaatggggagtccatgtcctaccttttcagaaacataggcttagatgactgagttttcctttaggaaaactcccgagggccaaactggaaacataagagtgactgctcggtgggatggatttcacaggaaccgtcatgcttgttcctccctctcccctgtaacctcacttcttattgattcctaagaagatagaccaactttttatgtcggtttgggtgtttgtgagtttggggagcaatttttataaaagaaaaactttattctcctcttttgaaaaggtaagacctcgttttagttgtaactgtttaaaaaataacacttggaataagatttgtaagctcacaaagccttcttccaaagttgcttgagccaagtgcttaaaaagttaataaaataaaatgatctgtatgatacctgcaattgaaaagccgaaaagattatactgtcaagtccagtaaatgacatttttagagatgcttttgtagacaagcatatggaatatgtgattgtatttattttctgcaactaaaaaaggaataaaaacttgtgtttgtgtgtttttctaaaactttgtgttttggcaatcgttttataactaaaataaaatgaaagctaaatct

SEQ ID NO: 1796 - DNA, 2450 bp, Homo sapiens
tccgggtgctgtggcccggccttggcggggcggcctccggctcaggctggctgagaggctcccagctgcagcgtccccgcccgcctcctcgggagctctgatctcagctgacagtgccctcggggaccaaacaagcctggcaggacaaaattagaagatcaaaatggaaaatatgctgctttggttgatatttttcacccctgggtggaccctcattgatggatctgaaatggaatgggattttatgtggcacttgagaaaggtaccccggattgtcagtgaaaggactttccatctcaccagccccgcatttgaggcagatgctaagatgatggtaaatacagtgtgtggcatcgaatgccagaaagaactcccaactcccagcctttctgaattggaggattatctttcctatgagactgtctttgagaatggcacccgaaccttaaccagggtgaaagttcaagatttggttcttgagccgactcaaaatatcaccacaaagggagtatctgttaggagaaagagacaggtgtatggcaccgacagcaggttcagcatcttggacaaaaggttcttaaccaatttccctttcagcacagctgtgaagctttccacgggctgtagtggcattctcatttcccctcagcatgttctaactgctgcccactgtgttcatgatggaaaggactatgtcaaagggagtaaaaagctaagggtagggttgttgaagatgaggaataaaagtggaggcaagaaacgtcgaggttctaagaggagcaggagagaagctagtggtggtgaccaaagagagggtaccagagagcatctgcaggagagagcgaagggtgggagaagaagaaaaaaatctggccggggtcagaggattgccgaagggaggccttcctttcagtggacccgggtcaagaatacccacattccgaagggctgggcacgaggaggcatgggggacgctaccttggactatgactatgctcttctggagctgaagcgtgctcacaaaaagaaatacatggaacttggaatcagcccaacgatcaagaaaatgcctggtggaatgatccacttctcaggatttgataacgatagggctgatcagttggtctatcggttttgcagtgtgtccgacgaatccaatgatctcctttaccaatactgcgatgctgagtcgggctccaccggttcgggggtctatctgcgtctgaaagatccagacaaaaagaattggaagcgcaaaatcattgcggtctactcagggcaccagtgggtggatgtccacggggttcagaaggactacaacgttgctgttcgcatcactcccctaaaatacgcccagatttgcctctggattcacgggaacgatgccaattgtgcttacggctaacagagacctgaaacagggcggtgtatcatctaaatcacagagaaaaccagctctgcttaccgtagtgagatcacttcataggttatgcctggacttgaactctgtcaatagcatttcaacatttttcaaaatcaggagattttcgtccatttaaaaaatgtataggtgcagatattgaaactaggtgggcacttcaatgccaagtatatactcttctttacatggtgatgagtttcatttgtagaaaaattttgttgccttcttaaaaattagacacactttaaaccttcaaacaggtattataaataacatgtgactccttaatggacttattctcagggtcctactctaagaagaatctaataggatgctggttgtgtattaaatgtgaaattgcatagataaaggtagatggtaaagcaattagtatcagaatagagacagaaagttacaacacagtttgtactactctgagatggatccattcagctcatgccctcaatgtttatattgtgttatctgttgggtctgggacatttagtttagtttttttgaagaattacaaatcagaagaaaaagcaagcattataaacaaaactaataactgttttactgctttaagaaataacaattacaatgtgtattatttaaaaatgggagaaatagtttgttctatgaaataaacctagtttagaaatagggaagctgagacattttaagatctcaagtttttatttaactaatactcaaaatatggacttttcatgtatgcatagggaagacacttcacaaattatgaatgatcatgtgttgaaagccacattattttatgctatacattctatgtatgaggtgctacatttttaggacaaagaattctgtaatctttttcaagaaagagtctttttctccttgacaaaatccagcttttgtatgaggactatagggtgaattctctgattagtaattttagatatgtcctttcctaaaaatgaataaaatttatgaatatgacttaaaaaaaaaaaaaaaaaaaaaaaaaaaa

SEQ ID NO: 1797 - DNA, 3696 bp, Homo sapiens
accagacagttcttaaattagcaagccttcaaaaccaaaaatggggtcgaaaagaggcatatcttctaggcatcattctctcagctcctatgaaatcatgtttgcagctctctttgccatattggtagtgctctgtgctggattaattgcagtatcctgcctgacaatcaaggaatcccaacgaggtgcagcacttggacagagtcatgaagccagagcgacatttaaaataacatccggagttacatataatcctaatttgcaagacaaactctcagtggatttcaaagttcttgcttttgaccttcagcaaatgatagatgagatctttctatcaagcaatctgaagaatgaatataagaactcaagagttttacaatttgaaaatggcagcattatagtcgtatttgaccttttctttgcccagtgggtgtcagatcaaaatgtaaaagaagaactgattcaaggccttgaagcaaataaatccagccaactggtcactttccatattgatttgaacagcgttgatatcctagacaagctaacaaccaccagtcatctggcaactccaggaaatgtctcaatagagtgcctgcctggttcaagtccttgtactgatgctctaacgtgtataaaagctgatttattttgtgatggagaagtaaactgtccagatggttctgacgaagacaataaaatgtgtgccacagtttgtgatggaagatttttgttaactggatcatctgggtctttccaggctactcattatccaaaaccttctgaaacaagtgttgtctgccagtggatcatacgtgtaaaccaaggactttccattaaactgagcttcgatgattttaatacatattatacagatatattagatatttatgaaggtgtaggatcaagcaagattttaagagcttctatttgggaaactaatcctggcacaataagaattttttccaaccaagttactgccacctttcttatagaatctgatgaaagtgattatgttggctttaatgcaacatatactgcatttaacagcagtgagcttaataattatgagaaaattaattgtaactttgaggatggcttttgtttctgggtccaggatctaaatgatgataatgaatgggaaaggattcagggaagcaccttttctccttttactggacccaattttgaccacacttttggcaatgcttcaggattttacatttctaccccaactggaccaggagggagacaagaacgagtggggcttttaagcctccctttggaccccactttggagccagcttgccttagtttctggtatcatatgtatggtgaaaatgtccataaattaagcattaatatcagcaatgaccaaaatatggagaagacagttttccaaaaggaaggaaattatggagacaattggaattatggacaagtaaccctaaatgaaacagttaaatttaaggttgcttttaatgcttttaaaaacaagatcctgagtgatattgcgttggatgacattagcctaacatatgggatttgcaatgggagtctttatccagaaccaactttggtgccaactcctccaccagaacttcctacggactgtggaggaccttttgagctgtgggagccaaatacaacattcagttctacgaactttccaaacagctaccctaatctggctttctgtgtttggattttaaatgcacaaaaaggaaagaatatacaacttcattttcaagaatttgacttagaaaatattaacgatgtagttgaaataagagatggtgaagaagctgattccttgctcttagctgtgtacacagggcctggcccagtaaaggatgtgttctctaccaccaacagaatgactgtgcttctcatcactaacgatgtgttggcaagaggagggtttaaagcaaactttactactggctatcacttggggattccagagccatgcaaggcagaccattttcaatgtaaaaatggagagtgtgttccactggtgaatctctgtgacggtcatctgcactgtgaggatggctcagatgaagcagattgtgtgcgttttttcaatggcacaacgaacaacaatggtttagtgcggttcagaatccagagcatatggcatacagcttgtgctgagaactggaccacccagatttcaaatgatgtttgtcaactgctgggactagggagtggaaactcatcaaagccaatcttctctaccgatggtggaccatttgtcaaattaaacacagcacctgatggccacttaatactaacacccagtcaacagtgtttacaggattccttgattcggttacagtgtaaccataaatcttgtggaaaaaaactggcagctcaagacatcaccccaaagattgttggaggaagtaatgccaaagaaggggcctggccctgggttgtgggtctgtattatggcggccgactgctctgcggcgcatctctcgtcagcagtgactggctggtgtccgccgcacactgcgtgtatgggagaaacttagagccatccaagtggacagcaatcctaggcctgcatatgaaatcaaatctgacctctcctcaaacagtccctcgattaatagatgaaattgtcataaaccctcattacaataggcgaagaaaggacaacgacattgccatgatgcatctggaatttaaagtgaattacacagattacatacaacctatttgtttaccggaagaaaatcaagtttttcctccaggaagaaattgttctattgctggttgggggacggttgtatatcaaggtactactgcaaacatattgcaagaagctgatgttcctcttctatcaaatgagagatgccaacagcagatgccagaatataacattactgaaaatatgatatgtgcaggctatgaagaaggaggaatagattcttgtcagggggattcaggaggaccattaatgtgccaagaaaacaacaggtggttccttgctggtgtgacctcatttggatacaagtgtgccctgcctaatcgccccggagtgtatgccagggtctcaaggtttaccgaatggatacaaagttttctacattagcgcatttcttaaactaaacaggaaagtcgcattattttcccattctactctagaaagcatggaaattaagtgtttcgtacaaaaattttaaaaagttaccaaaggtttttattcttacctatgtcaatgaaatgctagggggccagggaaacaaaattttaaaaataataaaattcaccatagcaatacagaataactttaaaataccattaaatacatttgtatttcattgtgaacaggtatttcttcacagatctcatttttaaaattcttaatgattatttttattacttactgttgtttaaagggatgttattttaaagcatataccatacacttaagaaatttgagcagaatttaaaaaagaaagaaaataaattgtttttcccaaagtatgtcactgttggaaataaactgccataaattttctagttccagtttagtttgctgctattagcagaaactcaattgtttctctgtcttttctatcaaaattttcaacatatgcataaccttagtattttcccaaccaatagaaactatttattgtaagcttatgtcacaggcctggactaaattgattttacgttcctctt

SEQ ID NO: 1798 - DNA, 5502 bp, Homo sapiens
gctctcgaggtgtctggaggctcagcgagcgccggacccaggaggcccaaggagctggaggtgaccctcaggcagcaagaaccccacggaagggcgtgagccctgcagacagctgtgcggcacctcgggctgggctcctgttaggaggaagtgcctgcacccaggcagcggctcagaggcagctgctccatgcagaactgaagctggttctgcagcagaaaggggagaggacacaggagcctggggtgcaggtgcctcccagcaacgccatggaggccaggagccggagtgccgaggagctgaggcgggcggagttggtggaaattatcgtggagacggaggcgcagaccggggtcagcggcatcaacgtagcgggcggcggcaaagagggaatcttcgttcgggagctgcgcgaggactcacccgccgccaggagcctcagcctgcaggaaggggaccagctgctgagtgcccgagtgttcttcgagaacttcaagtacgaggacgcactacgcctgctgcaatgcgccgagccttacaaagtctccttctgcctgaagcgcactgtgcccaccggggacctggctctgcggcccgggaccgtgtctggctacgagatcaagggcccgcgggccaaggtggccaagctggtacgcgtgcttagcccggccccggccctggactgccccagcgatccggtctctgcgccgtgagccccattccccgccatcgtgggccagccttgccctctgtcttgtcactaacccaagctaattccaccctctgccccttcctctctgccccaaactcttccccgggaagggggacagacccaccccagcccagggccctcacccacctcggagaggcgtccccaccatcggatccaggcttgctaggggtcctgaaccaggctacttcgaaccaggaaagccagattccagcctgagtgctggcccaattactgctgagtggccctggacaaagttgtttctctccctgggcctcagtttccccatctctagaatgaggatgttggggaaaatcccggatcaggatctagaagtcttgggtccccgtccctacactcctgttgactcatttggagatcctagatggctgcctgctttcctgggcactcatggtgaaatgacaggcaagaagtggggatgatgtttggggaacaagatacttgacccagcacatcccccgcctggtccaataccaggtggggctcttcctgtccactcccagcctcccactgtcccaccgcctcctgcctctctcctctctccccagaacatccagagtctgtcccctgtgaagaagaagaagatggtgcctggggctctgggggtccccgctgacctggcccctgttgacgtcgagttctcctttcccaagttctcccgcctgcgtcggggcctcaaagccgaggctgtcaagggtcctgtcccggctgcccctgcccgccggcgcctccagctgcctcggctgcgtgtacgagaagtggccgaagaggctcaggcagcccggctggccgccgccgctcctccccccaggaaagccaaggtggaggctgaggtggctgcaggagctcgtttcacagcccctcaggtggagctggttgggccgcggctgccaggggcggaggtgggtgtcccccaggtctcagcccccaaggctgccccctcagcagaggcagctggtggctttgccctccacctgccaacccttgggctcggagccccggctccgcctgctgtggaggccccagccgtgggaatccaggtcccccaggtggagctgcctgccttgccctcactgcccactctgcccacacttccctgcctagagacccgggaaggggctgtgtcggtagtggtgcccaccctggatgtggcagcaccgactgtgggggtggacctggccttgccgggtgcagaggtggaggcccggggagaggcacctgaggtggccctgaagatgccccgccttagttttccccgatttggggctcgagcaaaggaagttgctgaggccaaggtagccaaggtcagccctgaggccagggtgaaaggtcccagacttcgaatgcccacctttgggctttccctcttggagccccggcccgctgctcctgaagttgtagagagcaagctgaagctgcccaccatcaagatgccctcccttggcatcggagtgtcagggcccgaggtcaaggtgcccaagggacctgaagtgaagctccccaaggctcctgaggtcaagcttccaaaagtgcccgaggcagcccttccagaggttcgactcccagaggtggagctccccaaggtgtcagagatgaaactcccaaaggtgccagagatggctgtgccggaggtgcggcttccagaggtagagctgcccaaagtgtcagagatgaaactcccaaaggtgccagagatggctgtgccggaggtgcggcttccagaggtacagctgctgaaagtgtcggagatgaaactcccaaaggtgccagagatggctgtgccggaggtgcggcttccagaggtacagctgccgaaagtgtcagagatgaaactcccagaggtgtcagaggtggctgtgccagaggtgcggcttccagaggtgcagctgccgaaagtgccagagatgaaagtccctgagatgaagcttccaaaggtgcctgagatgaaacttcctgagatgaaactccctgaagtgcaactcccgaaggtgcccgagatggccgtgcccgatgtgcacctcccagaagtgcagcttccaaaagtcccagagatgaagctccctgagatgaaactccctgaggtgaaactcccgaaggtgcccgagatggctgtgcccgatgtgcacctcccggaagtgcagctcccgaaagtcccagagatgaaactccctaaaatgcctgagatggctgtgccagaggttcgactccccgaggtgcagctgccaaaagtctcagagatgaaactccccaaggtgcctgaaatggccgtgcccgatgtgcacctcccagaggtgcagctgcccaaagtctgtgaaatgaaagtccctgacatgaagctcccagagataaaactccccaaggtgcctgagatggctgtgcccgatgtgcacctccccgaggtgcagctgccgaaagtgtcagagattcggctgccggaaatgcaagtgccgaaggttcccgacgtgcatcttccgaaggcaccagaggtgaagctgcccagggctccggaggtgcagctaaaggccaccaaggcagaacaggcagaagggatggaatttggcttcaagatgcccaagatgaccatgcccaagctagggagggcagagtccccatcacgtggcaagccaggcgaggcgggtgctgaggtctcagggaagctggtaacacttccctgtctgcagccagaggtggatggtgaggctcatgtgggtgtcccctctctcactctgccttcagtggagctagacctgccaggagcacttggcctgcaggggcaggtcccagccgctaaaatgggcaagggagagcgggtggagggccctgaggtggcagcaggggtcagggaagtgggcttccgagtgccctctgttgaaattgtcaccccacagctgcccgccgtggaaattgaggaagggcggctggagatgatagagacaaaagtcaagccctcttccaagttctccttacctaagtttggactctcggggccaaaggtggctaaggcagaggctgagggggctgggcgagctaccaagctgaaggtatccaaatttgccatctcactccccaaggctcgggtgggggctgaggctgaggccaaaggggctggggaggcaggcctgctgcctgccctcgatctgtccatcccacagctcagcctggatgcccacctgccctcaggcaaggtagaggtggcaggggccgacctcaagttcaaggggcccaggtttgctctccccaagtttggggtcagaggccgggacactgaggcagcagaactagtgccaggggtggctgagttggagggcaagggctggggctgggatgggagggtgaagatgcccaagctgaagatgccttcctttgggctggctcgagggaaggaagcagaagttcaaggtgatcgtgccagcccgggggaaaaggctgagtccaccgctgtgcagcttaagatccccgaggtggagctggtcacgctgggcgcccaggaggaagggagggcagagggggctgtggccgtcagtggaatgcagctgtcaggcctgaaggtgtccacagccaggcaggtggtcactgagggccatgacgcggggctgaggatgcctccgctgggcatctccctgccacaggtggagctgaccggctttggggaggcaggtaccccagggcagcaggctcagagtacagtcccttcagcagagggcacagcaggctacagggttcaggtgccccaggtgaccctgtctctgcctggagcccaggttgcaggtggtgagctgctggtgggtgagggtgtctttaagatgcccaccgtgacagtgccccagcttgagctggacgtggggctaagccgagaggcacaggcgggcgaggcggccacaggcgagggtgggctgaggctgaagttgcccacactgggggccagagctagggtggggggcgagggtgctgaggagcagcccccaggggccgagcgtaccttctgcctctcactgcccgacgtggagctctcgccatccgggggcaaccatgccgagtaccaggtggcagagggggagggagaggccggacacaagctcaaggtacggctgccccggtttggcctggtgcgggccaaggagggggccgaggagggtgagaaggccaagagccccaaactcaggctgccccgagtgggcttcagccaaagtgagatggtcactggggaagggtcccccagccccgaggaggaggaggaggaggaggaagagggcagtggggaaggggcctcgggtcgccggggccgggtccgggtccgcttgccacgtgtaggcctggcggccccttctaaagcctctcgggggcaggagggcgatgcagcccccaagtcccccgtcagagagaagtcacccaagttccgcttccccagggtgtccctaagccccaaggcccggagtgggagtggggaccaggaagagggtggattgcgggtgcggctgcccagcgtggggttttcagagacaggggctccaggcccggccaggatggagggggctcaggctgcggctgtctgaagcccctagtcagatggggatcccttcttgccttcctttctctaccccctcgctgttgtgtgtgtgataactagcactaaccctaagagggccgggaggtgggtgactgaccagggctggcagggaggcctgctcctgtctctctggcaggagtgcctgtaccccaccaagccatgtgaataaaataatctggaagta

SEQ ID NO: 1799 - DNA, 4853 bp, Homo sapiens
gctctcgaggtgtctggaggctcagcgagcgccggacccaggaggcccaaggagctggaggtgaccctcaggcagcaagaaccccacggaagggcgtgagccctgcagacagctgtgcggcacctcgggctgggctcctgttaggaggaagtgcctgcacccaggcagcggctcagaggcagctgctccatgcagaactgaagctggttctgcagcagaaaggggagaggacacaggagcctggggtgcaggtgcctcccagcaacgccatggaggccaggagccggagtgccgaggagctgaggcgggcggagttggtggaaattatcgtggagacggaggcgcagaccggggtcagcggcatcaacgtagcgggcggcggcaaagagggaatcttcgttcgggagctgcgcgaggactcacccgccgccaggagcctcagcctgcaggaaggggaccagctgctgagtgcccgagtgttcttcgagaacttcaagtacgaggacgcactacgcctgctgcaatgcgccgagccttacaaagtctccttctgcctgaagcgcactgtgcccaccggggacctggctctgcggcccgggaccgtgtctggctacgagatcaagggcccgcgggccaaggtggccaagctgaacatccagagtctgtcccctgtgaagaagaagaagatggtgcctggggctctgggggtccccgctgacctggcccctgttgacgtcgagttctcctttcccaagttctcccgcctgcgtcggggcctcaaagccgaggctgtcaagggtcctgtcccggctgcccctgcccgccggcgcctccagctgcctcggctgcgtgtacgagaagtggccgaagaggctcaggcagcccggctggccgccgccgctcctccccccaggaaagccaaggtggaggctgaggtggctgcaggagctcgtttcacagcccctcaggtggagctggttgggccgcggctgccaggggcggaggtgggtgtcccccaggtctcagcccccaaggctgccccctcagcagaggcagctggtggctttgccctccacctgccaacccttgggctcggagccccggctccgcctgctgtggaggccccagccgtgggaatccaggtcccccaggtggagctgcctgccttgccctcactgcccactctgcccacacttccctgcctagagacccgggaaggggctgtgtcggtagtggtgcccaccctggatgtggcagcaccgactgtgggggtggacctggccttgccgggtgcagaggtggaggcccggggagaggcacctgaggtggccctgaagatgccccgccttagttttccccgatttggggctcgagcaaaggaagttgctgaggccaaggtagccaaggtcagccctgaggccagggtgaaaggtcccagacttcgaatgcccacctttgggctttccctcttggagccccggcccgctgctcctgaagttgtagagagcaagctgaagctgcccaccatcaagatgccctcccttggcatcggagtgtcagggcccgaggtcaaggtgcccaagggacctgaagtgaagctccccaaggctcctgaggtcaagcttccaaaagtgcccgaggcagcccttccagaggttcgactcccagaggtggagctccccaaggtgtcagagatgaaactcccaaaggtgccagagatggctgtgccggaggtgcggcttccagaggtagagctgcccaaagtgtcagagatgaaactcccaaaggtgccagagatggctgtgccggaggtgcggcttccagaggtacagctgctgaaagtgtcggagatgaaactcccaaaggtgccagagatggctgtgccggaggtgcggcttccagaggtacagctgccgaaagtgtcagagatgaaactcccagaggtgtcagaggtggctgtgccagaggtgcggcttccagaggtgcagctgccgaaagtgccagagatgaaagtccctgagatgaagcttccaaaggtgcctgagatgaaacttcctgagatgaaactccctgaagtgcaactcccgaaggtgcccgagatggccgtgcccgatgtgcacctcccagaagtgcagcttccaaaagtcccagagatgaagctccctgagatgaaactccctgaggtgaaactcccgaaggtgcccgagatggctgtgcccgatgtgcacctcccggaagtgcagctcccgaaagtcccagagatgaaactccctaaaatgcctgagatggctgtgccagaggttcgactccccgaggtgcagctgccaaaagtctcagagatgaaactccccaaggtgcctgaaatggccgtgcccgatgtgcacctcccagaggtgcagctgcccaaagtctgtgaaatgaaagtccctgacatgaagctcccagagataaaactccccaaggtgcctgagatggctgtgcccgatgtgcacctccccgaggtgcagctgccgaaagtgtcagagattcggctgccggaaatgcaagtgccgaaggttcccgacgtgcatcttccgaaggcaccagaggtgaagctgcccagggctccggaggtgcagctaaaggccaccaaggcagaacaggcagaagggatggaatttggcttcaagatgcccaagatgaccatgcccaagctagggagggcagagtccccatcacgtggcaagccaggcgaggcgggtgctgaggtctcagggaagctggtaacacttccctgtctgcagccagaggtggatggtgaggctcatgtgggtgtcccctctctcactctgccttcagtggagctagacctgccaggagcacttggcctgcaggggcaggtcccagccgctaaaatgggcaagggagagcgggtggagggccctgaggtggcagcaggggtcagggaagtgggcttccgagtgccctctgttgaaattgtcaccccacagctgcccgccgtggaaattgaggaagggcggctggagatgatagagacaaaagtcaagccctcttccaagttctccttacctaagtttggactctcggggccaaaggtggctaaggcagaggctgagggggctgggcgagctaccaagctgaaggtatccaaatttgccatctcactccccaaggctcgggtgggggctgaggctgaggccaaaggggctggggaggcaggcctgctgcctgccctcgatctgtccatcccacagctcagcctggatgcccacctgccctcaggcaaggtagaggtggcaggggccgacctcaagttcaaggggcccaggtttgctctccccaagtttggggtcagaggccgggacactgaggcagcagaactagtgccaggggtggctgagttggagggcaagggctggggctgggatgggagggtgaagatgcccaagctgaagatgccttcctttgggctggctcgagggaaggaagcagaagttcaaggtgatcgtgccagcccgggggaaaaggctgagtccaccgctgtgcagcttaagatccccgaggtggagctggtcacgctgggcgcccaggaggaagggagggcagagggggctgtggccgtcagtggaatgcagctgtcaggcctgaaggtgtccacagccaggcaggtggtcactgagggccatgacgcggggctgaggatgcctccgctgggcatctccctgccacaggtggagctgaccggctttggggaggcaggtaccccagggcagcaggctcagagtacagtcccttcagcagagggcacagcaggctacagggttcaggtgccccaggtgaccctgtctctgcctggagcccaggttgcaggtggtgagctgctggtgggtgagggtgtctttaagatgcccaccgtgacagtgccccagcttgagctggacgtggggctaagccgagaggcacaggcgggcgaggcggccacaggcgagggtgggctgaggctgaagttgcccacactgggggccagagctagggtggggggcgagggtgctgaggagcagcccccaggggccgagcgtaccttctgcctctcactgcccgacgtggagctctcgccatccgggggcaaccatgccgagtaccaggtggcagagggggagggagaggccggacacaagctcaaggtacggctgccccggtttggcctggtgcgggccaaggagggggccgaggagggtgagaaggccaagagccccaaactcaggctgccccgagtgggcttcagccaaagtgagatggtcactggggaagggtcccccagccccgaggaggaggaggaggaggaggaagagggcagtggggaaggggcctcgggtcgccggggccgggtccgggtccgcttgccacgtgtaggcctggcggccccttctaaagcctctcgggggcaggagggcgatgcagcccccaagtcccccgtcagagagaagtcacccaagttccgcttccccagggtgtccctaagccccaaggcccggagtgggagtggggaccaggaagagggtggattgcgggtgcggctgcccagcgtggggttttcagagacaggggctccaggcccggccaggatggagggggctcaggctgcggctgtctgaagcccctagtcagatggggatcccttcttgccttcctttctctaccccctcgctgttgtgtgtgtgataactagcactaaccctaagagggccgggaggtgggtgactgaccagggctggcagggaggcctgctcctgtctctctggcaggagtgcctgtaccccaccaagccatgtgaataaaataatctggaagta

SEQ ID NO: 1800 - DNA, 1064 bp, Homo sapiens
tttgaggccatataaagtcacctgaggccctctccaccacagcccaccagtgaccatgaaggctgtgctgcttgccctgttgatggcaggcttggccctgcagccaggcactgccctgctgtgctactcctgcaaagcccaggtgagcaacgaggactgcctgcaggtggagaactgcacccagctgggggagcagtgctggaccgcgcgcatccgcgcagttggcctcctgaccgtcatcagcaaaggctgcagcttgaactgcgtggatgactcacaggactactacgtgggcaagaagaacatcacgtgctgtgacaccgacttgtgcaacgccagcggggcccatgccctgcagccggctgctgccatccttgcgctgctccctgcactcggcctgctgctctggggacccggccagctctaggctctggggggccccgctgcagcccacactgggtgtggtgccccaggcctctgtgccactcctcacacacccggcccagtgggagcctgtcctggttcctgaggcacatcctaacgcaagtctgaccatgtatgtctgcgcccctgtcccccaccctgaccctcccatggccctctccaggactcccacccggcagatcggctctattgacacagatccgcctgcagatggcccctccaaccctctctgctgctgtttccatggcccagcattctccacccttaaccctgtgctcaggcacctcttcccccaggaagccttccctgcccaccccatctatgacttgagccaggtctggtccgtggtgtcccccgcacccagcaggggacaggcactcaggagggcccggtaaaggctgagatgaagtggactgagtagaactggaggacaggagtcgacgtgagttcctgggagtctccagagatggggcctggaggcctggaggaaggggccaggcctcacattcgtggggctccctgaatggcagcctcagcacagcgtaggcccttaataaacacctgttggataagccaaaaaaaaaaaaaaaaaaaaaaaaaaaaaaaaaaaaaaaaaaaaa

SEQ ID NO: 1801 - DNA, 4482 bp, Homo sapiens
tgaggagccgcccggtcgcctgcgcgctccctccggcggcgtccccagcccgcggcccctctgctgccggcccccggctcgccggctgcgggagtggcctcaagatggatgaagacggcggcggcgagggtggtggcgtgcctgaagacctctcattagaagagagagaagaacttctagacattcgtcgaagaaaaaaggaacttattgatgacattgagaggctgaaatatgaaattgcagaggtgatgacagagatcgacaatctaacttccgtagaggagagcaaaacgactcagaggaacaaacagatagccatgggaagaaagaaattcaacatggatcccaaaaagggaattcagtttctaatagaaaatgacctgctacagagttccccagaagacgtcgcccagttcctttataaaggagaaggcctaaataagaccgtcattggggactacctgggtgaaagggatgaatttaatattaaagttcttcaagcctttgttgaactccatgagtttgctgatctcaaccttgtacaagccttaaggcagttcttatggagcttcaggctgcccggggaggcgcagaagattgatcgcatgatggaggctttcgcttctcgctactgcctgtgcaaccccggggtcttccagtccacagacacgtgctacgtgctgtcattcgccatcatcatgctcaacaccagcctccacaaccacaacgtgcgtgacaagcccacggcagaacggttcatcgccatgaaccgcggcatcaacgagggcggggacctccctgaggagctgctgaggaatttgtatgagagcattaagaacgagccatttaagatcccggaggacgacgggaacgacctgacccacaccttcttcaaccccgaccgcgagggctggctcctgaagctgggagggcgtgtgaagacctggaagcgccggtggttcatcctgaccgataactgcctctattactttgaatacacaacagataaggagcccaggggaatcatcccgttggaaaacctcagcatcagggaggtggaggacccccggaaacccaactgttttgagctctacaatcccagccacaaagggcaggtcatcaaggcctgtaagactgaggccgacggccgcgtggtagaggggaaccatgtggtgtaccggatctcagccccgagcccggaggagaaggaggagtggatgaaatccatcaaagccagtatcagcagagatcccttctatgacatgttggcaacgaggaaacgaaggattgccaataaaaaatagctttcctggctaaaagacccaggtaaaagacccaaccccagcagaaagacaccgcgggcggcccctccgcggaaggcgtggcagggaggcagtcgccctgcggtgcaagctgctgctccagagcataccgtggcccaggtggtatccccaaggcctcgtgccgtggctggggtcctgggaggtggtcgccctgcagtgcaagctgctgctccagagcgtaccgtggcccagactgatcctcgaggcctcctgccgtggctggggtcatggtcggctgcgcatgtccagaagcatttccttcctgcgaccatcccggcgcccctagggggagaagccaggacagcagcttccgctgtctccacagcagacacgggacggattccacagacgggagcctcattcgtaccatgccaaacgcattcactcggggcagtattaaccgttctagaaagccactgttttatagcaaaacaggaaaggaaaagctaccagttttttattcagaatttttctcagatatataggattatagcttttatatgcctttttatattctgaaattataacaaaagatactttctaacagtagtatttttagaatggcagctataaagttaactcctggacacaagtatatactgtgcactgaaaaaatatccatctacacagcacccaaggggagggctgggggcaccggcacgggggcagcgtgcagccctgccctgtcaggctgtcagacaagccccggggggcagcaggtgggctcgggacgggctgggggagggacggccatggcacttgggggctccagggtgactcccatgaggcctcccttcaaccaggctttttggccccacaaatactttaagcaaatcattaaaattataacagttaatggtttgggggtgtttaggctgtaactgctaactcctaggaaacagccttttccctggacacagatggtccatacgctgagccacgtgaaactgctgatgttttgtttagatgcacacacatggcagcgtttcatacaggtcagcaggttagaccggcttttgaccatattcatcgctatttaaaacctgtggcaaaatgaacgcttattttacagactttctaatttgaccagatttcttaatgaatagacacagaattaactaaaaacagtctcaccccatgtagtgcgccgtgtcctgagagaggtgccctccctacgaggagggaagaacaggccctggggtgcagaggcccggcacgtagagaacccagatagacgccggtggtggaactggtcaaactccacgcccgcctgggaggttgtcaggttgctgtggatgtaaggataggaggtgcccagtgctccgctcaaggaaggctggatctgggccccacctacagagagggctcagggctggaccgggggcattgtgtgcttgggccgacccgggccggtggcagacgctgttctctgtcgggagatttgcgtccccaggaccctgttacacagtgggctgttgggttggtggctggcttttcctctatggacttcctcttcctgccccacctgcataggcacacacaccttgaatctgcaccctctggagggcatctgtactcctgtgcaaaatgcccagtccagagacaaaacctcagactttgtgcacctaggtttccttctcagcagcggagactgttctttgagttgccttgaagtggaggccgagcggctgcgggcccttcgcctccctgcggctgaccttgatgtagctttaagtcacactagactgcagaggggtccgaggccagaaacccctgtcctgcatcagactttcattcccacgttcttaggctttgttactgatacctcaaatcggaagttttagttctgagaaaggcaagtcagcgttcttgaaatgcctgactggtagatatgcaactctggcctccagtcttccatgaaaataaatgctgcctggacccccacccagaccacacactgacggccggctccggcggtgcccacccctcaggctggcccggcacccaagactggccacagccagctctgtcagcatgttgtgctcggacaagctgtttccttcttctgaccaacccaggtgtgacctggggatgcagagctttctgttttgggtgttgggagaagcagcaggaaggagtcgccagatgatcaagctccccctttgctgtcatctgtgaatgagcttcgccaggtggtgggcacctgggagccatgcagaggctgtggtgctgagttagactccaggtactttgtggtcaaaggaaatcgcctagctccaggctgtgttaggacagtattagcatgaaggctgtgcgaccatcatgcctgctgatccttgaggcaggcctggtccagaaaactctgggtcagtgactgcgcagggccagccgctaccaggacggccctgaaacaggacacatctgttttttgtccctcaccctgggcaggccgcgtcacaatcacagtcctcctcctccccaccctgacgtctgagcgcagggcttgaattgttagtcccaactctggccaaagatacttttttccagagacagaggccaggaggcagtgaggggagccccgcggggaggcggcggcgactgccacagcccttccagcctgtcttgctggccgccctggttcatatttgagtttaattgtactgaccctggacccagataagcagcaactttgtgtctttggggtcacagaacattttggggcagtttaatgtggtaccaaactgaaaataggagctatttatagatggagcagcacttagtgcttcatagaaagcaatgcctatttttaaagttacaaacgcagatatctacatagatatgctttgctgagaagttaggtctgtggtagaccagaaaccacaaattgactttttttcttagaaaatatttctatttgcggtaaatatagtaatatgtaaataatgtacatctgttgatttctggagtgtctgttattcaatgatgtatatactcccacagctcgcatgaaggaacagcctctattgatacttggttgtaaagtgaagtaagattggagggtggatggctgtcagagctcttgcagatactgtgttcactaaataaaaatcacatgtattgttaaaaaaaaaaaaaaaaa

SEQ ID NO: 1802 - DNA, 2282 bp, Homo sapiens
gttgtacttttagcttcccccatcctgcaaggccactcaaccatgtgctagctggagtgatctttattcacaatgtctttacaaaggctcctgcaacacagcagcaatggcaatttggcggacttctgcgctgggccagcgtatagctcttactccacactcaccggcagccttacgatggacgataatagaaggattcaaatgctagcagacacggtggctactctgcctcggggacgaaagcagcttgctttgaccagatcaagttctttaagtgacttttcctggtctcaaagaaagcttgttactgtggagaagcaggataatgaaacatttggatttgaaattcagtcttacaggccccagaatcagaatgcctgctcctcggaaatgttcactttgatatgcaaaatacaggaggacagcccagctcactgtgctggcctgcaagctggtgatgtccttgcaaatatcaatggtgtgagcacagaaggttttacctacaaacaagtcgttgacctgatcagatcgtccggaaacctgctaacgatagagactcttaatggaacaatgattctgaaaagaacggagcttgaagcaaagctgcaggttttaaagcaaactttgaaacaaaaatgggtggagtacagatctctgcagttacaggaacatcgtctgcttcatggtgatgcagctaattgccccagtttggaaaacatggacttggatgaattgtctttgtttggacccctgcctgggccaggcccagcccttgtggaccggaatcgattatccagtgagagcagctgtaagagctggctgagctccatgacgatggacagtgaagatggctaccagacgtgtgtgtctgaggactccagcaggggtgccttcagtcggcagacgagtacagatgatgagtgctttatccccaaggagggggatgattttctgaggaggtcatcttcaaggaggaaccggagcatcagtaacaccagcagcggatccatgtctcccttgtgggagggcaacttatcaagcatgtttgggaccctgccccggaagagcagaaagggaagtgtccgaaagcaactcttgaaatttatccctggccttcatcgtgctgtggaagaggaagaaagtcgcttttgacggattgtggtgtcctttcaaattagcttatttcacaaatatctctagactcacccagatcccagcttggtgggaaagtgcagaagaattgcaaaactgacatcccatttcacagcaatagtgacctttatttaaattgttgtgttatagtttatgcttcttaaatcatttttcaacctaaacagccaatttctaagcagacaggaaaactaaataataagttaattaatataacaaagatgcaggttcctgctcattccagtaatgtctttgaaagcaaaactaatatttattttctagattatccctgtgaataattgagaactttttggagtcaagtatgaataaaggtgtggcagaatataataatctggactattttctataggataattgctgggttataaaatcttaggtttgcttatgcccagtagctcctgcggaggcttaataataggcaattttgaatttgttcaaacctgtaatggcttgtaaacaaagatgaccatcagctgtttctcacatctatagtgacaataaagcgggaagtataagatttaataggaggggttaaggttcatgagaaccatggaaagatgtggtctgagatgggtgctgcaaagatcataataaagtcatttttatagacagtctaaacaaaatgggtggggatgtcatgttttttgcccaattcagcttttgttctgcctgaacattaatggcaagtctagaactctccgaatcctacagctttgtaattttttttctacaaatgtctaacatccaaaactgagggttgggaaaaggacttccctcctgtagtttttttcatattacttctcactttatatcttatattctaaatagctatcacctcagcagtcttttgcctattggttatgttagtatcacattacttctagcctttcaattactccatgttttatttaatatccattgaagtctatgaattctctgttctggtggcacagctattcataacctatattctagagtagacaatctggactatgtaataaatagtctgctgattttaaaaaaaaaaaaaaaaaaaaaaaaaaaaaaaaaaaaaaaaaaaaaaaaaaaaaaaaaaaaaaaaaaaaaaaaaa

SEQ ID NO: 1803 - DNA, 3460 bp, Homo sapiens
attgcccggagatggccggcagagccgccgagacgccgaagagcccgccgcccgcgcgaggtgtagacggggcactgccttcagagcaggtcctgccagcctcgctggagaggatgccctcgtgtccgtgatgggctgtgggacaagcaaggtccttcccgagccacccaaggatgtccagctggatctggtcaagaaggtggagcccttcagtggcactaagagtgacgtgtacaagcacttcatcacagaggtggacagtgttggccctgtcaaagccgggttcccagcagcaagtcagtatgcacacccctgccccggtcccccgactgctggccacacggagcctccctcagaaccaccacgcagggccagggtagctaagtacagggccaagtttgacccacgtgttacagctaagtatgacatcaaggccctaattggccgaggcagcttcagccgagtggtacgtgtagagcaccgggcaacccggcagccgtatgccatcaagatgattgagaccaagtaccgggaggggcgggaggtgtgtgagtcggagctgcgtgtgctgcgtcgggtgcgtcatgccaacatcatccagctggtggaggtgttcgagacacaggagcgggtgtacatggtgatggagctggccactggtggagagctctttgaccgcatcattgccaagggctccttcaccgagcgtgacgccacgcgggtgctgcagatggtgctggatggcgtccggtatctgcatgcactgggcatcacacaccgagacctcaaacctgagaatctgctctactaccatccgggcactgactccaagatcatcatcaccgacttcggcctggccagtgctcgcaagaagggtgatgactgcttgatgaagaccacctgtggcacgcctgagtacattgccccagaagtcctggtccgcaagccatacaccaactcagtggacatgtgggcgctgggcgtcattgcctacatcctactcagtggcaccatgccgtttgaggatgacaaccgtacccggctgtaccggcagatcctcaggggcaagtacagttactctggggagccctggcctagtgtgtccaacctggccaaggacttcattgaccgcctgctgacagtggaccctggagcccgtatgactgcactgcaggccctgaggcacccgtgggtggtgagcatggctgcctcttcatccatgaagaacctgcaccgctccatatcccagaacctccttaaacgtgcctcctcgcgctgccagagcaccaaatctgcccagtccacgcgttccagccgctccacacgctccaataagtcacgccgtgtgcgggaacgggagctgcgggagctcaacctgcgctaccagcagcaatacaatggctgagccgcctggctgtgcacacatgcagcacgacccagcctggccacacactgtggtgccatctgggtccgatgccctctctggagataggcctatgtggcccacagtaggtgaagaatgtctggctccagccctttctctgtgccttcagcagcccctgtcctcaccatggcctgggccaggtgtgacagagtagaggtagcacagggggctgtgactccccctgaactgggagcctggctggcactgatacccctcttggtgggcagctgctctggtggagttgggaagggataggacctggccttcactgtctcccttgccctttgacttttccccaatcaaagggaactgcagtgctgggtggagtgtcctgtggcctcaggaccctttgggacagttacttctgggaccccctttcctccacagagcccttctccctggtttcacacattcccatgcatcctgatccttaagattatgctccagtgggagaccctggtaggcacaaagcttgtgccttgactggacccgtagcccctggctaggtcgaaacagccctccacctcccagccaagatctgtcttccttcatggtgcctccagggagccttcctggtcccaggacctctggtggagggccatggcgtggaccttcacccttctggactgtgtggccatgctggtcatcggcttgcccaggctccagcctctccaagattctgaggggtctcagcccaccgcccttggtgccttctttgtagagcaccgctacctccctctccccgttgatgtccattccattccccaggtgcctccttcccaactgggggtggttaaagggagccccactgctgctacctggggaatggggcacctgggggccaaggcagagggaagggggtcctcccgattagggtcgagtgtcagcctgggttctatcctttggtgcagccccattgccttttcccttcaggctctgttgctccctcctctgcagctgcacgaaggcgccatctggtgtctgcatgggtgttggcagcctgggagtgatcactgcacgcccatcgtgcacacctgcccatcgtgcacacccacccatggtgcacacctgtagtcctccatgaggacatgggaaggtaggagttgccgccctgggggagggtcccgggctgctcacctctccccttctgctgagcttctgcgcacccctccctggaacttagccatactgtgtgacctgcctctgaaaccagggtgccaggggcactgccttctcacagctggccttgccccgtccaccctgtgctgcttcccttcacagcattaaccttccagtctgggtcccactgagcctcaagctggaaggagcccctgcgggaggtgggtggggttgggtggctgctttcccagaggcctgagccagaaccatccccatttcttttgtggtatctccccctaccacaaaccaggctggaacccaagccccttcctccacagctgccttcagtgggtagaatgggcccagggcccagctttggccttagcttgacggcagggccctgccaattgcaggagggtttggttcccactcagcttctgccggtcggcagcctgggccaggcccttttcctgcatgtgccacctccagtgggaaacaaaactaaagagaccactctgtgccaagtcgactatgccttagacacatcctcctaccgtccccaaatccccctgggcaggaggcagtggagaaccaagccccatggcctcagaatttccccccagttccccaagtgtctctggggacctgaagccctggggcttacgttctctcttgcccagggtgggcctggtcctgagggcaggacaggggtttggagatgtgggcctttgatagacccacttgggccttcatgccatggcctgtggatggagaatgtgcagttatttattatgcgtattcagtttgtaaacgtatcctctgtattcagtaaacaggctgcctctccagggagggctgccattcattccaacaaaaaaaaaaaaaaaaaaaaaaaaa

SEQ ID NO: 1804 - DNA, 1238 bp, Homo sapiens
aaactcccgcagacttctctgtagatcgctgagcgatactttcggcagcacctccttgattctcagttttgctggaggccgcaaccaggcccgcgccgccaccatgtttcgaaatcagtatgacaatgatgtcactgtttggagcccccagggcaggattcatcaaattgaatatgcaatggaagctgttaaacaaggttcagccacagttggtctgaaatcaaaaactcatgcagttttggttgcattgaaaagggcgcaatcagagcttgcagctcatcagaaaaaaattctccatgttgacaaccatattggtatctcaattgcggggcttactgctgatgctagactgttatgtaattttatgcgtcaggagtgtttggattccagatttgtattcgatagaccactgcctgtgtctcgtcttgtatctctaattggaagcaagacccagataccaacacaacgatatggccggagaccatatggtgttggtctccttattgctggttatgatgatatgggccctcacattttccaaacctgtccatctgctaactattttgactgcagagccatgtccattggagcccgttcccaatcagctcgtacttacttggagagacatatgtctgaatttatggagtgtaatttaaatgaactagttaaacatggtctgcgtgccttaagagagacgcttcctgcagaacaggacctgactacaaagaatgtttccattggaattgttggtaaagacttggagtttacaatctatgatgatgatgatgtgtctccattcctggaaggtcttgaagaaagaccacagagaaaggcacagcctgctcaacctgctgatgaacctgcagaaaaggctgatgaaccaatggaacattaagtgataagccagtctatatatgtattatcaaatatgtaagaatacaggcaccacatactgatgacaataatctatactttgaaccaaaagttgcagagtggtggaatgctatgttttaggaatcagtccagatgtgagttttttccaagcaacctcactgaaacctatataatggaatacatttttctttgaaagggtctgtataatcattttctagaaagtatgggtatctatactaatgtttttatatgaagaacataggtgtctttgtggttttaaagacaactgtgaaataaaattgtttcaccgcctggtaaaaaaaaaaaaaaaaaaaaaaaaaaaa

SEQ ID NO: 1805 - DNA, 1480 bp, Homo sapiens
cgcgagccgggaccacgccgacccagcgtgcccaggccgaggaaagcgcggcggcggcagtccgaagacccaccggactgaaagagaaggacgaggtcatcttcggacgggaggggcaagccagccatcctgggaccccaggcgtgcaggttctctttgagggtattccaccctgcaaaaagcatgtattcatggtcagctctcagcaaggccagtagcagagtggtaaaggccttggccctccaaggctgggaaaagacaatgacaagtcaaatccagacctatgttggatgttggtctactaggtgactgtctcctggaaatgttatgcagctcagcaaggtgaagtttcgaaatcagtatgacaatgatgtcactgtttggagcccccagggcaggattcatcaaattgaatatgcaatggaagctgttaaacaaggttcagccacagttggtctgaaatcaaaaactcatgcagttttggttgcattgaaaagggcgcaatcagagcttgcagctcatcagaaaaaaattctccatgttgacaaccatattggtatctcaattgcggggcttactgctgatgctagactgttatgtaattttatgcgtcaggagtgtttggattccagatttgtattcgatagaccactgcctgtgtctcgtcttgtatctctaattggaagcaagacccagataccaacacaacgatatggccggagaccatatggtgttggtctccttattgctggttatgatgatatgggccctcacattttccaaacctgtccatctgctaactattttgactgcagagccatgtccattggagcccgttcccaatcagctcgtacttacttggagagacatatgtctgaatttatggagtgtaatttaaatgaactagttaaacatggtctgcgtgccttaagagagacgcttcctgcagaacaggacctgactacaaagaatgtttccattggaattgttggtaaagacttggagtttacaatctatgatgatgatgatgtgtctccattcctggaaggtcttgaagaaagaccacagagaaaggcacagcctgctcaacctgctgatgaacctgcagaaaaggctgatgaaccaatggaacattaagtgataagccagtctatatatgtattatcaaatatgtaagaatacaggcaccacatactgatgacaataatctatactttgaaccaaaagttgcagagtggtggaatgctatgttttaggaatcagtccagatgtgagttttttccaagcaacctcactgaaacctatataatggaatacatttttctttgaaagggtctgtataatcattttctagaaagtatgggtatctatactaatgtttttatatgaagaacataggtgtctttgtggttttaaagacaactgtgaaataaaattgtttcaccgcctggtaaaaaaaaaaaaaaaaaaaaaaaaaaaa

SEQ ID NO: 1806 - DNA, 949 bp, Homo sapiens
gcgctccgggcctggaatccctacgcgtccctttgggtttagcacgatgagctcaatcggcactgggtatgacctgtcagcctctacattctctcctgacggaagagtttttcaagttgaatatgctatgaaggctgtggaaaatagtagtacagctattggaatcagatgcaaagatggtgttgtctttggggtagaaaaattagtcctttctaaactttatgaagaaggttccaacaaaagactttttaatgttgatcggcatgttggaatggcagtagcaggtttgttggcagatgctcgttctttagcagacatagcaagagaagaagcttccaacttcagatctaactttggctacaacattccactaaaacatcttgcagacagagtggccatgtatgtgcatgcatatacactctacagtgctgttagaccttttggctgcagtttcatgttagggtcttacagtgtgaatgacggtgcgcaactctacatgattgacccatcaggtgtttcatacggttattggggctgtgccatcggcaaagccaggcaagctgcaaagacggaaatagagaagcttcagatgaaagaaatgacctgccgtgatatcgttaaagaagttgcaaaaataatttacatagtacatgacgaagttaaggataaagcttttgaactagaactcagctgggttggtgaattaactaatggaagacatgaaattgttccaaaagatataagagaagaagcagagaaatatgctaaggaatctctgaaggaagaagatgaatcagatgatgataatatgtaacatttactccagcatctattgtattttaaatttctactccagtccaatgtaactatttagccctggattatacatactgtccaattttcattaaatttttgtcttataactataaaaaaaaaaaaaaaaaaaaaa

SEQ ID NO: 1807 - DNA, 1023 bp, Homo sapiens
gttggctgccggtgagttgggtgccggtggagtcgtgttggtcctcagaatccccgcgtagccgctgcctcctcctaccctcgccatgtttcttacccggtctgagtacgacaggggcgtgaatactttttctcccgaaggaagattatttcaagtggaatatgccattgaggctatcaagcttggttctacagccattgggatccagacatcagagggtgtgtgcctagctgtggagaagagaattacttccccactgatggagcccagcagcattgagaaaattgtagagattgatgctcacataggttgtgccatgagtgggctaattgctgatgctaagactttaattgataaagccagagtggagacacagaaccactggttcacctacaatgagacaatgacagtggagagtgtgacccaagctgtgtccaatctggctttgcagtttggagaagaagatgcagatccaggtgccatgtctcgtccctttggagtagcattattatttggaggagttgatgagaaaggaccccagctgtttcatatggacccatctgggacctttgtacagtgtgatgctcgagcaattggctctgcttcagagggtgcccagagctccttgcaagaagtttaccacaagtctatgactttgaaagaagccatcaagtcttcactcatcatcctcaaacaagtaatggaggagaagctgaatgcaacaaacattgagctagccacagtgcagcctggccagaatttccacatgttcacaaaggaagaacttgaagaggttatcaaggacatttaaggaatcctgatcctcagaacttctctgggacaatttcagttctaataatgtccttaaattttatttccagctcctgttccttggaaaatctccattgtatgtgcattttttaaatgatgtctgtacataaaggcagttctgaaataaagaaaattttaaaataaaaaaaaaaaaaaaaaaaaaaaaaaaaaaaaaaaaaaaaaaaaaaaaaa

SEQ ID NO: 1808 - DNA, 1035 bp, Homo sapiens
gcggctggtaccccggaagcagtcgctgcaacttccgggaggtgcttgtgtgcctggtgcgggagctacggggcccagggattgtgtttaaagtagtgcttctaccaacatgtcccgtggttccagcgccggttttgaccgccacattaccattttttcacccgagggtcggctctaccaagtagaatatgcttttaaggctattaaccagggtggccttacatcagtagctgtcagagggaaagactgtgcagtaattgtcacacagaagaaagtacctgacaaattattggattccagcacagtgactcacttattcaagataactgaaaacattggttgtgtgatgaccggaatgacagctgacagcagatcccaggtacagagggcacgctatgaggcagctaactggaaatacaagtatggctatgagattcctgtggacatgctgtgtaaaagaattgccgatatttctcaggtctacacacagaatgctgaaatgaggcctcttggttgttgtatgattttaattggtatagatgaagagcaaggccctcaggtatataagtgtgatcctgcaggttactactgtgggtttaaagccactgcagcgggagttaaacaaactgagtcaaccagcttccttgaaaaaaaagtgaagaagaaatttgattggacatttgaacagacagtggaaactgcaattacatgcctgtctactgttctatcaattgatttcaaaccttcagaaatagaagttggagtagtgacagttgaaaatcctaaattcaggattcttacagaagcagagattgatgctcaccttgttgctctagcagagagagactaaacattgtcgttagtttaccagatccgtgatgccacttacctgtgtgtttggtaacaacaaaccaacatcatggaggtccctggattgaaaaaggagcctctcccactcctcctaccaccgaagtggttaggactctatataaataaaaacaaggcttttggaaaataaaaaaaaaaaaaaaaaaa

SEQ ID NO: 1809 - DNA, 984 bp, Homo sapiens
cggcgccgagggtggggcgcgggcgtagtggcgccgggagtcgcgggtgcgcgcgggccgtgagtgtgcgcttttgagagtcgcggcggaaggagcccggccgccgcccgccggcatgagctacgaccgcgccatcaccgtcttctcgcccgacggccacctcttccaagtggagtacgcgcaggaggccgtcaagaagggctcgaccgcggttggtgttcgaggaagagacattgttgttcttggtgtggagaagaagtcagtggccaaactgcaggatgaaagaacagtgcggaagatctgtgctttggatgacaacgtctgcatggcctttgcaggcctcaccgccgatgcaaggatagtcatcaacagggcccgggtggagtgccagagccaccggctgactgtggaggacccggtcactgtggagtacatcacccgctacatcgccagtctgaagcagcgttatacgcagagcaatgggcgcaggccgtttggcatctctgccctcatcgtgggtttcgactttgatggcactcctaggctctatcagactgacccctcgggcacataccatgcctggaaggccaatgccataggtcggggtgccaagtcagtgcgcgagttcctggagaagaactatactgacgaagccattgaaacagatgatctgaccattaagctggtgatcaaggcactcctggaagtggttcagtcaggtggcaaaaacattgaacttgctgtcatgaggcgagatcaatccctcaagattttaaatcctgaagaaattgagaagtatgttgctgaaattgaaaaagaaaaagaagaaaacgaaaagaagaaacaaaagaaagcatcatgatgaataaaatgtctttgcttgtaatttttaaattcatatcaatcatggatgagtctcgatgtgtaggcctttccattccatttattcacactgagtgtcctacaataaacttccgtattttt

SEQ ID NO: 1810 - DNA, 872 bp, Homo sapiens
aaggcagccatctcgccgtgagacagcaagtgtcgcgcagccgtgcgatgttgtcctctacagccatgtattcggctcctggcagagacttggggatggaaccgcacagagccgcgggccctttgcagctgcgattttcgccctacgttttcaacggaggtactatactggcaattgctggagaagattttgcaattgttgcttctgatactcgattgagtgaagggttttcaattcatacgcgggatagccccaaatgttacaaattaacagacaaaacagtcattggatgcagcggttttcatggagactgtcttacgctgacaaagattattgaagcaagactaaagatgtataagcattccaataataaggccatgactacgggggcaattgctgcaatgctgtctacaatcctgtattcaaggcgcttctttccatactatgtttacaacatcatcggtggacttgatgaagaaggaaagggggctgtatacagctttgatccagtagggtcttaccagagagactccttcaaggctggaggctcagcaagtgccatgctacagcccctgcttgacaaccaggttggttttaagaacatgcagaatgtggagcatgttccgctgtccttggacagagccatgcggctggtgaaagatgtcttcatttctgcggctgagagagatgtgtacactggggacgcactccggatctgcatagtgaccaaagagggcatcagggaggaaactgtttccttaaggaaggactgatctgtgtgctcttatcaccaatcagttcagacctggttgattttgtactttggaactgtaccttggatggttttgtttattaaaagagaaacctgaagt

SEQ ID NO: 1811 - DNA, 850 bp, Homo sapiens
ctgcaggcgtcgcgccaatcttcgctctgaggtgctgtctcaccggtgagacctggaagcgggcgagtctcgtgctgtgtcggacctgcagcccctggccttccgccaccatggagtacctcatcggtatccaaggccccgactatgttcttgtcgcctccgaccgggtggccgccagcaatattgtccagatgaaggacgatcatgacaagatgtttaagatgagtgaaaagatattactcctgtgtgttggagaggctggagacactgtacagtttgcagaatatattcagaaaaacgtgcaactttataagatgcgaaatggatatgaattgtctcccacggcagcagctaacttcacacgccgaaacctggctgactgtcttcggagtcggaccccatatcatgtgaacctcctcctggctggctatgatgagcatgaagggccagcgctgtattacatggactacctggcagccttggccaaggccccttttgcagcccacggctatggtgccttcctgactctcagtatcctcgaccgatactacacaccgactatctcacgtgagagggcagtggaactccttaggaaatgtctggaggagctccagaaacgcttcatcctgaatctgccaaccttcagtgttcgaatcattgacaaaaatggcatccatgacctggataacatttccttccccaaacagggctcctaacatcatgtcctccctcccacttgccagggaacttttttttgatgggctcctttatttttttctactcttttcaggcgcactcttgataaatggttaattcagaataaaggtgactatggatataattgaaaaaa

SEQ ID NO: 1812 - DNA, 784 bp, Homo sapiens
gagcggttgcgcagtgaaggctagacccggtttactggaattgctctggcgatcgaggggtcctagtacaccgcaatcatgtctattatgtcctataacggaggggccgtcatggccatgaaggggaagaactgtgtggccatcgctgcagacaggcgcttcgggatccaggcccagatggtgaccacggacttccagaagatctttcccatgggtgaccggctgtacatcggtctggccgggctcgccactgacgtccagacagttgcccagcgcctcaagttccggctgaacctgtatgagttgaaggaaggtcggcagatcaaaccttataccctcatgagcatggtggccaacctcttgtatgagaaacggtttggcccttactacactgagccagtcattgccgggttggacccgaagacctttaagcccttcatttgctctctagacctcatcggctgccccatggtgactgatgactttgtggtcagtggcacctgcgccgaacaaatgtacggaatgtgtgagtccctctgggagcccaacatggatccggatcacctgtttgaaaccatctcccaagccatgctgaatgctgtggaccgggatgcagtgtcaggcatgggagtcattgtccacatcatcgagaaggacaaaatcaccaccaggacactgaaggcccgaatggactaaccctgttcccagagcccacttttttttctttttttgaaataaaatagcctgtctttcaaaaaaaaaaaaaaaaaaaaaaaaaaaaaaa

SEQ ID NO: 1813 - DNA, 925 bp, Homo sapiens
ttttttctgctaccgtgactaagatggaagcgtttttggggtcgcggtccggactttgggcggggggtccggccccaggacagttttaccgcattccgtccactcccgattccttcatggatccggcgtctgcactttacagaggtccaatcacgcggacccagaaccccatggtgaccgggacctcagtcctcggcgttaagttcgagggcggagtggtgattgccgcagacatgctgggatcctacggctccttggctcgtttccgcaacatctctcgcattatgcgagtcaacaacagtaccatgctgggtgcctctggcgactacgctgatttccagtatttgaagcaagttctcggccagatggtgattgatgaggagcttctgggagatggacacagctatagtcctagagctattcattcatggctgaccagggccatgtacagccggcgctcgaagatgaaccctttgtggaacaccatggtcatcggaggctatgctgatggagagagcttcctcggttatgtggacatgcttggtgtagcctatgaagccccttcgctggccactggttatggtgcatacttggctcagcctctgctgcgagaagttctggagaagcagccagtgctaagccagaccgaggcccgcgacttagtagaacgctgcatgcgagtgctgtactaccgagatgcccgttcttacaaccggtttcaaatcgccactgtcaccgaaaaaggtgttgaaatagagggaccattgtctacagagaccaactgggatattgcccacatgatcagtggctttgaatgaaatacagatgcattatccagaactgaagttgccctacttttaactttgaacttggctagttcaaagatagactcttcttttgtaaagtaaataaattcttcaaaatg

SEQ ID NO: 1814 - DNA, 1050 bp, Homo sapiens
ctttctgcccacactagacatggcgcttgccagcgtgttggagagaccgctaccggtgaaccagcgcgggtttttcggacttgggggtcgtgcagatctgctggatctaggtccagggagtctcagtgatggtctgagcctggccgcgccaggctggggtgtcccagaagagccaggaatcgaaatgcttcatggaacaaccaccctggccttcaagttccgccatggagtcatagttgcagctgactccagggctacagcgggtgcttacattgcctcccagacggtgaagaaggtgatagagatcaacccatacctgctaggcaccatggctgggggcgcagcggattgcagcttctgggaacggctgttggctcggcaatgtcgaatctatgagcttcgaaataaggaacgcatctctgtagcagctgcctccaaactgcttgccaacatggtgtatcagtacaaaggcatggggctgtccatgggcaccatgatctgtggctgggataagagaggccctggcctctactacgtggacagtgaagggaaccggatttcaggggccaccttctctgtaggttctggctctgtgtatgcatatggggtcatggatcggggctattcctatgacctggaagtggagcaggcctatgatctggcccgtcgagccatctaccaagccacctacagagatgcctactcaggaggtgcagtcaacctctaccacgtgcgggaggatggctggatccgagtctccagtgacaatgtggctgatctacatgagaagtatagtggctctaccccctgaaagagggtggatgcagctgcttgtgtttcttggggtgactgtcattggtaatacggacacagtgacccatcctccatcctatttatagtggaagggccttcaattgtatcagtacttttttttaagctctggcacattgacctctatgtgttaccagtcattaatgagctgctgcagaggtgactatttgttttactttcttggatgttaaacattacactactcactactcaatctca

SEQ ID NO: 1815 - DNA, 849 bp, Homo sapiens
acagttgctttgaggcagtaccggaggagaaagatggcggctaccttactagctgctcggggagccgggccagcaccggcttgggggccggaggcgttcactccagactgggaaagccgagaagtttccactgggaccactatcatggccgtgcagtttgacgggggcgtggttctgggggcggactccagaacaaccactgggtcctacatcgccaatcgagtgactgacaagctgacacctattcacgaccgcattttctgctgtcgctcaggctcagctgctgatacccaggcagtagctgatgctgtcacctaccagctcggtttccacagcattgaactgaatgagcctccactggtccacacagcagccagcctctttaaggagatgtgttaccgataccgggaagacctgatggcgggaatcatcatcgcaggctgggaccctcaagaaggagggcaggtgtactcagtgcctatggggggtatgatggtaaggcagtcctttgccattggaggctccgggagctcctacatctatggctatgttgatgctacctaccgggaaggcatgaccaaggaagagtgtctgcaattcactgccaatgctctcgctttggccatggagcgggatggctccagtggaggagtgatccgcctggcagccattgcagagtcaggggtagagcggcaagtacttttgggagaccagatacccaaattcgccgttgccactttaccacccgcctgaatcctgggattctagtatgcaataagagatgccctgtactgatgcaaaatttaataaagtttgtcacagagaaaaaaaaaaaaaaaaaaaaaaaaa

SEQ ID NO: 1816 - DNA, 1012 bp, Homo sapiens
actgctttcttgggaagatggcggctgtgtcggtgtatgctccaccagttggaggcttctcttttgataactgccgcaggaatgccgtcttggaagccgattttgcaaagaggggatacaagcttccaaaggtccggaaaactggcacgaccatcgctggggtggtctataaggatggcatagttcttggagcagatacaagagcaactgaagggatggttgttgctgacaagaactgttcaaaaatacacttcatatctcctaatatttattgttgtggtgctgggacagctgcagacacagacatgacaacccagctcatttcttccaacctggagctccactccctctccactggccgtcttcccagagttgtgacagccaatcggatgctgaagcagatgcttttcaggtatcaaggttacattggtgcagccctagttttagggggagtagatgttactggacctcacctctacagcatctatcctcatggatcaactgataagttgccttatgtcaccatgggttctggctccttggcagcaatggctgtatttgaagataagtttaggccagacatggaggaggaggaagccaagaatctggtgagcgaagccatcgcagctggcatcttcaacgacctgggctccggaagcaacattgacctctgcgtcatcagcaagaacaagctggattttctccgcccatacacagtgcccaacaagaaggggaccaggcttggccggtacaggtgtgagaaagggactactgcagtcctcactgagaaaatcactcctctggagattgaggtgctggaagaaacagtccaaacaatggacacttcctgaatggcatcagtgggtggctggccgcggttctggaaggtggtgagcattgaggcccagtaagacactcatgtggctagtgtttgccgaatgaaactcaactcaataaaaaacaaaaaccaaattgggcagctgaaaaaaaaaaaaaaaaaaaaaaaaaaaaa

SEQ ID NO: 1817 - DNA, 1048 bp, Homo sapiens
gcgcgttgtgcgctgtcccaggttggaaaccagtgccccaggcggcgaggagagcggtgccttgcagggatgctgcgggcgggagcaccaaccggggacttaccccgggcgggagaagtccacaccgggaccaccatcatggcagtggagtttgacgggggcgttgtgatgggttctgattcccgagtgtctgcaggcgaggcggtggtgaaccgagtgtttgacaagctgtccccgctgcacgagcgcatctactgtgcactctctggttcagctgctgatgcccaagccgtggccgacatggccgcctaccagctggagctccatgggatagaactggaggaacctccacttgttttggctgctgcaaatgtggtgagaaatatcagctataaatatcgagaggacttgtctgcacatctcatggtagctggctgggaccaacgtgaaggaggtcaggtatatggaaccctgggaggaatgctgactcgacagccttttgccattggtggctccggcagcacctttatctatggttatgtggatgcagcatataagccaggcatgtctcccgaggagtgcaggcgcttcaccacagacgctattgctctggccatgagccgggatggctcaagcgggggtgtcatctacctggtcactattacagctgccggtgtggaccatcgagtcatcttgggcaatgaactgccaaaattctatgatgagtgaaccttccccagacttctctttcttattttgtaataaactctctagggccaaaacctggtatggtcattgggaaatgagtgctcagggagatggagcttaggggaggtgggtgcttccctcctagatgtcagcatacactctttcttcttttgtcccaggtctaaaacatctttcctagagaaaacaaaagggactaaactagaaatataaagagccctatacatgacaggtgatcacgtactgaatgattttgaagtagtacaaacaataaaaattctcattccgcatcatcatgcggtccatgatgatgaggccgcaa

SEQ ID NO: 1818 - DNA, 1018 bp, Homo sapiens
gcgcgttgtgcgctgtcccaggttggaaaccagtgccccaggcggcgaggagagcggtgccttgcagggatgctgcgggcgggagaagtccacaccgggaccaccatcatggcagtggagtttgacgggggcgttgtgatgggttctgattcccgagtgtctgcaggcgaggcggtggtgaaccgagtgtttgacaagctgtccccgctgcacgagcgcatctactgtgcactctctggttcagctgctgatgcccaagccgtggccgacatggccgcctaccagctggagctccatgggatagaactggaggaacctccacttgttttggctgctgcaaatgtggtgagaaatatcagctataaatatcgagaggacttgtctgcacatctcatggtagctggctgggaccaacgtgaaggaggtcaggtatatggaaccctgggaggaatgctgactcgacagccttttgccattggtggctccggcagcacctttatctatggttatgtggatgcagcatataagccaggcatgtctcccgaggagtgcaggcgcttcaccacagacgctattgctctggccatgagccgggatggctcaagcgggggtgtcatctacctggtcactattacagctgccggtgtggaccatcgagtcatcttgggcaatgaactgccaaaattctatgatgagtgaaccttccccagacttctctttcttattttgtaataaactctctagggccaaaacctggtatggtcattgggaaatgagtgctcagggagatggagcttaggggaggtgggtgcttccctcctagatgtcagcatacactctttcttcttttgtcccaggtctaaaacatctttcctagagaaaacaaaagggactaaactagaaatataaagagccctatacatgacaggtgatcacgtactgaatgattttgaagtagtacaaacaataaaaattctcattccgcatcatcatgcggtccatgatgatgaggccgcaa

SEQ ID NO: 1819 - DNA, 1586 bp, Homo sapiens
agtggtggaggaacttccggcagcggcagctcaagtggccaaggcaagatgggtcaaagtcagagtggtggtcatggtcctggaggtggcaagaaggatgacaaggacaagaaaaagaaatatgaacctcctgtaccaactagagtggggaaaaagaagaagaaaacaaagggaccagatgctgccagcaaactgccactggtgacacctcacactcagtgccggttaaaattactgaagttagagagaattaaagactatcttctcatggaggaagaattcattagaaatcaggaacaaatgaaaccattagaagaaaagcaagaggaggaaagatcaaaagtggatgatctgagggggaccccgatgtcagtaggaaccttggaagagatcattgatgacaatcatgccatcgtgtctacatctgtgggctcagaacactacgtcagcattctttcatttgtagacaaggatctgctggaacctggctgctcggtcctgctcaaccacaaggtgcatgccgtgataggggtgctgatggatgacacggatcccctggtcacagtgatgaaggtagaaaaggccccccaggagacctatgcagatattggggggttggacaaccaaattcaggaaattaaggaatctgtggagcttcctctcacccatcctgaatattatgaagagatgggtataaagcctcctaagggggtcattctctatggtccacctggcacaggtaaaaccttgttagccaaagcagtagcaaaccaaacctcagccactttcttgagagtggttggctctgaacttattcagaagtacctaggtgatgggcccaaactcgtacgggaattgttccgagttgctgaagaacatgcaccgtccatcgtgtttattgatgaaattgacgccattgggacaaaaagatatgactccaattctggtggtgagagagaaattcagcgaacaatgttggaactgctgaaccagttggatggatttgattctaggggagatgtgaaagttatcatggccacaaaccgaatagaaactttggatccagcacttatcagaccaggccgcattgacaggaagattgagttccccctgcctgatgaaaagacgaagaagcgcatctttcagattcacacaagcaggatgacgctggctgatgatgtaaccctggacgacctgatcatggctaaagatgacctctctggtgctgacatcaaggcaatctgtacagaagctggtctgatggccttaagagaacgtagaatgaaagtaacaaatgaagacttcaaaaaatctaaagaaaatgttctttataagaaacaggaaggcacccctgaggggctgtatctctaatgaaccatggctgtcatcaggaaaatggttgggagatttctcaatccctgaaagggatgaggttgggggagttgcccagaggaatccctgttcccactgatttttattagcaaaacatcctgtgtcttttggagtacgatgtgtaagtgcccattgggtggcctgttggtcactgtgcagcagtctgcttcccaataaagcgtgctctttcacaa

SEQ ID NO: 1820 - DNA, 1545 bp, Homo sapiens
gaagacaccaccggaagcaaggaaggtgctgtgtaatcattaaggagcggaggcttttggagctgctaaaatgccggattacctcggtgccgatcagcggaagaccaaagaggatgagaaggacgacaagcccatccgagctctggatgagggggatattgccttgttgaaaacttatggtcagagcacttactctaggcagatcaagcaagttgaagatgacattcagcaacttctcaagaaaattaatgagctcactggtattaaagaatctgacactggcctggccccaccagcactctgggatttggctgcagataagcagacactccagagtgaacagcctttacaggttgccaggtgtacaaagataatcaatgctgattcggaggacccaaaatacattatcaacgtaaagcagtttgccaagtttgtggtggaccttagtgatcaggtggcacctactgacattgaagaagggatgagagtgggcgtggatagaaataaatatcaaattcacattccattgcctcctaagattgacccaacagttaccatgatgcaggtggaagagaaacctgatgtcacatacagtgatgttggtggctgtaaggaacagattgagaaactgcgagaagtagttgaaaccccattacttcatccagagaggtttgtgaaccttggcattgagcctcccaagggcgtgctgctctttggtccacccggtacaggcaagacactctgtgcgcgggcagttgctaatcggactgatgcgtgcttcattcgagttattggatctgagcttgtacagaaatacgtcggtgagggggctcgaatggttcgtgaactctttgaaatggccagaacaaaaaaagcctgccttatcttctttgatgaaattgatgctattggaggggctcgttttgatgatggtgctggaggtgacaatgaagtgcagagaacaatgttggaactgatcaatcagcttgatggttttgatcctcgaggcaatattaaagtgctgatggccactaacagacctgatactttggatccagcactgatgaggccagggagattggatagaaaaattgaatttagcttgcccgatctagagggtcggacccacatatttaagattcacgctcgttcaatgagtgttgaaagagatatcagatttgaactgttagcacgactgtgtccaaatagcactggtgctgagattagaagcgtctgcacagaggctggtatgtttgccatcagagcacggcgaaaaattgctaccgagaaggatttcttggaagctgtaaataaggtcattaagtcttatgccaaattcagtgctactcctcgttacatgacatacaactgaaccctgaaggctttcaagtgaaaactttaaattggaatcctaaccttatatagacttgttaataaccaattcataaacaaataaatggcttcaaaattgtatgcttttttccatatctcttcttgtaatataataaaaggtgatttctaatgttaaaaaaaaaaaaaaaaaaa

SEQ ID NO: 1821 - DNA, 1618 bp, Homo sapiens
gtggccaggggttggtctttggaatcggagaggcagattcgctgctccgcagcacggccggagctggtcgggtcaagagtcgggatttgtggggagaggttttccactggtcaagagaaggctttaagaaagacggtattaatctcccgttgcggctcccgcctggtcccatcttctgcccgctcctccaggaaatgaatctgctgccgaatattgagagtccagtgactcggcaggagaagatggcgaccgtgtgggatgaggccgagcaagatggaattggggaggaggtgctcaagatgtccacggaggagatcatccagcgcacacggctgctggacagtgagatcaagatcatgaagagtgaagtgttgagagtcacccatgagctccaagccatgaaggacaagataaaagagaacagtgagaaaatcaaagtgaacaagaccctgccgtaccttgtctccaacgtcatcgagctcctggatgttgatcctaatgaccaagaggaggatggtgccaatattgacctggactcccagaggaagggcaagtgtgctgtgatcaaaacctctacacgacagacgtacttccttcctgtgattgggttggtggatgctgaaaagctaaagccaggagacctggtgggtgtgaacaaagactcctatctgatcctggagacgctgcccacagagtatgactcgcgggtgaaggccatggaggtagacgagaggcccacggagcaatacagtgacattgggggtttggacaagcagatccaggagctggtggaggccattgtcttgccaatgaaccacaaggagaagtttgagaacttggggatccaacctccaaaaggggtgctgatgtatgggcccccagggacggggaagaccctcctggcccgggcctgtgccgcacagactaaggccaccttcctaaagctggctggcccccagctggtgcagatgttcattggagatggtgccaagctagtccgggatgcctttgccctggccaaggagaaagcgccctctatcatcttcattgatgagttggatgccatcggcaccaagcgctttgacagtgagaaggctggggaccgggaggtgcagaggacaatgctggagcttctgaaccagctggatggcttccagcccaacacccaagttaaggtaattgcagccacaaacagggtggacatcctggaccccgccctcctccgctcgggccgccttgaccgcaagatagagttcccgatgcccaatgaggaggcccgggccagaatcatgcagatccactcccgaaagatgaatgtcagtcctgacgtgaactacgaggagctggcccgctgcacagatgacttcaatggggcccagtgcaaggctgtgtgtgtggaggcgggcatgatcgcactgcgcaggggtgccacggagctcacccacgaggactacatggaaggcatcctggaggtgcaggccaagaagaaagccaacctacaatactacgcctagggcacacaggccagccccagtctcacggctgaagtgcgcaataaaagatggtttagggtccctgccaaaaaaaaaaaaaaaaaaaaaaaaaaaaaaaaaaaaaa

SEQ ID NO: 1822 - DNA, 1400 bp, Homo sapiens
gatcatcccaggccacacagaggccggcttggtcactatggaggagataggcatcttggtggagaaggctcaggatgagatcccagcactgtccgtgtcccggccccagaccggcctgtccttcctgggccctgagcctgaggacctggaggacctgtacagccgctacaagaagctgcagcaagagctggagttcctggaggtgcaggaggaatacatcaaagatgagcaaaagaacctgaaaaaggaatttctccatgcccaggaggaggtgaagcgaatccaaagcatcccgctggtcatcggacaatttctggaggctgtggatcagaatacagccatcgtgggctctaccacaggctccaactattatgtgcgcatcctgagcaccatcgatcgggagctgctcaagcccaacgcctcagtggccctccacaagcacagcaatgcactggtggacgtgctgccccccgaagccgacagcagcatcatgatgctcacctcagaccagaagccagatgtgatgtacgcggacatcggaggcatggacatccagaagcaggaggtgcgggaggccgtggagctcccgctcacgcatttcgagctctacaagcagatcggcatcgatcccccccgaggcgtcctcatgtatggcccacctggctgtgggaagaccatgttggcaaaggcggtggcacatcacacaacagctgcattcatccgggtcgtgggctcggagtttgtacagaagtatctgggtgagggcccccgcatggtccgggatgtgttccgcctggccaaggagaatgcacctgccatcatcttcatagacgagattgatgccatcgccaccaagagattcgatgctcagacaggggccgacagggaggttcagaggatcctgctggagctgctgaatcagatggatggatttgatcagaatgtcaatgtcaaggtaatcatggccacaaacagagcagacaccctggatccggccctgctacggccaggacggctggaccgtaaaattgaatttccacttcctgaccgccgccagaagagattgattttctccactatcactagcaagatgaacctctctgaggaggttgacttggaagactatgtggcccggccagataagatttcaggagctgatattaactccatctgtcaggagagtggaatgttggctgtccgtgaaaaccgctacattgtcctggccaaggacttcgagaaagcatacaagactgtcatcaagaaggacgagcaggagcatgagttttacaagtgacccttcccttccctccaccacaccactcaggggctggggcttctctcgcacccccagcacctctgtcccaaaacctcattcccttttttctttacccaggattggt

SEQ ID NO: 1823 - DNA, 1332 bp, Homo sapiens
aagacggctcggatgccggcggtctctgctgaagagagaagatggcgcttgacggaccagagcagatggagctggaggaggggaaggcaggcagcggactccgccaatattatctgtccaagattgaagaactccagctgattgtgaatgataagagccaaaacctccggaggctgcaggcacagaggaacgaactaaatgctaaagttcgcctattgcgggaggagctacagctgctgcaggagcagggctcctatgtgggggaagtagtccgggccatggataagaagaaagtgttggtcaaggtacatcctgaaggtaaatttgttgtagacgtggacaaaaacattgacatcaatgatgtgacacccaattgccgggtggctctaaggaatgacagctacactctgcacaagatcctgcccaacaaggtagacccattagtgtcactgatgatggtggagaaagtaccagattcaacttatgagatgattggtggactggacaaacagatcaaggagatcaaagaagtgatcgagctgcctgttaagcatcctgagctcttcgaagcactgggcattgctcagcccaagggagtgctgctgtatggacctccaggcactgggaagacactgttggcccgggctgtggctcatcatacggactgtacctttattcgtgtctctggctctgaactggtacagaaattcataggggaaggggcaagaatggtgagggagctgtttgtcatggcacgggaacatgctccatctatcatcttcatggacgaaatcgactccatcggctcctcgcggctggaggggggttctggaggggacagtgaagtgcagcgcacgatgctggagttgctcaaccagctcgacggctttgaggccaccaagaacatcaaggttatcatggctactaataggattgatatcctggactcggcactgcttcgcccagggcgcattgacagaaaaattgaattcccaccccccaatgaggaggcccggctggacattttgaagattcattctcggaagatgaacctgacccgggggatcaacctgagaaaaattgctgagctcatgccaggagcatcaggggctgaagtgaagggcgtgtgcacagaagctggcatgtatgccctgcgagaacggcgagtccatgtcactcaggaggactttgagatggcagtagccaaggtcatgcagaaggacagtgagaaaaacatgtccatcaagaaattatggaagtgagtggacagcctttgtgtgtatctctccaataaagctctgtgggccaagtcctctaggaaaaaaaaaaaaa

SEQ ID NO: 1824 - DNA, 1590 bp, Homo sapiens
atgagagacggcttctcatcatggcggaccctagagataaggcgcttcaggactaccgcaagaagttgcttgaacacaaggagatcgacggccgtcttaaggagttaagggaacaattaaaagaacttaccaagcagtatgaaaagtctgaaaatgatctgaaggccctacagagtgttgggcagatcgtgggtgaagtgcttaaacagttaactgaagaaaaattcattgttaaagctaccaatggaccaagatatgttgtgggttgtcgtcgacagcttgacaaaagtaagctgaagccaggaacaagagttgctttggatatgactacactaactatcatgagatatttgccgagagaggtggatccactggtttataacatgtctcatgaggaccctgggaatgtttcttattctgagattggagggctatcagaacagatccgggaattaagagaggtgatagaattacctcttacaaacccagagttatttcagcgtgtaggaataatacctccaaaaggctgtttgttatatggaccaccaggtacgggaaaaacactcttggcacgagccgttgctagccagctggactgcaatttcttaaaggttgtatctagttctattgtagacaagtacattggtgaaagtgctcgtttgatcagagaaatgtttaattatgctagagatcatcaaccatgcatcatttttatggatgaaatagatgctattggtggtcgtcggttttctgagggtacttcagctgacagagagattcagagaacgttaatggagttactgaatcaaatggatggatttgatactctgcatagagttaaaatgatcatggctacaaacagaccagatacactggatcctgctttgctgcgtccaggaagattagatagaaaaatacatattgatttgccaaatgaacaagcaagattagacatactgaaaatccatgcaggtcccattacaaagcatggtgaaatagattatgaagcaattgtgaagctttcggatggctttaatggagcagatctgagaaatgtttgtactgaagcaggtatgttcgcaattcgtgctgatcatgattttgtagtacaggaagacttcatgaaagcagtcagaaaagtggctgattctaagaagctggagtctaaattggactacaaacctgtgtaatttactgtaagatttttgatggctgcatgacagatgttggcttattgtaaaaataaagttaaagaaaataatgtatgtattggcaatgatgtcattaaaagtatatgaataaaaatatgagtaacatcataaaaattagtaattcaacttttaagatacagaagaaatttgtatgtttgttaaagttgcatttattgcagcaagttacaaagggaaagtgttgaagcttttcatatttgctgcgtgagcattttgtaaaatattgaaagtggtttgagatagtggtataagaaagcatttcttatgacttattttgtatcatttgttttcctcatctaaaaagttgaataaaatctgtttgattcagttctcctacatataaaaaaaaaaaaaaaaaaaa

SEQ ID NO: 1825 - DNA, 1598 bp, Homo sapiens
cgtcggcggccgcggccggggacggtgtgagagcggtaagatggcggcggcggcggtggtggagttccagagagcccagtctctactcagcaccgaccgggaggcctccatcgacatcctccactccatcgtgaagcgtgacattcaggaaaacgatgaagaggcagtgcaagtcaaagagcagagcatcctggaactgggatctctcctggcaaagactggacaagctgcagagcttggaggactcctgaagtatgtacgacccttcttgaattccatcagcaaggctaaagcagctcgcctggtccgatctcttcttgatctgtttcttgatatggaagcagctacagggcaggaggtcgagctgtgtttagagtgcatcgaatgggccaagtcagagaaaagaactttcttacgccaagctttggaggcaagactggtgtctttgtactttgataccaagaggtaccaggaagcattgcatttgggttctcagctgctgcgggagttgaaaaagatggacgacaaagctcttttggtggaagtacagcttttagaaagcaaaacataccatgccctgagcaacctgccgaaagcccgagctgccttaacttctgctcgaaccacagcaaatgccatctactgcccccctaaattgcaggccaccttggacatgcagtcgggtattatccatgcagcagaagagaaggactggaaaactgcgtactcatacttctatgaggcatttgagggttatgactccatcgacagccccaaggccatcacatctctgaagtacatgttgctgtgcaaaatcatgctcaacaccccagaagatgtccaggctttggtgagcgggaagcttgcacttcggtatgcagggaggcagacagaagcattaaaatgcgtggctcaggctagcaagaacagatcactggcagattttgaaaaggctctgacagattaccgggcagagctccgggatgacccaatcatcagcacacacttggccaagttgtatgataacttactagaacagaatctgatccgagtcattgagcctttttccagagtacagattgaacacatatctagtctcatcaaactctccaaggccgacgtggaaaggaaattatcacagatgattcttgacaagaaatttcatgggattttggaccagggggagggtgtcctgattattttcgatgaacccccagtagataaaacttacgaagctgctctggaaacaattcagaacatgagcaaagtagtggattccctctacaacaaagccaagaaactgacatagagttggatctgtagcggtcctttggagagtgtgtgtggcgggagagtgaaaccttgggggaaaatgctaggagattcttttttctttttgttctacttttcgctcggaaagtttttaaatcctcatttggtgcatctgtattccagccaataggtgtgccagttttcatgtaatctttactggcccaacttgggagtggggaaattgcttaaaaaaaaagaaaaagaaaaaaaaaaagattattctaaataaaaggaaaaaggcttacactaaaaaaaaaaaaaaaaaa

SEQ ID NO: 1826 - DNA, 1757 bp, Homo sapiens
tttgacgcctcaatggcacagccaagtgcgcgggaagtgggctgcaaacgccggagagttttgtccggagcgcagagacgcgctgtaaccgagcaaccagcggggcccgcccccggcctgctacggcgctcccagcctgccccgcgccgctcggcgccggaagtgagtgagcatttccggcagccatccccgcggtgctgacatcccggttgttcttctgtgccgggggtcttcctgctgtcatgaaggacgtaccgggcttcctacagcagagccagaactccgggcccgggcagcccgctgtgtggcaccgtctggaggagctctacacgaagaagttgtggcatcagctgacacttcaggtgcttgattttgtgcaggatccgtgctttgcccaaggagatggtctcattaagctttatgaaaactttatcagtgaatttgaacacagggtgaaccctttgtccctcgtggaaatcattcttcatgtagttagacagatgactgatcctaatgtggctcttacttttctggaaaagactcgtgagaaggtgaaaagtagtgatgaggcagtgatcctgtgtaaaacagcaattggagctctaaaattaaacatcggggacctacaggttacaaaggaaacaattgaagatgttgaagaaatgctcaacaaccttcctggtgtgacatcggttcacagtcgtttctatgatctctccagtaaatactatcaaacaatcggaaaccacgcgtcctactacaaagatgctctgcggtttttgggctgtgttgacatcaaggatctaccagtgtctgagcagcaggagagagccttcacgctggggctagcaggacttctcggcgagggagtttttaactttggagaactcctcatgcaccctgtgctggagtccctgaggaatactgaccggcagtggctgattgacaccctctatgccttcaacagtggcaacgtagagcggttccagactctgaagactgcctggggccagcagcctgatttagcagctaatgaagcccagcttctgaggaaaattcagttgttgtgcctcatggagatgactttcacacgacctgccaatcacagacaactcacttttgaagaaattgccaaaagtgctaaaatcacagtgaatgaggtggagcttctggtgatgaaggccctttcggtggggctggtgaaaggcagtatagacgaggtggacaaacgagtccacatgacctgggtgcagccccgagtgttggatttgcaacagatcaagggaatgaaggaccgcctggagttctggtgcacggatgtgaagagcatggagatgctggtggagcaccaggcccatgacatcctcacctagggccccctggttccccgtcgtgtctcctttgactcacctgagagaggcgtttgcagccaatgaagctggctgctcagacggtcgacattgaatttgggtgggggttgggatcctgtctgaagtacagactgttcttgctctaaaaacaggactgtccctgatgggagccaggccacagggaggaggcttctttgtgggtctctcctgcagagggtgggggtctcagggtcttaggtgatacgggagagaaagaacgtgccaggcaggaggccccctgaagtctgtgtactccgaggtggatctccatccccatccacctgtacggacatcttttccgttgcggtttgagaatgttcctataataaacccctctgctttgttctt

SEQ ID NO: 1827 - DNA, 1277 bp, Homo sapiens
gcttcgcggcggaggcccgggcaactcttttgaatggaatcgggctgattcatcgccggtttgcagacagagccgcgtcgggtgtgcgccgctgctgctgttgcctctgtcttcgcgtcaccacagaggcaagacaagggtccatatcgcggcatccggctcccgcccgtcttcaggagagaaagaaaaaataaaatatacttggggaagttgtacctgccagaattagcaagagctttctttaagaagacatttgtcaaactcaacaaattgaaggttaacaccttaagagttgtagttactgaccagaaatatggacagacttcttagacttggaggaggtatgcctggactgggccaggggccacctacagatgctcctgcagtggacacagcagaacaagtctatatctcttccctggcactgttaaaaatgttaaaacatggccgtgctggagttccaatggaagttatgggtttgatgcttggagaatttgttgatgattataccgtcagagtgattgatgtgtttgctatgccacagtcaggaacaggtgtcagtgtggaggcagttgatccagtgttccaagctaaaatgttggatatgttgaagcagacaggaaggccggagatggttgttggttggtatcacagtcaccctggctttggttgttggctttctggtgtggatatcaacactcagcagagctttgaagccttgtcggagagagctgtggcagtggttgtggatcccattcagagtgtaaaaggaaaggttgttattgatgccttcagattgatcaatgctaatatgatggtcttaggacatgaaccaagacaaacaacttcgaatctgggtcacttaaacaagccatctatccaggcattaattcatggactaaacagacattattactccattactattaactatcggaaaaatgaactggaacagaagatgttgctaaatttgcataagaagagttggatggaaggtttgacacttcaggactacagtgaacattgtaaacacaatgaatcagtggtaaaggagatgttggaattagccaagaattacaataaggctgtagaagaagaagataagatgacacctgaacagctggcaataaagaatgttggcaagcaggaccccaaacgtcatttggaggaacatgtggatgtacttatgacctcaaatattgtccagtgtttagcagctatgttggatactgtcgtatttaaataaagcaacgaaaaacgccaaaaaaaaaaaaaaa

SEQ ID NO: 1828 - DNA, 2990 bp, Homo sapiens
tgcgcgcgcagcgggccggcagtggcggcggagatggaggagggaggccgggacaaggcgccggtgcagccccagcagtctccagcggcggcccccggcggcacggacgagaagccgagcggcaaggagcggcgggatgccggggacaaggacaaagaacaggagctgtctgaagaggataaacagcttcaagatgaactggagatgctcgtggaacgactaggggagaaggatacatccctgtatcgaccagcgctggaggaattgcgaaggcagattcgttcttctacaacttccatgacttcagtgcccaagcctctcaaatttctgcgtccacactatggcaaactgaaggaaatctatgagaacatggcccctggggagaataagcgttttgctgctgacatcatctccgttttggccatgaccatgagtggggagcgtgagtgcctcaagtatcggctagtgggctcccaggaggaattggcatcatggggtcatgagtatgtcaggcatctggcaggagaagtggctaaggagtggcaggagctggatgacgcagagaaggtccagcgggagcctctgctcactctggtgaaggaaatcgtcccctataacatggcccacaatgcagagcatgaggcttgcgacctgcttatggaaattgagcaggtggacatgctggagaaggacattgatgaaaatgcatatgcaaaggtctgcctttatctcaccagttgtgtgaattacgtgcctgagcctgagaactcagccctactgcgttgtgccctgggtgtgttccgaaagtttagccgcttccctgaagctctgagattggcattgatgctcaatgacatggagttggtagaagacatcttcacctcctgcaaggatgtggtagtacagaaacagatggcattcatgctaggccggcatggggtgttcctggagctgagtgaagatgtcgaggagtatgaggacctgacagagatcatgtccaatgtacagctcaacagcaacttcttggccttagctcgggagctggacatcatggagcccaaggtgcctgatgacatctacaaaacccacctagagaacaacaggtttgggggcagtggctctcaggtggactctgcccgcatgaacctggcctcctcttttgtgaatggctttgtgaatgcagcttttggccaagacaagctgctaacagatgatggcaacaaatggctttacaagaacaaggaccacggaatgttgagtgcagctgcatctcttgggatgattctgctgtgggatgtggatggtggcctcacccagattgacaagtacctgtactcctctgaggactacattaagtcaggagctcttcttgcctgtggcatagtgaactctggggtccggaatgagtgtgaccctgctctggcactgctctcagactatgttctccacaacagcaacaccatgagacttggttccatctttgggctaggcttggcttatgctggctcaaatcgtgaagatgtcctaacactgctgctgcctgtgatgggagattcaaagtccagcatggaggtggcaggtgtcacagctttagcctgtggaatgatagcagtagggtcctgcaatggagatgtaacttccactatccttcagaccatcatggagaagtcagagactgagctcaaggatacttatgctcgttggcttcctcttggactgggtctcaaccacctggggaagggtgaggccatcgaggcaatcctggctgcactggaggttgtgtcagagccattccgcagttttgccaacacactggtggatgtgtgtgcatatgcaggctctgggaatgtgctgaaggtgcagcagctgctccacatttgtagcgaacactttgactccaaagagaaggaggaagacaaagacaagaaggaaaagaaagacaaggacaagaaggaagcccctgctgacatgggagcacatcagggagtggctgttctggggattgcccttattgctatgggggaggagattggtgcagagatggcattacgaacctttggccacttgctgagatatggggagcctacactccggagggctgtacctttagcactggccctcatctctgtttcaaatccacgactcaacatcctggataccctaagcaaattctctcatgatgctgatccagaagtttcctataactccatttttgccatgggcatggtgggcagtggtaccaataatgcccgtctggctgcaatgctgcgccagttagctcaatatcatgccaaggacccaaacaacctcttcatggtgcgcttggcacagggcctgacacatttagggaagggcacccttaccctctgcccctaccacagcgaccggcagcttatgagccaggtggccgtggctggactgctcactgtgcttgtctctttcctggatgttcgaaacattattctaggcaaatcacactatgtattgtatgggctggtggctgccatgcagccccgaatgctggttacgtttgatgaggagctgcggccattgccagtgtctgtccgtgtgggccaggcagtggatgtggtgggccaggctggcaagccgaagactatcacagggttccagacgcatacaaccccagtgttgttggcccacggggaacgggcagaattggccactgaggagtttcttcctgttacccccattctggaaggttttgttatccttcggaagaaccccaattatgatctctaagtgaccaccaggggctctgaactgcagctgatgttatcagcaggccatgcatcctgctgccaagggtggacacggctgcagacttctgggggaattgtcgcctcctgctcttttgttactgagtgagataaggttgttcaataaagacttttatccccaaggaaaaaaaaaaaaaaaaaaaaaaaaaaaaaaaaaaaaaaaaaaaaaaaaaaaaaaaaaaaaaaaaaaaa

SEQ ID NO: 1829 - DNA, 2174 bp, Homo sapiens
agaaggcccagcgccgggaaggggtttgcagctgctccgtcatcgtgcggcccgacgctatctcgcgctcgtgtgcaggcccggctcggctcctggtccccggtgcgagggttaacgcgaggccccggcctcggtccccggactaggccgtgaccccgggtgccatgaagcaggagggctcggcgcggcgccgcggcgcggacaaggcgaaaccgccgcccggcggaggagaacaagaacccccaccgccgccggccccccaggatgtggagatgaaagaggaggcagcgacgggtggcgggtcgacgggggaggcagacggcaagacggcggcggcagcggctgagcactcccagcgagagctggacacagtcaccttggaggacatcaaggagcacgtgaaacagctagagaaagcggtttcaggcaaggagccgagattcgtgctgcgggccctgcggatgctgccttccacatcacgccgcctcaaccactatgttctgtataaggctgtgcagggcttcttcacttcaaataatgccactcgagactttttgctccccttcctggaagagcccatggacacagaggctgatttacagttccgtccccgcacgggaaaagctgcgtcgacacccctcctgcctgaagtggaagcctatctccaactcctcgtggtcatcttcatgatgaacagcaagcgctacaaagaggcacagaagatctctgatgatctgatgcagaagatcagtactcagaaccgccgggccctagaccttgtagccgcaaagtgttactattatcacgcccgggtctatgagttcctggacaagctggatgtggtgcgcagcttcttgcatgctcggctccggacagctacgcttcggcatgacgcagacgggcaggccaccctgttgaacctcctgctgcggaattacctacactacagcttgtacgaccaggctgagaagctggtgtccaagtctgtgttcccagagcaggccaacaacaatgagtgggccaggtacctctactacacagggcgaatcaaagccatccagctggagtactcagaggcccggagaacgatgaccaacgcccttcgcaaggcccctcagcacacagctgtcggcttcaaacagacggtgcacaagcttctcatcgtggtggagctgttgctgggggagatccctgaccggctgcagttccgccagccctccctcaagcgctcactcatgccctatttccttctgactcaagctgtcaggacaggaaacctagccaagttcaaccaggtcctggatcagtttggggagaagtttcaagcagatgggacctacaccctaattatccggctgcggcacaacgtgattaagacaggtgtacgcatgatcagcctctcctattcccgaatctccttggctgacatcgcccagaagctgcagttggatagccccgaagatgcagagttcattgttgccaaggccatccgggatggtgtcattgaggccagcatcaaccacgagaagggctatgtccaatccaaggagatgattgacatctattccacccgagagccccagctagccttccaccagcgcatctccttctgcctagatatccacaacatgtctgtcaaggccatgaggtttcctcccaaatcgtacaacaaggacttggagtctgcagaggaacggcgtgagcgagaacagcaggacttggagtttgccaaggagatggcagaagatgatgatgacagcttcccttgagctggggggctggggaggggtagggggaatggggacaggctctttcccccttgggggtcccctgcccagggcactgtccccattttcccacacacagctcatatgctgcattcgtgcagggggtgggggtgctgggagccagccaccctgacctcccccagggctcctccccagccggtgacttactgtacagcaggcaggagggtgggcaggcaacctccccgggcagggtcctggccagcagtgtgggagcaggaggggaaggatagttctgtgtactcctttagggagtgggggactagaactgggatgtcttggcttgtatgttttttgaagcttcgattatgatttttaaacaataaaaagttctccacagtgaaaaaaaaaaaaaaaaaaaaaaaaaaa

SEQ ID NO: 1830 - DNA, 1332 bp, Homo sapiens
aattggaggagttgttgttaggccgtcccggagacccggtcgggagggaggaaggtggcaagatggtgttggaaagcactatggtgtgtgtggacaacagtgagtatatgcggaatggagacttcttacccaccaggctgcaggcccagcaggatgctgtcaacatagtttgtcattcaaagacccgcagcaaccctgagaacaacgtgggccttatcacactggctaatgactgtgaagtgctgaccacactcaccccagacactggccgtatcctgtccaagctacatactgtccaacccaagggcaagatcaccttctgcacgggcatccgcgtggcccatctggctctgaagcaccgacaaggcaagaatcacaagatgcgcatcattgcctttgtgggaagcccagtggaggacaatgagaaggatctggtgaaactggctaaacgcctcaagaaggagaaagtaaatgttgacattatcaattttggggaagaggaggtgaacacagaaaagctgacagcctttgtaaacacgttgaatggcaaagatggaaccggttctcatctggtgacagtgcctcctgggcccagtttggctgatgctctcatcagttctccgattttggctggtgaaggtggtgccatgctgggtcttggtgccagtgactttgaatttggagtagatcccagtgctgatcctgagctggccttggcccttcgtgtatctatggaagagcagcggcagcggcaggaggaggaggcccggcgggcagctgcagcttctgctgctgaggccgggattgctacgactgggactgaagactcagacgatgccctgctgaagatgaccatcagccagcaagagtttggccgcactgggcttcctgacctaagcagtatgactgaggaagagcagattgcttatgccatgcagatgtccctgcagggagcagagtttggccaggcggaatcagcagacattgatgccagctcagctatggacacatctgagccagccaaggaggaggatgattacgacgtgatgcaggaccccgagttccttcagagtgtcctagagaacctcccaggtgtggatcccaacaatgaagccattcgaaatgctatgggctccctggcctcccaggccaccaaggacggcaagaaggacaagaaggaggaagacaagaagtgagactggagggaaagggtagctgagtctgcttaggggactgcatgggaagcacggaatatagggttagatgtgtgttatctgtaaccattacagcctaaataaagcttggcaactttttttccttttttgcttcaaa

SEQ ID NO: 1831 - DNA, 1308 bp, Homo sapiens
gtcagccgctgtccccttagccgcgatgccgctggagaacctggaggaggagggtctgcccaagaaccccgacttgcgtatcgcgcagctgcgcttcctgctcagcctgcccgagcaccgcggagacgctgccgtgcgcgacgagctgatggcggccgtccgcgataacaacatggctccttactatgaagccttgtgcaaatccctcgactggcagatagacgtggacctactcaataaaatgaagaaggcaaatgaagatgagttgaagcgtttggatgaggagctggaagatgcagagaagaatctaggagagagcgaaattcgcgatgcaatgatggcaaaggccgagtacctctgccggataggtgacaaagagggagctctgacagcctttcgcaagacatatgacaaaactgtggccctgggtcaccgattggatattgtattctatctccttaggattggcttattttatatggataatgatctcatcacacgaaacacagaaaaggccaaaagcttaatagaagaaggaggagactgggacaggagaaaccgcctaaaagtgtatcagggtctttattgtgtggctattcgtgatttcaaacaggcagctgaactcttccttgacactgtttcaacatttacatcctatgaactcatggattataaaacatttgtgacttatactgtctatgtcagtatgattgccttagaaagaccagatctcagggaaaaggtcattaaaggagcagagattcttgaagtgttgcacagtcttccagcagttcggcagtatctgttttcactctatgaatgccgttactctgttttcttccaatcattagcggttgtggaacaggaaatgaaaaaggactggctttttgcccctcattatcgatactatgtaagagaaatgagaattcatgcatacagtcagctgctggaatcatataggtcattaacccttggctatatggcagaagcgtttggtgttggtgtggaattcattgatcaggaactgtccaggtttattgctgccgggagactacactgcaaaatagataaagtgaatgaaatagtagaaaccaacagacctgatagcaagaactggcagtaccaagaaactatcaagaaaggagatctgctactaaacagagttcaaaaactttccagagtaattaatatgtaaagccatgtaactaacaaaggatttgctttagagataattatttggaatttttatagcttacttcacaatgtgcccaggtcagctgtataaaataaatactgcattgttgtttc

SEQ ID NO: 1832 - DNA, 1678 bp, Homo sapiens
aagaaggaggccgcgcgagggctgacgaaccggaagaagaggaactgggcctgaaagggtaccggtgaccgctactgctgccggtgtttgcgtgtggcagggagccaggcctggcgagcggggtgtgtcgcgatgccggagctggcagtgcagaaggtggtggtccaccccctggtgctgctcagtgtggtggatcatttcaaccgaatcggcaaggttggaaaccagaagcgtgttgttggtgtgcttttggggtcatggcaaaagaaagtacttgatgtatcgaacagttttgcagttccttttgatgaagatgacaaagacgattctgtatggtttttagaccatgattatttggaaaacatgtatggaatgtttaagaaagtcaatgccagggaaagaatagttggctggtaccacacaggccctaaactacacaagaatgacattgccatcaacgaactcatgaaaagatactgtcctaattccgtattggtcatcattgatgtgaagccgaaggacctagggctgcctacagaagcgtacatttcagtggaagaagtccatgatgatggaactccaacctcgaaaacatttgaacacgtgaccagtgaaattggagcagaggaagctgaggaagttggagttgaacacttgttacgagatatcaaagacacgacggtgggcactctgtcccagcggatcacaaaccaggtccatggtttgaagggactgaactccaagcttctggatatcaggagctacctggaaaaagtcgccacaggcaagctgcccatcaaccaccagatcatctaccagctgcaggacgtcttcaacctgctgccagatgtcagcctgcaggagttcgtcaaggccttttacctgaagaccaatgaccagatggtggtagtgtacttggcctcgctgatccgttccgtggtcgccctgcacaacctcatcaacaacaagattgccaaccgggatgcagagaagaaagaagggcaggagaaagaagagagcaaaaaggataggaaagaggacaaggagaaagataaagataaggaaaagagtgatgtaaagaaagaggagaaaaaggagaaaaagtaaaacatgtattaaatagcttttttaatttgtaaattaaaatcttacaaactaaatcagtgtgctgctagagggttctttttcacttgacatgcttattagaaagctgacccaacaagagctctctgcctccggtcactcttgctgtggtgctacgtggaagtgaatggagactgatctcaaatctgaactgcagctttcgctgctgtgagttggggatatgatagtcagctcaggcttcagattgtatgagaaaaatgaagagaagtcaacaaatattttggtactcttcattcatttatctctaaaaccaggagttgaattttcctcatcttgaaagactcttggggtctgtttctggtattttacaaaattgctaagtggaatgcatgaattgcattatgttctctggtaacacgtagagttcagacccttctgaactctgttgataataccacaccatgttctggacccatagctctggcatcctcaggggttgtgatccagctccatatattgtttaccttcaaagatacaattaaatggcttgatttttaaaaaaaaaaaaaaaaaa

SEQ ID NO: 1833 - DNA, 1556 bp, Homo sapiens
ccaacttccggtcaccatcttgagtgacgacagaggcggagctccaactgacatgttcattaagggcagggctccgagggcgccacctcgagagcgacggcgggctacccggggcgggctgaggcaggttgtagccccgccccgggccttgggctccacctctcggccccacttccgccgggcaagcgtttgtaggcggcgctgccgtaaatcaggcggtctgcttgccgcatcacgcaagatggcggccgcggcggtgaacggggcggcaggcttctcgagctccgggcccgcggcaacctcgggcgctgttctgcaggccgcgaccggcatgtacgagcaactcaagggcgagtggaaccgtaaaagccccaatcttagcaagtgcggggaagagctgggtcgactcaagctagttcttctggagctcaacttcttgccaaccacagggaccaagctgaccaaacagcagctaattctggcccgtgacatactggagatcggggcccaatggagcatcctacgcaaggacatcccctccttcgagcgctacatggcccagctcaaatgctactactttgattacaaggagcagctccccgagtcagcctatatgcaccagctcttgggcctcaacctcctcttcctgctgtcccagaaccgggtggctgagttccacacggagttggagcggctgcctgccaaggacatacagaccaatgtctacatcaagcacccagtgtccctggagcaatacctgatggagggcagctacaacaaagtgttcctggccaagggtaacatccccgccgagagctacaccttcttcattgacatcctgctcgacactatcagggatgagatcgctgggtgcatcgagaaggcctacgagaaaatccttttcactgaggccacccggatcctcttcttcaacacacccaaaaagatgacagactacgccaagaagcgagggtgggtcctgggccccaacaactactacagttttgccagccagcagcagaagccggaagacaccaccattccctccacagaactggccaaacaggtcatcgagtatgcccggcagctggagatgatcgtctgagccccccgggcactgggtggggcagggcacgagttatttaaaacagttacactgcagggtttcgcccaataaaggtggactgacattccctcttccaggcccttgtctccccagttgggacggcagagagacaagttcttatatctgaagaacttggaggttttggggcattcaggagttggagatagcctccaactgggtcagcctctgtctggtgggcattgctcagggtctcaaacatggacgcccactgtggggccccagcagcactgtggcctgcaggagggcatggccccaggtagggggactgttctagccagctgtggacacataggaatgctggaccagggtaccagattttttcaacaaagggggtgaagtgtcctactaaaaagaataaatgttggcagtgaattaaacaatttttcaaatgaaaaaaaaaaaaaaaaaa

SEQ ID NO: 1834 - DNA, 7101 bp, Homo sapiens
ggtgggggccggggagggttcgggtgggagggggtggggggggtgtccctgggctcatggagccggccgagcgggcgggagtcggagagcccccggagccgggcgggcgtcccgagccgggcccgcggggcttcgtcccgcagaaggagatcgtctacaacaagctgctgccctacgcggagcggctagacgccgagtccgacttgcagctggcccagatcaaatgcaacctgggccgggccgtgcagctccaagagctgtggcccgggggcctcttctggaccaggaaactctccacatatattcgactttatgggagaaaatttagcaaagaagatcatgttctttttattaagttattgtatgagctggtatcaattccaaaactggaaatcagcatgatgcagggatttgcccgccttttgatcaacttgttaaagaaaaaggaacttctttcaagagctgatttggagttaccctggagaccactttatgacatggtagaaagaatattatattccaagacagagcacctaggattaaattggtttcctaattctgtagaaaatattctcaaaacactcgtgaaaagctgccgaccatattttccagcagatgccaccgctgagatgctagaagaatggcgacctttaatgtgcccttttgatgtaaccatgcaaaaggccatcacttattttgaaatatttcttcctacctcccttcctccagaacttcatcataaaggttttaaactttggtttgatgaattaattggcctttgggtttcagtgcaaaatctcccacaatgggaggggcaactagtaaatctctttgctcgattggctacagataatatagggtacatagattgggatccatatgtaccaaagatatttacaagaattctgagaagcttgaacctcccagtgggaagcagtcaagtgttagtcccaagatttttaacaaatgcttatgatataggacatgctgtaatatggatcaccgccatgatgggtggaccaagtaagctagtgcaaaaacacttagctggtttgtttaacagcatcacatctttttaccatccttcaaataatgggcgctggctgaacaagttaatgaaactacttcagcggttgccaaacagtgttgttagaagattgcatcgtgaaagatacaagaagccctcttggttaactcctgtgcctgatagccacaagcttactgatcaagatgttacagactttgtacaatgcattattcagcctgtcctcttggctatgtttagcaaaaccggtagtctagaagcagcccaggctttgcagaatcttgcactcatgagacctgaattggtaataccccctgtacttgaaagaacatatcctgcattagagacattaacagaacctcaccagctcacagctactttaagttgtgtaattggagtagcccgcagtttggtatcaggaggcagatggtttcctgaaggtcctacacatatgctacctctgttgatgagagcattgcctggggtggatccaaatgactttagtaaatgcatgatcacattccagttcatagcaacattttctactctggtgcctttagtagattgttcatctgtactacaagaaagaaatgacctcacagaagtggaacgagaactttgttcagccacagctgaatttgaggatttcgtcttacagtttatggacagatgttttggacttatagaaagtagcacattggagcaaacaagagaagagacagaaactgagaaaatgacacacttggagagtttggtcgaattaggtctgtcttctacgtttagtacaatcctcacccaatgttccaaagaaatatttatggtggcccttcagaaggtttttaatttttctacttcacatatatttgaaacaagagtagcaggtcgcatggtggcagacatgtgccgcgctgctgtaaagtgctgcccagaagaatctttgaagctctttgttccccactgctgcagtgttataactcagcttacaatgaatgatgatgtattaaatgatgaagagctagacaaggaattactatggaatcttcaacttttgtctgagattactcgagtggatggaaggaagttgcttctttatagggagcagcttgtaaagattctccaaagaaccctacatttaacctgtaagcagggttacactctgtcttgtaaccttttgcatcatcttctccgttctaccacacttatctaccctacagaatactgcagtgtgccaggtggctttgacaagcctccttctgaatactttcctatcaaggactggggcaaacccggggacttgtggaatctgggaatccagtggcatgttccttcttcagaagaagtgtcttttgccttttatcttttggactcctttcttcagcctgagctcgtcaaactccagcattgtggggatggaaaacttgaaatgtctagagatgatattctacagagtctgactatagtgcacaactgtttaattggctctggaaacctcctacctccgttgaaaggagagccagttactaacttagtaccaagtatggtgtccttggaagagacaaagttgtatactggacttgaatatgatctgtctcgagagaaccaccgagaagtaattgctacagttataaggaaacttcttaaccacatacttgataattcagaagatgatactaagtcattgtttcttattataaagattattggagaccttttacaattccaaggatctcacaagcatgaatttgactcccgatggaaaagcttcaacttagtaaagaaatcaatggaaaatcggctccatgggaaaaaacaacatatcagagcactgttgattgatagagtaatgttacagcatgagctacggacactaactgttgagggttgtgaatacaaaaagatacatcaagatatgatcagagatcttcttcgtttatctacaagttcatacagtcaggtgagaaataaggctcagcaaacattttttgctgccttgggagcatataacttctgttgcagagatatcattcccttggttttggagttcttaaggcctgatagacaaggtgttacacagcaacaattcaagggtgccttgtactgtctccttggaaatcacagtggtgtgtgcttggcaaaccttcatgattgggactgtattgtacagacgtggccagcgattgtttcttcagggcttagccaagcaatgtccctggaaaagccatcaatagtgagattgtttgatgatcttgcagaaaagattcataggcagtatgaaacaattggcttggacttcacaattccaaagtcatgtgttgaaatagcggaattacttcaacagtcaaaaaacccctctatcaaccagatattgcttagcccagaaaaaattaaggaaggaattaaacgccaacaggaaaagaatgccgatgccctaaggaactatgaaaatttggtagacaccttgctagatggtgtggagcaaagaaacctgccctggaaatttgaacatataggcattgggcttctgtctctactgctgagagatgaccgagtgttgcctcttcgtgccatacggttttttgttgagaatctcaaccatgatgcaattgtagttcgaaagatggctatctcagctgttgctggtatccttaaacagctaaaaagaacccacaaaaagctgaccattaacccctgtgaaatcagtggatgccctaaacccacccaaattattgctggtgataggcctgataatcattggttgcattatgacagcaaaactataccaagaactaaaaaagaatgggagtcaagttgctttgtggaaaaaactcactggggatactacacctggccaaagaatatggttgtttatgctggtgtggaagagcagcctaagcttggcagaagcagggaggatatgacagaggcagaacagattatatttgatcatttttctgatcctaaatttgttgagcagttaattacttttctatcattagaagacagaaaaggaaaagataagtttaatccacgacgtttttgcctctttaagggtatattcaggaattttgatgatgccttcctgccagttctgaagccccatttagaacatttggttgcagattcacatgaaagcacccagcgatgtgttgcagaaattatagctggtttaatcagaggttctaagcactggacatttgaaaaggtggagaagctttgggagcttctgtgccctctgcttagaacagcactgtccaatattaccgtagaaacttataatgactggggagcttgtatagcaacatcctgtgaaagcagagatccccggaaacttcactggctttttgaactgctgttggaatcaccattgagtggtgaaggaggatcctttgtagatgcatgtcgactttatgtactacaaggtggccttgcccagcaagaatggagagtgcctgaactattgcacagactactgaagtacttggaacccaaactcacccaggtttacaaaaatgtcagagaaagaataggaagtgtgctgacctacatattcatgatagatgtatctttgccaaataccacaccaaccatatcgcctcatgtccctgagtttactgctcgaattctggagaaattgaaacctctcatggatgtggatgaagaaattcagaaccatgttatggaagaaaatggaattggtgaagaagatgagcgaactcagggcattaaactcttgaaaaccatattgaaatggctgatggcaagtgcaggaagatccttttctacagcagttacagaacaacttcagcttctacctttgtttttcaagattgccccagtggaaaatgacaatagctacgatgaactgaaaagagatgcaaagttatgtttatcattaatgtctcaggggttgctttaccctcatcaagtgcctttggtacttcaggtgctaaaacaaacagcaagaagcagttcttggcatgcacgatacacagtactgacctacctccagaccatggtattttataacctctttattttcctaaacaatgaagatgcagttaaagatatcaggtggctggttataagtcttttggaggacgaacaactggaggttcgagaaatggctgctactaccttaagcggtctgctacagtgtaactttcttaccatggacagtcctatgcagattcattttgagcaactttgcaaaacaaaactacctaagaaaagaaagcgagaccctggttctgtaggagataccattccttctgcagagttggtcaaacgccatgctggggtgctaggacttggtgcatgtgttctttctagtccttacgatgttcccacctggatgccccagctcctcatgaatctcagtgcacatctaaatgatcctcagcctattgagatgactgtaaaaaaaaccttatccaatttccgaaggactcaccatgacaactggcaggaacataaacagcaattcactgatgaccaactgcttgttctcaccgatcttcttgtgtcaccatgctattatgcatagaaagatgactagtcctcacttcaggctcttttcatcaaaaattccacaccctcaggtaccatctgtggtggctctctgcaagttttaaaactgcctctgctgagctctcatcattttggtggtttctgtgttagatctcgttagtctgcattccacagcttctcagttgccatttgatttcccaacttgtccggaagtgtttccagaatactgatcactttttttttttgaggcatctgacaaagtcacaaagtctcagactagaaataattacccagtatgatcatggcatccaagaccagagtctcagaactcattaagaaacagtttacttggaatggagaatacccatctgtaatacaggtcctgtcatttcattcatctcaaattattttgaattcttcccaaatggctgctggatttaggtggtaataggggctgtgggccataaatctgaagccttgagaaccttgggtctggagagccatgaagagggaaggaaaagagggcaagtcctgaacctaaccaatgacctgatggattgctcgaccaagacacagaagtgaagtctgtgtctgtgcacttcccacagactggagtttttggtgctgaatagagccagttgctaaaaaattgggggtttggtgaagaaatctgattgttgtgtgtattcaatgtgtgattttaaaaataaacagcaacaacaataaaaaccctgactggctgttttttccctgtattctttacaactattttttgaccctctgaaaattattatacttcacctaaatggaagactgctgtgtttgtggaaattttgtaattttttaatttattttattctctctccctttttattttgcctgcagaatcgttgagagactaataaggcttaatatttaattgatttgtttaatatgttatataaatgtaaaagagtgtataaactgtagagatagcattggcaagacattgtacagatgcaaccttttacacaacatcattgtgtaatttgtaaagattcacgtgtagttctttattatagtgattttgggctttgtacccactgaatgccattttttgtgtttttaaattattttctttatcttgttacaaaaactgagatgtggggttttttttttttcagttcacttatcattagaatgtctgaacttttatgtaacatttttgtgtgcatctctcaatgctaacaccacatgtttgcctatgacaagtttatagagtgaaaggtatcttctgggttgaaataattcacaaattggtgaatgtcatcttgcaacacaccctgtacagtcttccttaaaggaacactacagtatatttttagtatctacatgctgaatgactgaatacagacctaagcacagcagtggtcctggtacagtatttaagtgtcggcatacacaggcgtaatccctgtataaagtagtgccaaactgatttcagttgtgtaactagtttaaaacccaataaatggattctttttaacaaa
